United States Patent Application Publication US 2011/0183924 A1 - sequence listing, part 228

SEQ ID NO: 600776 - DNA, 535 bp, Homo sapiens
  misc_feature (13)..(13): n is a, c, g, or t
gcagaggggttcnaggtatgataaagggtcaggttaggattgggcttcaagttcaagtggggggtagggttagatcactaatggaaggtcagggataggagcacaagtcaatattatgatcaagggattatattcgttataagggacaagggtcaaaggtcaggataaggatcaaaggtcggggggtaagagaattgggtagatgccttcagggttcaaatcaggggtcaagagtcaagggttacgggcaaaagtcaggggtgagtacaaaattttacatggaagttaaagtaggtgtggggtggggttgggtttggagtctaaatttagatccatttgcagggtggggtagaattaggttccatatccagtcataagtgagggtccagatcaaaatgggggtccaagttctcattctcggtccagggtcaggggtcagctcaaggatcaagaagcaagggtcaaaggccacaggttagttgcaaggtcccaagtccggtcagggccagtatcaggtcgagaggtacaacagggc

SEQ ID NO: 600777 - DNA, 439 bp, Homo sapiens
  misc_feature (23)..(23): n is a, c, g, or t
  misc_feature (202)..(203): n is a, c, g, or t
  misc_feature (209)..(209): n is a, c, g, or t
  misc_feature (215)..(216): n is a, c, g, or t
  misc_feature (249)..(249): n is a, c, g, or t
  misc_feature (254)..(254): n is a, c, g, or t
  misc_feature (353)..(353): n is a, c, g, or t
  misc_feature (394)..(394): n is a, c, g, or t
ggggtagtcctgtgtgctttccnctccctcctggtctctggtgtggtcccccagttgccgtttcctggttgcctggtgcccagggtccctgctttggggtgggctggggcttgttggggtgggggtccttcccttggcctgtgtaattacacaattctcagaagctgttgttgaggcaatcttctttcagtgctgtgttgtnntctttntttttnntcttttggggattgcaaactggtttaacctcanatganatttccttttttgtttgtttgtttttttcatttgattggtttaaaaattatcctggatccaggaaagtgatgccttttcttattctccttttatcatcnaaacaaacagccaatatgtctctagaaacattgcgttctanactgggagtgctgacaagccttcatcccagaccctgagtggcaga

SEQ ID NO: 600778 - DNA, 671 bp, Homo sapiens
  misc_feature (540)..(540): n is a, c, g, or t
aattaccctagtggatcccccgggcttcaggattcggctcgagacctgacttacacacaatacataataccagcaaaccaaattcaacagcacatcaaaaggttaatttaccatgatcaagtaggcttcattctggcatgcaaatttggtccaacatgagcaaatacaaatgtgattcaccacataaataggatttttaaaaagccttagaatcatctcactagatgtagaaaaagcttttgctataatccaacatcccttcatgataaaaaacttcaagaaagtaggcactgaagaacatacctctaaataataagagccatctatgataaaaccacagccaatatcatactgaatgggcaaaaactgaaagcattacccttgcgaactggaacaagacaaagatgcccactcttactactcctattcaacatagtactggaagtgctagccacagcaatcaggcaagagaaagaaataaaatgcatcttaataggaaaagaagaaatcaaactatctctctttgcagacaatatgatnctattcctaaaaaactcaaagacgccaccagcctctagaactcagaaacaacttcaagtaagtttcaggtcattaaatcaatgtatagtcagtagcatttcttgaccaccaataatgttccttgcgagcct

SEQ ID NO: 600779 - DNA, 128 bp, Homo sapiens
ggaagttctcttcacggagccgcgcggtgcgagggcgcaaatagggtcacgggccgttgggggtgtcgttgtcggtaccaggtccgcgtgaggggttcgggggtgctgggcatggcagcaatggctgt

SEQ ID NO: 600780 - DNA, 713 bp, Homo sapiens
tccccccccccctcccttttttgggggctcgggggggccccgcacaaaaaaaactaaaaaaaaaattttctcccctcttgggggggtttttctcttccagaaaaaaacaactccctttataaaggcaggggccgctaagtgtgggtggggggtctccccgcaagcaaaaccaggcgaaaatcatttgtgtagaaaggcagacggcggtggtgtgcgtcgtttcctctctccaccgcccatcttctatttatataaagaagacagagggagggagaagcacaaacagacgagcaatattaaaagggccaaaaaaagacacccacccccaccgggagggaggaggtggggttaatgagggaggaaaaaaaccgcgccgctctctccccacaagagcaagagagcagagatacaggtgcgcgcgcgcgcgtacacacacagagagagggggggagcaggagaaaaaaatgtgtgcgtgggggcgagtgcgaaagacagacaaaaacgaggaaacaccagagggggagcgtgctctctctctaacacacgcgagcggagaggggagggagcagaacacacaaaaaaaagtatagcagcgcgcgcgggtgctttcttatcgacacaccgagaaaggagaggaggggcggcgcacccagcaccacacgacaagaatatgaagaagaacgaggggacgtgcgtgggagagcgaaacacac

SEQ ID NO: 600781 - DNA, 1377 bp, Homo sapiens
  misc_feature (325)..(325): n is a, c, g, or t
  misc_feature (1098)..(1098): n is a, c, g, or t
  misc_feature (1362)..(1362): n is a, c, g, or t
  misc_feature (1377)..(1377): n is a, c, g, or t
ggtgcactctcagaacggctgcctaacgtgtccgaaatgtgccgcaccttagagatatataggagctctgactagtgtggtccttctcctctcccggcaccaggaagaagaatgaactataccaagcgcagcacccagcagacacggcgcaacgatgacgtgaccgaaagaatacgcgcaatggcagccgtgtggccggcaagcgtgggaccgtctagggctcgtccgaatgatacatgggtgcactccgagaagattccttggacgagatacggagtcatcttcgtagacgcgtgtgtgtcgttcgcattcgattgtacttccnacgtgtctctcaacgagagcatgacgagttggtaatacacagtcctacccatatggtcaacatgggtacgtctttctctagcgaacaagccaaaaagcttgatgcacgaagaactagccttgtcgtggcgtatggagacgctggggagagcgagcgcttgacgtgggtttgagctagacaagggcatgtgtaaactcgttgtggccgtgcatcgttggagtgtagggaatggctagcgaattggcaggggtcactacgtacacccgtatagtcgattcacgattgagaatgtcaccccttggttgaaccgggatcccgatgtgctagttggtcgccttagcgtcctcttcgagttggttgtgcccttgagctaggtttcgtgtgccgtcctcgtggtgaataggcatgtgttgtctctgggtacttttctgtcctgcttcctcggtgataaggtctttagcactcacttcgtgtgagtgtcaactttgaataaccattcggtcgtagaagattgaacatgcacgtctttcccaacgggcgacttggggcatagggtctgctgacgagctggcattgagccaagatcccgactaaggattcactctttgcttttgaagagagatcggcggtcccgtatactttgcggtaagcgtggacattgcttccacgtatagagcacagcgatttaagtaagcccactccggatagggtgtgcgttgatccagcgaaggaaacccaattgtagtcacttagaactccccccaccggagttncattctcctggagcgggaaaacaacggcttggcggcgccgacacagggtacggccacccgggaccctagaagggtccttggagctggcggaccacaaaattgttggcgtcccttacgaaggcttgggcgcggcactgggaccacttccccctatgttgttggccaacgcggaaagcctgtattgctcccaagggggccggatatttttggcacgtctctaaccgccttacacttgggaactctggatatacagggaacttgaangccagggagtccccn

SEQ ID NO: 600782 - DNA, 240 bp, Homo sapiens
ggtggtccccccccgcaagtccttgttggggcatttcaatcggcgggctctggggaagattgacctttagttcattgccgccgcctccaagtttggccatggccggtttccgaccgtggaggaaaaaaaagcatttatgggacccctgaataaaggcctaattgcaaaggaagaaggaggttaatgccaggaacagattttgcagttggtggggtctccaaaaaagttatttttccctga

SEQ ID NO: 600783 - DNA, 924 bp, Homo sapiens
aggaattttctttccccgcccgcgggggggctgtctcgctctttgtggggtgctttcgtgttcttggggttggttgtttctgctgtttatagcacccccgagtggttcttcacacctctctgttgttcgccccgcaacggtttttcggaggctggtttatatttgggggcgcccgagttttcttcgcggccttcttcccctcgggtataatcgctcgctcgcgcctttctctcgggattgtttccagcggtagtttttgtctctcgcgcttcacggcccctcccgcttattagtgtgagccttgcgggagtttatatataggcgcgccgccctcactccacccgccgcccacagtgaaactctctgtggttagattgttgtaagtatagaaagaataggggtgtttttcgccctcgtttggggccacaggcgtggttgttttgaaaacttcccacgcctcgagaatggagtgccaccccacacgtgtcgcaccctgagccacacaatggctcgggaatttcacggcgactgaggccacccacacttcccggcctcgctgttttgtgttttgaaagaacacggagactttaaggtgtttccttccctctcccgagagacttgtataaacctcggcgctgtgtgggctgtgcacccgcgctcgtgttgtagcgtgccaacacctctcacggggttctggggagaattctgtggctgggcactactccgtcacttgtggccccttcatcacgaagctggggcctcttcgggccacgaaagaacttccttcgtttctttttagaaggggggattcagggcctctttctggggttcccctgggggaattttgtgttttgtaaattgtttattttgaaaaaggattatttttaaaaccgttaaaaaaggtaaaagcatattttaagggga

SEQ ID NO: 600784 - DNA, 363 bp, Homo sapiens
tcagcgcttgtaagtgctcagaatggttgccctggcactgtgtgcaggttgtctgggaagatgatgaatgataatgaggaagaagctggcagtgtgcagatgcaaggatcaagacccggacccctgtgattctgtgtcattactatcagcacctacggtgccacacatcccatctccctgccagaactctcctgtcccctcctagaagtctttcatcctgaaagtggctttttgagcttgatttcctggtggaccgtcctagggtcacctggccagaaggtagtacccagtggttacataaggagtaagtcggaaggtataaactgcccttgccagtcagcaagactgggcctcctgtgcaat

SEQ ID NO: 600785 - DNA, 1477 bp, Homo sapiens
gccgcggcgcggagagcgaacgcgcagccagccttgcggaagcccaggcccggcagccatggcggctggaaggaggaactgaaactgctgctgaacgttcttgcctctacccgcctcctcctgctgcgcctctattgcgccatgctgcagctgcggacgtgacttgccagctgcgcgctgctcgcgcgcgccacacgccttgctccctgcacgctcaccgcacccactacactccacgcggcgtgcttacctcctcctggttctcctctgcatctgcccagctggctcacctctactcgccacggtgcgcgctgctccttccccctccatctccctggcctgcgcctctcttcgctgcgcgctcgccctacgccgtcgcgcgctcctgcaactgcgcagcacaccttacattactggtccctccactgccactcgaacggcgattatggccccagtacccattctctgtgcatacattcgtagtactccacctgtcttttgggtcttggcccgcgctgcgcccccgcccacagctccgtcatttgccttggcgcccttactgcctcgcttcctaccgcagccgacacttacataccccggctgctcacgcttgcatacctacggcatgttcgttctcctacaccttaaccagcccagagctccccatcgatatccccgggggcatcctgtccacgccaactttgctcgatagcgataacactttaaacatcctggcgacgaacaatacctcttactaccctagcatccttctgtgcgtctacgcgcacctcccccccagcgaccccgcagccgcagttgccgagcggggctcgcacgaagcatcccgtacagcgcccaggccactgcactgcacccgcagccactaggccctcaaggcagaacacccagcaatggcaccttcgcggcctaacggagacaggcacgtcccagcggatctacaccgcacatgcacgtcgggcacaacacgcagcacccccggagaaggaactcccgcccccggcagccgtagtcggagagagccccgatcgcagccaatgaaaaaacagccttcaacaccccataggaccccacgccgccacaatagacgaggaaggccagccaacacatcagcagcacagccagcacacaacagcggcaacgcacaacaaagcgcgcacggcgcataccagcgacatacacatagagcggcacccaggcaggcccatggctcatacgttgtcgcaagacagaacacagcgaccacacaaagggaggagacggatggcaagaatgagcgacgccaaaatggaagcagcagacaacacaacagcgacacacaggcaactggaacacagggggagacagctgcggaacacagaacgcgcccctgaccgaccgcagcacaacatcgacacgcagtatgcataggaccagaaatctcggagctgcacagatgagggagcagtcgccgagccgc

SEQ ID NO: 600786 - DNA, 298 bp, Homo sapiens
ctaccctgtagtgctgagagaacagggatggattggtcagactgaacatgcacacaaatagccccaaggaagcccaaatcttctcagtgatgagatttttaaggccaaattttactctatattctggaaaaacagatgaaatatgtactatattagaatgctatttcaggaaattaattatgtacacggactgcaaattaaatatattgtcccatttggtaactacagaggtcagatagtcttccgggattaaaccaagagaacagctgctgcatttgggtactacgctttggcagga

SEQ ID NO: 600787 - DNA, 294 bp, Homo sapiens
ggaaggggttgcctcaaaagtcacagcttagctgggcacagtggctcatgccgataatcccagccattcagaaagctgaggcaggaggattacttgaggccagactgggcaatatagcaagaccccatctctaaaaaattaggcatggtggtgcatgcctgtattcccagctactcaggaggttgaggtgggaggatcacttgagcccagaagttcaaggctgcaatgagccatgattacaccacggcactacaaccttggtggcacagtgagaacctgactcttaaaaaaaaa

SEQ ID NO: 600788 - DNA, 373 bp, Homo sapiens
  misc_feature (81)..(81): n is a, c, g, or t
  misc_feature (158)..(158): n is a, c, g, or t
  misc_feature (178)..(178): n is a, c, g, or t
ctggggtaccgtctgtggttagtggaagctttcagaaatgatgaatgggtgtggagatttatgataagcaaaaatggatgnatttattttaaaaacatcagtcacagaactcttctgaaatcagatcataatggtttggtcactctctcttttgtgtnaatttatctctctctgattngggaatttcagtccaccttctattaaattaacctgtgaggacatctagcataaccagaatggatccccctgtatgatttagaaccttttggaaagtaaccttgggatttcccgtcatggtgcagcagaaacgaatccaactaggaaccatgaggttgtgggtttgatccctggcctcactcagtgggttaaggat

SEQ ID NO: 600789 - DNA, 280 bp, Homo sapiens
agggaggagtcaagatatgtgacctctccgcctattcaccttcgcccttctggagattcctctcacagtcattcaccctgttgtccgctatgccctgttttgcctgtgagtcagtctggtaacgtacagcacaagaaggggaccatggctgccatgtatatcccatagcactgctgtcctatgcttttgcccttgcaggttaccaggacaagaggaacgaagtactcaagtcacttaatgaggaagctgtgaagaaagacaactctgccctttctggtgg

SEQ ID NO: 600790 - DNA, 404 bp, Homo sapiens
cggaataattttcatagctatttcctgagcaaaaaacacaccccacaaaaccctaattattgccaaaagactttgcggggggagaaattccccaatgctattgcctccttttattctagccatgctgccaggtgaaaaaacgccacccacacagattgaggttgggtcaacctcttccagtccactgactcaaacattaatctctcttggcaacaccctcacagacacacccagaaacaatactttgatccttcaatccaatcaagttgacactcaatactgaccatcacagcatctatgtatataatgatatctgtgtctgtatgtgtgtcttacattggagaaagatacagcagataacaaatattgtttgttctcacttataagtgggaactaagctacca

SEQ ID NO: 600791 - DNA, 491 bp, Homo sapiens
  misc_feature (250)..(250): n is a, c, g, or t
  misc_feature (306)..(306): n is a, c, g, or t
ctttgtgcaccctacgggcgggccgtcatcatgtttggcgtcccctacgtctacacacaaaaccgcattttcaaggggcggctggaaaaccttcggggccagttccaaatttgttaaaaagactttttttcctttgattccatgcgccccccggcccaatgtgtgggtcgggccatcaagggcaaaacggaatacggcctcatggttttttcccacaaacggtttgcccgtggggacaaacgggggaaanttcccccctggattcaagagcacctcacaaattccaacctccacctttccgtggangagggtgttcaggtggccaaatacttccttcggcaaatggcacaacccttcccccgggaggatcaactgggcctgtccctgctcaacctggagcagctaaaatcaaaggaaacccttaaaaggataaaacaaatttctcaacaacttttaatggggcgggtggggccataaacggtttcccctta

SEQ ID NO: 600792 - DNA, 191 bp, Homo sapiens
ggagtttgagaccagcctgggcaacatagcaaaatcctcatctctacaaaaaaaaaaccaaaattttaaaaaccagggaggaaccaaatggaatttttagaaccaaaaatacaaaattgaaataatgacttcaggggctggcttcaatagcataatggaaaacacagggggaggattcagtgaactgtcta

SEQ ID NO: 600793 - DNA, 244 bp, Homo sapiens
  misc_feature (155)..(156): n is a, c, g, or t
  misc_feature (158)..(159): n is a, c, g, or t
agagataaccttgccctagttgtgggcaacacatgcagaataatcctgttttacagctgcctttcgtgatcttattgcttgcttttttccagattcagggagaatgttgttgtctatttgtctcttacatctccttgatcatgtttttaatatgnnannaaacacgaacctgtcaatatttttgaatgtaccccccatgctattgtttgaacttgagtataagataaaataaaattttatttta

SEQ ID NO: 600794 - DNA, 348 bp, Homo sapiens
ccagaagctgctccaaagccagatctgtggattcccagaattcattgtgttcctgttagaggaacacctccttaagagccaccacccacctggcttgggtgctcagagatgctgctcctgggaagataaatctgtcaggtgcagggcgccgctcttgaacacagactctgccccacagtctgaagaaaggtgcacgtatgaatgtatggaagtgcctgccctctgtggacagctaggcacccttacccgcccaggaggcacgtgcgacagcagatctgaatgaagagcttccgttcgcacagccggttggacttccccatctcgcagtatgtctcgtcagcgttgctg

SEQ ID NO: 600795 - DNA, 401 bp, Homo sapiens
  misc_feature (362)..(362): n is a, c, g, or t
  misc_feature (367)..(368): n is a, c, g, or t
aaataacttaaggaaagtctgcagaattcttttttttacaacttttctgagtttccagtgggtatatttagtgtgagtttgacagtaacaggctagggagggcagagattggagaaattgggggtcgggggagtgattatgggaagaaggttagtaaggaacaaaacaatgcaccgttttgtaaagataataaatggaacgtggctggtagatactattcagtacattttcttagggtgagtaagggtagaccaggggaggagggggcggagagagtgttacagaagaaagaaaataagtaaccctgatggtttaagccctttataaaaaagaaatggcatcaggtttttttttctttattnccccnnaccccaccctttgtagtcaagagacttttaaag

SEQ ID NO: 600796 - DNA, 255 bp, Homo sapiens
gctcgtgcctgtaattccagcactttgggaggcataggcaagaggatcccttgagctcaggagtttgagatggcatgaccttatctctgtacaactatagtcccagctacttgggaggctgaggaaggaagattgcttcacccagaggattaaggctgcagtgagccatgatggcaccactgcactccagcctgggtgacagagggagaccctgtctcagaaaaaaaagaaaggaaaaggaatggctgaaagaca

SEQ ID NO: 600797 - DNA, 443 bp, Homo sapiens
  misc_feature (312)..(312): n is a, c, g, or t
  misc_feature (340)..(340): n is a, c, g, or t
  misc_feature (370)..(370): n is a, c, g, or t
  misc_feature (405)..(405): n is a, c, g, or t
aactgaagatgtctccatgagcaggcccaagggtggcatatattctttccatcctccttacacatggtatgagatactttagaaatgtgttctagctgtgaacccaaggaaagaaacatttttttctgactttcagatcctctatacttaagatcagctaacacagtgccatattcaagttagtttcttttaataatatttaataaatgtatgttgcagcctcatagaaattataatatgtgatgtttcttttgaatcatattagtggattttgatatatcgcaaggatataattattgacttgggggttantatgaatttggtggcatggttggttggncaatataataaataatggttccaatttccncccatttgacaagtggaagttctcccagacctcantttcccggcctggcctcacagagtctcatgggttgggg

SEQ ID NO: 600798 - DNA, 269 bp, Homo sapiens
atatgttatttcatgtataagaaaattcgagtataaaatactttctgaaaagtgctttaaaatctgttatccatggacaagatctttagaaccggcatcagagtgagcgtgcttatgcatgttataagagatgcagttgaatgtgtagatataagcacaccttattattctggaggttttgaaagactttaaaaaaaatcacagtagagctcattaattccttacattagtcgccccattacagggtacctacaggtcatggtcgacgc

SEQ ID NO: 600799 - DNA, 271 bp, Homo sapiens
gtgatctagaggatcccttttttttttcccagtttttttttattggtaaagctcggccataaacttctagtcgggttgcaatgggtcaccggccacactcgcaccaggtggtccggggtagccagcaaacagagtcgggccatcagcagaccaggccagggaggtgcacgggggtggttctgcctggctgcgggtacggataacttctggcttcagttcatctacaaggatctttccctctaaatcccagatctggatgcggggtaccgag

SEQ ID NO: 600800 - DNA, 108 bp, Homo sapiens
gacatgctgtgctgcgcactccggcagtcgcctgttgacagtttcccatatagctcttcgctgagctcttgggtcgggactcgtgaagcagacgtcttggggcaggct

SEQ ID NO: 600801 - DNA, 650 bp, Homo sapiens
atcgcagagtcctaaagaagattgtagttactcttgagggaagcggtttacgccacgtgccgtgcatttctataatgcaggataatggtatcatcaccgccttagaaacatcctggatactactgtatgagtgtacgcaacgcatgaagcatcgtgagcgcttgcccaaggtggactctcgtggaaaccggtttcctgcaatatcggactcgacagttgctttcccggaacgtcacgactgcaattgtaccgcgcactcttgccgtaaacgccacgcttcccttcaaagaagtctgctaccaattctgccccattcacacaactaataatttcgaaattaccacgcatcctcaggaagaatacctcgaaacagcccagacggactcccaacatcatgcgacatgtagcactcacacacacgtcgcatcttgcgtatccatttcggaaagacagcactcgtcacctaactcatacgccaaccatgaaacctccattaattacacttcactcgtataggcaaacccacaaagcgcccaactcaattaattatcatctatggcacccacaacaacacacccatatttcgggccatggactcacaccaccaccttcaccatacatcacacccgcgatgtcgctagctcccctat

SEQ ID NO: 600802 - DNA, 518 bp, Homo sapiens
gggaagatgggagaaaaagcagtatgggaggccttcaagtcttggtatcttcagaaatgtgctaggctttgtgggcagcagatacttcacaacattacgtaaagaacactggagtcaaaggcatggagcttcagaaagttattagcactgatagccaaccacggtggtgggtgcctgtagactcagttacttgggaggctggggtgggaggctagctggagccaggagttcgaggctgccgtgagctatgatcatatccctgcactccagcctgcgtgacggagaccccatctttaaaacagaacaaaacaaagataagaagaaaagaaagttactggcactgagagccagacagatgcccaaagtacgagcccatcacgaatttccaacatgagatcactggccccgtaatcttcatattacaaatagcttccttcctcgcactacaagggatgattcgagcaagcagcttctaaaggagaggtgcaaccgaagacatgctctgaatgtttggagat

SEQ ID NO: 600803 - DNA, 187 bp, Homo sapiens
ttcccccctagggatgtgcgggtgtgatgctagggatacaatccgagctatgttggagaaataaaatgtgcatcgtggcggatttattttaagtttgttggtcaggtaccttcaggtctagggctgttagaattcctaggaaagtgacagctagggctgtgagttttaggtagagggggattgttgt

SEQ ID NO: 600804 - DNA, 171 bp, Homo sapiens
gaccaggggcccttcccttgattgaggcccttcccgagctcagtgaaaagggccctgttttcccctcccctgcccccaggggctgtggacaaaccggctgggggactgcccaccctcccccctgtttttttaacttatttcagggctttataataaaggaacccctaccca

SEQ ID NO: 600805 - DNA, 445 bp, Homo sapiens
  misc_feature (5)..(5): n is a, c, g, or t
tgtantgaatggatagaaggtggacttagaacgagtagcaaacatacatcgtagataagaaatcagcccacgtgcgagcgacggatcttgagttgaatcagcctattggtgtagttgtaggtctacatacatctgattgaatcgaacctactggtgtagatcagtggactatgagtaagtcgtgttgtcagttctccagccaagcaactttctaattcacagtgggggaccctaaatgtccttaaaggtagagaggaataggcccacaggatacattgggttacactatctcatactggttatatgtgatggcacgagagaggcagtaggctagaaagattccaatcagttggaagcaagcaaactcctaaggatcatcctgcaacgagtcccatttctgactctatgaaggtcatcacctttataaaacaaccttcattgtcaa

SEQ ID NO: 600806 - DNA, 670 bp, Homo sapiens
ttgggaagctggctggaaagggccagagctgacctgcaattttatttatttatttttttttagagggagtctcgctctgttgcccaggctggagtgcagtggcgcgatctcggctcactgcaacctccacctcccgagttcacgccattctcctgcctcagcctcccgagtagctgggactataggtgcctgccaccacgcccggctaatttttcatatttttagtagagacggagtttcaccgcgttagccaggatggtctcatctcctgacctcgtgatcgtcccacctcggccttccaaagtgctgcaattacagatgtgagccaccatgcctggcctgacctgcagttttgagtgtcttgctgcagcccgcgccattcagaccaagccctagtcaatattccagaccatgcctctagccagagtgtgccctgtgctggacaaatgagagcctttggctgtaaccagcgcatcagttgaacgaagagagtgccttcctaaccggattatgcccttacctctgctacggccttcagaggtactctgcccggtctgatcagcagccgtggcatacgcctgaagacccacatgttggcaggcccaatgggcattacacctgaggcccgtgtttacgactggtctactactggcatacgcccttgctactc

SEQ ID NO: 600807 - DNA, 90 bp, Homo sapiens
cttgggagataacagtttcccctctccctccccctgcagatttccagcgcccggaccaaggccaagtaagcctctacaaacctagcattt

SEQ ID NO: 600808 - DNA, 713 bp, Homo sapiens
attctctattccaataaagcagagtttgacaccgaaaaaaaaaaaaaaaaaaaaaaaaaaaaagggaaaaaaaaaaaaaaaaaaaaaaaaaaaaaaaaaaaaaggaaaaaaaaaaaaaaaaaaaaaaaaaaaaaaccttgtggcccctttggcccaattcatttttaacttgggcaagttttttccttgggcccgaatttgggcttaattggccaatttccccttatggggggccttttacaattcaatggcccgcgttttaaaaacgttggactgggaaaaccctgggggtccccaatttaaatccctttgaagaaaatccctttttcccaagtggggtaaataccaaaaggccccaacccattggcctttccaaaaatttgccaaccctaatggccaatggaaatttggagccttaaatttttggtaaaattccggttaaaattttggtaaaaccagttattttttaaccaaatggcccaaattgggaaaaaccctttataattaaaagaattgccccgaaaaaggtttaagggtttcccatttggaaacagggtcccctttttaaaaacggtggcttaaaccgtaaaggggcaaaaaccccgtttataggggcatggccccattcgggaacccttccctttaaaaaatttttgtgggtcggggtccctaaaagccttttggacccttagggcccccttttgttttccggg

SEQ ID NO: 600809 - DNA, 120 bp, Homo sapiens
gggcggcaagatggcagttcaaatattcaagaagaggaagtttttcgcttattggcatcttcaaagctgatcttaatgagtttcttactctgggagcttgcttaagatggctacctttga

SEQ ID NO: 600810 - DNA, 262 bp, Homo sapiens
ttgacacgaatgtactccagatcatcatcgtgcgttggcggtactgcgcgacacagctgctggaacgcggggaaaaacgtccccggcgtactctctacccgtggcaaagcaactggctccggcaagtcggcgccgccagggaatcgcgcaccttctgctcgatgccaagcaagaccttgtccgccgcctcatggcgcccagcctgttccagccaacgcggcgactccgggataaagaaacggatggccagcacgaacaccgc

SEQ ID NO: 600811 - DNA, 755 bp, Homo sapiens
gcttgatacaagtgggacaaggatggggtcaggtgagtacagtctatttggtggagctccagatttggagctggaggggttgtggcggtcttagaggcttggcttggggcaagggtccctgagtctgggctgggagactcagtcagaaataggtattgcttatcctctgtgactatgacaggccctccctggggttgggggtgtgacagggacagaagccgacccagggggtcccttgagagcccaggggctggaggatgcctgggactggcatctgctcctgcggggccttggacagggagggggccagaccacagcggcccctcctccggtcattgtgcgggcctctgagggtgtggcaggtgcgcggtgctcacagttcatcgtggtgccgggtcaggtcctcgccatagttggtggcctgactgcccacaaacatgttccaattacccaggatttccgctttgttcaggcggccatccttgtccagtgaatcgaattcctgcagcccgggggtcccctagtctagagcggcgccacgggggggcttccatttttgtccctttgtgagggtattgcgccttggggtatctggccagtgccgtagtcccgcgcaaaaacaaaaggcccgcgtaccacgaccgcggcaaaacgaagggaaggagcggggggcacccccaagaacggcccaagacgaaaagcagcgcggaacaaagcacggaacccgcccggccagagaagacgccacacaaacg

SEQ ID NO: 600812 - DNA, 364 bp, Homo sapiens
  misc_feature (229)..(229): n is a, c, g, or t
gcacgagggcgagcagaagcagaccctacagggatactgggatctggaaagcccacttcctgccccacacgggaatacggggcagccccacactcctagcccgcctggcctactgtggataagaaaacgggctcgactgcctggccctagaccgggactcgaaaccgggggtacttcgtcacccagaaaacgaacctgtgtaggcgcagtgtcagcggcagccgccggngcgcatgcgcggcccgccctatccgggggggggggtggttaggccgcgtcacgtgacgggctcagcgctccgcagtcacgtgacgctcgtccgcaacctctgctgtcctccgcggcgcccccttccgcctgacgc

SEQ ID NO: 600813 - DNA, 358 bp, Homo sapiens
  misc_feature (29)..(29): n is a, c, g, or t
  misc_feature (106)..(106): n is a, c, g, or t
accttaaggcccccttagggaaaaaacanccccccaaatgggtgattcctattggtgttatgaagttgtgtcccccaaagagatatatcagtgtccctgaccccanagtaccctcagaatgtgactgccatttggagatagggttccttcccggggtaacccaaggtagaatgaggtcgttagtgtgggccctaatcccaatatgacggctatccttataaaaagaggaacatttaggctggatacagtggctcatgcctgtaatcccagcaccttgggaggctgaggcaggaggactgcttgagctcaggagttcaagaccagcttggggcagcatgtcgaaacgctgtgtctacca

SEQ ID NO: 600814 - DNA, 305 bp, Homo sapiens
gttttccctccaaatagaatactgttttatccatacaaatcataacagcatctatcccatgctagggttggaaactgatattggtattacttgtgtgtgtcttagtgtgttttatttcccagtgtcatcttcttctaaaatgaaaatatggtgcctccctccctccaggagactggcaaatatgtcctcttattactgctgctgtggagtgatgagatatgcactctactcttaagatcagcaaaagcgtgtcactcctcagtatatcagagtacatcatatctgggactaggaagtcgccagca

SEQ ID NO: 600815 - DNA, 245 bp, Homo sapiens
ttaaataaaaagctatgtgtaatagcataaacatgggatgacaatagttatatatctttgcagcactatatcaagataaactaattgagatatatactctgaaatatggggaattacaatagacataaaatattagacttgtcagaataatactttacatgccaagtttaatctactagcccagtactcctacgggtaacctgagcctcagaattgcgtaacatcataggtacataagactagta

SEQ ID NO: 600816 - DNA, 716 bp, Homo sapiens
  misc_feature (319)..(319): n is a, c, g, or t
gccctgttcctacacttacgggtgtatctccaaatcctctcccaattttattcccttattcatttcaagagctccaatggggtctccagctgaaagcccctccgggaggcaggttggaaggcaggcaccacggcaggttttccgcgatgatgtcacctagcagggcttcaggggttcccactaggatgcagagatgacctctcgctgcctcacaagcagtgacacctcgggtcctttccgttgctatggtgaaaattcctggatggaatggatcacatgagggtttcttgttgcttttggagggtgtgggggatatttntgtttggtttttctgcatgttccatgaaaacagccctttttcaagcccatagtttctgtcatggtttccatctgtcctgagcaagtcattccttctgtatttaacatttcgaacatcttggccatttaaagccccatgttctcttcactgtttgcccacctaacctttaccatcgatttcaaactataatttaaccctaccgcattgaatgttcaaatgaggctcgtcccttctgcaaatactcttactacctacactcactttcctataaaactaccccttatcctttaaaccttacaattctacaatgttactgtcttcgggcctcccgaagcctctccccttcataacccaccctcctgaacccagtttgcctattaaaccttctatctttgtt

SEQ ID NO: 600817 - DNA, 1433 bp, Homo sapiens
  misc_feature (563)..(563): n is a, c, g, or t
  misc_feature (1433)..(1433): n is a, c, g, or t
tctgattatgtcactgactgacatgagtcccgtagtctacaatcaaccatcaaatcattattacccttacgtcacccaacgaatggcgactgctcgataaggaaagggttgcccaaaagtaatagacatggaactcggcaaagatcgtgtaccctcgatctgtgaaccaagacaacatcactcatctagcattcactcatgatattagatggccccgcctgcccaatgtgactcgagtgttgtgatcgggccgcaggtacctcgtaacctgtcgtatgatggctcatcgataatccacttgttgctttaatgtacgagtgcaccatgtcatgagattggtctacctaggagtggattccacgctggtgcttcctatacattgtttgattcgcaagtgtatcattcgaccctttgcgccggatgatcgtatgagctgggcaaatgatctaatcgatgccaaggatcgaagaaagagcctcttagatgtgaaggccatttcattatgagttaaggtgcgaaagaccagttatcacttttaaccaatagagcgcgcgatcaacggnttcacttacatagcataagctccaagatcacctagtcgaatttcataaaattacttttccagaggtctagtgggggccgaatcccgtccgagaaagtccaagataacacgcaaaagccgtacactgtaggctaggttgaacaattgccttaaacgggactttttgaactctagattccagaaaatgctgcatatcgtgaatctaaattaactttccgaaatattggattctcgaatatagagcttggggattcccaaacgtggccaatcgaaagctattcatcccctaacggggtcattggaaacaaggcgggccatatccccttaagtatcggttaagaaaggttacccatttacttctaatcgagacctcaccgggggctattaaactggagacctctccgatactgagtcggaggattccagggaatcgaaattccccagaaattggggttggccacccccgtctttatggtacaagacgcggtccgggaaaaggtgtcaaagcagaaatataagaggagtcccctaacgcgcatgaaaaacccgggagaggcgtttcaggaaaaccggcgagggagtatggttccccgaggggccgcggcgctcacccactacgtcaaactttccaaaattttccatctccccgtggtatgcgaccacggtggcacacgagggtacacctgaggggggacaaacttttacaccaaagacggaccttattccccgcgggaaagagaggaatgtcattcctacacacttactgatattataagccacacaaccccatccacggaaacaccggggtgtggctgtaatcaaacaaagtgggacacacacaaaaaggcggggcgcgcaaacaaatacgccn

SEQ ID NO: 600818 - DNA, 135 bp, Homo sapiens
  misc_feature (35)..(35): n is a, c, g, or t
gaggaggaagaggaagaggaagaggaaagcgaggncggcgaagaagaggatgacatcaccagcgccgagtcggagagcagcgaggagggggagcagggcgacccccagaacgcaacccggcagcagcagctggag

SEQ ID NO: 600819 - DNA, 343 bp, Homo sapiens
acttgtccatattcctgtcggaggatgaacaactatagtttctgacattaagcaagcagagcccgtcattgggtggagatcaagacagtaggtggctagaagttctcgaagttcaattgatgtgattcctactgaccagatatcacagagttggttgtagccaccagttcttctctactgctgcaactgtactggggccatccagtaagggggtgccaatgaaagattttcgttttgcaatggtagctgttatttttgcagccacaccaaagtcagctaattttacatcgccatggtctgtcaataaaatattagcacctttgatatctctatgcattttgcc

SEQ ID NO: 600820 - DNA, 323 bp, Homo sapiens
tctctaaaagcacattatatctcagtacacaatacacgtgtggcgcgtgggggctgcccgtgtccccctgtgtgtgcgcctccccactctctttctgcgtctcgaaaaaccctgtgtgtaaaacaaaactcacgtggtccccccatgtgtgcgcattctcacagctgcgcagtgtatgaccccatgtgaagtccaccagatgcccccctcacaaaataggggccccccctcactcttctgggtccctttcactcacagaaaaagggtgctctcccccttggtcacatataaaagagacctgcgcacttctccccgtgcgtttt

SEQ ID NO: 600821 - DNA, 171 bp, Homo sapiens
cagaggttcccctgtcgttcctggcgtatgtccttttcttaagactcacataataactagactaagtatctatcatatcagacgctactaggatatagagaccgtctgatctatcttgctcgccatcatcctaattctcatacgcccgggttggccgggtatcgagctcga

SEQ ID NO: 600822 - DNA, 402 bp, Homo sapiens
aaaataccccaaaggaaggagggagccctgtttgccttgagataaactgccttggcattttctggctttaatgtagaaataatggtcctatgatgacatattttcaaagaacactttctatttactgtggtgaaaaagttgctaaatgtgttgttccatatgtaactgctgaagtaattgcaccttaataagggaatttctacaaaacaaaaaaaaaaaagtgacccggccgggaattaatataagagttgacccggaatcccgacgggacccgaggcgtacacctttcctataggagtggattaaaccttggggaaccgggccatagtgtacctgtggaaaagggtgccggacaaatcccacaaattacaacccgaaaaataaaggttaagctggggtgcg

SEQ ID NO: 600823 - DNA, 312 bp, Homo sapiens
ggcacgaggagtttcgctctgtcacccagcctggattactggattacagtggtgcgatcctggctcactgcagtttcctcctcctaggttcaagcaattctgccacctcagccttctgagtagctgggattacaggggtgcaccaccacggccagctaatttttgtattttttagtagaaatgggatttcaccatgttgggccaagcttgtcttgaactcctgacctcaagtgatccacccaactgggctcccaaagttctggggttataaacgtgaggcaacctgcctggcccctttgtttctttttttag

SEQ ID NO: 600824 - DNA, 349 bp, Homo sapiens
  misc_feature (274)..(274): n is a, c, g, or t
  misc_feature (318)..(318): n is a, c, g, or t
  misc_feature (326)..(326): n is a, c, g, or t
  misc_feature (344)..(344): n is a, c, g, or t
tttttgttgttgttgtgactgacagagtgagattccgtctcccaggctggagtgcggtggcgccttctcggctcactgcaacctgcggcctcctagattcaagcggttctcctgcttcagccttccgagtagctgggatgacaggcactcaccaatatgcctgggtaatttttgtatttttaagtacatacaggatttcaccgtgttggccaggctggtttcaaactcccggcctcaggtggtctgcctgcctcagcctcccaaggtgttgggnttacaggtgtgagccactgggccctgcctgtactttttatcagncacaaatncagcaacaagctgagggnttcaa

SEQ ID NO: 600825 - DNA, 108 bp, Homo sapiens
  misc_feature (104)..(104): n is a, c, g, or t
gaagctccaggctttggttttcgctgctgctggcggcagcgttcgcaggacgggcgacggccctctggaccagaactcccgtgcccaaacctccttccagcgcnacgg

SEQ ID NO: 600826 - DNA, 115 bp, Homo sapiens
gtggtttcgacagcaagcatatccaacatcatgcattcagttcgtcgtggttgtgcaatgttcatacattcaaggcagcatttgtcagggcagcattcagtcatcagcagcaggt

SEQ ID NO: 600827 - DNA, 141 bp, Homo sapiens
atatagctgctatcttaatcaggatacaaagaattatcatgccatggcagacatcgacgaatgggttattcagagaatttaaacttatgagatcatgagctgcagtatgtggaccaccttctgaaagaggatgtgcgacat

SEQ ID NO: 600828 - DNA, 591 bp, Homo sapiens
tggttggtataaacggtaaaagtgcgtgtgtgtgccctctttacccattcttgtggtgagtatgtgtggtgtgagcatggcatttgtctcagaagaaaaaaaaaacatagttcaggcacaaagtaagcccaccccactaagaaatatgttaaagaatttcaagaaagaatttaaaggagattatggtgtaactgtgaccccaggaaaacttagaacttgtgtgaaatagactggccagcatttgaggtaggttagccatcagaaggaagcctggatgggtccctagtttcaaagatatggcacaaggtaacctgtaagccaaggcacccagaccagtttcagtacacagacagttacacctggttttagacctcctccccccgccccccacagtagttaaaagaacagcagcataagtggctggcagaggcaagaaaagaccagcagagagaaaaagaggccatctataccaattctaagttaatttagactaaacaaggtcttatgaatagcaaaggataattgaagtcccaaacttacaaggttttcaacaaaaagtgaagttgctaaaagtcaacagcgtagcatgtt

SEQ ID NO: 600829 - DNA, 458 bp, Homo sapiens
aacgagtgatgcggatgtagttcttaagggaatagtccatgtttctgctgctatctgacagatcaatcatcgctggggggaaaatacatcattccaggcacagaacatccgaaggcccgagatgatgaagagcaaatatcccccctggggcctcataggtgtccagcttgctgaagggagggcagagaggagagcagactgccatgagtcccgagtctttcaactcaagacttggggttggggagctgagcacatgtctcctttttacatttcgctaccgacagacgtgagcgttcactgcagactggactgattatgaagcttgctgaagcactagagcaagcggaatgtgcctaccttgtggaacccattgctgtgaatggccagggctcagcaccagcgctcagcagatgctcaatgcgttttgctgagtttgctgagggaagactggtttttgt

SEQ ID NO: 600830 - DNA, 380 bp, Homo sapiens
  misc_feature (280)..(280): n is a, c, g, or t
ttttttcactaaggataataactctccagagattaatccaggttgttgcccttatccctagttttttttttattaccaattagtattccatggtgtgatggaccacagtttaacctttcaccctttgaaggacatctgtgtagcttccagttttttattactataaataaagttgctgtaaacattcatgcactggttttatgggaacatggtttttcatgtctttgggataaatgctcaggaatgcaaattgctcggttgtatgctagttgcatatttngcaggtttagcttgcaacttgcagcgatccctaaagcattcattattatcattcttattatatacttttgaggggaaaagaccctagggtaccgagctcg

SEQ ID NO: 600831 - DNA, 205 bp, Homo sapiens
  misc_feature (37)..(37): n is a, c, g, or t
  misc_feature (39)..(39): n is a, c, g, or t
  misc_feature (44)..(44): n is a, c, g, or t
  misc_feature (115)..(115): n is a, c, g, or t
  misc_feature (120)..(120): n is a, c, g, or t
  misc_feature (123)..(123): n is a, c, g, or t
  misc_feature (126)..(128): n is a, c, g, or t
  misc_feature (133)..(134): n is a, c, g, or t
  misc_feature (144)..(144): n is a, c, g, or t
  misc_feature (146)..(146): n is a, c, g, or t
  misc_feature (158)..(161): n is a, c, g, or t
  misc_feature (165)..(165): n is a, c, g, or t
  misc_feature (171)..(173): n is a, c, g, or t
  misc_feature (175)..(176): n is a, c, g, or t
  misc_feature (178)..(178): n is a, c, g, or t
  misc_feature (191)..(194): n is a, c, g, or t
  misc_feature (200)..(201): n is a, c, g, or t
  misc_feature (203)..(203): n is a, c, g, or t
cctagaggatctccgtactgtggtgtaccgtgggagncngtgangctcagcagtaatgaaacctgactagtaaacataaagattcaggttcaatctctggcctcgctcagcgggntaagnatntgnnnttgcnntgagctgtgntntaggtcacagannnngctnggatcnnncnntnctgtggctgtggnnnngcagcnncnac

SEQ ID NO: 600832 - DNA, 324 bp, Homo sapiens
  misc_feature (20)..(20): n is a, c, g, or t
ctcacttctacttctcttgnttctatgagtctattaacagatgaatggatatagaaaatacggtgtgcgtatgcaatggaatattattcaggcataaaaaaagaaggaaaccctgccatttgcagcaagatggatgaacctgcaggacattgtgctaagtgaaataagccaaacactgaagcttctctagattgatgttcctcccactgtgtttccctgagcgtggtgctcaccttccatgctcagatgaaggaccacttcacataagctttgcctgattcggcggttctgggctacgacacatatttgcctgaagctttactg

SEQ ID NO: 600833 - DNA, 297 bp, Homo sapiens
ggtgttcctttgtctggttaggtagcattaccatcaccctcaactcaaaaccttctatggagggaacatatcttattttattcatgagcctctgtgtgctgtgttactgtatacttcccttgaccagtagcaatgctgattatgccggctggctactttttgagctgatccacgacctgtaaacttcatggttcgtcttttctgtggtgatatgatgatgtctgacctggatctactaggttgtcctctatagacattatccttggctggatagcctaggccttctcaataccccga

SEQ ID NO: 600834 - DNA, 504 bp, Homo sapiens
gcttactccttagttttctgccttaatttctaagtcataggctactttcaggctaagagttttcctccagccatggttttagtctcattctgtaagtctggttttagttttattcatttaaaattaatctttaataacttttttgactcattggtgacagagtaattccctctcttcccaccacaccaccctctgtccccaagattctggaagtttgttcttccccttttgtgatcattgttacttaaaactttgagtttttcaaattagaagtttcttctataaatgtatatagagcttggctgggcgtggtggctcacgcctgtaatccacagcgtcaggcgaggctgacgcgcggagtggactcgccgagggcaaggagcaccgagacgcatacctggcgtaacatgcgtgaaaacgcggtctctaaccaaaaaatacacaaacactacgagccgggcgagagtggcaggcgccggaggaccccggctgccgggaggctga

SEQ ID NO: 600835 - DNA, 246 bp, Homo sapiens
tctctcaccagcaaaaagataacaactcactgaatgtctacagtaatcgtatatctatttagcaatagggtatatttaaattaaggtatgtacatttaaaaaaaaaacgtaatgctggtcaggcacagtggctcatgcctgtaatcccagcactgtgggaggctgaggtgggcgatcacttgagctcaggagtttgagaccagcctggcaacatggcaaaatcccatctctactaaaaatacgaaa

SEQ ID NO: 600836 - DNA, 1077 bp, Homo sapiens
gcgctgacgggcacgctgactggacggctggcgtgacagtgcgacagcgaactgcggcagtgaccagagtgagctgagagcagcaatgaaccacacccatgacagcaatgtcatgcgtgacagtggaaacctcagagtggggtagactgatgtcagacaaaacatgaactctggtgtgccctagcaaaatgtgcatgcaaccaaatgagcatggctgacctctcgtgagctccttgcacagtgcaagggcacccaatggacagcaccactgcacctgggccagcacaaaccaccccagtttttgtcacagtgccgttctcttgcacactgtgccacaccattaacagcacagtgcaccttgttatcacagcttgtgccaccccactgggccactcttacctttcagcagttacctacacggcacacatccgcatgtgactggtgaaaaattgggaacgcggccaacacattggatccaatccccaagacctttttgcaccgctttatgtacactttaccacccaattgtggaagcttgcaaaccctgtgaaactggtgaatgtgctgcgttgacaccaacagggggagccatttgtggacacgggttatcaacaccatataatgaggattgcaacgtagaactttggagtggcctgtgcatgccaaggggtttgcgaagtttgcaccccacaaaaagggcttttgggacccaaagcaacaagttcaccaggttgagcaaggcaggagcattcccaaataaacaattaagtggagcacaggaaaacagcaggccccgcggctgcatcatcttggtatgtggcccaccaattggcctattaaccgaccctctgtcgtaaaccacttgggtgcggaatcatactacagtgatgagggagcccccataagattgcattgcaacgcaaacaggagttgggccccaagctggacaggacacctttgtacccgttccccccaagacgaacagtggtgggaacaagggtgacccacaagagttccatcatcctatactcattcacgccacttggttggaacacagttggcgacaaagacgagata

SEQ ID NO: 600837 - DNA, 500 bp, Homo sapiens
gaaaaggctgtggctgcagctgctgcagctgttgtgacccctgcagccattgcagtgccacaaccactggctcttcctgtgctaatgtggttgtggcagctgaatgtggggtcacctttacgcagggaagagaccagttgggagggggccaagaagaccgaaaaaaggggagactggaagcgtgaagggctgaaggattaaccttgtgatgatttagagacagaaggccatctggggttggaaaaaagggcctttgaggattcacaattggacggaagggcccacaaggtttgtccacaaagaaggtcatatagggggggaaaattgttgtggtacgtgactttgtacaatcttcaaatgtggggtttgtgtacaggcaggtaccaattttccaacaattgtggctacaaactggttgtcgaggcttttagaacatataaacattgtggttgtactaacatgtgctaaggtcgaaagtttcacattttaaaaaacggggc

SEQ ID NO: 600838 - DNA, 604 bp, Homo sapiens
  misc_feature (37)..(37): n is a, c, g, or t
  misc_feature (74)..(74): n is a, c, g, or t
  misc_feature (84)..(84): n is a, c, g, or t
  misc_feature (87)..(87): n is a, c, g, or t
  misc_feature (144)..(144): n is a, c, g, or t
  misc_feature (154)..(154): n is a, c, g, or t
  misc_feature (440)..(440): n is a, c, g, or t
  misc_feature (447)..(447): n is a, c, g, or t
  misc_feature (462)..(462): n is a, c, g, or t
  misc_feature (464)..(464): n is a, c, g, or t
  misc_feature (534)..(534): n is a, c, g, or t
  misc_feature (565)..(565): n is a, c, g, or t
gctcaggcgatcctccgacctcagcctcccgagtagntgggactacccgtgcatgacaccctatctggccttgntttttgttgntgntgttgttctttcttttttcacgtggtttcgcacttgtcacccaggctggagtgcggnggtgtgttgncggctcactgcaacctgtctctcgggttggagtgattctcgtgtctcagtcttccgggtggctgggattgcgggcgtgtgccaccacgcctggctgatttttgtatttttagtagggacggggcttcgctatgttggtcaggctggtctcgatttcctgacctcgggtgatctgccacctcggcctcccaaggtgctgatattgcaggcgtgagccaccacgcccggcccgcatccggctttaagatttgttttcacttgcccgtgggaggatgtacttatctcanatgctanagccgggagaccctncnccccaccacccccatctcctgcaggagctctgatcgcagattggagtgtctgaactctgcatctatgganggtgcttctgtaagcccggccgcaactctgnagtggcatagtagtggcagctttgcctttctgggtgccc

SEQ ID NO: 600839 - DNA, 650 bp, Homo sapiens
tctaccacgcatggcctttgttcactgaactacagaattgccaagaatatttttaaaacaaacacattcaacattacaaagggcaagagaacaggaaaaaagaaaatccctactcagctttgaagtcatgagatggccataaaaatggaagagtacaagaaaagggcctttgaaaattaaatatatatgattgaagtgaaaaaataaaacacttaactgtacttttagaaaattaaacaatgaggcaaaaacctgagaacaaaggaatgtaagaaattcagaggactggtaaaatggccaaaatattagaagtattattattctaaaataattccagaaatgcaagaaataaaactgtcaaataattgaaataaaacatctaaaaatgaagggctcaagcttgcataaagaaagccaataccccataccaagtgatcaggaaaattggtaaaaataaacttacccaaaggcacatggacatgatatttcagaacaataatgaaaaagagaagacgctattagtttccagaaagagagagacaaacataacaaaataaagaaagaaatgtggaaagagtcagaatcagtaacactttacagcaagactggaaaatagaccacaatggagcaatgtcttcaaaatgcagaaa

SEQ ID NO: 600840 - DNA, 547 bp, Homo sapiens
  misc_feature (424)..(424): n is a, c, g, or t
ggatccaattttgcgttccttgattgcatacactctttatctctagcttcttagcagagtaagcctggcatgttgaaaaagtaaaataacacacagcctatgatcaggctccacttgtatatatttagtggaagttacttgtcacatccagatcttacaaaagatcattagaagaacagtctcgtaatagagcaaatggacaggcgggttcatcagaaccaggaaaaagaacggcaattatccaatacagccctctagctgatatataaatttgtcctacgatatttcaaaacgctcatttggtctctccttgaatacctccagagatggagagctccctacttactgtttgagtatatttaactgctggtgagctctgcttattggagactttttccatacattaaactaagctgaaatctgnctccctataactccttataacccttgtcatcccaaagctgcgagaggcgccacagaataagttctctctctattccacttgggcacattttaagtgtctcaagacagctaccaggtctcatct

SEQ ID NO: 600841 - DNA, 267 bp, Homo sapiens
tcgaccattttagtctctccccagagcactatacagaggatatattggcccagagctgctgggggcaaagacagggtgcagatcctatcatacccactctaagacctttccacttctccttgtgccaggagactccctggggccactgcttgggaggcttctgccccttagccaaagagcagccctggatgtgactgcttgggaaccttctcccagctaccgccctgatgaactgcctggcagcctcccgagactgcctcgccaaat

SEQ ID NO: 600842 - DNA, 901 bp, Homo sapiens
  misc_feature (271)..(271): n is a, c, g, or t
acatgcacttgcgacgcacccgcgaggttgcggactgagtctgagacagtgctagcagagtgaacgctctggtgcctattcatgcactaccactagcgtgcaacgcacttggacagacgtgtcacgctcgtgcgccggaagaacccactcgggtctgcgggaccccacgtgctaacaggcgcgcatgaaatgaggctagcgaagcacacgcgaactcgcacctcggctccatataaagggcaagtgtgctatagactatacggcgttctanaagaccgcacgcgatggtaaatactcaggttagatatggagtaactaacatcagacaggatttaccaaaagccacaaccctacagtcgacgccagaaataacaaaaccacaagtactacacaactactcgactaccctgacaggacaccagaacgaatcacagacaagcaaaacaaacaccataaaaaagaaacaacatagggcagagacacgcaccacaaaacaaaaacacacacagaaacacaaacaaaagcagaaaggcgagaaacacaaaacataaaaaagaaacagaaagaggagacacacaagacatggaccaaaggcatcacagacagacactatcaacatcgaaccgcggcaggccgccatagaacagaagaagacggacacacaaaaaacaaggagaaagcagatcgccgccaccgcaaagcaacaatcgagatgagaagagaaacaaccaataaagagccggcacacacaacatataactgaagagacaacagacacgcacaagccagagatgaggagcaagacagagcgagcaaaagacacaccaacaagaatatgaatcaattctatcaaggagaacacacaaacaaagaagacaggaagaagaatataaaacgaaaa

SEQ ID NO: 600843 - DNA, 498 bp, Homo sapiens
  misc_feature (254)..(254): n is a, c, g, or t
  misc_feature (286)..(286): n is a, c, g, or t
ccgaaggccacgccctcgaggggtacaatgcaagggagaaaccgccctctagtggcgtaaagaaagagaaggacagacgaggcgtctagacagaccgtgagagaagaagtgtttgcctccctcagagagccgcgttcagaaacgaaagcacaaccgtgacaaaagccaaagcacagagacccagagaaagccaaatgggacaaaagcaagcaaggtctggacagcttggacacaggaaaagggagcaggagacnctgtggcccaaggtaaaagagaagggttctanacaacctaaagactccagaagggaaagtcaaaactaattcggatagaacagctcaaccttgggggggctttcccgcttccctttaagaaggttggacggagacagatatggaggatgaattcgagcagccaaccatgtctttgaatcctacctcagctatgaccagccccggaagaaaccgacaaacgattgtgaaaacttcagccacggca

SEQ ID NO: 600844 - DNA, 138 bp, Homo sapiens
cagtaactattaatgtagttaaggttttgtgattaaagatagaaaataaactgaggacatcaatggacaaagttctgggtggagtcaagattcttattttttccctccaactttgttttttctaatttaaaaaaataa

SEQ ID NO: 600845 - DNA, 497 bp, Homo sapiens
atggccagacagaccagacatatgagtggtacggtacctcatctctgatagcataacagagatgtaagagcgtttcccatgcctgtatggaatggcaatccgcaggaaatgtctactacagtatactacccatatgtatgttgctcaggccactgtgtggccccagcaactgttggtttgcatcgggactaggggatagtacgtcgttgttagccaagaaaaatagtaacactgctgttcctacagtgagctagtgggagtggggtataggggacatatgcttatgcccaacagtaccatcagaaatcccactgccttaagacagtctcacgggaacccagtcccagacttgcagaaatgagtagacctgtggcatcttgactttggatgtatctgcatttgttgacagtcactcagcaatgtagacatgcatttactccacttaggtcaaatgttacagggaagttcatcagctatgatttatacaaaaactgatg

SEQ ID NO: 600846 - DNA, 122 bp, Homo sapiens
ttattcgtgttgcacccccaacgtcttgattatagtagcttccataacaacttttgaaatcaggtaagtgtgagctcttccaactttcttctctttgggcgattagttaccggcgtgttgcc

SEQ ID NO: 600847 - DNA, 130 bp, Homo sapiens
ttatgtctgaccaccatctgcaagcagaaatgaagcctcaccagaaaacaacatgagggcaccttgatcttagacttctaagcctccagaactgtgagaaaatacatttcttggccgggcactggtgact

SEQ ID NO: 600848 - DNA, 537 bp, Homo sapiens
gggtgcagtgcagtggcatgagctcagctcacttttttttttttattaaattactgagctttatttcacatgcatatttttggtctccctaccatttccatatctaaccaccgctactactatgttcctattataacattccatacatacctaaaaccaaacgaagggcagagttccatctttaaaaactaaacaggcatttgggacaacacgttctgggcaatggaacctagacaacagttatcaaacagggtagggaaatttctcactctgctttataaaaaagacagccagatttcaccgtgttacagaattgagatgaaaattttttaataaatggtttaaactatttccttaaagagacttcctctactgccagagatcttgattagcctccgggtcagtcatctggaaccaattcttcacttaactgatgaccttggctcccgctgtgggaatagaaccaccttttcctatacttgcttgcatttcggctttcctgtcttctacagaactaggtcctcctggtgtccccgg

SEQ ID NO: 600849 - DNA, 2036 bp, Homo sapiens
tttttttttggcattaaaatcagtttattgggaaaccagtcacttagagacattacattgtaaagagaatgtagagagaggtctgaacattttataagatactgtacaaaaatactatgtttctctgaatcctataactttttagcagtgcttctttttaaacagttctgaccttaaatattgttttcagaaacagaacaaaaatgtgtttgtcctccatttttattttcctttctaacagtttgaatgcgttcagtgaattccagattggggcgttaagttaaattctgtactggtgccaaatggctttcagaatagtatttgaagaataagattttgaaaagaataaatttttccttgtattataattttagtatgtgcagctacatggtgatacgaaagcatcagtcagtggacaggaaataaacagaataccttcttccttgcgatttatgtggacagacataatcctaatttctcaggcaagtaaattgatattagatttgtctcagtgataccaagatgataatttctgggaggaaattcaaataaaagggagaaaaataagttttccaaaataaggtttgcagagccttaaagaaggacaagagggccctaaaactccttgaaccaccttcctcacatagtatcagttggacaaagttttcagttgccaaaacaaaagcacaatttctcatcttccaaaactaccttgaaagttgatgttattaagcttgttctgcaggagagcaaaatatctcttagggaaaaaaaatggaaaacttagtcaagccagtgaccaactctggcatcatacaggtcaataatccaatgaacactagtttgaacagagtcagtgttttttgggaaatttaaactgaattcagttaaaacatttgtgcacagagactggcaaaaaagcagctatctattgaaccaggggcactttggaagctgcaagtgtcattacattttgagactaagaagtcccaggggtgtgtgtgtatgtgcccatattcagggttggagaggatggaagaacatgtctaacccatcaaaattatttgttaaaaagtgggtttttggtcaagaacccatttggaaaaccttccaactcagagcatattctatgaccttcatgatgagtactgggaaaatcagacttaaaattccaacaactttgaataatttacaaaaacagtcacaaaaacaccagaatatcaagtttgaagggaaaattagtctcctgtccttcaaaacaaggacaagagctatttcctatctttctttcagcatcaacaggctttgtaggaatggaaaagtacatttaaagggttgtcctgagaaggccaagttcccttaacctttctatttcttgttagaggaggtacagtgtggctgaggcggagagcaaccacactttgcaactctccaggcctggcactctgaagggcaaagaaatgccagagaatatgggggaagcccagacctccacattcccttaaggaattctggtggtggcagcaccagaaacaaggtagtcgagagaaggataaattccaaatatactagaaacagaaggtaaccattaaatcttgttggcagataaaagtctttttttgagtatgtgaatgtgttcttacagggaaaatgtgttttcagggtgaacagttcctttatatgaaggtagcattgtgtcaacaagaaaaacgtgtttgaagcagtctctttactagcattgaaggatttatactaacctaaccacatgccttgacccagttcctttggtaaccaatggcacgtcatagcagataccctgtggccatagagctcagtaaacactgcctgttgtacctcaggggctaaagcccagggcctggcttcatagtctgcacagggtcttacttatcatagagcctaacgtagggttttgttataattccctcaaactggatcatgcctctttttattttggtttcacacataaaattaagcaagaagtcaaaacatacttctttcctggtgccgagcttgga

SEQ ID NO: 600850 - DNA, 389 bp, Homo sapiens
  misc_feature (6)..(6): n is a, c, g, or t
  misc_feature (49)..(49): n is a, c, g, or t
  misc_feature (83)..(83): n is a, c, g, or t
  misc_feature (106)..(106): n is a, c, g, or t
  misc_feature (186)..(186): n is a, c, g, or t
  misc_feature (238)..(238): n is a, c, g, or t
  misc_feature (273)..(273): n is a, c, g, or t
  misc_feature (284)..(284): n is a, c, g, or t
  misc_feature (298)..(298): n is a, c, g, or t
  misc_feature (344)..(344): n is a, c, g, or t
ctgccnaaggataaaaatctcaacaacttagaaggcatgtgtagcttgnatgctcaatagctgcctcatctcttcctgtcccnacaacagtacactaaatcacagnttgcctctctgaagctacacctcctggtgaccacctgctaccctcctgaatactcttccctctctctgctcttaagtctncttgggacttggcaagcatcagctcacccctagatggtgtccctgagcctgnccaaagtgagagctaggggtgccttgctctggctncatgttgtcgngcttcctagtatanggtaacactgttacctctcacgggttaatcctgttcctagacctgnccatagaaacactccataagttctgttccaaaactgaatgaagtt

SEQ ID NO: 600851 - DNA, 1117 bp, Homo sapiens
atgactaatgatgctattctttgaggacaatctcccagtgtgaggatacaacagtcctcatacaataaaatcctacgatatccatgcgtggactgtgcctccccatgggatgatctcatgcggagggcagctagtgaccaagatgtcatcatgggagaggatgcacaacagcttcttgacagcaaggcctccgtgctccgtggatcacaactactgcctggacgcctgaaagacaggcagggcacgacacgcctaggtacttcagccaattggagtggggaggccctcaatgggcctaccaggacaggtacctataaggcatagacacatactcctgactgacgtgacaattcaagcggtcagccagccttgaggtcatgtagcctctgaacagtggatcttgggcagcacacaccacccatagatcgtgagagtgatctgaagaggccaagcccaaagctgtaaagtaaacttaaatcgacttcgatgtgcgggctagcgtcatgatgtgaaggtgcctgggaactgcctatatacaagtagatgtcctccactgtctcatggtagcacatgcctgtgaatgtgtcctctcagtacatgagtgccgagttggccttgtgctaggtacaccagtaatcacactgcagcctccgtctaactcccttccttacgggcctgatctatgagtgagtgctttaatccaggacccagaaaatccttagtttgatggtaagaggacgccgctgagtcaagacacctgttttcttgacaatgttcgctctgccaaaaccactaggggaccaacgtaagctgtctatcctagaacctcccaagagtcgattcacatttgtaggtggacggcgccggagaaggggcccaggcgggacggggcgggaataaccaggccagcggggcgcaacgctaaggggcggggaacacatgggaaacgcctccagagtaaaagagacagcagctgggaggaggctggggaccttcacacaaggagcaagcccgggaaaatggagtgcgcgacacgaagtacccagcaacaacccgtaccgacgaaacccgcacacacataataacggccgcacggacactacacaacacaccgccg

SEQ ID NO: 600852 - DNA, 321 bp, Homo sapiens
aacagcaattctgcctctacattctaggttgtgtgggatgttctctgtttgatcagaccaatgtcagatgcactgtgctgctacagagaatctgcaaggtctatggcccattgtctctgccacctccgagagacataccaggaagtcgcagagcaggggtccagcacctcaggagcagcagcagtcgcccgagttgccgcttcatggtctcctggctctcttcaaagttcccttgcacgagctccatgaagccacagaaacaccagaaagcatccacctcgttctgaatgacgtggaggatcgcggagagaccactttcta

SEQ ID NO: 600853 - DNA, 530 bp, Homo sapiens
tggacgacagagtcttgctctgtgcccaggctggagtgcagtggcgcgactggagctcactgcaacctccacttcccgggttcaagtgattgtcccacctcagcctcctgaatagctgggattataggtgcatgctaccatgcctggctactttttgtatttttagcagagacagggtttcaccatgtgggccaggtggtctcgaactcctgacctcaagtgatccgtctggctcagcctcccaaagatgctgggattacaggtgtgagccactgcacctggcctatataggctttttttcttaaacctatttagtacatgttttcccaagtttatcttctgacttttaaaaatttgttaccccaagtttatcatttctatattatattttcagtggaacacactggggctaacttacgcagtttcaactatggaagactgaagtttacaacacaattaacctgtcataggtacttttaaacatacacgttataacacgtaggctcaaacacatattagagacacgagtc

SEQ ID NO: 600854 - DNA, 358 bp, Homo sapiens
  misc_feature (23)..(23): n is a, c, g, or t
  misc_feature (139)..(139): n is a, c, g, or t
  misc_feature (147)..(147): n is a, c, g, or t
  misc_feature (162)..(162): n is a, c, g, or t
  misc_feature (168)..(168): n is a, c, g, or t
  misc_feature (192)..(192): n is a, c, g, or t
  misc_feature (211)..(211): n is a, c, g, or t
  misc_feature (232)..(232): n is a, c, g, or t
  misc_feature (236)..(236): n is a, c, g, or t
  misc_feature (246)..(246): n is a, c, g, or t
  misc_feature (248)..(248): n is a, c, g, or t
  misc_feature (250)..(250): n is a, c, g, or t
  misc_feature (252)..(252): n is a, c, g, or t
  misc_feature (254)..(254): n is a, c, g, or t
  misc_feature (256)..(256): n is a, c, g, or t
  misc_feature (270)..(270): n is a, c, g, or t
  misc_feature (284)..(284): n is a, c, g, or t
  misc_feature (288)..(289): n is a, c, g, or t
  misc_feature (296)..(296): n is a, c, g, or t
  misc_feature (358)..(358): n is a, c, g, or t
ccaaactataaacctttaaggcngtttgagaaagctgtagagctgtggcacgaagtaatccttgtaatgcccgtcaatgaatccttttccactgttgtgcacaaaccagcaggtaacgtccgttccaaacactagatcngttctgtngtctttctgtaagcncctggngatgatcagcttctgccccttcanttccatgctggcctctggnttctcagggtcctttcctggnctcncaatgaagangngnancntnggttcctgcatganctggcctattagtncgtnngctttangtgagaacttgtttgtagggggtatgtagattcccagaaagtcaacattgacgggatgtttn

SEQ ID NO: 600855 - DNA, 344 bp, Homo sapiens
  misc_feature (32)..(32): n is a, c, g, or t
  misc_feature (50)..(50): n is a, c, g, or t
  misc_feature (232)..(232): n is a, c, g, or t
  misc_feature (297)..(297): n is a, c, g, or t
  misc_feature (332)..(332): n is a, c, g, or t
agctacaagtaagggggagtcacccagtggancaggaacaaccattttangttttacttaagtgagaaataaatccctagtgtgttaactttctggcatgtatttgttacaggagccaatttgaccttaattaattcacttaagaggttaagtagtttatctaaagacacacagcttataactggggacagcatataccagatctccaaagtcagtcctgtcaatcattaangcttattggcagagaaaaccaaagtggttcaggtgtagccacctgccaagttatgcagaatgggnaacactagaaagggaggaggctgaaaatacctganctgtattgtttt

SEQ ID NO: 600856 - DNA, 1481 bp, Homo sapiens
  misc_feature (1172)..(1172): n is a, c, g, or t
ctccgggggttttgttgtactgcctccaccgccccccccttgtgggtggccctcttgtgtggaactgttggtgaagtggggtaggatgtagtgggtctgccccccgcatgatggggcgaattcgcccgctgttggtgggcgcgtttggggggcgccccccgccccgttcgcgcctgtgtggttttgcgccccctgtcttgtccgtcggcttagtgtgtaactcggtgctctactctctccctcgttgctccctttggttgtaggcctcccacctcttttttatgctccgcctaatggggcggtacctacctgttacgtcctacaaccgcgtgggttgcttcccccagcgaaggccagactggttgctgcgccccccctcttggggacttctcctaccctgttggttgtggcctctccctccttcctctctctcatcggtccctctttctttctggggtgagccacgcggacaccactttatttttattggggcgatgttaagtatgttgtccccccccgcacaggcctcggagggccccgttgtgtgcgctcacttgccgccgcgcccgccgtcgttgttgttgctcccccacagccaccttggaagagaggtccacaccttttcttctcacggggatgattctcgtgaagaggcggccctcttggcggccccccactgcccgcgcccacaacaggtattaaaccaccaggggttaatacccttccacagaggcccccccccgatcttgtgcgcctcgcacccacgccttataacagagaggggcgcccccagaagactcgtgttcgaaaaaaccttttgacgacttcgtgggttgtaaggagaccccccaccatgtccgcgggttccccgcggttcccccctctctatgggtgccccctgttctctgtttaggagacgcccttccgggggcccacacgttctgcgctctacagtgccccgctggcacgctgtgtcccacagaaccgcccgcttgcctttcttcctggcgcacacttgtgacacacagagatgtctctttgtgtttgttgtcttgaagggttttttagagagatatataatatatgttgtgttatacctgttgtgtggagagagagagaatgtggttgtgtgttttgtggccacgggggcgctccgcccacagcggctctgngggacacacagagagggtgtgtgcacaaccactcttctgtggagagcttgggggagactctcacagggacgcccggtgtgctctgcacaggagagtgttgtcctctgcccactagccccacagttccggcccccatcttcttccatcccttttgtgataagatttcttattcttgttccagatgtttataagaattttgtttttgtttggcaccatttttttctgaatcttttatttattattttttttatatttattgttagaaaatgacttatttttgctttggaataaagttgccagatgattcca

SEQ ID NO: 600857 - DNA, 384 bp, Homo sapiens
atatcgtcggacccgtcagacgctgaactatgtgtattgaacagaccaaagacatgctactattttctagtgttgagaaaagtttcaaagtgctacctagaagcaatcattaaaaccaacgtacctccataaaatgcattttttatcaaatgctttataaataaatagtgagttaaaattgagaaggagtgactatttttattgcatgtcacctggtcaggtatttcctgcaagaacagggactagatccgtccttccaatccttgtaaagctaggcatgaaaagaaggtggtcctatttttaaagtctttatggatttttacttgaatctcttttaaaggactagtgtgtgtgtgtgtgtgtgtgtgtgtgtgtgtgtgtgtg

SEQ ID NO: 600858 - DNA, 146 bp, Homo sapiens
ccacgaggacgccaacagaaccatcagtccatcaacaagcaacaatatcccgcgagggcaaggttagggtcagccgggagctgcctggccacactgggtacctgtcgtgttgccgcttcctggatgacaaccaaatcatcaccagc

SEQ ID NO: 600859 - DNA, 922 bp, Homo sapiens
ttcagttgcgttgtgatgtggtatctcttttaccgccgttgtgcgggttttcccctgaagactttgtcaagacccctgttatccgttgttcagctcaaaccccgggggtgccccccctatggagatggaccggtgtgttcccaccccggtgtttgtcaccctggggtgttgagggttcttatggcccccttccccgggaacctacccttgggtttatcccattcgcgctctcaagggcccctaatcaaggtcggagagtggcacgccgacatctcttcccgtgctatagcccctcccggcgtgtggtaccttgtcttttcttaccgcgcgtaataaaagggtattacctgcggcaccgagttaaaaaggcagtcacaaagagtttcttggtagaacaagggttactccctcctatcgtccttgtcatcccgccccggggaggtgtcccccccgtttccgggcgccctcaagaaatcgggtgaggattacccctctctgtctcccagggggtgactatctccctcgcgggcccccacaggtgggtaataaatagtccacgggcacccttctgttgtccctgcgccaggtccccccttgacccccctgagatagactcccttttagacaccgcttgggggccagcaaaaaagcgtgctcctcttgctgttccttcgagagtgagcagtgcatcatggtgcagtgattttcaaaggaaagaactgaaaccctggatattctccttccaatgggcgcagcctccagaaatgtctagcacaccccacgtaggatcagggtaaaaatctactcacttcctatgggcgcaccagtttatagccaaaaagtttatgtggcgcgcccccggtgtgtgcaaattttttggccgcgtccgggggtaaacattttcccgggcgtcaacataaca

SEQ ID NO: 600860 - DNA, 390 bp, Homo sapiens
agtaaacaaaagaaattctgtgttcttagagaatttgtatctgagtttgggaagcagtcaatatataaaatgttaaatatgtctggtggtgggaagtgctttgaagaaaaataaagtaagacaatagataagagtaataagggcacatggccattttgtacaaagtgataagaaaagctctagtcaggtctgtctgataagggacatttgagcatatgtgtccatgaagggagcaatgatccaagaggtttttgggaaaaaaatgtaccaggcagagggagcagcaagtgcaaataccctgaggccgccggttatttatttatatttatttattttgtaagacagagtctcactccagcctgggcaacaagagcaaaactccatctcaaa

SEQ ID NO: 600861 - DNA, 424 bp, Homo sapiens
tgcttcaacgcggacgaaccgtggaaacaggcttagtcaatacgtgcttcaacgcggacgaaccatggaaacaggcttagtcaatacctgcttcaacgcggacgaaccgtggaaacaggcacggtcaatacgtgcttcaacgaggacgaaccatggaaacaggagtggtcaatacgtgcttcaatgcggatgaaccatggaaacaggcgtggtcaatacgtgcttcagtgcggacgaaccatggaaacaggcgtgttcaatacgtgcttcagtgcggacgaaccatggaaacaggcgtggtcaatacgtgcttcagtgcggacgaaccatggaaacaggcacggtcttcaacacagatgaaccgtggaaacaggcttagtcaatacctgcttcaacgcggacggtcgacgcggccgcgaattta

SEQ ID NO: 600862 - DNA, 871 bp, Homo sapiens
  misc_feature (310)..(310): n is a, c, g, or t
  misc_feature (531)..(531): n is a, c, g, or t
taccccggccaatttaggaaggtactgggacgcaagcaggcatctgcccgaataaatccactaaaagtctgatttccttaacatgtccgtatgactcgcatcaggagatattcaatcacctgacactcacgcatacgtctaagtgagagacacatcgagaactcgagcacgcaaagatgatatatcatgtcatctcgccgtttagttgaacaattctgtactaggagggtgcttctgacttctttacaccatactcgtcatcacaaggcgctgcatggaggtaacattttctgaaagctgcattccactnttcagctctataattccagaacagaggagtccatattgggccttcacacaactttagtatgatagacgctgctagagggtgtcgcaaggaaacgttcatctgatattatttaggactcaaactctatgcagtacaactaatacatggctctacagtccagcaagatgcttatactatatttcatgtatagaccaaatcactaataggattcattattgggnctcttcgtaagaccggagagagcatgaagaagtgggccatcaatatgttagaatgttggttttctgcacatatattacctaataatgctctgcaagtcctgatggcatgaaggggtatgtatctcttatagggatctgagaatgagataccagttaatcttggcatatataatgtaaggtattgggaataaaccattacaaggaaagagtgaatcaaagttacgtggcttgaattttgaataatacaacgatgccatcgcttacgctttacttactagtaaatgtatgtaacattgttgggactagaaaataaacttgaaacggattacattagcaaaaa

SEQ ID NO: 600863 - DNA, 433 bp, Homo sapiens
  misc_feature (35)..(35): n is a, c, g, or t
ttcctctttcggggcggggaagaaacatggggggntgggggccttggcctcctacccccctcctttgggtgtgacccgtggcacccccagcccaaactggcggaaaaggaaaggaacgggcagcctgggcctgggtggaaatcctgccctggaggaagttgtggggagatcccttgggacccccaactttttgccctcccctttgggcccagcctggaaacctacagacaagggggggttcccccatgggctcccccgtgtttatgacgcaaagatccccacccatgggccttagggtcctttttaacagactcaaaccccatgggccccgaatattttttttgtccagaaggggtcctttccccatatagggctccaggggctgttttttttgttttcgctgttcaataaacattgggtgggcccctcccca

SEQ ID NO: 600864 - DNA, 480 bp, Homo sapiens
aaaacattggttcatgacgcacagcagcacacagattttgtccgtgccatacagcgtaaaaatgaagtggttaattttttacgtaataagaattttcataatcttgcggatatgcccaatatcgacgtgatcgacggccaggcggagtttatcaataatcatagcctgcgtgttcatcggcctgagggaaatctggaaattcatggcgagaaaatttttattaataccggtgcacaaaccgtggttccgccaattcctggaattaccaccacgccaggagtatatgacagcaccggattacttaatctaaaagaattgcctgggcatttaggtattttgggcggcggatatattggcgttgagttcgcctctatgttcgctaattttggcagcaaggtaaccattttagaagcagcttcgctgtttttgcctcgggaagatcgggatattgctgataatatcgcgacgattttacgcgat

SEQ ID NO: 600865 - DNA, 619 bp, Homo sapiens
ttggcacagtgacagactcataagaggaaccgagacataaacctgcctaggcccttgcgatatgacgatcatatgatcacgctcaccacggtctcaaggaagcctacatgtggaccagccatacaaaggggaaggaaaggaactgaattgatacctatccctgcttaagccctgaagtgaaggaaatgtgactaatgatctgggaagaactggatcaccgtgcgattttgacccttattgtcttgtcatctaacgaggatcgttatcaagtggaccacgcataaaggctgatggtaattgcacacgctgcttatagatgctcctttatagtctggttgtgactgtcctcatacgcatcacaagacgctctgctttggcatatacttgactacagggagatagatccgtgatattgctataccgcctcgttaacgaatataaaacccatagcgatacacattctcactgccgccgtttcttctcctacacgtatattctctgcactctcgttatttggtataccccgcggttcgctgtgttgacttaattgtctactgatgtaatactctagcccagattcatatatcgctatcgaagcccgttggcttcccgttcctta

SEQ ID NO: 600866 - DNA, 149 bp, Homo sapiens
gaagaaaaaaataataaaataatatcatgtatgcatatatgtatatataatgtaatatacaaagtacacaagggacaacagagaaaatggtccttctcactcccatccccagcaccccgttctcctctggaaggaaccagagtccccag

SEQ ID NO: 600867 - DNA, 429 bp, Homo sapiens
ttttttttttaaatccatctctatgtaagcctcccatcttcagatgcctgccctgactacccaccgaaaaattaaccttctctggggtcccacgcccacggagcttcgctcactgctagcacagcagtctgagatcaaactgcaaggccacagcgaggttgggggacgggcgtcgcactgctgagggttgagtaggtaaacaaagtggctgggaagctcaaactgggtggagccaccgcagttcaaggagacctgcctgcctctgtagactccaccgctgggggcagggcatagctgaacaaaaggcagcagacaacttctgcagacttaaaagtccctgtctgacagctatgaagagagcagtggttctcccaccatgcagtttgagctctgagaatggatagactgcctcctcaagtgggtccctga

SEQ ID NO: 600868 - DNA, 776 bp, Homo sapiens
  misc_feature (450)..(450): n is a, c, g, or t
  misc_feature (527)..(528): n is a, c, g, or t
  misc_feature (581)..(581): n is a, c, g, or t
  misc_feature (682)..(682): n is a, c, g, or t
ggggctttctcattcaaaacagcggagggggctcaacttttatagcccagccaatcgtggtctaaattaacggatcttggttcttcaagctctacaggcagtgattctagccgtgacgcagccaaaatgtttatgagggaataccgagttagctccagaaaaacccgtaaggaattatacaacaggtgagacttacagtgccatggcatattgtaaacagagcagaaacagcggagattatctcatgttgaagatcagaaaaaagaagtctcaaaggggatcgccattttaagaggccctacctaactgttattaaaaactcttgaatggctccttgaggtgaaaggactccagcatgaaatgcgttttctttaaatacagcacaatggactcagttgttggaacagatttctgacgattgtgatgcagataacaacacttgaaaattgngcgccttatatataaaacctggcccgattttaaatgcttaattcaacttttacatagactttggcgcgttaacagannccaactattgatgtttgaatcgcggaggatttgaggccagtacttttttttangggcaattttataattctggcgaagttaacgtaattttactatgggctatttggctggccacacatatggtgaacaaatttgtcatcccaagatagagacnaggataaccattttgtgccttgggcacatccccttttaccgaggaggtatatgtaggggcccatcggactccttgcttgccaattgaggggatt

SEQ ID NO: 600869 - DNA, 125 bp, Homo sapiens
gggtttttttttggggggggggggttttaggtttttggtttttaaaaccgggcttttttaaggggaccccttggcccaaaatttggtccagaatttttgggcccctttaaaaaggtttattggga

SEQ ID NO: 600870 - DNA, 931 bp, Homo sapiens
  misc_feature (47)..(47): n is a, c, g, or t
  misc_feature (69)..(69): n is a, c, g, or t
  misc_feature (102)..(102): n is a, c, g, or t
  misc_feature (203)..(203): n is a, c, g, or t
  misc_feature (207)..(207): n is a, c, g, or t
  misc_feature (227)..(227): n is a, c, g, or t
  misc_feature (244)..(244): n is a, c, g, or t
  misc_feature (255)..(256): n is a, c, g, or t
  misc_feature (271)..(271): n is a, c, g, or t
  misc_feature (299)..(299): n is a, c, g, or t
  misc_feature (303)..(303): n is a, c, g, or t
  misc_feature (320)..(321): n is a, c, g, or t
  misc_feature (323)..(323): n is a, c, g, or t
  misc_feature (326)..(326): n is a, c, g, or t
  misc_feature (335)..(335): n is a, c, g, or t
  misc_feature (393)..(393): n is a, c, g, or t
  misc_feature (419)..(419): n is a, c, g, or t
  misc_feature (512)..(512): n is a, c, g, or t
  misc_feature (563)..(563): n is a, c, g, or t
  misc_feature (591)..(591): n is a, c, g, or t
  misc_feature (626)..(626): n is a, c, g, or t
  misc_feature (784)..(784): n is a, c, g, or t
  misc_feature (801)..(801): n is a, c, g, or t
  misc_feature (818)..(818): n is a, c, g, or t
  misc_feature (828)..(828): n is a, c, g, or t
  misc_feature (891)..(891): n is a, c, g, or t
gatgccacaccctttctctcagaagccgggtctctgggagacggganggagagaagggggtagcctagnaagacgcagctccccctcagccacaccaccccnccgcagagaggggacagaaaaggaaaaaggaaggtgacacaggactggggttcaaatactcagaaagccacacaataaaagaaaagaagtagccagccccnaagnaagcggggacaaggaggaancagtgtccgttcccgcnctcttcccagnnggggcactgcgtccncaggactccgtggggtaaggggtttgtntgtnatgtgaggtattttttnngngtngaggggctnaaggctggacccaccctgcccttggactcctgggctcagggcacgtcaggcccgacgngcccctgcagtcggcagtgatggggncagtggaggcctacagcttggtcaggtccagtttcagcttgtagggtggtaggctgtcctcacaggcgtgggacggcggcgggtacaggggcnattcgggctccatcatgaagcccttgtgctgctccagggtcagaggctggnacttgaggtgctggtcaggcgcggtcancagggtggagcagctcagccacagcatcaccagcncggagaggaagaggcagcaggccaggatccagcgaggcagacccgagcgcctgccccgcccggcaggcaccactcagctgcccaggccgggaccagggagacccgtacctccagtcccacccccctcccacccccaaggtcctgccacccaccggganatgcaactgaggaagtnattgtcctgtggctctncagactccancttggccttgctgctggtcttgactcagatcttggccttcctcaccttgtccagggggcctanagggtccacgtgcacctccagggcttcagggtgggagctc

SEQ ID NO: 600871 - DNA, 185 bp, Homo sapiens
gagatcaggggggagaatccagatgacatctgaaatcacattacagaaaatacaacagacatgagccaaaaatctgatcttactagataccttcaggatcaaatccaggatattaaatatgtacaaaaatttcaaatgatatgcagagtgctgcatatgtgtacagacaaaccatgaatggcaca

SEQ ID NO: 600872 - DNA, 1020 bp, Homo sapiens
  misc_feature (239)..(239): n is a, c, g, or t
  misc_feature (823)..(823): n is a, c, g, or t
gacaatatactgcataaactatgaagaataggttcaaatgtgatacataaatacacatattttatagataatgtatatacagtgatcatggttaaactacccttggactgttttagagtgaacatgacctttgaataatagcagttatgttagatgtagtgcatggccaaacgttttcctcatgtgaggagagatagatgtcacaaatgtctttactgatgagaatggaccaccaggcnttgcgttgaattatatctattattaaagccaatcaatatgtaacatattataagtgtagacgtcttgatagaagggtgaatgggacagcgtgagattaccatggtgctaatccgatttattgggttctactcttgataatctcttgatacaaatagcaatacctctgtagacaccacactcatacacacccgaagtacaaataaggtaccaactaaggcttgcacattatattctatgttcacacatgtgatccagggtatgctcctagacttattgggcttccctcgagtctcgagctaggaagacgataacgcccttcgaatacggtcagttgggcagggagacacggtaatttatccacagcaatgctgaggtgctcacagttctattaacttctaagaatgagaaaaaggatcatatctagagatgctccagcagatagaagtgaataggtgaagctttctcatcaaaaatacatgtgcggtctactgtgagactagatagtcgattgaatgaagatacctgttggtattgcgagcgagtagttggtgtgtccgctcgtgctaagaaaggggaaactaantctggcgtaaagaattaaggataatagtgtataacctccgaaaagagttgccaaaaggatttggacctttagatggtgagcaatgaaatttcccttttccccgagattggtcaaccgcgtaaacaagggtctaagtggaagggcatttgaaacaataatatttaacgaagtaaggggttcatttcataacgactgta

SEQ ID NO: 600873 - DNA, 311 bp, Homo sapiens
gtcgcgcggccgggtggctcgggtcggtaccctgggcgcggacgagctgcctcattagtattcgtacccacgaggcggccacgggccctcggggacagcgagcgtcgcggccatggcttatcactcgggctacggagcccacggctcagagcacagggcccgggcagccccggatccccctcccctcttcgatgacaccaacggttggtaatccgagcaagccgggggaatacccagccacaggagcagacgtggccttcagtgtcaaccacttgcttggggacccaatggccaatgtggctatggcctat

SEQ ID NO: 600874 - DNA, 1788 bp, Homo sapiens
ggaacaaagctcgtcgtgacaggattcaaccggaaggagcattctacaaacttctagagttagagcagctcaacactcgctggcatctggacgaacctggacgcaggctcacacgactgctcacttgacacaatgcacaccgacacgactcgccttctcaccctgaccctctcagccctccactgccacgtgctccagagcactagcacactcgtctgtccactgccctggacggggctgactccgacactcactctgcctactgtgctctgcgaacagccctcctcccaaccgctcacctgcgaacactgacactgaacagataccttacctcacagaagccacctattgacgaccacagccacttagctcattccatggtcatcaacgaactgccagaggagcccatcaaggcgtctattctcttcttgccacaaactgacgccggcgcaacgaaagcaagaccaacttcatcgtcgactgtattacgcgtaaactactttcaatttgtctgtgccactctgctacaccaacattcttactctcatattcaccaccaactgctaatgcctgtatgctgctgtacaccaccttcccgccccctctgaacacatcacccctcactccccgcttggaccctcctccgcactttttcacacactgtcctcccttcccgctcgcaccccactccgcctcccggacctggcgggcggcacgtctccccgctctctcttcttgggcccaccgtgcctccagccgcccgctcctcggctcgcggaccacgcgtgcgttggttctcacccacggtcgcaaggcccgcccagtctctgccggccccgaaaaggtcgttttagccccccgcgcacctgtccgctcaccacccctccgtcgcgcgccctcgcctcctgtcgtcttgaccacccctgcttcttgtatatttgtttttgttttctcctctccccatctcctcctccgcctccccccccccgcccccctcccacacctgagcacacgcctacgcacacaccaacacgccacaacccagaccacgcacctcccaccactctacaacctccttctgtccttctctctcctctacgtaaccgctcctccctactccgcccctcacacgacacccgacgcctcacccgacctccacctgcccctgcttctaccctcccagccgggactcccgcgccgccctcctctcctccctccctaccaccacaaccctcgctcctcctctgccctctcacccaccctccgtccgcccctccgccgcggcctgccgccgcgcgggccgcgccgcgcggtgcccggggccgcccgcgtagtcgtcactctcccgctggtcccctcccgcctcccgcgtccccctcctcttctctccgccttctcccgtcccgtccccctctctcccggccgcctcctcactctcccgccccccccgcggcctccccccccgcccgcgcccgcggcgcgcgtcggctgctgcggtgcatgggagtccgctggagagcgcggccgcgttgctgcgcgctctgctctgttcgccttgctctcccgctctctcctgtctgtgactcgctctctcgctgtcgcgcctgcccgtgccctctcttcccgcccccctgtcctcttcgcgtccccgccattcgttcctgcctctcccgtctctcgcgcgccgtcggcggtcggctgcgttgcgcggtggccgcgctggctgtctgctcctcctcagtccccgcggccatgcccgtctgtacggccgcgcgcttgttcctcccg

SEQ ID NO: 600875 - DNA, 133 bp, Homo sapiens
tgtttttcgtttaaaaaaaaaaaaaagaaataggacagggcgagagagaattcgagaggacgcgaggtctgggagaaaccagcagcaccaaaaaagaggacgctagagatggcagtaagatcggggtcttaat

SEQ ID NO: 600876 - DNA, 342 bp, Homo sapiens
tgaaaaaacccccgggcccttttttttttagttgggcctttaaaaaaccccagaggggaaaatccttgtggagggggaaacgggggtggggaataaggggggggggggggggaaaaggggggaaaggaaaaccccccaacaagagaatgcccctctccacaacgcctaatgcgcggaggacaccacgcgaaaatcttgatcacctccgagtctaaccccagcaggggtctcccgggtgtccgcggggtggcacagagagcctggccgcacaacacaacctccgggggggaggggcacggcgccctcataaaaaagcggcgcccctattggggggaaaccgcc

SEQ ID NO: 600877 - DNA, 100 bp, Homo sapiens
gttcttgacttcaggtctgtctgtgctgtgggcaagctaactgccgtacggttctgatcccgtgtgctattagattgctttgtgaaacgacgggagttat

SEQ ID NO: 600878 - DNA, 423 bp, Homo sapiens
ccgttccctccactgccactgcctgcctcagccctgcctcacagcctcaaaggcaggcctgccctcctggcacctctacccaaggttgctgctgtgcagtgccttccagctagggcccacctccctagagctgaggccacatattagggtcacctgatggaaaggaggaaggctcacggtccggggtcccctgccactgcccagctcttccaactgacggctccacatcttgggagtgggctctgatgcatgatgggtcaggggcttctcagttttctacagcccaaatactccccagctccggagccttctatcccaccaggagcaggtataacacaaatccttcccaaagatcttgcggtacctgctgagtgaacaacaccctcaactctttcccacaggccctgggtcccatgctgcagg

SEQ ID NO: 600879 - DNA, 418 bp, Homo sapiens
  misc_feature (246)..(248): n is a, c, g, or t
  misc_feature (286)..(286): n is a, c, g, or t
  misc_feature (297)..(297): n is a, c, g, or t
cctttaaaaccgtccatagccactcaaatcaccggtccaacaacaggaatggctggagcggggctcctggaccgtgcagtgtgtttacgaggatcaggctgggagacctactgaagggggtgtcgaggagctattggcgtgactgcaagatccttgttaaagaccagttgggtcagagcaggaggtgaagagggaccgggtgtccatgcaaggacaatccacgaagaaacccgcacgtttcactgnnntgacctatggcggcatctcactgaacaacgtgactgcntggaacatgcntttttaaccctgggggcttgctgcgacactctgacgcacaacacgtggcaacatgacgcttggaggtcacagattcaacgttgaccagtgtgacgcactaggtccaacgcaaagggttgcc

SEQ ID NO: 600880 - DNA, 257 bp, Homo sapiens
aacgcgctgacagtctccaggaaaggagcattcattcgacatcacggagatgatccgggagaagaaccccgatggctccctgtcagcagcggagatgccccttttcaagctctacatggacatgaccgcctgcttcctggccgctggcatcttctgtgtgtccatcctctgcaggaacacgtacagcgtcttcacgatccactggctcatggagcccttggccttcaccaagagcatctctctcctctcacacagca

SEQ ID NO: 600881 - DNA, 346 bp, Homo sapiens
  misc_feature (40)..(41): n is a, c, g, or t
  misc_feature (58)..(58): n is a, c, g, or t
  misc_feature (82)..(83): n is a, c, g, or t
  misc_feature (212)..(212): n is a, c, g, or t
taccctctctgccccaataccgcccccacttcctcaccgnnctatcctccccagcagnccatttcatctacccaggtgagannccattctctttaggaagataatgcttcaactcctcctttgaattgcccctaacttggaccacatatggtcgtgaaagaaaaaaaaaagaaaaaaaatttaaaaagattttcctttaacaacagagggancatgcattcccgggggtttcagggcgcattcccacatggctcgccaaagggccaaaacttctttaaaggctcattttccctttttattttgtgggagacaggttctcctcctggcacccagggtgggtttgaac

SEQ ID NO: 600882 - DNA, 911 bp, Homo sapiens
taaaaggaatgtaagcctttattcccttgtttttggcaattaaaatcgggtctaagtgggtgtgcttttggtgtggattagtccaaagagaccaaatcccattatcctccgtcggattcctccgactcttccttggtttcaaccattagctgggggctgcacgcagcacgaggacgcatgctgtgtgtgctgcatgcacgccacagggggcatgcagccacaaaaggcaagattggatcagccaagaaggccttgacctttatcagcaatgtggggaatggtgtaacccggtctccacagacagggccacggactgcgtttggtacccctgtgtggatgtatagaatggggtgtccctgggatgcacccacgttggtgtgtgacgccaattctgggcgacgacaagacctctggggccaacttttggcgggccctcggtcggccgggaatctcggagacacagagggctgggttttagaattcccgcgggcccgatgtccccggggaaacgctcgcgggatgacccgggccgtcatgcgtgcaagaagaccccttttttttgctcgacggggggcaaacaggtttgatggtgcaagcaccccaggtgtgactgttgtgaaataaacccctggttatctgcggcgcccccattatgtgttggtggtccccgggttgtttccccaaggaattggccctcatgaaacaagctccccccttgggcacagtttggtttcccgcgaccatatttgtcttccccacgaggggaatgtacccgcactggtatagaatgtttttgcgtacgccacacaagagagggatggtggacaccaagggggggggctggctacggcgtgctaacgcggcctcacctacacgtgggcgcccaaattgtttgtcggaaaacgcccggg

SEQ ID NO: 600883 - DNA, 112 bp, Homo sapiens
cctgtggcgcatcgggtggagcatgggtggagcatcgggtggagcatcgggtggagcatcgggctggagcatcgggctggagcctcgggctggagcatcgggctggagcatc

SEQ ID NO: 600884 - DNA, 857 bp, Homo sapiens
gtgctggggcgtgcagtggccggatgcatgtgactgagaccctgggtgtggcgtccgtgccctcgcagtggagtggtctgtccagtggcatccgcggtgagacgacaaagttgccagacgtgcagcattgccactgccagtgcatcctgccagtgccaggaatcattgtggactgcccgatgtgtgcacgactggatgtgcccccctgtgcctgtccagctgtggcagtccacccgcagttccagtagcggacataacccagtgctctgcgagccatttctatcggtgagatgtggagcgccatggtcgatcctgagagctttgaacgaagaatttggcagagccggcgcgtattgattggcttgcgagtgtgaacttggaccgagccagcagcggatggtgtcttgtcgttgtataccctgtggctaccctgccaggcccatggctgcattgggtcttgcttgttgatgcgagcatctccttggaacctccgacttggctcgtgtggttgtggcttggtgcccgtacgtggtcggggctgggcgcccactggggacttggatgcacgcttgaaggtccttccggtgtgtgcctggaacttgggacgcgggcggagacccttgcggtcaacagggatgacgtacgagactgtggtggaatgtcccgaggagcttgccttgtgtctgagcgtatcaaaccaatgcaaacctccaatgtggatgatggagtggatgcaaagactgggacagcaagggtacgtagtgctagtagtgaccggaaggaacgtgtctaggaagggaaaagataagcaaatgaggtaagaggacagcctaaaagacgaatgcataagacagccg

SEQ ID NO: 600885 - DNA, 244 bp, Homo sapiens
gaacggtgagatgctcctcgtccatccaccggtccccacaagtagagagagtgtatccacctcatcataaacctgaggaacagacttaagtacgccctgacaggagacgaagtaaagaagatttgcatgcagcggttcattaaaatcgatgacaaggtccgaactgatataacctaccctgctagatacatggatgtcatcagcattgacaaaacgggagaaaaattccgtctgatctatgaca

SEQ ID NO: 600886 - DNA, 166 bp, Homo sapiens
tcgctgccggtactttacgactatacactggacgtttacccaccccgactttgggcacgcacttcccacagcaaccccgacctccgggacagacccggagcccggcgcgccgggggccgataccggacctcacaccgtccaccggagcggtgggtcagcacataag

SEQ ID NO: 600887 - DNA, 202 bp, Homo sapiens
tataaataaccttagcctaatgagcatgcctgtgattgggttgacagtgagggtcatcatgacttgtcggttgattgtacatttgggccgttaattgtcagtccagtgttgaatctgacgcaagcttatgcggagcagaatgttttcatgttacttctactaacattagttcttctatcgggtgatcgattggtccgagcgg

SEQ ID NO: 600888 - DNA, 428 bp, Homo sapiens
gtcagacatcttcctcggcttcttctgtgagggtgtaaacagtgaggtactcgaaggatgagagttaaaccaatctttctatgaattggttttttactgttatgggaaatggaagatacgtaccttcatgctataatgaaggacatttggaccacttggaatatcaacacttaataagtttctcaaaaatgtatgtttatcattttaacagggccagttaaaaattcaaagctcaaagagactcacacattacagatcctataaataacatggtgaaagttgatcatacaaatggggtcaatcttggcacacccagctaaaacagagtcaagaggctagggggataaagcactggtcacatgacatcgctctgagactgtaattctctgcaagcctgctgctggaactggctggtgtaacctgaaagc

SEQ ID NO: 600889 - DNA, 964 bp, Homo sapiens
gcctggatcgagggtacacttccgactcagaggtctacacttgaccatgtgaggccgggcaatgatacaccgatcagtcacagatgccgatgtggtcaagcgagttggtaggttagtggttgggaaggatgaccgtaagtataacgtccaaggaccagaggacccagtctggccaggaccttcacacctctgggatcaaatcacatcatccagccgtacaccagtgggacgtggtattcggggccatccacgacaggcgtaatgtcgttctggcttgatagctgtgtggaatcggtggtccttcatcgtgcgtgatgctgaccacatccacaacctggacaactttgaggctctgcgtcaatgcacgtgctccggatctttgtcgagagtgccagtctgaatggcgagatgcaatgtcccaggagaaacgtgggagagtcacaacaatattgacgagcgaaaaggggatacgcgtgttccacacgataggaaattcgcactgagggatcaatgcttcgccaggacctcagaagctccatgcaacatgcctctcggggcgttcgagagtgatgatgatgaggaccaagggcgtgctgacatctacattaaggagtcgctgaccagggcagtcagggacttgctaaactgatgacaccctgtaccacgaggggcaagactctatctaaaggctcatgggcgtgggagctatgccacactggagactggtggccacgaacaatcgaagtgattctcgagcctcttggggccacaagctggtgccctttactggagggtatttgcttgctgtgtgaaatgccccggagcaggcacggggtgcgcaggcatgactatcttgcggggagcacaactggacatgattctgaacagtatatgcctggaatggagtccggtttaacaaggggggtccttaatacaagtcttgagaacatcgcctccaatttga

SEQ ID NO: 600890 - DNA, 1743 bp, Homo sapiens
aaatataatttattgaggcctttgggtggcaccggggccttcattcgattgcatttcccactcccctcttccacaagtgtgattaaaagtgaccagaaacacagaaggtgagatcacagctctgctggcagagattactagcccttggctctctcgtttggcttgggtattttatattatttctgtcataacttttatctttagaattgttctttctcctgtttgtttgcttgttagtttgtttaaaatggaaaaaggggttctctgtgttctgcccctgtaattctaggtctggaacctttatttgttctagggcagctctgggaacatgcgggattgtggaattgggtcaggaaccctctctggtattctggatgttgtaggttctctagcagtctagaaatggatacagacatttctctgttcttcaagggtgataggaaccattatgttgagcccaaaatggaagtaataataaatgcctcctggaggctgtgggtgtgggggattctgtatctggattccgtatcactccaactggaggctgtgggtgtgggggattctgtatctggattccgtatcactccaagtggaggctggcaggtttttctgcaagatggtccagaatctaaaatgtcccattaatctggtcacttgggtttggctctgctgtatccatctatagtggtagagacccaccagggctcaagtggagtccatcatcctcccacgggggcctgttcttagtactgagttgatcgctccatgggggagagatcagacattccttatcagagatgatgtgaccttttctgactctgcccagtctctatgaatgttatggcctagggaagaatcatgaaactctttagcttgattagatggtaaacagtgttaacccatcctttactacagaggcatatgggtttgaatgttacctggggttctctctattgagttgagccccttcttcctttagtgggttttggacatcttctggcaagtgtccagatgccagaaccttcttttcctctagaagggatggtgcttggtaaccttaccttttaaaagctgggtctgtgacctggtcttcccatccctgcattcctgtctggaaccagtgaatgcattagaaccttccataggaaaagaaaaggggctgagttccattctgggtttgctgtagtttggttgggattattgttggcattacagatgtaaaagattgactagcccataggccaaaggcctgttctagttgaccaagtttcaagtaggattaagaggttggttgaggggtgcagtttctggtgtaggccaggtaggtagaaagtgaggaacagggttgcctcttggctgggtggagtctctgaaatgttagaagaagcgctgaagccttgattgatagttctgccccttgttgccctggggcttatctgattatgggacgagggtagaaagtaagaagcacttttgaatttgtggggtagaacttcaacaataagtcagttctagtggctgtcgcctggggactagtgagaaagctactcttctccctcttccctctttctccccatggccccactgcagaattaaagaaggaagaagggaaggcggaggagtctataagaaggaatcatgatttctatttagcagattggatgggcaggtggagaatgcctgggggtagaaatgttagatcttgcaacatcagatccttggaataaagaagcctctctgcgc

SEQ ID NO: 600891 - DNA, 191 bp, Homo sapiens
  misc_feature (67)..(67): n is a, c, g, or t
  misc_feature (88)..(88): n is a, c, g, or t
  misc_feature (113)..(113): n is a, c, g, or t
  misc_feature (121)..(121): n is a, c, g, or t
  misc_feature (142)..(142): n is a, c, g, or t
  misc_feature (152)..(152): n is a, c, g, or t
cctgtacaaccagaagcgacacaggttcctttggtatcatccacaagtaaggggtacacagcatctnaacccttgtaccagccttctnatgctacagagcaacgaccacaganggaaccanttgatcagattcaggcaacantctctttaantacagaccagactacagcatcatcatcccttcctgctgc

SEQ ID NO: 600892 - DNA, 417 bp, Homo sapiens
gttggaacttttttttttttgagacagagtctcactctgttgcccaggctacagtccagtggtgcaatctcagctcactgcaacctccgcctcccgagttcaaatgattctcctgcctcagcctcccaagtagctggggttacaagtacgcaccaccatgcccggctaattctttgtatttttagtagagacaggtttcaccatgttggccaggctggtctcgaactcctgacctcaggtgatccacccgcctcagcctcccaaagtgctgggattacaggcaggagccaccacgcccagcctaaacattttcatcttaccaagaattcctcaaagaccctgggtgctgccacaatgcaaatgtggtcacatttataagaagggagtttatatttacaaggactggcatcacattct

SEQ ID NO: 600893 - DNA, 487 bp, Homo sapiens
  misc_feature (142)..(142): n is a, c, g, or t
  misc_feature (216)..(216): n is a, c, g, or t
  misc_feature (218)..(218): n is a, c, g, or t
  misc_feature (301)..(301): n is a, c, g, or t
tccaaccatgctgtactgctttctggatccatgtaaaatttctaagaataaatttacagttgaacttaacattctacagtgaaatgaattatagacaaagaatatatataatactggctgggtgcaccggctcacgcctgtnattccagcacttcgggaggctgaggtgggaggattgcttgaggcctggagttcaagaccagcctgagcaacatngngagacactttcctctacaaaaaaaaacaaaaaaactggcccatggtggcgcacacctgtggtcctagcctatagacccagttnctggggaggctgagacaggagggttgcttgagcacagaagttcaagcctgcagtgagctgtgattccaccattgtactccagcctgggtgatagactctgtctcaaaaaataaagtcagatggaatcatgctttaatactagatatatggatcattgagactgtctcaaaagaataaatgttatca

SEQ ID NO: 600894 - DNA, 409 bp, Homo sapiens
  misc_feature (64)..(64): n is a, c, g, or t
  misc_feature (138)..(138): n is a, c, g, or t
  misc_feature (140)..(140): n is a, c, g, or t
  misc_feature (223)..(223): n is a, c, g, or t
tattgtaaaatcatgatgatctctcatttacaaaagtgggccaggtatgcgtgtcacgcctgtnattccagcacttcgggaggctgaggtgggaggattgcttgaggcctggagttcaagaccagcctgagcaacatngngagacactttcctctacaaaaaaaaacaaaaaaactggcccatggtggcgcacacctgtggtcctagcctatagacccagttnctggggaggctgagacaggagggttgcttgagcacagaagttcaagcctgcagtgagctgtgattccaccattgtactccagcctgggtgatagactctgtctcaaaaaataaagtcagatggaatcatgctttaatactagatatatggatcattgagactgtctcaaaagaataaatgttatca

SEQ ID NO: 600895 - DNA, 924 bp, Homo sapiens
cgtttttttgtgtgtgtttgtttgtgaaggacggaccaacaggcagcgacagcaacagacgagaaacgcccggtagtagactctcttctgcgtttttgtacctgcctcttgcgatttccctctgaatgtgagcgttttcctatgagccgattggccactattgatgctgtgtttttaaaattagaggccctacctgtatggccgagaattgttttattctccggccacctgaatttaatgcatacatggagtattatttgcctacgcccgagggaccacttgagtacccgatctcacaactggggaactgtcaaagacgaattaactgacttggatccatcaaaagtgactgaggaacacctgaaggtggaggacagcagcccgtggccagacactggaaataaggagaatgaagttgaagaggtaaaagaggagggtcccaaagagatgactttggatgagtggaaggctattccaaataaggaccgcggccaaagtaggatttaatatccggaaacccaatgaaggtgctgaatgggcacactggaagaagggatttgtttcttcataaatccaagagtgaagaggctcacttctgaagattcggcttatggaccactcactttccggaagccacgccaatgatattaacgtctcacgctggagatccattttggagagccttggccgccccggagcgtggcggccaggggaggacgaggtggaacgtgggcgtggtgggcgccccaaaccgtggcagcacggagccgaaccaaattcaaagtgcttttgctctctgatgtggatgaccccgaggcattccccgctctggcttaactggatgccctaagaccaccctggttccctttgtgaacccttctggtccaagcttttgcatgcttaaggattccccaacgactaaga

SEQ ID NO: 600896 - DNA, 1377 bp, Homo sapiens
gcgccatgatgcaatgatcagcgaggcctgtgaatgctgctgcccgcgcctgcttcagctcgtggcaggaccctgtccgctgcagttcctggatccagcatgctgtgatgtgctgctgcatgctgccttgcatccatgtgatgcatgtgatgcatgtgatgctgtgtgtgtgctgctgctttggcctgcaggactctgccacaaggacatgaattgtgaatctgcctaactaatagatgtgaggtggttgtgttgtacgtgtcctagatgtgatgatctgatgttacagtgataccatgaatgctacccttgagttggtgcctgctggacatgatgccctgttggacgcaatggactgccccgagacttcatggcatgtgactgcagctctaactatacgcactacgtgagaccactagggacgtaggtacctacggtacatttggacacctgtgtgtaactaacccctatacaacctacacgcataccatgcccatggcttggtgctctgctcattacgcctagcaggggcaactgccagattgtgtctctcaagtgtcgcctacgtgaggctagcattttgatgaccgattgcgctgatgcctggactgcgcctaactcatcatacccaccatgttaccttagggcacgacacgggctctttgtatctcgcaggtaacatcaaagtgtgggcgcgatagtccccgtggaggaaccaactgtgaagactaggcattcgcaatgggcacgaaggggtctccgacaccaagttagtcccgtggtacccatctggcgacatggccaccctgcggcgcgagcttggcggggcaacatcgcatccagtacagtggcaccgcggggcccttggcttggcccacaacggccaccacattgagcccccccgtggtcaacctaggctgtgcactccattcgcggcacgggggccatgcacgctccccgtagccctaaccgtgggcaccacgaggagaacgctatgcgttggaaccgttgtgggcaaccagtgtttggacaccgttgggccatggaccgtggccagtacatggccctatggggtgccggagccacaccacgctagccagttgcgaaaccgcacggatgggggccccagcagccaccccatggcgctgataggtgcgcagcacgcaggtggaagccgtaaccggaactcccgccatactcaggtgctggtagaacgcacccccgcctatcgagacacacacaccaggaaaagacccgcaagacaccgacttggcggagcggaccgacaaccggcaccccacacgggaacaggggctaccacgctgggggaacacgtgacaggagacccactaccaggccgacggacaagagacgaac

SEQ ID NO: 600897 - DNA, 842 bp, Homo sapiens
  misc_feature (842)..(842): n is a, c, g, or t
gggggccttcgccgccgcgcccccagcacggccctgccagcatcgccacctccgccgctgccgccttggggccctcctcggcttcaccgcccccttcaccaccatctacactgttctaggccttctgtcctggagaagaagctatatgtcgttctcccttgtgggccccggggactgcagccataggcggacggcaggacgagcgtgcgggggaactggcgctggtgggctgtgctgtgcgtgaactacgtccatggcctctgcccggtgtggcaggctgacttgtggcgctacctggaggccatgctggttgtgcgtgtggccccgatcagagcccgtgccctcgccttgccgtccactgagacatgaacccacgacagggcttcagttcagcctcattcacttcgatggggaggcaagggcttccaaaagaagaccctgggagtgccccttttatttgagcaaaggctttcacgggtcctgagggaaccttagcccattggggcccgaaccgggttggggaaccaaccccagaaaggccccaggccatatataacccaacaacgaccccattggaagcgcaccagggaagcacacgcttggggaaataaagctgtatggagggtagcttcaaacccacccaaatttcgttgggggaagcgaaaaggccaaagggcaagacttgggacacagttcccctttaacgggaagttagcaaaagtcaagaagagaaagcccgaggattttggacacgaaacaattggggtacctttggaatggtgagcaatgaaatgagattggataggggattttcaatgagtttcaagggtgaatgaattggn

SEQ ID NO: 600898 - DNA, 202 bp, Homo sapiens
tcgcggttaccgactgcaatctgtgcctctactaaaaaagcaaaatggcggatggagtggctcacacctgtaatctcagcacttcagtgaggctgacatgggtggatcaccgtgaggtcgggagttcgggaccagccatgaccaaccatcgtcagtaagagaaaccccgtctctactaaagaatacaacaattagcctgggc

SEQ ID NO: 600899 - DNA, 411 bp, Homo sapiens
cagccaacaggatcagagaccagaacttagattatgacaaaggcagcagcggccccttgccaaaatccgacagaggtctatatatgacatgcagtatgagaggaaggcgccaccatctgcccagtggtgcggtccacatagatgaagtgcaccaagcctgggaagtcttctaggtcggacaccatggtgatgttcctcctgctcttcaccagcaagaagtccttccagtccgtcagcttctcccgcatgagcctctgcacttggtcctgcaggtgctggggcaggtgtgggcctcccctgctgggggctgtggtcagaaagttcagccggtcgatggcgcagagctgccgcttcagcttcccacatgcctggagcagatcccaggaggatccgggctcacttttggagaaa

SEQ ID NO: 600900 - DNA, 261 bp, Homo sapiens
gggggtaaaattttttcccccctgggtggccttaaagccgccccccatttaaaagggggtttggggttccccccccctcccttaaaatttcccaacaattttttgggttccttcccccccattgggcccttttttcccccctttggaggaattttgtttggtttgggtacctggaaacttttttccccgggtagggcggggggggtttttaaccctggattggccatttacgggcccattttttcctttccccccccggga

SEQ ID NO: 600901 - DNA, 113 bp, Homo sapiens
  misc_feature (4)..(4): n is a, c, g, or t
acgncgacatacgctctagacggcaggctgacatctgcacttaacaggaccaattctgatcgtcttcacacgagtgctctgagtaccaagccccaggacccctatggaggagg

SEQ ID NO: 600902 - DNA, 382 bp, Homo sapiens
gttctctggagcagcgttcttttatctccgtccgccttctctcctacctaagtgcgtaccgccacccgatggagggttcgatggacatggacatgagccccctgagggcccagaactatcttttcgggtgtgaactaaagggcgcacaaagatatattcactttaagggggggtaatgatgaaaaatgagcacccagtttatctttaagagcgggtgagatttagggggctcggtgcaaagggtgaggttgcacaaatgtttaaggagagggcactgtatttacgcggggaggtgcacttaaagtgagcactcgcgcatcttggaaatatctggtgcagcacacagggttccctttggggggttttaataaccaaccacccc

SEQ ID NO: 600903 - DNA, 302 bp, Homo sapiens
tccatgccactgccctccagcctgggtgacagagggagactcttatttcatcaaaacctaacacttacacacgctcacacacattcacacacacactcacacactcacacacagacactctcactctcattctcacacatacacccacacacacacttattcactcgctctcacacatcctcactctcacatccacactatatcccctcctccttaattacactccctcccaccccgcacagaaattgtttcacttacttgacacctcatctccacattctcacactcaagggaagatccaa

SEQ ID NO: 600904 - DNA, 275 bp, Homo sapiens
tgggcccctgcaaaggcacacaggggccggccacacccaggggccccccgcacaaccccccgtggggtgttgcccttatgcccggggccgggccccaaccccatgtttggggtttgtttgggtttgtttttcaaaaaaaaattcaaaatgcggcttggattttgaaatttccgggaacggtcaggggacacgtttggaccccgtttcatttttaccccaatttggtaaaaaaggtgttttcaccctcccccaattaaaccgcatgtgttttccca

SEQ ID NO: 600905 - DNA, 405 bp, Homo sapiens
aataatttggacagtatttgagggtttaaaaaagagcagcaggccgggcgcagtggctcacacctgtaatcccatcactttgggaggccaaggcaggtgaatcagttgaacccaagagtttgagatcagcctgggcaaccaaaacttgtgtctacaaaacatacaaaaattagccagcctggacaacaaggcaagatcctgtctcaggaaacaacaacaataacaacaaaaacaagcagcagagctttccacttttgcttgggttattattcaaatcatatactcttcccgaattgttgaaaagaagtgtcatatggatcagatattatctaaggacacgttcattaagatgtctgccttcagtcctggttcaggacttaagaaggtgagactcttcatcttctg

SEQ ID NO: 600906 - DNA, 132 bp, Homo sapiens
ttcgcatgtttccccagcgcagtagtcctggagctgtgaggagttcgggccgtcaccctgcctcccctgtcgtaccgccaccgggcgcttctgtcctcggacccgattccaacaatctcgtaaaacatggcg

SEQ ID NO: 600907 - DNA, 674 bp, Homo sapiens
  misc_feature (554)..(554): n is a, c, g, or t
ggcggtggctcacacatgtaatcgtagcactttaggaggccaaggcggggatctcttgaggtcaggagttcaaaaccagcctggccaacaaggtgaaccccatctttactaaaaatacaaaaaaattagccaggcatggtggcagacacctgtaatcccagctactcaggaggctgagggaggagaatcacttgaacacgggaggtggaggctgcagtgagccgagatcacgcaccattacactccagcctgggcgacagagcaagactctgtctcaaaaaaaaaataaataaattaaaaataaaaagttgatctcatagaagtagagagtaagccagtgcttaccagagactgggaaggggaaggtaggaagagatgtggttaacagacacaaaattacagctagataggaagaattaagttctagtggtctaaggccctgtagggtgaaaacaaatactaatgtatggtgtattttcaaatggctggaagagaaaatttttaatgttcccaatacaaagaaatgaaaaatgttggaagtgactgatatactnattaccctaattggaccattacacatcattaaatatcacaccgtatgccataaatatgtataattttggtcaaaatcataaaataatgtttaaagtccattttcaatttgtctatagata

SEQ ID NO: 600908 - DNA, 517 bp, Homo sapiens
tagattaaccccttcctctcctcccacctcttcagcttctgctccacttcctcctcccttttacgcacccctccttgaagtggttgtccctgctggctacttctccgaatcttcacctccattccctcttagcctacaccagccaagtttttgtttctgtcactccattgaaactgcccttgtccaagtcaccagtgacctcctactggcgcatccaaaaggtctgtctcctggtctcacctcctcaatttctcagcagcgtttgcacagtagggcactcgctcctccttgcaacgctgtctttctttggagtccaggactccacactggtctggcttcctcctacccggatggcagctctttctctggctccttcgctggctcctcctcttcttgatctctaaatgtgagcatggtgtggggacttttttcttatttacagtctctcccggttagatggttagattccatctaggcctgtgcctttaaatgtcctctagaggtgggaggagaggaa

SEQ ID NO: 600909 - DNA, 581 bp, Homo sapiens
  misc_feature (31)..(31): n is a, c, g, or t
  misc_feature (66)..(66): n is a, c, g, or t
  misc_feature (105)..(105): n is a, c, g, or t
  misc_feature (115)..(115): n is a, c, g, or t
  misc_feature (124)..(124): n is a, c, g, or t
  misc_feature (129)..(129): n is a, c, g, or t
  misc_feature (141)..(141): n is a, c, g, or t
  misc_feature (173)..(173): n is a, c, g, or t
  misc_feature (195)..(195): n is a, c, g, or t
  misc_feature (200)..(200): n is a, c, g, or t
  misc_feature (209)..(209): n is a, c, g, or t
  misc_feature (251)..(251): n is a, c, g, or t
  misc_feature (299)..(299): n is a, c, g, or t
  misc_feature (318)..(318): n is a, c, g, or t
  misc_feature (555)..(555): n is a, c, g, or t
atcaaaccataaaacggtcagacccagcatnctagccaccccaggacaggacagacagatatgaanagaaacggacgcagacccacagacacatacaccgagacncacgatgatnctccaagcncaagngcctccactggnctgcacaagcagggatcagtcagagccaagantggaaatactcaagcaaatgcngaggntacaacccntccctcgactctaagccccaaacccacaatgtccccactgtncgtccagaggctccctccccagggcctggagatccgggcccagcaaangccgtggaaagcagaagtnagttagaagaaaaaaccgccagagcactcaggatcacccctgggagaaggaaggggcaggaggcagaaagggagggaggcaggcagtccttctgtccatcctttgtcacacaattgcccggaacaggaaggagaaaacagcccccagtgccagaaccagatacaggaagaaggccatgatggctcctgcggtctctgcctcagctggcttcactttcttgggcccgaagcacatgcngaggctggcgaggtagccgttggaga

SEQ ID NO: 600910 - DNA, 104 bp, Homo sapiens
cggacgacggaggttgcagtgacgccgagactcatgccactgcactccagcctaggcgcacagcagtgcagcactctgtactttaaacacacatcattttttaa

SEQ ID NO: 600911 - DNA, 190 bp, Homo sapiens
aatgactgttgcttttaaagatataaaactatggagaaaactgctaaagggtatccctgacctgtatgatgatgcagctattttcgggggcaaaaaaatcaattttacttgggcaggaaaaacacctcattccctttgtcgggaaaatccttgcctcaggctctttatgaattattttctcccccagatg

SEQ ID NO: 600912 - DNA, 240 bp, Homo sapiens
aactggagcagcacaacagtgaggttacatcttttacaccttttctactgtacagcccatcccagacgaagacatgtccctggatcacctgacagcacatgacatgaatccctgctaccatccatgtgcaactccttcgtagtacaactggaagaaacatgctacccagacaggaacagctggttagtgcaacatgatgtgcatgatgggataatcgccataacacccaattgaatgact

SEQ ID NO: 600913 - DNA, 368 bp, Homo sapiens
gctgtaaagacatacccgagactgattaatttataaagaaaagaggtttaattgacttatagttatgcatggctggggaggcctcaggaaacttacagtcatggcggaaggggaagaggcacgtcttacatggtggcaggcgagagagagaagagggaacaagggaggagcttccaaacagttataaaaccatcagatctcttgagaactcactcactatcatgagaacagcatgagggaaaccacctgcatgatccgatcacctcccacctggtccctccctcaataactggggattacaactcaagatgagatttgggtgggaatacaaagcctagccatatcaaatagtaaatatattttcttat

SEQ ID NO: 600914 - DNA, 385 bp, Homo sapiens
  misc_feature (30)..(30): n is a, c, g, or t
  misc_feature (360)..(360): n is a, c, g, or t
  misc_feature (377)..(377): n is a, c, g, or t
ccccccatgggagcggcgggccccttcccncccttgttttttctctgggcggccggggggggttatattttcccccgggaacacccttgtccctgttggctttctcaaaaatcctttttggtcacccttaagaaggggcccctgcaggaacgctttctggttccgcggggcgcccccccccctcgggattttttttctttttttccggccggggggggcccgccgggttttttccccccccgttttttttttctattttcccaggggggaggggctcttttttttcggggaaaaaaaaactttttttgcaaaattcttgtccccccacaaatttttttttttttcaaaaaaaacatgccnaaaataaaatttgtttnttctttta

SEQ ID NO: 600915 - DNA, 530 bp, Homo sapiens
agagcatacctctctgaagacatcctctctgaagacgctgcactatgctcagtgactgcccagtacattcaccttgcaagtctatgacatctcactggggtaggttgagttgtctattggatactatcatttctttcacaaatcttagagaatccagtgcgccgaaaatatttctgtgtactaccctcaataccagcatataattgattgaccagcaatatgtctcgcggaaatggacactgggttggtttgaagacaatcttaacttctcaaagggtttgcttttcaaaggaagagtacaccaggagattcctctcagccccagggcattcacctgctcccttgagaggctacactccaacctcaggttgtcctctgtctcccattcccagataaccagagttcattccaggccaggagctgaaatttaccagagattctagcatacacagccacagtggatattttgatttatcctcagaaagtactgaaacccaggaccaaggaaaaaactgaagagtgactaagga

SEQ ID NO: 600916 - DNA, 207 bp, Homo sapiens
gtatgaggcgaggtcttctaatgatagggctcttccttaggtgtacttggccatctctccatcccagttccatagttagctagggtccagcatctagctttgcagattccttaaacgcttaagatgctactttccatctcactgctgtctctactgtgtagtctgtgtgagtcttcccatgacgtctgtgctgaacttgccagactg

SEQ ID NO: 600917 - DNA, 223 bp, Homo sapiens
agtgatctaattaccttttatataaggaaccggcaataccctcggtgtctttgacaggcctcccataggctacaccccgtgatggactgactgcgtacagtcagaggctgacgtgcagacttggcccaccgtccgtcagaggctggagtggaggcttggcccaccatccatcagaggctggagtggagacttggcccaccgtccatcagaggctggagtggag

SEQ ID NO: 600918 - DNA, 424 bp, Homo sapiens
  misc_feature (411)..(411): n is a, c, g, or t
taataattataatggttaaaaacaaaaccatgggtaaacaagcccctttccccaaaaaagaaaccccccttcttgcctggggactaagactgccaccgtaggactaacaaaataagccacaagatttaggaattatggtttaggagtcatgcagctggaggctacaagattctgacccgccctaaactgctaagatcagtgcttgggatattttgcagaccctgcacttgatggatcagctggcaccacccagatggataaactggctcatctgatcttgtccccacccaggaactgactcaggacaagaggacagcttcagcttcccattatttcttcttctgacccaaccaatcaggactctcgactttactggccttccccaacccaccaaattatccttaaaaactntgatccccgaatg

SEQ ID NO: 600919 - DNA, 987 bp, Homo sapiens
  misc_feature (805)..(805): n is a, c, g, or t
  misc_feature (859)..(859): n is a, c, g, or t
  misc_feature (878)..(878): n is a, c, g, or t
ggctaggtcgaggctgggtgttaatcggccgaggtgcccgtgcacctgtcccagccgtcctgtcctggctgctcgctctgcttcgctgcgccgccactatgctctccctccgtgtcccgctcgcgcccatcacggacccgcagcagctgcagctctcgccgctgaaggggctcagcttggtcgacaaggagaacacgccgccggccctgagcgggacccgcgtcctggccagcaagaccgcgaggaggatcttccaggagcccacggagccgaaaactaaagcagctgcccccggcgtggaggatgagccgctgctgagagaaaacccccgccgctttgtcatcttccccatcgagtaccatgatatctggcagatgtataagaaggcagaggcttccttttggaccgccgaggaggtggacctctccaaggacattcagcactgggaatccctgaaacccgaggagagatattttatatcccatgttctggctttctttgcagcaagcgatggcatagtaaatgaaaacttggtggagcgatttagccaagaagttcagattacagaagcccgctgtttctatggcttccaaattgccatggaaaacatacattctgaaatgtatagtcttcttattgacacttacataaaagatcccaaagaaagggaatttctcttcaatgccattgaaacgatgccttgtgtcaagaagaaggcagactgggccttgcgctggattgggaccaagaggctacctatggtgacgtgttgtagccttgctgccgtggaggctttctttccggncttgcgcgcagtctgcccagaacgggactgtgctggcccccatttatgactttngccgcacaggtcccgggtntgcgccgcgtcccccggtccaacccggggagaggaaacaccgggggaaaagcccccgggcccgggggcctacacacttggccacggcgccccggtagattgggcgcctt

SEQ ID NO: 600920 - DNA, 1000 bp, Homo sapiens
  misc_feature (774)..(774): n is a, c, g, or t
  misc_feature (782)..(782): n is a, c, g, or t
  misc_feature (789)..(789): n is a, c, g, or t
agcagagagacacatggctaggtctgaggctggggtgaatcggccgaggcgtctgtctggctgctcgctctgcttcgctgcgccgccactatgctctccctccgtgtcccgctcgcgcccatcacggacccgcagcagctgcagctctcgccgctgaaggggctcagcttggtcgacaaggagaacacgccgccggccctgagcgggacccgcgtcctggccagcaagaccgcgaggaggatcttccaggagcccacggagccgaaaactaaagcagctgcccccggcgtggaggatgagccgctgctgagagaaaacccccgccgctttgtcatcttccccatcgagtaccatgatatctggcagatgtataagaaggcagaggcttccttttggaccgccgaggaggtggacctctccaaggacattcagcactgggaatccctgaaacccgaggagagatattttatatcccatgttctggctttctttgcagcaagcgatggcatagtaaatgaaaacttggtggagcgatttagccaagaagttcagattacagaagcccgctgtttctatggcttccaaattgccatggaaaacatacattctgaaatgtatagtcttcttattgacacttacataaaagatcccaaagaaagggaatttctcttcaatgccattgaaacgatgccttgtgtcaagaagaaggcagactgggccttgcgctggattgggaccaagaggctacctatggtgacgtgttgtagccttgtnagtgaagnttctttncggagcttggggaaatctgccaagaacgaggatgatcctggctaattctatgactctagcgagatgggtaccgggattgtggttaggtacactgtaatactggggagaaaagaaataagggcgagaaggcagaggaggacaggagtgctaagattggggaattcgggccaaagcttctcagaaaaagagcaacacccctcaaatcactgaa

SEQ ID NO: 600921 - DNA, 151 bp, Homo sapiens
ctggtttggggaaaactggagcacttactcaggtggctggtgaaatgccccctcaaaaggaatgagtgctataaaaaggaaaaaggagtgtcctgcccaggtttttgacaaatgtaattttcattcaattaaagtttcagtgttttggtta

SEQ ID NO: 600922 - DNA, 420 bp, Homo sapiens
  misc_feature (282)..(282): n is a, c, g, or t
attgggacaaagaggctacctatggtaaggagacccttgcccctacttaaacctgagcttcattttccaagtaatgttactggatttttggcccttgaataccaactcactagaatcatgttggtgacaaagaggctacctatggtgaacgtgttgtagcctttgctgcagtggaaggcattttcttttccggttcttttgcgtcgatattctggctcaagaaacgaggactgatgcctggcctcacattttctaatgaacttattagcagagatgaggtgngtctaagtcaaataatagggtgacctaaaccccaaacacaactcgggcatgctcttgtgttcactgacggggacctgagatgctagatggcatatatccacatttaatgtgtgagttcaccatacacataatggggta

SEQ ID NO: 600923 - DNA, 333 bp, Homo sapiens
aggagtcctcgtttttttaacttattataggtcactctatgatccagagctgtaagatctgcttcttaaaagaacgtccttaatgaaggcaggacctaaagttattttcagttcctagtcctgctttctgtagctgtaggtatgagtatagttggcttgtataacatagaacagtgagattggctccactctggtaatccaaatttacatgtttttcactatagttagtcaaattcatttttatatattaggttatctataaagacttcagttatggtatagaaatttcataactcgctatttgagggttattggaggaagtattagtaatct

SEQ ID NO: 600924 - DNA, 167 bp, Homo sapiens
aatctgcggtgagaaaacatgagactggacggagctggagtgccttcaggaccatctggatacttggtggtgagtgtcgagatatagttggcaacctcactgagttcgaatcagaggatattcaaactagaagccttgctgatagagagcctgttagcccgattatt

SEQ ID NO: 600925 - DNA, 1072 bp, Homo sapiens
  misc_feature (10)..(10): n is a, c, g, or t
cacgctggcnggagcggcgcgacttcctgaaggtccgggattggccggagcgcccgccgctcacggtcaggggttgccggatcccgtccgcgggcgatgctgctgcggagggtggtcgagggaggccgggcggtagccgccgcggtccgtggctcggcaagtaccaggacgggtcttggcagcgccgaagggcacgtccgagaggccgctgtccgggggcccgcacgtaccgggaggagccccggcccctccacccgcatgtggggacggagccgggaggatcgcgcgctggccgccgccgaaggacccctcgctcctctcctccatcggctcttaccgagtccccgccccggaatctgtggaggggccgcttagccttgggagaggaagcagcccggtgaacggccactttcctgtttctcagtatctgccgagcgcctgtgtgcgagccctcctgggctctggggactggccgtggacatggagcggatgatgcccctcgcaggactagttaaataagtgaagttgggggctcgccggttctccagcccggactgctgccagaggcttcctggaggtggcagctttcttcaaaggcaccatcccggagcgcaagcccctgatgggcgcagaaaattcgggacagaccacgtagaggtgggctcccaagcaggtgcggacggcaccaggccgcccaaggcatcgctgccacctgagctccagccgcccacaaactgctgcatgagtggctgccccaactgcgtgtgggtggagtacgcggacaggctgctgcagcacttccaggacggtggggagcgggccctggctgccctggaggagcacgtggctgatgagaacctcaaggccttcctcaggatggagatccggctgcacaccaggtgcggaggctgagccatccctgctggactccctaccgcaggacggagtccaggacgcagccgcagcctccttccttcacaccccctcacagactccttgtgtccaacgggaataggaagaattagttactgacttcacctgagaaaaaaataaattctctatggtggtttca

SEQ ID NO: 600926 - DNA, 411 bp, Homo sapiens
ctgccattttataaatgtcagcagttggaaaaatcgtcacgcctcagacataaatgcacttggaggttcccgttggcaaggggggctaactgtggggcatagtaagtggtccagcatacttaaagtttgagtgctcagtgtgagtcctgtaggctttactctcttccttttatgctaaaattgtgacttccgaacctcaggtggacctctccaaggacattcagcactgggaatccctgaaacccgaggagagatattttatatcccatgttctggctttctttgcagcaagcgatggcatagtaaatgaaaacttggtgagtttccagaccttcgttcaatcgttatgacgttgccgttctgagctcgatataggtcgcatgcctagtgttgatatgtctggggggctct

SEQ ID NO: 600927 - DNA, 574 bp, Homo sapiens
  misc_feature (6)..(6): n is a, c, g, or t
ggcggngcaggtcgccgcggtccgtggctgggggctcgccggttctccagcccggactgctgccagaggcttcctggaggtggcagctttcttcaaaggcaccatcccggagcgcaagcccctgatgggcgcagaaaattcgggacagaccacgtagaggtgggctcccaagcaggtgcggacggcaccaggccgcccaaggcatcgctgccacctgagctccagccgcccacaaactgctgcatgagtggctgccccaactgcgtgtgggtggagtacgcggacaggctgctgcagcacttccaggacggtggggagcgggccctggctgccctggaggagcacgtggctgatgagaacctcaaggccttcctcaggatggagatccggctgcacaccaggtgcggaggctgagccatccctgctggactccctaccgcaggacggagtccaggacgcagccgcagcctccttccttcacaccccctcacagactccttgtgtccaacgggaataggaagaattagttactgacttcacctgagaaaaaaataaattctctatggtggtttca

SEQ ID NO: 600928 - DNA, 3607 bp, Homo sapiens
gccgccgagaccctcaggggctgcggccctggtcccgcgggacctgtgggggcctgggcggcggcgcccccgacccagccagcggacgggccggggggggaaccgggaggtcccggggggcgtccacgggggtgtccccgggggtctccggaaggcgccggcggaggctcccgcgctgcgcttgtcgcgcgcggccccgcggccagcctgggtagggcccaggcgcagccaatgggaagggtcggaggcatggcacagccaatgggaagggccggggcaccaaagccaatgggaagggccgggagcgcgcggcgcgggagatttaaaggctgctggagtgaggggtcgcccgtgcaccctgtcccagccgtcctgtcctggctgctcgctctgcttcgctgcgccgccactatgctctccctccgtgtcccgctcgcgcccatcacggacccgcagcagctgcagctctcgccgctgaaggggctcagcttggtcgacaaggagaacacgccgccggccctgagcgggacccgcgtcctggccagcaagaccgcgaggaggatcttccaggagcccacggagccgaaaactaaagcagctgcccccggcgtggaggatgagccgctgctgagagaaaacccccgccgctttgtcatcttccccatcgagtaccatgatatctggcagatgtataagaaggcagaggcttccttttggaccgccgaggaggtggacctctccaaggacattcagcactgggaatccctgaaacccgaggagagatattttatatcccatgttctggctttctttgcagcaagcgatggcatagtaaatgaaaacttggtggagcgatttagccaagaagttcagattacagaagcccgctgtttctatggcttccaaattgccatggaaaacatacattctgaaatgtatagtcttcttattgacacttacataaaagatcccaaagaaagggaatttctcttcaatgccattgaaacgatgccttgtgtcaagaagaaggcagactgggccttgcgctggattggggacaaagaggctacctatggtgaacgtgttgtagcctttgctgcagtggaaggcattttcttttccggttcttttgcgtcgatattctggctcaagaaacgaggactgatgcctggcctcacattttctaatgaacttattagcagagatgagggtttacactgtgattttgcttgcctgatgttcaaacacctggtacacaaaccatcggaggagagagtaagagaaataattatcaatgctgttcggatagaacaggagttcctcactgaggccttgcctgtgaagctcattgggatgaattgcactctaatgaagcaatacattgagtttgtggcagacagacttatgctggaactgggttttagcaaggttttcagagtagagaacccatttgactttatggagaatatttcactggaaggaaagactaacttctttgagaagagagtaggcgagtatcagaggatgggagtgatgtcaagtccaacagagaattcttttaccttggatgctgacttctaaatgaactgaagatgtgcccttacttggctgattttttttttccatctcataagaaaaatcagctgaagtgttaccaactagccacaccatgaattgtccgtaatgttcattaacagcatctttaaaactgtgtagctacctcacaaccagtcctgtctgtttatagtgctggtagtatcaccttttgccagaaggcctggctggctgtgacttaccatagcagtgacaatggcagtcttggctttaaagtgaggggtgaccctttagtgagcttagcacagcgggattaaacagtcctttaaccagcacagccagttaaaagatgcagcctcactgcttcaacgcagattttaatgtttacttaaatataaacctggcactttacaaacaaataaacattgtttgtactcacaaggcgataatagcttgatttatttggtttctacaccaaatacattctcctgaccactaatgggagccaattcacaattcactaagtgactaaagtaagttaaacttgtgtagactaagcatgtaatttttaagttttattttaatgaattaaaatatttgttaaccaactttaaagtcagtcctgtgtatacctagatattagtcagttggtgccagatagaagacaggttgtgtttttatcctgtggcttgtgtagtgtcctgggattctctgccccctctgagtagagtgttgtgggataaaggaatctctcagggcaaggagcttcttaagttaaatcactagaaatttaggggtgatctgggccttcatatgtgtgagaagccgtttcattttatttctcactgtattttcctcaacgtctggttgatgagaaaaaattcttgaagagttttcatatgtgggagctaaggtagtattgtaaaatttcaagtcatccttaaacaaaatgatccacctaagatcttgcccctgttaagtggtgaaatcaactagaggtggttcctacaagttgttcattctagttttgtttggtgtaagtaggttgtgtgagttaattcatttatatttactatgtctgttaaatcagaaattttttattatctatgttcttctagattttacctgtagttcatacttcagtcacccagtgtcttattctggcattgtctaaatctgagcattgtctagggggatcttaaactttagtaggaaaccatgagctgttaatacagtttccattcaaatattaatttcagaatgaaacataattttttttttttttttggagatggagtctcgctctgttgcccaggctggagtgcagtggcgcgatttgggctcactgtaacctccatctccggggttcaagcaattctcctgtctcagcctccctagtagctgggactgcaggtatgtgctaccacacctggctaattttggtatttttaagtagagatggagtttcaccatattggtcaggctggtcttgaactcctgacctcaggtgatccacccacctcggcctcccaaagtgctgggattgcaggcgtgataaacaaatattcttaatagggctactttgaattaatctgcctttatgtttgggagaagaaagctgagacattgcatgaaagatgatgagagataaatgttgatcttttggccccatttgttaattgtattcagtatttgaacgtcgtcctgtttattgttagttttcttcatcatttattgtatagacaatttttaaatctctgtaatatgatacattttcctatcttttaagttattgttacctaaagttaatccagattatatggtccttatatgtgtacaacattaaaatgaaaggctttgtcttgcattgtgaggtacaggcggaagttggaatcaggttttaggattctgtctctcattagctgaataatgtgaggattaacttctgccagctcagaccatttcctaatcagttgaaagggaaacaagtatttcagtctcaaaattgaataatgcacaagtcttaagtgattaaaataaaactgttcttatg

SEQ ID NO: 600929 - DNA, 207 bp, Homo sapiens
gagtcggccccggtttgatgaagctgtagtttcgtagatctgggtgatttcatgttattaaactcgaactttggctagttacactcatactgatatttcatctagtctcttaattatttaacacttaattcaagtcatttgtttgaagtctctacaaaagaagattgcagtcatccattcatatgcacggggagtgatgctttgaga

SEQ ID NO: 600930 - DNA, 1461 bp, Homo sapiens
gttatctgactttttgaaccatctcttgtttgttcactaacaattctctgttttcttgggtttccacatccctcttttttttattttccctttttttaattacaagtttcatatcatcttttgtaactttattattgctcacatcttttttttgttatgtcctccctaattaaatattgctgttttgtaattctcctgtttctatgttattatttgtattcattcatggatctcttatccccctctttgtgcttctctttgtatgacacaccctgtactgcaggctgttgtcttaaggatactttctctgtctttctgtggttatactgaagccttgtgtgggatgtctgtccgtgaccccacacagcttagggaattcttcctccgtctgttcccgtggaccaaactcggtaccactattgggggggtgttttaatcaacgccatgctaatttatatgccaagcgatgtgacaaacttgagtagtgtgttttcaacgatggcgcacgttggattgtcggttttgcgggccttcatcggcaatgcctatgtgttggaactccttctgctatatgacgccatgcccctagtgattagtattactgacctcacgggtttgagttttagactagttcctcttgttctaggtgtctctgagagaggacgtgctagcttagtatgagtatccctgctgccagcgagtaggagtgaagatagcggccacgtgcctcttgaagaattgtgagtacgcacatactgttgctacatagcaacgactagctctactcttgtggtgaagactacaccgggtttgtattagagtagccctactaagtgttcatcctaccactaatgctgacgcattgacgattgatcacgaccatttccacactgtgacgatccatcatgagttatcgagctacagcgatctatcacagttgtgtcactatcctggagtggtcatagcgcacacgcttacacgtctcaaggaagcaacaacgtctagtacttgcctaccatttgtagtccgtccttcacagggatgcagatattggaggttgctactcctggtagttctgtattggtctagcacgtcacgctcccttatcatgtagtgctacagagtccaaggctgtccctcggtgttttgcccatgctcgtgcgtcgcgttttgcgacacagatcaggttcttatagggacgacatagttggtgcgacgatagtctgttggcccatctatgatggtaccaccacacgatgattgtaatttcggagaacgtcagatctgctcgagcagcgggagcacgcgatgttcgatccccccctgccatatcaagcttcttctcgtggagcctgttcctcactctaagataggcctactgtgtgtgtgatgtgtgtgtcgatgtgtgtgtgtatgttcactgtacacttggctgatacggccattcgggtgcagtgtacg

SEQ ID NO: 600931 - DNA, 1633 bp, Homo sapiens
  misc_feature (10)..(10): n is a, c, g, or t
cacgctggcnggagcggcgcgacttcctgaaggtccgggattggccggagcgcccgccgctcacggtcaggggttgccggatcccgtccgcgggcgatgctgctgcggagggtggtcgagggaggccgggcggtagccgccgcggtccgtggctcggcaagtaccaggacgggtcttggcagcgccgaagggcacgtccgagaggccgctgtccgggggcccgcacgtaccgggaggagccccggcccctccacccgcatgtggggacggagccgggaggatcgcgcgctggccgccgccgaaggacccctcgctcctctcctccatcggctcttaccgagtccccgccccggaatctgtggaggggccgcttagccttgggagaggaagcagcccggtgaacggccactttcctgtttctcagtatctgccgagcgcctgtgtgcgagccctcctgggctctggggactggccgtggacatggagcggatgatgcccctcgcaggactagttaaataagtgaagttggtagcgtgtcagtccgtgatcctgggtagatagagcagggcagcgacggaagactgcctataggacattcacgctgggatgagaggggcctgagaggcctgggctttgtgacagggaaacttggataaagggtggtgcgattcttccggttggtccctcagaggtggtggggcttggttatactggtagaggtgctgggctggccaggagcttacagggttacacctctcgcatactggtgtccacagagcagccatcttagctggaggtgtcgagtgcctcccccaccccccaccatgtgcttgagtgcacacccggcgccaggccctgatcctggcacttcttgtgaatcacaccgtgtcatacccatgacttccattgcacagtggggaaactgagtctagagaggtgaaataacatgtctaaagtcacaggaagtgaaaaagctgaggacatggagccagttgcccaatgacaggagagctgaaatgtcctcactgctgggggtagaccgggcctcaccagcttcctggagagtcacatgtttgtctgcatcctcagggggctcgccggttctccagcccggactgctgccagaggcttcctggaggtggcagctttcttcaaaggcaccatcccggagcgcaagcccctgatgggcgcagaaaattcgggacagaccacgtagaggtgggctcccaagcaggtgcggacggcaccaggccgcccaaggcatcgctgccacctgagctccagccgcccacaaactgctgcatgagtggctgccccaactgcgtgtgggtggagtacgcggacaggctgctgcagcacttccaggacggtggggagcgggccctggctgccctggaggagcacgtggctgatgagaacctcaaggccttcctcaggatggagatccggctgcacaccaggtgcggaggctgagccatccctgctggactccctaccgcaggacggagtccaggacgcagccgcagcctccttccttcacaccccctcacagactccttgtgtccaacgggaataggaagaattagttactgacttcacctgagaaaaaaataaattctctatggtggtttca

SEQ ID NO: 600932 - DNA, 3990 bp, Homo sapiens
gccgccgagaccctcaggggctgcggccctggtcccgcgggacctgtgggggcctgggcggcggcgcccccgacccagccagcggacgggccggggggggaaccgggaggtcccggggggcgtccacgggggtgtccccgggggtctccggaaggcgccggcggaggctcccgcgctgcgcttgtcgcgcgcggccccgcggccagcctgggtagggcccaggcgcagccaatgggaagggtcggaggcatggcacagccaatgggaagggccggggcaccaaagccaatgggaagggccgggagcgcgcggcgcgggagatttaaaggctgctggagtgaggggtcgcccgtgcaccctgtcccagccgtcctgtcctggctgctcgctctgcttcgctgcgccgccactatgctctccctccgtgtcccgctcgcgcccatcacggacccgcagcagctgcagctctcgccgctgaaggggctcagcttggtcgacaaggagaacacgccgccggccctgagcgggacccgcgtcctggccagcaagaccgcgaggaggatcttccaggagcccacggagccgaaaactaaagcagctgcccccggcgtggaggatgagccgctgctgagagaaaacccccgccgctttgtcatcttccccatcgagtaccatgatatctggcagatgtataagaaggcagaggcttccttttggaccgccgaggaggtggacctctccaaggacattcagcactgggaatccctgaaacccgaggagagatattttatatcccatgttctggctttctttgcagcaagcgatggcatagtaaatgaaaacttggtggagcgatttagccaagaagttcagattacagaagcccgctgtttctatggcttccaaattgccatggaaaacatacattctgaaatgtatagtcttcttattgacacttacataaaagatcccaaagaaagggaatttctcttcaatgccattgaaacgatgccttgtgtcaagaagaaggcagactgggccttgcgctggattggggacaaagaggctacctatggtgaacgtgttgtagcctttgctgcagtggaaggcattttcttttccggttcttttgcgtcgatattctggctcaagaaacgaggactgatgcctggcctcacattttctaatgaacttattagcagagatgagggtttacactgtgattttgcttgcctgatgttcaaacacctggtacacaaaccatcggaggagagagtaagagaaataattatcaatgctgttcggatagaacaggagttcctcactgaggccttgcctgtgaagctcattgggatgaattgcactctaatgaagcaatacattgagtttgtggcagacagacttatgctggaactgggttttagcaaggttttcagagtagagaacccatttgactttatggagaatatttcactggaaggaaagactaacttctttgagaagagagtaggcgagtatcagaggatgggagtgatgtcaagtccaacagagaattcttttaccttggatgctgacttctaaatgaactgaagatgtgcccttacttggctgattttttttttccatctcataagaaaaatcagctgaagtgttaccaactagccacaccatgaattgtccgtaatgttcattaacagcatctttaaaactgtgtagctacctcacaaccagtcctgtctgtttatagtgctggtagtatcaccttttgccagaaggcctggctggctgtgacttaccatagcagtgacaatggcagtcttggctttaaagtgaggggtgaccctttagtgagcttagcacagcgggattaaacagtcctttaaccagcacagccagttaaaagatgcagcctcactgcttcaacgcagattttaatgtttacttaaatataaacctggcactttacaaacaaataaacattgtttgtactcacaaggcgataatagcttgatttatttggtttctacaccaaatacattctcctgaccactaatgggagccaattcacaattcactaagtgactaaagtaagttaaacttgtgtagactaagcatgtaatttttaagttttattttaatgaattaaaatatttgttaaccaactttaaagtcagtcctgtgtatacctagatattagtcagttggtgccagatagaagacaggttgtgtttttatcctgtggcttgtgtagtgtcctgggattctctgccccctctgagtagagtgttgtgggataaaggaatctctcagggcaaggagcttcttaagttaaatcactagaaatttaggggtgatctgggccttcatatgtgtgagaagccgtttcattttatttctcactgtattttcctcaacgtctggttgatgagaaaaaattcttgaagagttttcatatgtgggagctaaggtagtattgtaaaatttcaagtcatccttaaacaaaatgatccacctaagatcttgcccctgttaagtggtgaaatcaactagaggtggttcctacaagttgttcattctagttttgtttggtgtaagtaggttgtgtgagttaattcatttatatttactatgtctgttaaatcagaaattttttattatctatgttcttctagattttacctgtagttcatacttcagtcacccagtgtcttattctggcattgtctaaatctgagcattgtctagggggatcttaaactttagtaggaaaccatgagctgttaatacagtttccattcaaatattaatttcagaatgaaacataattttttttttttttttggagatggagtctcgctctgttgcccaggctggagtgcagtggcgcgatttgggctcactgtaacctccatctccggggttcaagcaattctcctgtctcagcctccctagtagctgggactgcaggtatgtgctaccacacctggctaattttggtatttttaagtagagatggagtttcaccatattggtcaggctggtcttgaactcctgacctcaggtgatccacccacctcggcctcccaaagtgctgggattgcaggcgtgataaacaaatattcttaatagggctactttgaattaatctgcctttatgtttgggagaagaaagctgagacattgcatgaaagatgatgagagataaatgttgatcttttggccccatttgttaattgtattcagtatttgaacgtcgtcctgtttattgttagttttcttcatcatttattgtatagacaatttttaaatctctgtaatatgatacattttcctatcttttaagttattgttacctaaagttaatccagattatatggtccttatatgtgtacaacattaaaatgaaaggctttgtcttgcattgtgaggtacaggcggaagttggaatcaggttttaggattctgtctctcattagctgaataatgtgaggattaacttctgccagctcagaccatttcctaatcagttgaaagggaaacaagtatttcagtctcaaaattgaataatgcacaagtcttaagtgattaaaataaaactgttcttatgaaaaaaaaaaaaaaaaaaaaaaaaaaaaaaattttgtgggggcggcttggggcccttagagaaaggtttttaaaacaatttgggtgtggggaggcgggggccaagagggtgaaagggagacaatgtgtgcgcaaaagcggtgtgtccccaaagagagaaacccggggcacaaagaacaaggcgcgggggagattccaccccaaaatacaaaaaagccgccgcgggggggaaaaccgagaagtgtctgttagagacacaattccccagaaatggaggtgtatcggggaggggcataaacggggggaatatatcaaacaagagggaagtccacaagagaggaggccgcaaatattccaaaatataaaccgccccggcacgagagg

SEQ ID NO: 600933 - DNA, 102 bp, Homo sapiens
agaggatcccgcatttctccatcagacaatgcatgctacgagttcataccaaatattgaaaggatggtatgaatctaaaaccaaatattagtttttattaaa

SEQ ID NO: 600934 - DNA, 956 bp, Homo sapiens
  misc_feature (10)..(10): n is a, c, g, or t
cacgctggcnggagcggcgcgacttcctgaaggtccgggattggccggagcgcccgccgctcacggtcaggggttgccggatcccgtccgcgggcgatgctgctgcggagggtggtcgagggaggccgggcggtagccgccgcggtccgtggctcggcaagtaccaggacgggtcttggcagcgccgaagggcacgtccgagaggccgctgtccgggggcccgcacgtaccgggaggagccccggcccctccacccgcatgtggggacggagccgggaggatcgcgcgctggccgccgccgaaggacccctcgctcctctcctccatcggctcttaccgagtccccgccccggaatctgtggaggggccgcttagccttgggagaggaagcagcccggtgaacggccactttcctgtttctcagtatctgccgagcgcctgtgtgcgagccctcctgggctctggggactggccgtggacatggagcggatgatgcccctcgcaggactagttaaataagtgaagttgggggctcgccggttctccagcccggactgctgccagaggcttcctggaggtggcagctttcttcaaaggcaccatcccggagcgcaagcccctgatgggcgcagaaaattcgggacagaccacgtagaggtgggctcccaagcaggtgcggacggcaccaggccgcccaaggcatcgctgccacctgagctccagccgcccacaaactgctgcatgagtggctgccccaactgcgtgtgggtggagtacgcggacaggctgctgcagcacttccaggacggtggggagcgggccctggctgccctggaggagcacgtggctgatgagaacctcaaggccttcctcaggatggagatccggctgcacaccaggtgcggggtgacatcctggtggatcccaccgcggcgggtccggcgcccgggctcctc

SEQ ID NO: 600935 - DNA, 1993 bp, Homo sapiens
gccgccgagaccctcaggggctgcggccctggtcccgcgggacctgtgggggcctgggcggcggcgcccccgacccagccagcggacgggccggggggggaaccgggaggtcccggggggcgtccacgggggtgtccccgggggtctccggaaggcgccggcggaggctcccgcgctgcgcttgtcgcgcgcggccccgcggccagcctgggtagggcccaggcgcagccaatgggaagggtcggaggcatggcacagccaatgggaagggccggggcaccaaagccaatgggaagggccgggagcgcgcggcgcgggagatttaaaggctgctggagtgaggggtcgcccgtgcaccctgtcccagccgtcctgtcctggctgctcgctctgcttcgctgcgccgccactatgctctccctccgtgtcccgctcgcgcccatcacggacccgcagcagctgcagctctcgccgctgaaggggctcagcttggtcgacaaggagaacacgccgccggccctgagcgggacccgcgtcctggccagcaagaccgcgaggaggatcttccaggagcccacggagccgaaaactaaagcagctgcccccggcgtggaggatgagccgctgctgagagaaaacccccgccgctttgtcatcttccccatcgagtaccatgatatctggcagatgtataagaaggcagaggcttccttttggaccgccgaggaggtggacctctccaaggacattcagcactgggaatccctgaaacccgaggagagatattttatatcccatgttctggctttctttgcagcaagcgatggcatagtaaatgaaaacttggtggagcgatttagccaagaagttcagattacagaagcccgctgtttctatggcttccaaattgccatggaaaacatacattctgaaatgtatagtcttcttattgacacttacataaaagatcccaaagaaagggaatttctcttcaatgccattgaaacgatgccttgtgtcaagaagaaggcagactgggccttgcgctggattggggacaaagaggctacctatggtgaacgtgttgtagcctttgctgcagtggaaggcattttcttttccggttcttttgcgtcgatattctggctcaagaaacgaggactgatgcctggcctcacattttctaatgaacttattagcagagatgagggtttacactgtgattttgcttgcctgatgttcaaacacctggtacacaaaccatcggaggagagagtaagagaaataattatcaatgctgttcggatagaacaggagttcctcactgaggccttgcctgtgaagctcattgggatgaattgcactctaatgaagcaatacattgagtttgtggcagacagacttatgctggaactgggttttagcaaggttttcagagtagagaacccatttgactttatggagaatatttcactggaaggaaagactaacttctttgagaagagagtaggcgagtatcagaggatgggagtgatgtcaagtccaacagagaattcttttaccttggatgctgacttctaaatgaactgaagatgtgcccttacttggctgattttttttttccatctcataagaaaaatcagctgaagtgttaccaactagccacaccatgaattgtccgtaatgttcattaacagcatctttaaaactgtgtagctacctcacaaccagtcctgtctgtttatagtgctggtagtatcaccttttgccagaaggcctggctggctgtgacttaccatagcagtgacaatggcagtcttggctttaaagtgaggggtgaccctttagtgagcttagcacagcgggattaaacagtcctttaaccagcacagccagttaaaagatgcagcctcactgcttcaacgcagattttaatgtttacttaaatataaacctggcactttacaaacaaataaacattgtttgtactcac

SEQ ID NO: 600936 - DNA, 1597 bp, Homo sapiens
ctggtactggcccggaattatctgggagtggatcccgtcctgcggtgcgatgcttgctccgtagtggtggtctgagtgtgatggcctggggcggtatgcctgaccgcggtccgtggctcggcaagtaccaggacgggtcttggcagcgccgaagggcacgtccgagaggccgctgtccgggggcccgcacgtaccgggaggagccccggcccctccacccgcatgtggggacggagccgggaggatcgcgcgctggccgccgccgaaggacccctcgctcctctcctccatcggctcttaccgagtccccgccccggaatctgtggaggggccgcttagccttgggagaggaagcagcccggtgaacggccactttcctgtttctcagtatctgccgagcgcctgtgtgcgagccctcctgggctctggggactggccgtggacatggagcggatgatgcccctcgcaggactagttaaataagtgaagttggtagcgtgtcagtccgtgatcctgggtagatagagcagggcagcgacggaagactgcctataggacattcacgctgggatgagaggggcctgagaggcctgggctttgtgacagggaaacttggataaagggtggtgcgattcttccggttggtccctcagaggtggtggggcttggttatactggtagaggtgctgggctggccaggagcttacagggttacacctctcgcatactggtgtccacagagcagccatcttagctggaggtgtcgagtgcctcccccaccccccaccatgtgcttgagtgcacacccggcgccaggccctgatcctggcacttcttgtgaatcacaccgtgtcatacccatgacttccattgcacagtggggaaactgagtctagagaggtgaaataacatgtctaaagtcacaggaagtgaaaaagctgaggacatggagccagttgcccaatgacaggagagctgaaatgtcctcactgctgggggtagaccgggcctcaccagcttcctggagagtcacatgtttgtctgcatcctcagggggctcgccggttctccagcccggactgctgccagaggcttcctggaggtggcagctttcttcaaaggcaccatcccggagcgcaagcccctgatgggcgcagaaaattcgggacagaccacgtagaggtgggctcccaagcaggtgcggacggcaccaggccgcccaaggcatcgctgccacctgagctccagccgcccacaaactgctgcatgagtggctgccccaactgcgtgtgggtggagtacgcggacaggctgctgcagcacttccaggacggtggggagcgggccctggctgccctggaggagcacgtggctgatgagaacctcaaggccttcctcaggatggagatccggctgcacaccaggtgcggaggctgagccatccctgctggactccctaccgcaggacggagtccaggacgcagccgcagcctccttccttcacaccccctcacagactccttgtgtccaacgggaataggaagaattagttactgacttcacctgagaaaaaaataaattctctatggtggtttca

SEQ ID NO: 600937 - DNA, 3294 bp, Homo sapiens
ggctaggtcgaggctgggtgttaatcggccgaggtgcccgtgcacctgtcccagccgtcctgtcctggctgctcgctctgcttcgctgcgccgccactatgctctccctccgtgtcccgctcgcgcccatcacggacccgcagcagctgcagctctcgccgctgaaggggctcagcttggtcgacaaggagaacacgccgccggccctgagcgggacccgcgtcctggccagcaagaccgcgaggaggatcttccaggagcccacggagccgaaaactaaagcagctgcccccggcgtggaggatgagccgctgctgagagaaaacccccgccgctttgtcatcttccccatcgagtaccatgatatctggcagatgtataagaaggcagaggcttccttttggaccgccgaggaggtggacctctccaaggacattcagcactgggaatccctgaaacccgaggagagatattttatatcccatgttctggctttctttgcagcaagcgatggcatagtaaatgaaaacttggtggagcgatttagccaagaagttcagattacagaagcccgctgtttctatggcttccaaattgccatggaaaacatacattctgaaatgtatagtcttcttattgacacttacataaaagatcccaaagaaagggaatttctcttcaatgccattgaaacgatgccttgtgtcaagaagaaggcagactgggccttgcgctggattggggacaaagaggctacctatggtgaacgtgttgtagcctttgctgcagtggaaggcattttcttttccggttcttttgcgtcgatattctggctcaagaaacgaggactgatgcctggcctcacattttctaatgaacttattagcagagatgagggtttacactgtgattttgcttgcctgatgttcaaacacctggtacacaaaccatcggaggagagagtaagagaaataattatcaatgctgttcggatagaacaggagttcctcactgaggccttgcctgtgaagctcattgggatgaattgcactctaatgaagcaatacattgagtttgtggcagacagacttatgctggaactgggttttagcaaggttttcagagtagagaacccatttgactttatggagaatatttcactggaaggaaagactaacttctttgagaagagagtaggcgagtatcagaggatgggagtgatgtcaagtccaacagagaattcttttaccttggatgctgacttctaaatgaactgaagatgtgcccttacttggctgattttttttttccatctcataagaaaaatcagctgaagtgttaccaactagccacaccatgaattgtccgtaatgttcattaacagcatctttaaaactgtgtagctacctcacaaccagtcctgtctgtttatagtgctggtagtatcaccttttgccagaaggcctggctggctgtgacttaccatagcagtgacaatggcagtcttggctttaaagtgaggggtgaccctttagtgagcttagcacagcgggattaaacagtcctttaaccagcacagccagttaaaagatgcagcctcactgcttcaacgcagattttaatgtttacttaaatataaacctggcactttacaaacaaataaacattgtttgtactcacaaggcgataatagcttgatttatttggtttctacaccaaatacattctcctgaccactaatgggagccaattcacaattcactaagtgactaaagtaagttaaacttgtgtagactaagcatgtaatttttaagttttattttaatgaattaaaatatttgttaaccaactttaaagtcagtcctgtgtatacctagatattagtcagttggtgccagatagaagacaggttgtgtttttatcctgtggcttgtgtagtgtcctgggattctctgccccctctgagtagagtgttgtgggataaaggaatctctcagggcaaggagcttcttaagttaaatcactagaaatttaggggtgatctgggccttcatatgtgtgagaagccgtttcattttatttctcactgtattttcctcaacgtctggttgatgagaaaaaattcttgaagagttttcatatgtgggagctaaggtagtattgtaaaatttcaagtcatccttaaacaaaatgatccacctaagatcttgcccctgttaagtggtgaaatcaactagaggtggttcctacaagttgttcattctagttttgtttggtgtaagtaggttgtgtgagttaattcatttatatttactatgtctgttaaatcagaaattttttattatctatgttcttctagattttacctgtagttcatacttcagtcacccagtgtcttattctggcattgtctaaatctgagcattgtctagggggatcttaaactttagtaggaaaccatgagctgttaatacagtttccattcaaatattaatttcagaatgaaacataattttttttttttttttggagatggagtctcgctctgttgcccaggctggagtgcagtggcgcgatttgggctcactgtaacctccatctccggggttcaagcaattctcctgtctcagcctccctagtagctgggactgcaggtatgtgctaccacacctggctaattttggtatttttaagtagagatggagtttcaccatattggtcaggctggtcttgaactcctgacctcaggtgatccacccacctcggcctcccaaagtgctgggattgcaggcgtgataaacaaatattcttaatagggctactttgaattaatctgcctttatgtttgggagaagaaagctgagacattgcatgaaagatgatgagagataaatgttgatcttttggccccatttgttaattgtattcagtatttgaacgtcgtcctgtttattgttagttttcttcatcatttattgtatagacaatttttaaatctctgtaatatgatacattttcctatcttttaagttattgttacctaaagttaatccagattatatggtccttatatgtgtacaacattaaaatgaaaggctttgtcttgcattgtgaggtacaggcggaagttggaatcaggttttaggattctgtctctcattagctgaataatgtgaggattaacttctgccagctcagaccatttcctaatcagttgaaagggaaacaagtatttcagtctcaaaattgaataatgcacaagtcttaagtgattaaaataaaactgttcttatg

SEQ ID NO: 600938 - DNA, 196 bp, Homo sapiens
tcactcttctatatctacttctcagtactccatgtcctttaagactgttttgagtagtgtagatacgagataatgaaagcctggaatatcaatgaaagtggcagaaccaggatgaagagtagagatgttaaaagtgtagaatctttgagattggtcattggattgtgtagaaggaggctgaacgatagagaggaag

SEQ ID NO: 600939 - DNA, 175 bp, Homo sapiens
agagatctgctgaccttggatacataggtatggtctgagcgatgatatcaataggcttcctagggttgatcgtgtgagcacgaccatatattatatcagtagggagtagagatgtagacacgagacgtatattacaccctccgttaccataatcatggttatccccaccggcgtc

SEQ ID NO: 600940 - DNA, 836 bp, Homo sapiens
  misc_feature (2)..(2): n is a, c, g, or t
  misc_feature (84)..(84): n is a, c, g, or t
  misc_feature (160)..(160): n is a, c, g, or t
  misc_feature (163)..(163): n is a, c, g, or t
  misc_feature (177)..(177): n is a, c, g, or t
  misc_feature (186)..(186): n is a, c, g, or t
  misc_feature (193)..(193): n is a, c, g, or t
  misc_feature (197)..(197): n is a, c, g, or t
  misc_feature (215)..(215): n is a, c, g, or t
  misc_feature (242)..(242): n is a, c, g, or t
  misc_feature (262)..(262): n is a, c, g, or t
  misc_feature (271)..(271): n is a, c, g, or t
  misc_feature (276)..(276): n is a, c, g, or t
  misc_feature (296)..(296): n is a, c, g, or t
  misc_feature (305)..(305): n is a, c, g, or t
  misc_feature (308)..(308): n is a, c, g, or t
  misc_feature (324)..(325): n is a, c, g, or t
  misc_feature (329)..(329): n is a, c, g, or t
  misc_feature (331)..(332): n is a, c, g, or t
  misc_feature (337)..(337): n is a, c, g, or t
  misc_feature (348)..(348): n is a, c, g, or t
  misc_feature (354)..(354): n is a, c, g, or t
  misc_feature (360)..(360): n is a, c, g, or t
  misc_feature (363)..(366): n is a, c, g, or t
  misc_feature (391)..(391): n is a, c, g, or t
  misc_feature (393)..(393): n is a, c, g, or t
  misc_feature (430)..(430): n is a, c, g, or t
  misc_feature (485)..(485): n is a, c, g, or t
  misc_feature (544)..(544): n is a, c, g, or t
  misc_feature (552)..(552): n is a, c, g, or t
  misc_feature (566)..(566): n is a, c, g, or t
  misc_feature (587)..(587): n is a, c, g, or t
  misc_feature (598)..(598): n is a, c, g, or t
  misc_feature (714)..(714): n is a, c, g, or t
  misc_feature (732)..(732): n is a, c, g, or t
  misc_feature (756)..(756): n is a, c, g, or t
  misc_feature (834)..(834): n is a, c, g, or t
gnggcacttttctattcttgataaatttatataataaattcttatgacatttgattccaaattgtatgtccgaattggcttganataataaatataaacataagggcaatttaaacattggcagtagtttatgtaagtcaattcaaggtcagtgactggnganctatattaagaganacctgaggnaaaaaanatcnttaggaagcagccctgtnacaatgtacatttgtagatcaggggcnaaaaatccactctgaatgantaccaagangcaangggtgtacaacatccatcanacatctgtntcngaaacagcatgtgtcnnaaangnnaatcnctttacaagtnaacgtnacagtnttnnnncctatagccacaccattcgcctgcncnccagacgccctgccgacttccaccaagcacccctggnccatcgcttaaggcatccatctcaatcctggggctttaagaacatcttctttgcnttaattggtgttatgtctccattttcatcttcttcataattggcatggtctctctttcnggcaaacnttttcccaattgtncccaccaaggtctcatatctnctagccatctnttcatctgatatatcaagctctactgtttcatcttcaacttcttctgctttgtgcttagcatttatctgaagcatcaatttctcaacctcaggattaaatcctctgaatgacattnttccatagagaagatctncacatagtaagaaactctgctctnctattatgaaactctctttctctttaagctctggcaaatccaagttccagtgctcttcactaatgattttcttttctnct

SEQ ID NO: 600941 - DNA, 1700 bp, Homo sapiens
  misc_feature (10)..(10): n is a, c, g, or t
cacgctggcnggagcggcgcgacttcctgaaggtccgggattggccggagcgcccgccgctcacggtcaggggttgccggatcccgtccgcgggcgatgctgctgcggagggtggtcgagggaggccgggcggtagccgccgcggtccgtggctcggcaagtaccaggacgggtcttggcagcgccgaagggcacgtccgagaggccgctgtccgggggcccgcacgtaccgggaggagccccggcccctccacccgcatgtggggacggagccgggaggatcgcgcgctggccgccgccgaaggacccctcgctcctctcctccatcggctcttaccgagtccccgccccggaatctgtggaggggccgcttagccttgggagaggaagcagcccggtgaacggccactttcctgtttctcagtatctgccgagcgcctgtgtgcgagccctcctgggctctggggactggccgtggacatggagcggatgatgcccctcgcaggactagttaaataagtgaagttggtagcgtgtcagtccgtgatcctgggtagatagagcagggcagcgacggaagactgcctataggacattcacgctgggatgagaggggcctgagaggcctgggctttgtgacagggaaacttggataaagggtggtgcgattcttccggttggtccctcagaggtggtggggcttggttatactggtagaggtgctgggctggccaggagcttacagggttacacctctcgcatactggtgtccacagagcagccatcttagctggaggtgtcgagtgcctcccccaccccccaccatgtgcttgagtgcacacccggcgccaggccctgatcctggcacttcttgtgaatcacaccgtgtcatacccatgacttccattgcacagtggggaaactgagtctagagaggtgaaataacatgtctaaagtcacaggaagtgaaaaagctgaggacatggagccagttgcccaatgacaggagagctgaaatgtcctcactgctgggggtagaccgggcctcaccagcttcctggagagtcacatgtttgtctgcatcctcagggggctcgccggttctccagcccggactgctgccagaggcttcctggaggtggcagctttcttcaaaggcaccatcccggagcgcaagcccctgatgggcgcagaaaattcgggacagaccacgtagaggtgggctcccaagcaggtgcggacggcaccaggccgcccaaggcatcgctgccacctgagctccagccgcccacaaactgctgcatgagtggctgccccaactgcgtgtgggtggagtacgcggacaggctgctgcagcacttccaggacggtggggagcgggccctggctgccctggaggagcacgtggctgatgagaacctcaaggccttcctcaggatggagatccggctgcacaccaggtgcggaggctgagccatccctgctggactccctaccgcaggacggagtccaggacgcagccgcagcctccttccttcacaccccctcacagactccttgtgtccaacgggaataggaagaattagttactgacttcacctgagaaaaaaataaattctctatggtggtttcacaggaaaaaaaaaaaacacaaaccacacaagcgacacaacacacaccaccacaaacaacaaaaaggc

SEQ ID NO: 600942 - DNA, 1261 bp, Homo sapiens
  misc_feature (1207)..(1207): n is a, c, g, or t
  misc_feature (1210)..(1210): n is a, c, g, or t
gccgccgagaccctcaggggctgcggccctggtcccgcgggacctgtgggggcctgggcggcggcgcccccgacccagccagcggacgggccggggggggaaccgggaggtcccggggggcgtccacgggggtgtccccgggggtctccggaaggcgccggcggaggctcccgcgctgcgcttgtcgcgcgcggccccgcggccagcctgggtagggcccaggcgcagccaatgggaagggtcggaggcatggcacagccaatgggaagggccggggcaccaaagccaatgggaagggccgggagcgcgcggcgcgggagatttaaaggctgctggagtgaggggtcgcccgtgcaccctgtcccagccgtcctgtcctggctgctcgctctgcttcgctgcgccgccactatgctctccctccgtgtcccgctcgcgcccatcacggacccgcagcagctgcagctctcgccgctgaaggggctcagcttggtcgacaaggagaacacgccgccggccctgagcgggacccgcgtcctggccagcaagaccgcgaggaggatcttccaggagcccacggagccgaaaactaaagcagctgcccccggcgtggaggatgagccgctgctgagagaaaacccccgccgctttgtcatcttccccatcgagtaccatgatatctggcagatgtataagaaggcagaggcttccttttggaccgccgaggaggtggacctctccaaggacattcagcactgggaatccctgaaacccgaggagagatattttatatcccatgttctggctttctttgcagcaagcgatggcatagtaaatgaaaacttggtggagcgatttagccaagaagttcagattacagaagcccgctgtttctatggcttccaaattgccatggaaaacatacattctgaaatgtatagtcttcttattgacacttacataaaagatcccaaagaaagggaatttctcttcaatgccattgaaacgatgccttgtgtcaagaagaaggcagactgggccttgcgctggattggggacaaagaggctacctatggtgaacgtgttgtagcctttgctgcagtggaaggcattttcttttccggttcttttgcgtcgatattctggctcaagaaacgaggactgatgcctggcctcacattttctaatgaactttagcaataggttnccngggattggtgctgtgttcacccggtccaccctccgggagggtggaaaccca

SEQ ID NO: 600943 - DNA, 1351 bp, Homo sapiens
  misc_feature (1213)..(1213): n is a, c, g, or t
gccgccgagaccctcaggggctgcggccctggtcccgcgggacctgtgggggcctgggcggcggcgcccccgacccagccagcggacgggccggggggggaaccgggaggtcccggggggcgtccacgggggtgtccccgggggtctccggaaggcgccggcggaggctcccgcgctgcgcttgtcgcgcgcggccccgcggccagcctgggtagggcccaggcgcagccaatgggaagggtcggaggcatggcacagccaatgggaagggccggggcaccaaagccaatgggaagggccgggagcgcgcggcgcgggagatttaaaggctgctggagtgaggggtcgcccgtgcaccctgtcccagccgtcctgtcctggctgctcgctctgcttcgctgcgccgccactatgctctccctccgtgtcccgctcgcgcccatcacggacccgcagcagctgcagctctcgccgctgaaggggctcagcttggtcgacaaggagaacacgccgccggccctgagcgggacccgcgtcctggccagcaagaccgcgaggaggatcttccaggagcccacggagccgaaaactaaagcagctgcccccggcgtggaggatgagccgctgctgagagaaaacccccgccgctttgtcatcttccccatcgagtaccatgatatctggcagatgtataagaaggcagaggcttccttttggaccgccgaggaggtggacctctccaaggacattcagcactgggaatccctgaaacccgaggagagatattttatatcccatgttctggctttctttgcagcaagcgatggcatagtaaatgaaaacttggtggagcgatttagccaagaagttcagattacagaagcccgctgtttctatggcttccaaattgccatggaaaacatacattctgaaatgtatagtcttcttattgacacttacataaaagatcccaaagaaagggaatttctcttcaatgccattgaaacgatgccttgtgtcaagaagaaggcagactgggccttgcgctggattggggacaaagaggctacctatggtgaacgtgttgtagcctttgctgcagtggaaggcattttcttttccggttcttttgcgtcgatattctggctcaagaaacgaggactgatgcctggcctcacattttctaatgaacttattagcagagatgaggtgngtctaagtcaaataatagggtgacctaaaccccaaacacaactcgggcatgctcttgtgttcactgacggggacctgagatgctagatggcatatatccacatttaatgtgtgagttcaccatacacataatggggta

SEQ ID NO: 600944 - DNA, 278 bp, Homo sapiens
aaagcgcagtattcgggtgggagtgacccgattttccaggttatccaagcccagaagtgttaccagaaaggggaccggatccagaccccaagagagggttcttggatctcatgcaaaaaaagaattcagggattggctgtcaacatttaaatatcaagatttcggagcggggcgcgatggctcacgcctgtgatcccagcactttggcaggccgaggtgggcagatcacgaggtcaggagatcgaaacacagtgaaaccccgtctctactaaacatgc

SEQ ID NO: 600945 - DNA, 1418 bp, Homo sapiens
  misc_feature (10)..(10): n is a, c, g, or t
cacgctggcnggagcggcgcgacttcctgaaggtccgggattggccggagcgcccgccgctcacggtcaggggttgccggatcccgtccgcgggcgatgctgctgcggagggtggtcgagggaggccgggcggtagccgccgcggtccgtggctcggcaagtaccaggacgggtcttggcagcgccgaagggcacgtccgagaggccgctgtccgggggcccgcacgtaccgggaggagccccggcccctccacccgcatgtggggacggagccgggaggatcgcgcgctggccgccgccgaaggacccctcgctcctctcctccatcggctcttaccgagtccccgccccggaatctgtggaggggccgcttagccttgggagaggaagcagcccggtgaacggccactttcctgtttctcagtatctgccgagcgcctgtgtgcgagccctcctgggctctggggactggccgtggacatggagcggatgatgcccctcgcaggactagttaaataagtgaagttggtagcgtgtcagtccgtgatcctgggtagatagagcagggcagcgacggaagactgcctataggacattcacgctgggctggccaggagcttacagggttacacctctcgcatactggtgtccacttcttgtgaatcacaccgtgtcatacccatgacttccattgcacagtggggaaactgagtctagagaggtgaaataacatgtctaaagtcacaggaagtgaaaaagctgaggacatggagccagttgcccaatgacaggagagctgaaatgtcctcactgctgggggtagaccgggcctcaccagcttcctggagagtcacatgtttgtctgcatcctcagggggctcgccggttctccagcccggactgctgccagaggcttcctggaggtggcagctttcttcaaaggcaccatcccggagcgcaagcccctgatgggcgcagaaaattcgggacagaccacgtagaggtgggctcccaagcaggtgcggacggcaccaggccgcccaaggcatcgctgccacctgagctccagccgcccacaaactgctgcatgagtggctgccccaactgcgtgtgggtggagtacgcggacaggctgctgcagcacttccaggacggtggggagcgggccctggctgccctggaggagcacgtggctgatgagaacctcaaggccttcctcaggatggagatccggctgcacaccaggtgcggaggctgagccatccctgctggactccctaccgcaggacggagtccaggacgcagccgcagcctccttccttcacaccccctcacagactccttgtgtccaacgggaataggaagaattagttactgacttcacctgagaaaaaaataaattctctatggtggtttca

SEQ ID NO: 600946 - DNA, 941 bp, Homo sapiens
  misc_feature (10)..(10): n is a, c, g, or t
cacgctggcnggagcggcgcgacttcctgaaggtccgggattggccggagcgcccgccgctcacggtcaggggttgccggatcccgtccgcgggcgatgctgctgcggagggtggtcgagggaggccgggcggtagccgccgcggtccgtggctcggcaagtaccaggacgggtcttggcagcgccgaagggcacgtccgagaggccgctgtccgggggcccgcacgtaccgggaggagccccggcccctccacccgcatgtggggacggagccgggaggatcgcgcgctggccgccgccgaaggacccctcgctcctctcctccatcggctcttaccgagtccccgccccggaatctgtggaggggccgcttagccttgggagaggaagcagcccgggggctcgccggttctccagcccggactgctgccagaggcttcctggaggtggcagctttcttcaaaggcaccatcccggagcgcaagcccctgatgggcgcagaaaattcgggacagaccacgtagaggtgggctcccaagcaggtgcggacggcaccaggccgcccaaggcatcgctgccacctgagctccagccgcccacaaactgctgcatgagtggctgccccaactgcgtgtgggtggagtacgcggacaggctgctgcagcacttccaggacggtggggagcgggccctggctgccctggaggagcacgtggctgatgagaacctcaaggccttcctcaggatggagatccggctgcacaccaggtgcggaggctgagccatccctgctggactccctaccgcaggacggagtccaggacgcagccgcagcctccttccttcacaccccctcacagactccttgtgtccaacgggaataggaagaattagttactgacttcacctgagaaaaaaataaattctctatggtggtttca

SEQ ID NO: 600947 - DNA, 1356 bp, Homo sapiens
tagggagcaagggtgcttctattctcgtgggactcgtgcgtaccaggcgtggcgtgggggtgcgtggaggtggcgaaggggaactccagagggagcaacaccaagaaggctccatagggcccagccataggccctccagcggccgcggcccggtcgcactgaacggcggaagtgtgtgcgcggcactgaacgctccgtggaagtgcggctctcagaagtgctgaggtgccccgtgagccccccgaaatggtctcgcggaagcgtgggcgcccaatattctcacccactggggaccatccaagcgggacagtgccaccaaggagaaaacaaggacaccttactcagcgcgaccgctgcggccagggcgtggggaccaaatacgagacgagggctgtccaccactctctgacgagccgggtggcggactccacaacgagcgcatttcccacgggacacaccaccctgagaggaggccccaacgcacacaggacggggccctcgcgccccccacgtagacggcgagccatatcgggcgccgcacaacgaggactcaccctctcaaacatagcggccgcacgaaacacacacccccccctagtgcaccgcagcgagttgacacacccccctagggaccaacgcccggtggctccacacacaacacaacaacgccgacgaggaattaaccaccccacgttgggcgccctacatcacagtcgagggaccccccccagagaacccccaccacacacgggccccccgtggagaggaccccccccgccgacaaacccaaagcgctcccccggccccgcacaacgcacacccctcgaggcgtgcaccaccacaaacaaggaagtggcccccaacacaagagcacagcactttgggcgggcccactaccacccgccacctcggccccaccctccaccacacaccatagacacagagagcagcccccgggcgaaaccaaacccaaacaccgcagccacactgagccatgagagcacgacacaacatccgcccaccacacaccccaacagagaccccctcccgacacagggacgaaacccacctgacacgcgcgcacaaccgggagacatctgacaacacccccccccccagtgaagaccaccaacccggcgccaccgcggcaacacaaccgccccaccaacacaggccaccaaagcggacacaacaacacgaaaaagtatcaggcgccccctttgaaaacgccccacgcaggcacagcggcaacccaacaatccaccatgctgacgagcccccgccagccctccccaccagtagccacgcaccaagccaccaaccaacgccggccgcacacactcgaggccacctccg

SEQ ID NO: 600948 - DNA, 182 bp, Homo sapiens
cactatccgtactatgcacaagacagcccatccctcacagacgaataatcatccacccaaagtagagaaaccctatactagaccaatacaatgggcactatgatgacagacgatacaatggacagagtgagaaactgctggtagactccacaccagacatcacaatcacacatctcttccat

SEQ ID NO: 600949 - DNA, 719 bp, Homo sapiens
  misc_feature (17)..(18): n is a, c, g, or t
  misc_feature (20)..(20): n is a, c, g, or t
  misc_feature (51)..(51): n is a, c, g, or t
  misc_feature (56)..(56): n is a, c, g, or t
  misc_feature (82)..(83): n is a, c, g, or t
  misc_feature (92)..(93): n is a, c, g, or t
  misc_feature (113)..(113): n is a, c, g, or t
  misc_feature (125)..(126): n is a, c, g, or t
  misc_feature (161)..(161): n is a, c, g, or t
ggaattcggtacgagcnncntgcttgggggccacgggcgtcggccagacgntcccngcgtgaaacgtgctgcaggatatccnnccgcgcggnnacggcaccggggcgcggggnccacccggcgtnnggcggcgactcaccctttagctgctcgggtccttnaccgcttcgcacagggggctcgccggttctccagcccggactgctgccagaggcttcctggaggtggcagctttcttcaaaggcaccatcccggagcgcaagcccctgatgggcgcagaaaattcgggacagaccacgtagaggtgggctcccaagcaggtgcggacggcaccaggccgcccaaggcatcgctgccacctgagctccagccgcccacaaactgctgcatgagtggctgccccaactgcgtgtgggtggagtacgcggacaggctgctgcagcacttccaggacggtggggagcgggccctggctgccctggaggagcacgtggctgatgagaacctcaaggccttcctcaggatggagatccggctgcacaccaggtgcggaggctgagccatccctgctggactccctaccgcaggacggagtccaggacgcagccgcagcctccttccttcacaccccctcacagactccttgtgtccaacgggaataggaagaattagttactgacttcacctgagaaaaaaataaattctctatggtggtttca

SEQ ID NO: 600950 - DNA, 402 bp, Homo sapiens
gctcatcaatcctactatgcgattaacactgtttatgtatatggacaagagaaataattgtagtagcatgatatctcagaatcggaattacataactgaagctgcaaatcatttgtgcatgtggtatgcctggtctatgcattgtcagccaatcccaaatcctttgcacatcactgtgcccagtatttttcaagcaaccactttatggacagccagcacatacttgcttcatcgtagctgccaagtcagcacagcatgcaagttcacacacacatacagtcatttcacctcactgcatactagcaggcaaacacaactgcctccaaccccacagccttcccttgcactactgctgcatgcccccagtcaaaggactctcttctgtacattgacaagcctggc

SEQ ID NO: 600951 - DNA, 410 bp, Homo sapiens
  misc_feature (309)..(309): n is a, c, g, or t
aggctgcagtgcattaggtgagagaaaataaattaaaagcatactcattggaaaggaagaaataaaactgtctctgtttggagaggacataatttgtctatgttatgaaaaacccaacagaatttaagagactatataatctgagacttatgtaactgttgcaatgatacaagtctcaattatgcaacaaataacgctgtatttgcattacgtaataagcaattggacaagtgaaacaataaacaacacaagttacttacaatagtcaccaaagaaatataaatctacttcaggaataacgcctatcanaatatgtatatggatcccttactactaaaaaactacaaagacacaagattaaataaatcaacagaatgccataaaataatatagagatgaaccattgttca

SEQ ID NO: 600952 - DNA, 1139 bp, Homo sapiens
  misc_feature (10)..(10): n is a, c, g, or t
cacgctggcnggagcggcgcgacttcctgaaggtccgggattggccggagcgcccgccgctcacggtcaggggttgccggatcccgtccgcgggcgatgctgctgcggagggtggtcgagggaggccgggcggtagccgccgcggtccgtggctcggcaagtaccaggacgggtcttggcagcgccgaagggcacgtccgagaggccgctgtccgggggcccgcacgtaccgggaggagccccggcccctccacccgcatgtggggacggagccgggaggatcgcgcgctggccgccgccgaaggacccctcgctcctctcctccatcggctcttaccgagtccccgccccggaatctgtggaggggccgcttagccttgggagaggaagcagcccggtgaacggccactttcctgtttctcagtatctgccgagcgcctgtgtgcgagccctcctgggctctggggactggccgtggacatggagcggatgatgcccctcgcaggactagttaaataagtgaagttgggggctcgccggttctccagcccggactgctgccagaggcttcctggaggtggcagctttcttcaaaggcaccatcccggagcgcaagcccctgatgggcgcagaaaattcgggacagaccacgtagaggtgggctcccaagcaggtgcggacggcaccaggccgcccaaggcatcgctgccacctgagctccagccgcccacaaactgctgcatgagtggctgccccaactgcgtgtgggtggagtacgcggacaggctgctgcagcacttccaggacggtggggagcgggccctggctgccctggaggagcacgtggctgatgagaacctcaaggccttcctcaggatggagatccggctgcacaccaggtgcggaggctgagccatccctgctggactccctaccgcaggacggagtccaggacgcagccgcagcctccttccttcacaccccctcacagactccttgtgtccaacgggaataggaagaattagttactgacttcacctgagaaaaaaataaattctctatggtggtttcacaggaaaaaaaaaaaacacaaaccacacaagcgacacaacacacaccaccacaaacaacaaaaaggc

SEQ ID NO: 600953 - DNA, 393 bp, Homo sapiens
  misc_feature (65)..(65): n is a, c, g, or t
  misc_feature (92)..(92): n is a, c, g, or t
  misc_feature (96)..(96): n is a, c, g, or t
  misc_feature (162)..(162): n is a, c, g, or t
  misc_feature (363)..(363): n is a, c, g, or t
atcaaaaggttccttttaccctttttgagaaaggaaaatcctaattgcttcctagaagccagtgnacaatgctccacttgtgcacataggtnctcntggatgaatgcctattatagtgtccatatctaaacaatgctgcaatcacggttgtgttagctcccnttatctttgaaaaaattaacatatcattctctctcattgatgctattgtatgagagaagacaaattaccatctatgaaaaacagataaagtcattgagtcatagaaaactgacccactgaaaatactggagctaaccagcatctatttagggctagaaatcattttggcagatcccttgacagtgacacttctcatgcttngtgggggaaggttgggaattaaaggaaaat

SEQ ID NO: 600954 - DNA, 389 bp, Homo sapiens
  misc_feature (74)..(74): n is a, c, g, or t
  misc_feature (109)..(109): n is a, c, g, or t
  misc_feature (135)..(135): n is a, c, g, or t
  misc_feature (190)..(190): n is a, c, g, or t
  misc_feature (238)..(238): n is a, c, g, or t
  misc_feature (247)..(247): n is a, c, g, or t
gttaattaagtctctgggtgccgagaaccccgaggaacgagcttcgtcatctgcggcctgtccctgcttccacnccaggagcgagtccctgagatgaagtcgggagacngcatcccccgcccccctggctgcggncagtgagctgcggggacatggtgggcgactcagcgatgtacggcgtggtctctgnaactccggaggcccgttctgttgctgatgccctgctgctgggtactcntcgggcgcntagcggaaatgtgccgaagaaaattctctctggcggtcggagctgtgccggctgccgtcgctgtctgtgtcgggcgagctgtggccggggagtgcccgctcggcacgcgcaggaacctgcgcgccaccgcggggggcaggtc

SEQ ID NO: 600955 - DNA, 327 bp, Homo sapiens
ttcggccaggggcatcagggactgcgcccaggtcatgaggtccttgcgccgacgcaccggcagcagatgctgccagttgtagtaggccggcagatcgaactcgcaggtgccgcccgggatgctgatgcggctgcggatgctcatcagccagtcgttcgcggtcagggcggcgccggtcttgccgctcagcgcattgagccgttggtaggcgccgtcgatgcgcccgaccacctcgtccaggcgcgattcgtcgaggccggggctgccacggtaggcgttgtattgggccttgtgcttttcgagctccttgagcaggtcgctcttcag

SEQ ID NO: 600956 - DNA, 950 bp, Homo sapiens
  misc_feature (222)..(222): n is a, c, g, or t
  misc_feature (410)..(410): n is a, c, g, or t
atgtaacgacgattgaaaagattgccacagatcaatcataatgcgactcatggatagtcaagaaagcacgtaatggttatcgcatggtaagacatgagctgaaaatgagttttgatagattgagaggacgtgtagttcggtagtacgttagtgatagataacattactacgtttgtgaagtctaacgacgaatagtgtatgagtgacagaaatgtacttttnatgtaacttaaagtggtgctgttcagatatgcttagaggtgtcatgatatagtatatatatcttgttgaaattagcgatttatgagagaagactcgaggaatgcagatagtgttgttcagagatatacgaaagagcctgttatattttacatttattggaagacttgaaccacatgaaaatgccatcnttgtacttaagaatacgtggagtactttatttgcactgattaagagtaagatagtatgttaactttgttctctgctgagtcaatactgttgctaatcatgctagatgtgataaagtggagattattagtgaatacaatccaacttctttttttaacagttgagattcaatcgttgacctttatataagtaacagttaaattgtaatccatattttgttcagaattcgcatgatattttatcggaaggtcgttaaaaaatgtatgtctgtatgatgcaccaatataattattagatatatggtgagatctggcaagtttaatctaccatcagccattagatgatgcattagtgtagtacattactgtggtatgctaagtgatggtattaagcatgatgtagttgttcaaatgaatattcttgaatagtgtatgtgaattaaacaaggtaatgctatcgctgagttggcagagtttaaaactaccgggttaatataagggagttggaggaaatatgtttgttggaggaatggctttggaata

SEQ ID NO: 600957 - DNA, 432 bp, Homo sapiens
ggcctcccaaagtgctgggattacaggtgtgagccaccaagcctggctgggattctgtgtcattctggatagttatcatgacttcaagcatccaggactctgtcctgggtatcctgagcctgagtgtgtatgtgtgtccagctggcttggaggttgtctacaggcaggttgaacttggcctctgagtccatggcagccttacatgggaaataccaccaaggagcctcatcctgtgcttttaggagatagtttctatttagtcattgctgaatctgttacagacagggtctcaatttcttgcaagtcctgtatgaggtgggtgctgtgattatccacatgttcacttgttctctctagcccctttcaggctcttacacttcctttgctcttttcctgcctcaaggcctttgcacatcctgctctttctgcctg

SEQ ID NO: 600958 - DNA, 289 bp, Homo sapiens
gaagaaacagagcaatgcagaaacaataactatatatatttaaaaactgactgggtgcggcggcttatgcctgtaatcccagcagtttgggaggtcgaggtgggccgatcacgaggtcagatcaagaccatcctggccaacatggtgaaaccccatctccactaaaatacaaaacattagccaggcatggtggccatgcctgtagtcccagctactccagaggctgaggcaggaaaattgctggaacccaggaggcagaggatgcagtgagtcgagactgctggcaaca

SEQ ID NO: 600959 - DNA, 177 bp, Homo sapiens
ctttggaacgaggaattgggagattcccggagtcagggtaaaaaatttttgaccaaatcggagatattttaggggtgtggagaaggggaagggaggaatgggcccccatatttggccttccaggaattaaggagccttcctgtaatatttctttccaataaatattgctttttccca

SEQ ID NO: 600960 - DNA, 929 bp, Homo sapiens
ttagtagtggtcgcccaccactactagtagtggtggtgctgagtagtactactagctgcagctgctgagaggtagtagaagagaagagagtagtagagtagatgacgagaagagtagatgagaagagagcagacgacactagtagtgtcgcgcacagtcagaggagatagagagagcactagacaccagagagagagtagtagtagtagtgtgtgtggtgcgccccacctgctgcgagagcacacgcgcacacgctctgtgagagagtgcgggtgcgcggtgtgagagagaaaatagtggacacacagcagctgataatagtggtgctgtgtgtggtgtgtgagatacatacatagtagttctactcccgcccgcgcgagacagtactcacccgcgctgcgtgtgtgtgatgtgagagggtccctcacgcgggcgcgggcccacacagagtattgagtgaggcgcacgcgagagagagtgtgcgagacaccacacctcctgcggggcacacacccgcggtaaacacacgccgcctccccatcctgtacatagaacaccaaacacccaacagtgtacccgcggcccgttgcggccggggccccgcaggaggtccccacgcgttgttgggggacgcgtgagcgcagcagtaaatgggtggtaaacccgcgcggaccgcgcgaccgtccccgtttgaccaggaagtaggcccccccccccccccccccgggcgcgaaaagcaacaacgtgcgtgctcccacaaaaaaaaaaaaaaaaaaaaaaaaaaggagaactcccccccagacaacgaaaagaggttaaagcccaaacccccaggccccccaaaaaaaacaaaagaaaacaaaaagaataaaaatacgctgagcagatatggctgggtcgagaagagaatgattcccggcgtggttggg

SEQ ID NO: 600961 - DNA, 223 bp, Homo sapiens
acgcccaaggagggagtatagcggaaactcatcttcaagcaggtgagctcacgaagttccagaggtctggggcttgtgactggtgtctgaagaaggggggcagtcttggggacctgaagccttcaaacctgtgggattctgatgttatctcccggtagatagtattgggattgaattacagaacaccccagctagtgtccactggcagaaatttgattgcttt

SEQ ID NO: 600962 - DNA, 1503 bp, Homo sapiens
  misc_feature (329)..(329): n is a, c, g, or t
  misc_feature (430)..(430): n is a, c, g, or t
  misc_feature (1245)..(1245): n is a, c, g, or t
cacgtgaatacgggtgtgagtaacatgagagaatgcataagtgaagtggaatagacggaattcacctaggttaggaacctattttcgatacacgtggactcataccgagtggcgtgatgacgtgtgaatagtgggagacacggagaaataaggtctaggatggatctaaccgagaagctgagactctgaaggagtgtgatatttctcctatcattaaaggcatttaatctagacaatatgagctattgtaccctattgactatgagttaagagcaatggcctatgtcagagtgagatcttctcatatgcgactacggaaggagtcagtnatcatcgcgtttggtggtggtacgtaagatatagagtctacacatctggggcggaagaactaggtacgtatatggatcacattggagagcacctaaggganaaatctctgaacgtggttgatcatcattatctagatccttcatcgtttccgtgctagaaaaaatgaacttgtgcaaccgtttcatgttgctaagaagaactggtagggttaagtatgatttcaccaagaacaaattgatgtgttccacaaattgaatttaaccttttcgcactttggggaaagcaccctgttaaataaattgtttgggtataaatggataaatcaattgggtcaaagaaaagtaatccttgtgtaatcgcaccccgttgttgtatgttttacccacatattccatacacgttacaccagcgtcttacatcctgcggaggacgacacatggcaacaacagggacaacggtattgcaacgcattccaactttcatgggtgcatgcgtcttgttgtacatccttgatggaaccgtgcgtgggtgccccctattagaaaccgtaacttgtgtgcgcgggcactttcagtcgccagggcacggtaacctgttcttcatggcttgaaagtcgccccaaatccaattactttgcaaaccgaattgtataattcccactctaaaaaccataccttggcgtaattctgcaaagggtcagaatggggtcgtccctccccagaacgcacttacaccgcaacagacataggtagcgcaacgaattttggtgggcccctacgaaatctctttgccactttacattccttgagttaccccaacagtgggacctctgggatgggaacattaagcgcgctacctcaccgtggagagtcgtttgcacacataacagggtaggccgtttaacaactcttgganacacgtgcgacacgtgtttcacatacttttccaccggaaggcatgtaacactctttggcgttacccaagtacggtggcttggcttccttggtcgcgaccctggaaggaataccaaaaggtgccagaggcactctcggacactttcgtggccgtattaaaaccctgaatcttgcagacgagtgcgctcacatgggtattcgtctacgcagaaaaagatctggtggaaaaaacagcatttgagcagacaagttagagacc

SEQ ID NO: 600963 - DNA, 192 bp, Homo sapiens
gagttgggcagccggagggggggccagcggcgcccgcagccgcccactgtttgcaaacggcccccgcttcggagcgaaggggagcaccctgccttcggcagcggcaccctccccgggtttggagaggcgagcccggcttcctgcgccccgctccccgtccgcatggatctgccgcccggctcggcggccgct

SEQ ID NO: 600964 - DNA, 366 bp, Homo sapiens
tttttggttcactttaatttggccccagaaccctttaaatccccgtggaaatttaattgttggtccaaaggggaacagttttttggccattaggaaaaacccttgtagggagggtaaaaattttaccccccatggtgggcctaaaagcagcccccaattaagaaggggttcagggtcaaccccccctccttaaaaattcccaaacatataattgaattcctcccccccaatggggccattttttccccctatagaagaattaaggttgggatagggaacatgaaacctttttcctcgggataggccggggtcggtttaaaaccttggattgccaattaacggcccaatttttccaatcacccccca

SEQ ID NO: 600965 - DNA, 208 bp, Homo sapiens
atcccctacaatagccacaactgaatggaaggagtgtacgtgtgttttgaagactgcaacggtcaggcgcggcgggtcactacctgtcatcccagtcactttgtgaggctgaggggggtggattgcttgaggccaggagttcgataccagcctgggcaaaatggtgaaaccttgttctctactaaatatacacaataattagccaggt

SEQ ID NO: 600966 - DNA, 550 bp, Homo sapiens
cccccgccggggtctccaggctacgccgcccgcccgctcgcgaacgtcaggcgccttcccggctctcccattgcctgccgccaatgttttttgcctccggtgggatggctgcatggatggcctccagggcggggcacggcggcaccggcaggccaggtagtggcgtgtagctctcaggccccatgtggatcgccgcccgggtggcggccgggaatggcacggctcgttctcctccaggggcttgcgcaggtcggagagtccccggtacagtttagcgtggtccgggattcgtgcagcccgtggacgctgtctttcccgtgccctgtgtctccgacggcggacctgctggagctttaagctcccaccttcggttttagtactgggcgcgggaagttgcaaaatgccagaatatcgcaaccatccccgcggcccgccgggtttgcaaagggtgccccggccaggagcgggggctcggggcctgcgtccagtcgcgtggcggctccagcccgactgcacgtggactcgcgatggggtgggggtggccacgcgg

SEQ ID NO: 600967 - DNA, 208 bp, Homo sapiens
gctatataccatgagttcgcgaggaacactctggcgatcttctgaccaggatacccctcataggacagagggaaatcccaataccctgctgggtgcgacactgtactgtgtcccaccatgaggacacaagcagtttcacccagtatcccatggtgcttgcggaaaatcaaagccctgcgcactcaggtcccagctagaaattcccaca

SEQ ID NO: 600968 - DNA, 882 bp, Homo sapiens
  misc_feature (1)..(1): n is a, c, g, or t
nacccgctacgagtcgttgtctgttccctacgctacgtgctgtgagtactagccaatcagatccttgcccgcagccctagtgtgtgcctctttccaaatgttttgcgcgcaactggttctccactcgtgggccccccaccaaggggtggcccgccgtataggttctcccccctttctaggcgtccgccttcccagggcgagacactttctctgccttgcgatcataactgtgctgccggggacacaaccagtcctcccacgggggtgattaactaccacggcttttcaccctgctgggggcacaaacccccacccccttttcagggataaacccccaggttctttcggccccctctcaggatgaattttgccccgcccgcccccacgcggttccaaaacacgtgacgcctattgagaccgtcacctgatcacgccccatggtgtgagagcccccttctctccccccgggtgatgtaacttaggcgtttcgccccattggggcttgacagacatactacagcggtcttatttggagttcacacgtctccctgtgtattgccctccctctcggctgcacactttatctgtgacacccctcggcaggaacctccggggagggggacctcttggcacaagtttgtggcctcttcctgcctccgaccccaatgtcaaatcgtgatgcgcgccttccacctccgcacaaaccccagaaggtgttgattgccttcgaggaccccgcgcaactgatgatggacagcccgcctcggcgacgtacacctcctctacgtcgttctccctcggggcccacgtgtatcccggttatcttctcagcccgccgctagtttgccgcacaaaaaactccaacgatctttttacaccgga

SEQ ID NO: 600969 - DNA, 151 bp, Homo sapiens
  misc_feature (136)..(136): n is a, c, g, or t
  misc_feature (150)..(151): n is a, c, g, or t
tataggcgctaggttatttcacagcatgttttttatgtaaccggttttaccgcatcttctcagcagcttctgaccacggctcaattttctcctttacagccatggttctgggtggacacaataaccataggcaccnataggcgcctctann

SEQ ID NO: 600970 - DNA, 612 bp, Homo sapiens
ccctttgtctagtcacgttactaccatcagttagttatggtggtgtctgctaggttgtttctttgtgaagttactcttttaccacttggaattagtaagtatcctgtggagagttactctacataaatatcctttctttgttttgttttgttttgagacagagtctctctctgttgcccaggcgggagtacagtgacaggatctcggctcattgcaacctttgcctcccagtctcaagcaattccactgcctcaacctcccaagtagctgggattacatgtgtgcaccaccatgtttttgtatttttagtagagacagggttttgtcatgttgcccaggctggtctcgatcctgacctcgggtgatccatccaccttggcctcccagggtgttgggattacaggcgtaagccactgcgcctggcctgtttgcttctgtgaagagacaaggtctcactacgttgcccagctggcctcaaaatcctgggcacaagtgatacttctgcttcagcctcctgagtaactgggactacaggcatgtgccactgtagccagcttattattattatttttactttttttttatgagacgttgtctcactctgtggctcag

SEQ ID NO: 600971 - DNA, 205 bp, Homo sapiens
cattcgtagcccaattacgctgaatatctgccacaacggcttggcggaatggcagactggcatatacttcttttttcagttccttttcagttaaaccactatccatatcgtgttcaaaatcagtctcataatacgtcacatcaacccaagggcgttaccgtcaccgatagcgtccttattcgtctaccggtgtcaccgcggcccg

SEQ ID NO: 600972 - DNA, 130 bp, Homo sapiens
tgtacaacgatgagaacgctggcttttagagtcgcaaagtttcagaatgccgtgcagccaatggttttatcttctggagttaggtggaggaacgctgtgtctaagatgagactgcgaacgtcactgacat

SEQ ID NO: 600973 - DNA, 119 bp, Homo sapiens
cctgtatcccaccctctgcaagcagtaagtgattaaaatacttactcctcactttctactattcctcctcctcgagttcttcacttagtagtgaccaaccaggcaccaggcatcttgaa

SEQ ID NO: 600974 - DNA, 1012 bp, Homo sapiens
agatagtgccatcgcactccagcctggacaacagagcgagactccatctaaaaaaaaaaaaaaaaaaaaaaaaaactcacgttttgggttttggaaaatgttctgaaccctgtggaaataccggctgaataaatgggtaatacccactctagggcttggtttcaaaaaaacttgtccctgtcatttcggaattggtaaacaattatgttttggccgcttttctcacgaaatttcagttcatttttctccagtggtttcagtgaagttcattcctttttaaaagaaaaaaaaagaatccgtggtaatttcgtcgtggttcctctgggctattacctcctttatagtgacataaagtttcccctcatttagtggggttaccccacatttacggcgttacgaagaacattctcttttagttccagaaaaacagtagccttgggttcagttctagccttcatgtgggttaagctcatagggtaaattcgggccaaatcggggctagaaaaccagttccccttgtttgtggctgggtccttaagggctctcaccttttcccagctatttggggattgtatatacttcgggcttccttgggtgcggtgtaccatcttactttttgtttttggcactaagctgtttgttgtcctcccaaacttcttttttgtgggaacgccgaaattggtaaactcacccctgttaaaccttaacactttgggaaggcctaggtgggcaggaaatgctttgaatccggggaagttcaaaccacgccgggcactgttgtcgcacccgctctctacaacaaacaacacactttattgaccggtggtggcataacgcgtgtgcccgataactcgaagctccttaccccaattgacagtgcgttgccctattgccctggttgaaaacaccctctttcaaaacacatgtcctgtgagggccccgttaccgaaagagcggcgtgcactgctgattataccgcccggaaccttaatacacggtgagccgccagcgc

SEQ ID NO: 600975 - DNA, 169 bp, Homo sapiens
  misc_feature (110)..(110): n is a, c, g, or t
  misc_feature (132)..(132): n is a, c, g, or t
  misc_feature (148)..(148): n is a, c, g, or t
  misc_feature (169)..(169): n is a, c, g, or t
attcgcgggcgcgtcgacacatgagaggatcacttgagactgggagattctgaggctgcagtgagctgtgattgcaccactacactccatcctaggtgagagggcaaganccctttgcttttccccaagggncaaaaaaaaaaaaggnggggaaataaaaaaaaaaaan

SEQ ID NO: 600976 - DNA, 496 bp, Homo sapiens
  misc_feature (25)..(26): n is a, c, g, or t
  misc_feature (33)..(33): n is a, c, g, or t
  misc_feature (36)..(36): n is a, c, g, or t
  misc_feature (38)..(39): n is a, c, g, or t
  misc_feature (41)..(41): n is a, c, g, or t
  misc_feature (46)..(46): n is a, c, g, or t
  misc_feature (49)..(49): n is a, c, g, or t
  misc_feature (51)..(51): n is a, c, g, or t
  misc_feature (58)..(58): n is a, c, g, or t
  misc_feature (124)..(124): n is a, c, g, or t
  misc_feature (494)..(494): n is a, c, g, or t
atcgccctgatgctaaacggtatcnnctgggtnctntnntntggcncancntggcganacatgcccagaaacgattcggcccttggtcaacgatctatcaacggttccggggatggcgtgattncggagcttttgatcagatgctcaagcgtcttcatatccgattgaatgagcagggtttgattgacttggaaacatggatgatcgactccactgccgtacgagcaacccgggcctcatcaggtgccgggaaaaaaggggatttgaagaaccgcaagaccacgcgctcgggcgcagccggggtggcctgacgaccaagattcacatgctgtgcgacgccaatggtgtgcctctgcgtttcctgttgtcaggcggacaagccagcgatatagcctatgcccacccgctactcgatcaggcttgcatacccagacagcgcggtcgcccacgcaagcgttgccgctggttgctggctgacaaggggtgtgctttcnca

SEQ ID NO: 600977 - DNA, 304 bp, Homo sapiens
ccatttcatgttgcccactggcacggcagggagacttctatgttgccttgacgattgacaggacgacagagtcggaacatggcgggcgcttgttggagggcccttgacacccaggtggattggcccaagcgacgctgacaccaatgaagtgaccccgagttcttgtaagcttggaagtgaaccctggcagccggggaggactccgctggcacactgccacctggggcgaacagccgggctgggatgacggtgacccccgacaggcacagcacagccgagtcaggccacgcccccttgagactgt

SEQ ID NO: 600978 - DNA, 1426 bp, Homo sapiens
gctgctggagattatcacgaccgagaaaacttccacagacaccagtgcttacagctgtagcagtatggtctcaagcaggggaaggtcatcattgtggttaaggatggacctggacttctatactaccaggtgtctatgcgcccatgatgtctgaagtcatccgaatcctccaggaaggagttgacccgaagaagctggattcccatgaccacaagcatttggcttatcctgtgggatgccgccacactggatggatgcaagttaggtagtggatgtagcagaaacatgtggcggacagatactgggacaaaagactaaggaggcagcgcgcctggcagcgtagagaacaaccaagaacacagactcgcacgacagcatagagagtcacaaaagggactaaacataacagtcacgtcacacatcaacgggcaagaggcctaaacacaatacacataccagagcgtcgtgacagcaccgccacggactacgcaactaccagacacaaggactacgcacatcacccaccagacgctccaggacagacagcccaccgataaaaaacctgacaacacccactacaagaccgacacgcaccataccacgcaacacagaccagagaggacacaaagccataaatagtgacaacaaaagagacaaaatcaatagatagaacacacaaaacacagggaaaatacaaatagagaaagcacacacataggcaaaacaacgaagaacaacaagaaacacaccgaaagaaaacagacaacaaaaacaaaccccgcactaagcaaacgaaaaaaagagaacaaaagaaataagaagaacaaccaagacaaatgggacaaacacaggcgaacaagaacacaagtcggaacaccagagaccacccaacaggacaaaaaaatgaccacaacaagacagtgatggcaaaccaacacacaaatcacaacaacaatggatacaaacagaactacacatacaccaaaaagcaaaacaagaccaccacaaagaagaaaaaataccacaccaagaagacagcccggcaaaacagaaacaaccgacacaacaaagacagataaacacaacaatgacggacaacgaatgaaactcaacaaagaaggagacgagtaaaagaaaaaagagaaaacggagcgaacacacccgaagacgcagaaaaggcaccgacaagagagtagaacacactacagaacaccacacggcacacgagagaacacaagatgaacacacaagaagagcagacaccgaccggcaacaagaaggaaacgaggacgagcaagacgcacagacaaacaaaagcagcggatgcagaaacaaaaccataaaacagtagaacaaagaggaagaagagaaacacagccacaaagagagaaggcagtaactcacctacaaataacgacaaagtaaa

SEQ ID NO: 600979 - DNA, 386 bp, Homo sapiens
acggggagcatgaccttgcagtagcacaggttcagacactgttgagttttaaacaggtagtaattcaaaaaacttaacacaccaacaaaaaaatcaggagtgtacgtcagaacattgtgcgcttcacactcatatgatcccagcatattgataggccctcgcagtcgaactggttgactctaagcgatcaggatacgcctgggcaacatagtgagaccctgtctctacaaaaaaaaaatagaaaaaagaaaaaaagaaaaaaaatagctgggtactatggcacacctgtggtcccagccacttgagagcctgaggtgggagaatcacctgagcccaagaggtcaagatagcagcaagccatgttcatgcctctccccgggatacag

SEQ ID NO: 600980 - DNA, 226 bp, Homo sapiens
  misc_feature (75)..(75): n is a, c, g, or t
ccacagaacctctaaatcccttgtaattaactgttagtccaagaggacagctctttggacactaggaaaaacctngtagagagagtaaaaatttaccaccatagtaggcctaaagcagccaccatttaaggaagccgttcaaggttaacacccattacctaaaaatcccaaacatttactggactccaacaccaattggcccaatttttcaccttgaggagactat

SEQ ID NO: 600981 - DNA, 949 bp, Homo sapiens
tcggcccctctgccgtggcgcgcttgttggattccccttgcgtcccttggctatgctctggctctgggtgggcctgttgtgtgccgtgtttccggtgtttgtcgggccttgtcctctcgtgcttgtttttggttttcggctccttggtgaagtcggtgtgctccttcctctagttgccttgctgcctcatggtgcttgggtcctctgctgccctggttgtttctttaccccatatgggctgtgtgcgggctctcggtgttcatctctgtttgctttgagcttgatccacttgtgcttcctgcttgtggtgaactgtcctgcgtgtcatcaccgtcagtggatgacggactggctccgtcttgtggcgtctgggtctggcacttgatgggtctggtgcctgtggggtatacctcccgttgttctgtgagcccttgggaccctgttcctgctgtatgtgtctccgtccgtgtcatcttgggttatggaatggccagtgaacacgcatcccagagagcattttccctgctgcgaaatgacgtttcttgcgccacgtctgtttgctgctaatgattgtatagaatcaactgttccttcttccctcctgatatcccagcctgtaatggtgagaatgctgctcttgcttccaaatatatagataaacggaattgccctccagggtaatccctgttgcctttttcccgtctatataagggaatgtcttccttcctatctatctgcaaaatggacaatctagacctccttcttcatccataagtggactgtgccagtacaatacatgctctcagcccccaagcctagaaggacctctagtctccttgcctgtgtggaatcttccccactccatccctcccaagttgcctgtagttgataatgtactcactcatgctgtactaggtgctgaagcctgacaaccttcgtgggtgggcct

SEQ ID NO: 600982 - DNA, 1319 bp, Homo sapiens
  misc_feature (338)..(338): n is a, c, g, or t
  misc_feature (664)..(664): n is a, c, g, or t
  misc_feature (689)..(689): n is a, c, g, or t
gcctctctccagtggtccacgttgatctgtgccctaccgcgctccctggtgcttaccgtgaccacgtctagactctatcgctcgtgctgtcatccataagctcgagcgactcagtcctattatcatcctcttagacgatggcatcctctcgcatgatccgcgatctagcctgcttagatgccacagggaatccagagggcagatccgatgaaagctccacatactctctccttgaggaatcagtacatacatatttagagacttatcttagtcacgtaatcacttgatttctagtaagctcgcgagacgtcacgtctacatgatagtggctttcccanaaagcggcgatcgacaaggacgtatcacagaaattgattctcatatctcagggggcatgaagagtagatgagtcgcttagattgaagccaaaagaaaccaacacaattcgaagtgtctgcatagttgcctctcacagaaggcgacttgagccttgatgatcagactagagccacagagacggttctgtgcgaaggaaccacatgtcctgtgccttcttactagtcacagcgaggcgagaaatggtgagtgacactaatgtctcgcttcttgcagatgtgtgagagtgccctgtcaatctctgacatctatccccttgtgtgacacnttgtgtgaccttgagtgcacccctntggttgtagttggaaggttaccaggccatcgaacccgtctcgacttcgagaatagccacagtttaggacaacttagtagctttggacaggctacaagatttgtgtgcaaaagcgaattggcgcccaacatgtgggtgtttctaactgagaagccaccccccacctaggaagaaacttttacacaatatataggaacacaaaagtgtgcttacttagtggtataaattcttactcttaccttaaaacaaggatcactacacccaaggacagggttccaaacctactttgtggttataatttgcgctcagaacgatcgaagtggctcgaacatagtggtgttgccgctacaaagaaaaacctttgtgtgtggtaggccatttaagaatagcgcgaaggggaaaattggggtatccgtcggatatgtgcttagggggttaggcctcaattaggcgtcgcagcgcaattcattacatccttcccccttggctacggcgggtgtacggacgtccaatgggcaacaggtcttctggggatatagacaaggtctccgggtggggcgtttgcgccaaggaattccttatcccacttggctgtgcaattatgtttgacctctgtccttttttgcgcaca

SEQ ID NO: 600983 - DNA, 349 bp, Homo sapiens
  misc_feature (151)..(151): n is a, c, g, or t
ggatctactcacaacagtcagtcgtcttaaacatgggcatgtattatgtcagatgtcactggattctacgagcgctaagggagtaggatgcccgatcacagcagagccaaggttgtacacggcacattctccggtcagccggcgctggtgnaatcacaccggacgtggctcgatgtagaagtccccatcgccgtcgtacccaccctggaaggtgtacagcagacgcccattgtgacctgagtcccggtccgtggcagagaactggagcatgctggtcgagggtggagcatcctcaaagatggaaccctggtagaaatcccacaggaactggggtgcattgtcattggca

SEQ ID NO: 600984 - DNA, 245 bp, Homo sapiens
  misc_feature (10)..(10): n is a, c, g, or t
  misc_feature (66)..(66): n is a, c, g, or t
ccaccgcgcnggacccaacaggacactgaagatgcctagttattaaaagcttctatttcgaagggngctctaatgtaaaagagggagcagggttttccagaagctgaaatgattacgcaagaaagttagttgttgctttgtagctacaaataaaatttggtgagttcattaaaaagatgtttccagccaggcgcagtggctcaagcctgtaatcccagcacttcgggaggccgaggcaggaggat

SEQ ID NO: 600985 - DNA, 116 bp, Homo sapiens
tttatttacatccgactgccctcggctcacttgaacgtatctgagaagtctgtcaggccctcaaattctgctacatttcctagttcgcaattatatatcttgagcttggaatagcc

SEQ ID NO: 600986 - DNA, 837 bp, Homo sapiens
gaataatgacagtatagcacaagctggtcttgaactcctgggctcaggcaagttctcccagctcagcctcccaaagtgctgagattatagctgtgagccagcgtgcccagcctgaagctagaggctgtcttgaatatgtcgttactctctcagttgggtctaggataagagtctgaagggaggggctagaaagtttcaaaggcggagaaggttgcaaaggcatcatgtgaacaaggcagcaaacagcgatcaagccccatgacgaagggaaccatccatagactcgaagtgatgcctattcgtcgaaattgtaggaatcgtcttcgtagctatacttatgattgaatttcagtcgtgctaaatagcgctaaatgctaggttgagttggcgcttctgggcagtcaaattgcagccgatgaggcctttcacgtgcgttatgaatgaagtcgggatgaaaccgatgaggaccagaggatccttctcaccgtgcacaatcaaggcggggcactggacccggggcagcaggtgccggcagatgttaccatctgggagatgtttaaactgtcttatgccatccacccacttttcacaggttctggcaaagtagtcatacccatagagggcttctagaggctttcttgttctctcactccatttggaaacatctcggatgccctcatatatcatgctgtcttcgtcagtgacgtaggcgttggcgccccagatcaccatcttgtggatgtaagatggatatattgcagcagcaatgagtgcggttatgcccccatcactccacccaagcagagaaagcttcttaaacttcagcgccttcatcaa

SEQ ID NO: 600987 - DNA, 719 bp, Homo sapiens
tggggttgagcacaggttactttattggatggtacatgagaaggtgcggccccctaggccccccccctcttcaaggggtctacatggcaactgtgaggaggggagattcaggtgtggtgggggactgaggtgtggcagggacctccccagcaggtgagggtctctctcttcctctggttgctcttgcgggggcgtgggtggctccaggggttcttactcctgggaggccatgtgggccatgaggttccaccacccgtgttgctgtagccaaattctcggtgtgctcattcccgggaaatgtgagtcgttgacaaaggtggctcgtgtgagggcaatgtgccagccccagcgtcaaggggtggaggaggtgggtgctcgcgtgtggaagctcagaggagaccccctgttgggtgcctcaggtgttaccccaggtatgcccttgagggggccctccgacgcctgtttcaccaccttctgtgatgtcatcatattgggcaggtttcctagaacggcaggtcaggtcccccactgacacgttggcgtggggtgcgccggaaggccttgccagttgagcttccgtacagctcggggttgacctttcccacggccttggacgcgccattaaagggccgatatattttctggaaccccgcgccatcggccactcccgggggccccagttttggtggagatgcagacggcaagcctccagacctttg

SEQ ID NO: 600988 - DNA, 247 bp, Homo sapiens
aaaccatcctgactagaggagcagtgagctgctcccagcccaacatgactatcaagaaagacattgagaaggacagccccaagtgtgagagataggacatggtacatccatatagtcacttgccctctggcttgggctcctttaactggctggggcctgacacccgttttgaccacattgctatggtagagaacgagggcctggaggcccagaagttgctgccctacccaccgacttacccccggcc

SEQ ID NO: 600989 - DNA, 780 bp, Homo sapiens
gggcaatattgaggagtagcagagtttgtatagagaagaacggacaagctagatgaagtccccgggaagactatcaaagtctatattagtttaaagagtccatgcgaatacatcaagtcaagagatagcattgtatgagattatccttaagcaaattgaagcaacgtaactgaaagatctaaaagatagacgattgttaggtaaactgtaaaacgactctatgggaacattggttctccgacccttttgggactctccatcggaaaatttccacgatcaaacacggaattcctctaccgggctcgtactccactcaatttcgttcaagaatccaacatacataacagataaccaaagataacaaaagactttatcaagctgacttggaattgtgtgctgcttgctgttagtctacggggaaaggccactgccaatgatttaacttttaaaagcatcttatctaaaagaaaggctatccagtagagcccagtgctcccttgtccctcttttaatgatcagggcgaaatgtacttcctgatgtaatgaaccgtaatatctgatttccatgtcttataggtggatgtctgtgcagcatggtcgtccaccgattctggctgtcctatgtctcaggaagaagcccacttcgttgaggctgaccttcctgatcatacacacacacagcccagcaaaagcatctcctgaaccgaaaccaacctgttggttgggagactgcccagacatgattgatgacgggttcccgcctgctgtccccgccttgaa

SEQ ID NO: 600990 - DNA, 547 bp, Homo sapiens
agcgggaaggggctgcgaacgcgaactgcatgtaggaggtctcaccccgagcgagggagctggcggacggttcgtcctcgtccttgtgggtgtgaccgaggtgtacgcgctgcaggcgtgccgaaggacccagcgggggcgatcggccacgaatgtggaccagcctgggtacgatccgtgccccggaaggcagtacagttagacgcgtgcgaccgtctgggtgggggccggacagggcgtgcggggggagtccgccaagagtgaggaggccctgcgcgtgaatcggatgaagacgggcggagcgagagcgcggagatgccggaccgcggttgcgcagtgcatcccggtcgatgcgatcctcgcttgaagcggaggcccgaccttcatcgcatgtgagctgcgggattggaaacgtgctgtggatgaatgccgcatggtattacaccggtcaacttaaatccaacggaggaattcccaaataatgttccagtcaggcaaagtcgccaaaggagggcatttacgcaagtctagactacaggagacagcg

SEQ ID NO: 600991 - DNA, 1258 bp, Homo sapiens
agcggaggttctcgagaccttgtgctccggttgggccacttgcactcccactgcctgcccgtcctggcctgtctggaccagggcccccccgactgtcccatgtctccttgctccgaagaatgctgtatcctgtgtcccgcgtggcgggctcgccccgaggcaacggttgtgcgcggcgccgacagaatgttgctgcgagtgtggtgcttgacggtcgctggggcgaagtcgaagcgcttgactcgcgcacctggtggcgcggagcgccgtcgctccgcgctcgtggggctccttggtgactctgttgaatcctccgcgcgccagagcccgggaggaccgaagggtggtgttgccacgctctccttccagtgcatggttctcccatgatgcgggcccactgctcgcggctgtgcttcttgcgaagcgcaccgcggcggttcctgtacggcagtgcggagctgggacacaggacaccccgcaggctgggtgcgaactgttgcatgccccgctgcgttataacgcctggggggaaggcgagctcatcgcagggcgtggagcctacagccgggcgggtgttcccgcccttgctcggcacccatagcgcagggcgataaccgcttctcctagaggaggggccctcgggaggacctcgtatcccttccaaattggggctcccctccgtgagggccattgccctctctagttaacgctcacctaacatactctagggcaaacgcgcagccggccagagggagggtgctcccgcaaggttttgctttgcttttggcacccgataaccttttcctcaggctccatgtaggagggcgcaccctgtgtggtcccacagaacgcggcattctaggtgggttttggggttgagctagcggaagcgacaaggcggtaccctctgtcccggacggtatgcagagttgagaaaacgcttggcgccagctttagacagttgcggcaccgtttgaagggaagggggcccgttgggtggcctctgtaacaggcgggactacgttcggcatccgcacggggtaagagcttagagaaacacctgtgccttgctacaaggaaagcgttggcgacacatgtcgcgagtacatgtttgacggccacggaacgaaaacggagctttggcaacggggacaatttcaatacatttaggtacccttctccaccaggttaaaaagcgcggaacgaagaattggcgccggaaagacactacttacagcaagcgggaagagctctaaac

SEQ ID NO: 600992 - DNA, 289 bp, Homo sapiens
acgagccgaagacgttcgagcataatcctcataagtgtccagatgcattgttactggtgccaggtctgcagcatgggcggacagtgcgcaaagtgcaggcacctacacatgcatctgatcactcttggggttccctaggacgttgagcagctcggcgtgggtcgggtacaggcccagggcccgcatcacatccccacactggccgtcgatgtgtaacatgccatcacctgtacggtcaaacagctggaaggactggtcgaactctgagaatctggtcttcgggtcgatt

SEQ ID NO: 600993 - DNA, 1101 bp, Homo sapiens
gttttagtactttgggggtggttatacacaagcgcggcttgtttctctcccgttgtttttttatggagggggggcgtttgtataccccgtgttccatggtgttatgcaccccttcgttgtgctctgagttgttccccctgattttgtcgcctttttcctgtgtgccctgggtatttgcccccttgtttctctgtcaacaacgttttcttatctcctatacttgtaccttttattattttttaaaaaatttttccataaacactcttctaagggatataaatatatggtccccgtttgtgtacattattctcttgtggcggggccgcagtcttagctcttatgggctctctctcgtttcgcgctcgtctctccaaatttccgttttgggcgtattcctgtttacgagttcacctccggagcagagaggtgcgctacggagagtgtgccctcctcgctttttgcacactctaaatattgcacaatttgtggcccacacacacaaggggtattcctgagacactttctccgaggtataacaccccgcagttatcacgcgcggggagattataatgtcttttcaaaacttgtgcctgataaaatgaatcttttctccccactttatttttccctatggtgagccccacgcggggcgctcctcggcgagactctccctggagagcgcgttgagcacactctcgagtgtatgtaaactctctcgcgaggttttgagagggccgcaccactctgtcggtatatataaaatattaacattcacccaaaacagttcttgcacatccaattagagttgtgcccccacacacttatagaggtctatataaacacacagaaggccactttctcccggagaccgtttataaaccacacaaccacactctttcaccccctacacaccgagaccgcggggtatatatactatcgggtcacaatgtctcttgtgaaaatttgttggagcgcacaaccaccacggttttaatgcccactctgttctcctaagagaattaattccccctaaaaatttttgtaaatatgggccccgttatttaccccttagcaccccctttaccccctttagagacccca

SEQ ID NO: 600994 - DNA, 149 bp, Homo sapiens
atcccctccaatgctcactccccggggaagcagattgtctcttctgatcactgatcctgtgaggcttttgaaaatctttctgatcctgcccagctctcaagtgtgccacttcacccccttttatcaccccaagcagtcagttgacactc

SEQ ID NO: 600995 - DNA, 834 bp, Homo sapiens
atggggctgcgccccgccgttgttacctggtattgtaagaacaagccgtacccaaagtctcgcttctgccgaggtgtccctgatgccaagattcgcatttttgacctggggtggaaaaaggcaaaagtggatgagttccgctttgtggccacatggtgtcatgatgaatattgaagcaagcatgtcctctgaaagccctggatgtgcttgccctgaatttgtgccaataagtacatggtaaaaatgtatggttggcaaagatggcattccatatcctgggtgcggctccaccccttccactgtcatcctgcatcacacaagatgtatgtcctgtgcttggtgtgcttgacagtgctccaaacacacgtgcatgcagaggtgcctttgtgaaagccccagtggcacttgttggccatgtgttcacaatagtgtgccaagttatcatgtccatcctgcaccactgctgcagacacacggagcatgtgattgatgggcctgtgcatgggcacaagttcaatgtatccttggccgacagaagatccacactctcaacagaatgtggggcttcaccaattgtttcaatttgcttgattgaattttgatgacattggtggattgaacatgttgatacatcaccaagaatgtgcatgtgtgggtcaatgtaccatccccaagtcgtggccatctggacaagtgagagggacctgcactcccttgatggttcccaaatgtgatggccccctcgtcatagtcacaaaacagactacttcctgtccaaacagaaaaaaaacacacacgaggcttattctatgtctagatatatgataaattgac

SEQ ID NO: 600996 - DNA, 348 bp, Homo sapiens
tggacccctcctcccccaggaaggcttagagtggggaaaagaaaaaaaggtaaccctgagggaggagtttatgtaaagggggtgccgggggacaaaaaccgccttttaaaggaaggttcaaaggaaaagtgagctgtagttatgtgggcatgttgggggttgcatggggttagggggaggtttgggggcacagggaagcctgcagtgatggggatttttaatttgttggttttttaatttaataaggggggcatgggtgtggaggtaggtcagaattcatccagttggacacactgaaagggggcaacttactgtatgtcaggggggcctcgaaaaagctgtttttga

SEQ ID NO: 600997 - DNA, 1387 bp, Homo sapiens
aacatgcatctgcctgcagtgctctgcagccctaggcattcatctttcattttcaccgctaaggtgggccatgcactaggccatcgtattcagcaaactcatccactagaaccatcgctcacatacacgcaccacgctcactcacgctagctagcctcaccttcacactatgtccctatcacataggcagcctgctcttccgcccatccatcaggcacggcttccattacactgcattgtccccgtagttcgtcagcgctacaaccccgtagacgcaaagaccgtagcgccaagaagtcgcacttgtgcacgtagtcagtagtgcagtcggccgctaacagtcgtaagctatgtcctctcccacaaagcaacctttcctcggaccctaatccgggacatgcccccgcaccgcttaccctccggcactaacccccgcacggccattacaacacccacagtggcacaaagcactcgcgtactcaatacatggtacaggcactcacatatccatttgatcctcatcacagccagccccagtcaccatcattccacattcagcgtctgtctctccaattggaactccctggaacgaacacggccctagtacggactcttccgcaccagcgctggcaacaccaggttcccccttaacacttacagctacagcagaaggcaaaccaccactctccgacttcacagacctctgggcacgcgtgggcaccgctacaccacactggcggcatttggcccgccaccccccccacccacccttaaccccacccacagccaccctatccgtcaccgcaaccgccccgggcaaattaccccgcaaatgccactgcctaagggactgccccgcccatccaccccactccccgcccacacaccccccacaacggcacgccacacacgcacccccgcagctcacgcagtcaccgccacccatcgcgcccgacaccccgccttactcaagaaaaagcaccagccctccccacagcccgcacacacaacacacgccacccacagatgccgcacgcgcccgcgcggcccccactccaaacgaccgcgtaccaccacagacagacccctgccggcctacacacagacaaggccgaggaacaacaccaaacgaaggaacgcacactactgcgggcacacgcaccaaccacaaaactggccagcagaaaagaaaacaaccaacaacgacaataagataaaacccggtcacgaacgcaacaaacgcgcccacaccacggccatggcgccaacaacacaccagaacgacgcacacacctaaagacgaccgcaacacaccagcacacccaacataacgcgacaaccacacagccgccctaaaccacagacacacccacacgccgacacgaac

SEQ ID NO: 600998 - DNA, 247 bp, Homo sapiens
ccgattgtgaaataggtaggtcttttatcacatttactatcctcatcctattactattctgacattgcagtagctctgatccaagcttatgtgtttacactgctagataagcttatacctacacgacaatacataatgacccaccaaacacatgcataccacatagtaaacccaagcccatgaccacttatcggagccctatcagcccttttaataacatcaggcctacctacctatttcacaatcg

SEQ ID NO: 600999 - DNA, 747 bp, Homo sapiens
gctcctttacccttggttcccacatgcacagatgctacggacgcttttcctcccctgtccccactcagccgcagcatccgcggcgtgggcgcgacaggcggcgtcaaccgatgccgagggccagcaatacgcaggagacagggagaccgcagtacaaagtgtagagcagagacagacgacagaggacgaaacgaaagagaacgagaggacgtgagagcacgcactgaacaagggaaaaaagagaaacaagacatgcaggacgagaagcgacgaaagaaagccaaagagaaggaaacaagaacaagaagaaaagcgcgagaagacagaaacgaggaaaaacaaaccaaacaaagaagaaagaagagccaaggaacacaacaagaaaagagaacagaagaagaacaagagcaagaggacagagatgacagaacgaagacaaagaacaaaacgaaagaaagaaacaagacaaagaaaaggaaaaagaaagacaaaaagaaaacaaaaagagaggaacaagacaaaacagaagaaagaagagcaacaaaaagaacaagaaacacaaaacacaaaaaacaagcaacacagacgaagacacagaaaaaaaaaagacagaagaaagagaagagaaaaaaaaacacaccaaaagaagaaaaaagagacgaaaaaaagaagcaaacaaaaagcgacaaaagaagaaaaaacaaaaaaaagaaaacacaagaaaaaaagaagcacaaaaaaaaacga

SEQ ID NO: 601000 - DNA, 316 bp, Homo sapiens
  misc_feature (29)..(29): n is a, c, g, or t
  misc_feature (50)..(51): n is a, c, g, or t
  misc_feature (65)..(66): n is a, c, g, or t
  misc_feature (71)..(71): n is a, c, g, or t
  misc_feature (73)..(73): n is a, c, g, or t
  misc_feature (101)..(103): n is a, c, g, or t
  misc_feature (105)..(106): n is a, c, g, or t
  misc_feature (136)..(136): n is a, c, g, or t
  misc_feature (150)..(150): n is a, c, g, or t
  misc_feature (216)..(217): n is a, c, g, or t
  misc_feature (285)..(286): n is a, c, g, or t
  misc_feature (304)..(304): n is a, c, g, or t
  misc_feature (306)..(306): n is a, c, g, or t
gttaagctctctattaagttgagaaaatnggaacttcaggtgatcatgtnnagatattcaagttnnaaaantnatttaaaaagcacattcttattattaannncnntagaaagtacagagaaggaaattttaatanacctacacctaganacactaagatactggtaacgtagaaaaatgtgtagttaatgccttgatggattcttttctattttnntctctagcaatatttatgtctatccacagaaagcgtacactcatgtatttgcatggctaatatatttnntgtaaagttctatatatncncaacatttca

SEQ ID NO: 601001 - DNA, 87 bp, Homo sapiens
  misc_feature (5)..(5): n is a, c, g, or t
  misc_feature (49)..(49): n is a, c, g, or t
ttcancctgaagagggcaaagtgacggagtgacaggagtggatgcgatnagatgtggtttgaagctgatgggtgccaccctcattgc

SEQ ID NO: 601002 - DNA, 164 bp, Homo sapiens
tactatgtcaaggttcaaaatagtaatgttaaaaatgaaatttggggccaggtgcagtggctcacgcctgtaatcccagcatgttgggaagccaaagcaggtggattgcctgagctcaggagttcgagaccagcctgggcaacatggcgaaaccccatctctac

SEQ ID NO: 601003 - DNA, 796 bp, Homo sapiens
tagaaacaaagtctcactactgtcacccaggctgaagtgcaggggcactatctgggctcactgaaagctccgcctccggggttcacacttattctcctgcctcaggctcccgagttagctgggaccacaggcgccttggcaccaggcccagctaaattttggggtattttcagtaacaagatggggtttcaccggtgttaagccaggatggtctcgaatctccttgacctcgtgaatccgcccgcctcggtctctcaaagtagctgggataacaggctttgagccaccgctgcccagtgcagcttctccaaggtttcaaggggattaaagccctaaaactctcgagggctgaaaatcaattcctaatgtgggatatgttccccaagtattgcctaccgaaagccatacaagaataagacgtgagcagtcgacagcagctagggtcaaggcaagatttactgaagccatagatgggtccaaaggggggctgagcccccataatcctgagccatcgatcttgccaggggcctgtgtgagccccaagagggcaggacggggggctcctacacaaccaaattagcctcgggggaacaatacccctggggaacgctttacacaaacccacaagaatgtccattaagaggtacaaacttgcaacccaaggttaaggggctctggagggatttgaaccaaggtttaaacgccaaaagaaagctgtacagctaatttattgcccaaaaataaccttcagtaaaggccataaagaccgctataattaccgggcaaaacatgaaac

SEQ ID NO: 601004 - DNA, 348 bp, Homo sapiens
ctgccacagagaggataatttgaaattgattgatctttgctttaacccaaaattattatcaaaactttagctgcacaggggtgcttgggtggctcagttgattcagtgttttcctttggctcaagttgtgaccccggagtcccaggatcaaggcccacattgggctccctgttcagtggggagtctgcttctccctctctctctgcccccccccccccgctcctgctctctctcttgcttgctcactctctgtctcactcaaataaataaataaataaataaagtcttaaaacaatacaattatagctgcacagagttatgctaacaaaagtataagtgaccctgtta

SEQ ID NO: 601005 - DNA, 113 bp, Homo sapiens
cacgagggctgaggaacaagcgcgggtggcgccttcgggaggcgagcaggcagcagttggtcgtgccgtaacagtgtcccgcgcgcggcggtgagcggcccagtaggcgcgtg

SEQ ID NO: 601006 - DNA, 945 bp, Homo sapiens
gctgcccagccagagttcgcaacactggatatttacaccaaataattgtggttgacttgtctgaagccagctgacaaaaggatcagcttttcccacttgtcattttttcaacaaagcagggcattgtgatccattgtccatagcagttgggtgctggcctctccatcatatatgcatcatatcatcatcatccattctacatatcatcatatcattatcatccatcatcaccatacagttttacacgtgctcgtcctcataagcctttccaagtcaccgacaccaatccaggccacaggccgaatcaagcctcatatttgcatcatcattatacagcgcgtgtactctaaactcaaatcgtgccgctgagggcatgaaattactattcaagcgcacaaagaaaagatttaagagcaactgaggccaaatgagagttttggacaatggggttgaggtcaaacattatataaacaaggtactgttggaattacatgacaaacatgggaagaaattgaacacaggtgtactaatggagtgaagagcacaaaaaccttcaagtattgacgatggacagccacctcccattgccttactagagggatgaaagacacccccagcagccacacacaactttcaatcagggaggatgacacaaaactggccaaatcacccatgtatttccaaacaaccacttttgatccttcgcttaggccccgtcttttacaagtacgatctcatacaaacagaaaggcacgattattgcattccttgcttcacacattccctcgttttccgtggatctctcagaaaccaaatggtgtggccgcccgtatacaacagcaggtcatgcgggccaagacgtccattagaaacaccactttggacgatacactatcagagagcaacaagaagcagcccccgaaactagcgatagcacaacaaccc

SEQ ID NO: 601007 - DNA, 682 bp, Homo sapiens
tgttaaaataagtaactccattgttttcctcttttccaagaatggccgatgtaatggttccctacaaagtcagggcttacttaggctcactaacgagcgctgtctgttgggcggatgcgggtgcatgatgtgcgcacgcttttcacattgtggtgtgttttcaagcctcactcaactcatcctctcattcccaaagcattcagcatccgtgcacacttcctcacttccaggtttttcaaaagcatgggagatttccaggtgggggtccatcaggttatcatcccaatggtaacagatcaagctgggttcttcagtttcctcagttctttggttcgcccatgtagcaaggggttataaggctataggtaaagtcttacagatctccgcccttcagttaacaattcatgggactcattgggcctagcttcatactaattttcaggtacatccttcccaaattgctgtaccataagtccccatattagtccagcagcacaagctacaactccatctgtgtgatcctcatctccagcaatgtggtcacttgaaacgaccgaataaattctactctgggttgtaccaggttcacatccgggtgtacgtactcctgatccccctttaatcccgtggacgatcccagtataaggcttccaagcagattcccttagctcattcagatatc

SEQ ID NO: 601008 - DNA, 333 bp, Homo sapiens
caggaaattttctttttcccagaactggggtcaggaatccctgaagggctacccgtgatagtccttgcaagtaagtcaaggttttatcctgattggaaatagaagacatttccggttgagagaacagattcgttggaagcttaacttttgttgccttttaacgcccccaaattttagggtaatttgattatgaaagagtgaatttttttggccagaaaagggagagcccccaaattgtttttttttttttaaaaggaagtttaatgtccgttgtatcccaaatcagggttaaaaccccagaactttagccaaaataaatgttttccattccca

SEQ ID NO: 601009 - DNA, 127 bp, Homo sapiens
agctttctgcttctcagctgcttcagtcactttgggtcatgggtgacaactgctgtggtggggatcttctccttcctgtagcgctgggtcttgtggtggcctcctggcggcttgcttgaactgaggg

SEQ ID NO: 601010 - DNA, 319 bp, Homo sapiens
gttttttcaaggggcccgggcccctgtcccccctgtttttttccgaagcctttgcccaagctgtaaccctccctttttttgacacccaccaaacgccaaagctttttttaagacccagcttgaaagcccctcctgagggttcctccccgctcccctaaagacaacttgttgtttttcccttagtccttttgttgcccgggttggcctttccttataggggttgtttaaatgggggggtcccccaaaaatagggggggtcccttgaattttgacccttgtcccccttttttgttccctctcccggcccgcccccccctta

SEQ ID NO: 601011 - DNA, 506 bp, Homo sapiens
ggtccggtaaaaatgtctagcacagaagtacatgtggaagaattctctcatcattgtcggtaaaagcaacgcgtctaatattaagacgaagaagataggacagtgatgagagacttcttacaagaatttaaatttggacggtgtgtatcttcaagttccaatgcccagatccatttgccttgtgtcttaagacatacaagcctgcggtttccacgctctcgggctcataagctcaagagttaacatcagagtcctctttgttgcgggaagcccaccaccatctgtgaagggggaaaagggatgagagatggggaatgtccccagaccagtgccaaaatacgcctttaggttgctatttacaaaccagggcgttggatgcctctagcaggcctgagaaaagcaggtatcatcatgtgaaccaaagcaaaagatatggctggtgctcagcccctcctgggctttgagtaaccaaactgagaccagccacagccttccaaccaacccaa

SEQ ID NO: 601012 - DNA, 318 bp, Homo sapiens
tacggacgcagcggggtggcctgacgacaagatacatgctgtgcgacgccaatggtgtcctctgcgttcctgttgtcaggcggacaagccagcgataaagcctatgcccaaccgctactcgatcaggcttgcatacccagcctgcgcggtcgcccacgcaagcgttgccgctggttgctggctgacaaggggttacgacgctgaagcgctgcgccagtattgtgatcgttatcgcatgcagccagtcattccgttgcgaagcatgaagcgcaaaaccaagccaggattgcctcgactttttgatcgcgtccgtagcgg

SEQ ID NO: 601013 - DNA, 405 bp, Homo sapiens
gcaccaagatgagtgacacagaagacgagtagtctctgcatttccaaatgaagtgccaggttcatctcactggggcgtgtcagacagtgggtgcaggacagtgcgtgcagcgcaagaagcatcactgaagcaggaagaggcattgcctcaaccaggaagcccacgaggtcagggaatcccctttcctagtcacagaaaggggtgacagatggcatctgtttaatcgggtcactcccaccctaatactgcactttccaaatgttcgtaccaaatggcacaccaggcagattatatcccgtgcatggctcagagggccctatgccaatggagcctcactcattgctagcacagcagtctgagatcacactgcacggcagcagcaaagcagggtgaggggtgcccaca

SEQ ID NO: 601014 - DNA, 525 bp, Homo sapiens
  misc_feature (178)..(178): n is a, c, g, or t
ccgaaaatggaatagaggcaggtagatcgttgagccaggagtctgagaccagcctggacatggtgagactccatatctacaaaaaaaaataaaaaattagctgggcatggtatggcatgttggtggtctcggttacttgggaggctgaagtgggaggatcccttgagtccaggggttngaggctgcagtgagccatgatcgcgtcactgcactccagcaggggatggagtgtgacgctgtctcaagaaaaaaaaaaaaaaaaaaaaaaaaaaaccaaaaagggttaaaaaatttctcaagagtttgggtttctctatatttccatgggggggttatgtgggggcgacggggcccacatggggcgcttcacgggaggggtacagtgtggaccacggggacccaagaggggggattaaccacggggattccttcactcggcggagaaaagggggaattctcccttccctggattgccccttccttttctcccttccccttctttaacccgggttgaccaatgggtgg

SEQ ID NO: 601015 - DNA, 264 bp, Homo sapiens
ggtcgacggtgtggtggcatgtacctgtggtcccagctacttgggaggctgaggtgggaggattgcttgagcctgggaggtggaggttgtagtgagctgagatcacatcactgcactccagccctgggcgacagagtgagactctgtttcgaaaaaataaaacgaaataaaaacttagctgtaagggtaaaaaattagaaactggctgggcacagtggctcatgcctgtaatcccagcactttgggaggctgaggcagtcgacg

SEQ ID NO: 601016 - DNA, 144 bp, Homo sapiens
aggaccttggagccttaccctccgggagccttatcctgcaggtactaaataaaaaatatgataggtgaaaactaaatgctacattggaacagacccacttagtacttagaagagtgggttggttttaaattatatttctttgga

SEQ ID NO: 601017 - DNA, 150 bp, Homo sapiens
tttctcaccgacaatggtgaaatcaacgacctcaaattacaacgacatggttggcaggtgatactatacaacaaataaagcgaaggtctatagtttaaacagcatttgtagccatgtttacctatcaaaatctacagtctagtcactgta

SEQ ID NO: 601018 - DNA, 187 bp, Homo sapiens
  misc_feature (131)..(131): n is a, c, g, or t
  misc_feature (185)..(185): n is a, c, g, or t
gtgatctagaggatcccatcgtaatatgtaacacttcatcaatatcttagatctttccatgactgctgcacttctacttcagcatatctgtttcacttgcactttatgttatggagacatgtcttccttanactctgaccagcctctgctagtttacattattttacggtggggttacccgtagnct

SEQ ID NO: 601019 - DNA, 440 bp, Homo sapiens
  misc_feature (48)..(48): n is a, c, g, or t
ggagaagcaagccggcgatttgtaataagggggggccgccaatatgcnctgacattccccaagcattgcctttttattttacttctttaagcggtttacccttgtaaaacgcaaaagggttgggccaagtttaaaaggctgtgcggcccctttcccatcaaaaaactactgacaacgaaggccgggcctgcctttcccatttgtttttttttttggcgggcagggaaggaaaaaacttgcctgttggtaaagaaaaaaatggggtggaaaaagtggggggggcccccagtgaaatttaaagtaaaccccagctggcccaaggggtcccccaggctgtaatgcagtttaatcaaagggccctttttttttttgttcaaaagattttaattattggaaggccccatttttttaataggcaaataaaaagtttaaaaacttta

SEQ ID NO: 601020 - DNA, 1037 bp, Homo sapiens
gcacgagccacaatctcttccctcccatctacttggtatgatgcgagctccacttcccagacttctgtgtcatatgccagtcaagaatccgactatgccgttaatcaaaactcttggagcgcgtctactaatcaactgccatctaccagtacgacaagctactatgcgccaaccttcagtacatcggccgattttgctgcttctaatgtaaatgcagcttctgatgtctccactgccagtgttcccattgatacgagtgctaattctatccctttcacaactacaagtaacatagagactacaacgagtgcacctctcacttcggacactccacttatttccactagtacgatgtccgcagctgataacgtattttcgtcagcaaaccctatttctgcctccctaacaaccaccgatagttcagaaagttttgaccaaacttcgactgctggtgccattccggtgcaaagttcagcagattttagtagttctagtgaaattttagtacaaagttcggcggatttcagtagccctagttctccaactactaccgatatatcgctatcagctgccccactgcaaacaagtgaatcaagcagttttaccactgcatcagcagctctaccagtaagttcaacagacgttgatggctcaagcgcctcacctgtagtgagcatgagcgccgcaggacaaatagctagctcaagcagcacagataatccaactatgtcagaaaccttttcgttaacatctacagaagttgatggttccgatgtttcatcaacagtgagcgcattattatcggctccttttttacaaacaagtacttccaacagtttcagcattgttagcccatcggtatcttttgttccatcacagagttcctcagacgttgctagctccagtactgcaaatgtagttagttcatccttttctgatattccaccgcaaactagtacctcagggagcgtagtttcggtagcgcaatccgcatctgccctcgcatttcaaagttcaacagaggtatatggtgccag

SEQ ID NO: 601021 - DNA, 131 bp, Homo sapiens
tgcgctctcttcttatagtcagcgacatgtgtcaatggggagggcctgcatcgtctgctaacctgaaggatctggaggtaacgaggccctgtggccgtggcccagatgacccgtgcaggccagccctccaa

SEQ ID NO: 601022 - DNA, 377 bp, Homo sapiens
atgctgccggccggaagcacccaaccggggacttaccccgggcgggagaaggttccacaaccgggaccacaattaattggaagtggagttttaacggggccgttttaattgggttcttaattccccagtttcttaagggcgagggcggttggtaaacccgagtttttttaacaaggtttacccccttaaaacgagacacaatatactgctacactctcgtggtacatctttctcatccccgacgccggggccgcacagggccgctcccatgtggagctcccaggggtagtagcacttaggaggcctcctactactttttcggcggctgcaacaattggtgggggagtaatcaccagctaataattcatcgagaggta

SEQ ID NO: 601023 - DNA, 214 bp, Homo sapiens
ctccttactggtctgttactgcacgtgcatacattggcggtatgctatctgaacaacgctggccattgccgcacaacaggctattacccgaggcgcccagcgtgtcgcggtattggacgtcgactttcactcatggaaccggtacccacgaatattttctacgggcgcagtgacgtcatgtttgtctcgcttgcacggggacccgaacggtgtc

SEQ ID NO: 601024 - DNA, 1119 bp, Homo sapiens
taagacaaaaggtttttattcaaaaaacgccaagtataaaaaaaagaaataagatctgctttaattccccgtgtacagtattgcactcagataaaaccagcaggctaccgggttgctcaaaacacagccccagagaggatctggaaggccacaccatcgcaaaagcgtgctttccataaattatcctattttacacagtcagaaagtcccttccccattacccaaagaagcgcgggaccccaccgtgggataacgctaggttgaggggccccaaagaagccagggagcctgcagcacgtgtcccgccgtaagttcccggtaacccgcaaaaacgagagcacagcgttcggaagaccttccccccaaagaggtccccaagttcagcagggaggcaaaggaggcaaacgaaacctacgggcacgcagtctaatgggacaccttggggcacatcaggaacggggcaaacccacaatacagcttacccacttcacactaaaattcctttaaacatttggagccctccccagggcgttacaaaagtgggccattctttccaagaaccccacgaatcctaacacacgctggggtcacaaaatcaactttaaaagggggcaaaatttttcttaaaaaatttaaaaatccccctaaaaatcctttttgggtattactaacccgtgccaacgtgtccacccccttttttacaagctaaaccggggacgaatgccattgggtagggagccattcacgccggctgtgaaaaacatccgggccatcgacacaccaggttcagctaaaacccaaagaagggaagacccgtccacacggagtatacacaaaaggggcgggccacaccggggcagcgggtccacagacattgggcccgtgtaaccctttccccagggcacccttcaacttacaaacgggcaggagggcaggcacagctacacaaaaggggcaaaaacccggaattttgagggaacacacggtgaacaaacacatcaatattatcccacaaaacaggaaccaaaagtaccaaaaattgcaacatagagagtcaaaacggatgcatcacattccactagctatcctcgactgtacacacatatagaacactatata

SEQ ID NO: 601025 - DNA, 195 bp, Homo sapiens
cctgacccatgtgccagagcattatgcagactacatttcgatttgaaaaaatggcccagctgaacaaagtgtttctggttttgagagagagagagattgagagacagagagagagagagaaacctagggatcatgatagttatagtctgattgagcaaggattatcttttgaaaatgtgttggttctgtgataca

SEQ ID NO: 601026 - DNA, 227 bp, Homo sapiens
  misc_feature (160)..(160): n is a, c, g, or t
  misc_feature (211)..(211): n is a, c, g, or t
gttagaggatcccgttatgtggtgtaccgtcacagacatagaaaaaaaattatgattataaaaggaaaagaaggagagataaattaggagtatggaattgacctgtatacactactatatataaaacagataaacaacaaggtcctactgtatgccacangagaatgacagtcaaacttgtaataaccctataatgggaaaataatcacgngtaagcgaccacagta

SEQ ID NO: 601027 - DNA, 1218 bp, Homo sapiens
  misc_feature (208)..(208): n is a, c, g, or t
  misc_feature (639)..(639): n is a, c, g, or t
tggggtacttttttggtaaaggcggggttccaacacgttgcccaggggggtcttgaaactcctgagcctcaagctatccatccacctgcctcggccccccataagtggcgtgggagactaacagggcgggagacgcacagacacctaacgccctcttctctttttcttggtgctctggtgagaatgagagggtttggagacgccaganaaccatctggaatgttataagataatgtggcaaaaagggctctgtgtgtgtgtgcccccgggagatgtgaggagacagggtgtgtgtcgcaagagtgggtgtgaagaacccacaggctcttctgtggagaccccaaaggtcgtcaactgatgtgagcttcatcctatataccttataagacaaagaagactatatctcgagacctgtgtgtaagacagacacctgtgtgtgacccctgtggggtatagtgagagagatgtgtgtctgtgtgtgggcggcctctctctctgagtgtgcgtgtgtgtgtgcgccccctctctgtggggggtagagggaactctttttctctctctctctcttgtgggctctctctgtgtgtgggataatatagttggtctctcaggtccaccaactgtgtgggggcgccctangttgtggacccccccctctcaaacgaagaaggggctggtgtatccggaggggggacagctggtgggggacaaaacaacaccacccgaggtcttatgagaagggcaatcctctcagatgttggaacaagctacctacagaaggatgttggagctcttctaataagaagaaacctctcttcccaaagcggagagtgtgctgttgtgttcaccacaccaaacagacgaggtgggtttgttgggcaaatatctcgcagtgtagatgtggtgacacgctgagtgtagtagtttccagtctacagggaggacaggacctactaattctcctcaagaatgttgttgaacacaatttctccccaaacacacgaggaatttattgtggcatgtggggcccctcctccacgaaggaggtggcgaagaacatattatattcccaactagcaagagagggggattaaatcagacaaggggagaccaaggcggtaaacaagggacagggttcattttgtggcgcacacctctttagtggagactgtcgaccacgcgtgggggaaacacctccaaacaagagaagggcccaaa

SEQ ID NO: 601028 - DNA, 103 bp, Homo sapiens
ggtgggagtgccgacgagtcggggcagatcttcatctggtagccaagaagagagcattaaacccaagaacttggtggagaaagatggactgttgaccagtgtg

SEQ ID NO: 601029 - DNA, 340 bp, Homo sapiens
cccagaaaaaacacctctaacaaacacaaatatatgccattcaaaactgggcaagggcggccaggcacggtggctcatgcctgtaatcctagcacgggaggctgaggtgggcagatcacgaggtcaggagatcgagattaccctggctaacacggtgaaaccccgtctctactaaaaaataccaaaaaaaattagccaggcgtggtggcaggtgcctgtagttccagctacttgggaggctgaggcaagagaatggcatgaacccgggaggctgagcttgcagtgagccgagattgtgccactgcactcaagcctgagagacagagcaagacgccgtctc

SEQ ID NO: 601030 - DNA, 283 bp, Homo sapiens
ctgccactgtgcccggccaatacattcattattaacttaaggctgtactttattaaggcttccttagttttagttataagttatcgtattttttgatgcatggagtctcactcatgtcgcccaggctggaatgcagtggcatgatctccagctcactgcaacctctgcctcctgagttcaaatgattctcctgcctcagcctcccgagtagctgggattacaggcacctgccaccacgcccagctaattctttgcatttcttagtaaagacgggggatttcac

SEQ ID NO: 601031 - DNA, 170 bp, Homo sapiens
gcacatcgagaggcttcaactgtataggtggagtaggggattgaagtatcagaaatctacacgggaaaaaacagtattaaaacaacacaacacttaacttttcctctagggagaggatttggacagcgggaaaatattccttacttctcttattattggttgaagccacg

SEQ ID NO: 601032 - DNA, 370 bp, Homo sapiens
gaattcctatttttcccctgattatggggattgatccccccgcaatcctattatgtatttgagtgtgggtatgtgtgtgttatgggggaaggggggggttctttaaaatttttgtggtttgtggcttttttttccaaacattagttccccccctcgcatgcccaggggcccctgcctggcatttttgcatgctgggatcatcgggggagggtagtgaagctcacccctgtcctttgttttggagatttttttttttgcataagtagtccctcctatacaaatagctgatttactgttttcccctttcccctatgggtgctggggtaaataaactgcctttcccccttggttacccgtaataaaattttta

SEQ ID NO: 601033 - DNA, 255 bp, Homo sapiens
  misc_feature (22)..(22): n is a, c, g, or t
agcggcactgagtggaggaggngcagcaaggctgtgccaagaacatttatcaggagttccccttgtggcgcagtggttaacgaatccgactaggaacgatgaggttgcgggtttgatccctggccttgctcagtgggttaaggatccgacgttgctgtgagctgtggtgtaggttgcagatgcggctcagatcctgaattgctgtggctctggcgtaggccagtggctacagctccgattggacccctagcctcc

SEQ ID NO: 601034 - DNA, 1042 bp, Homo sapiens
ttttcgtttttgttctctttcctgctcgctcccttttctgccgttgcctcgtctctgcgtcttctttcttctttttttttggttcctctgttttcctttttttcggtctgggtgtgtctcttctcttctgtctccctcctcgtgtgtcgctcttctctgctcatttctctctcctctttgtttcgtcgtttttggttcttctcctttgttgtcttctgtgtcgggtttgggctgcgtgttcgtggtttggtggtctgtgcctgccttgttggccctgctctgtcgcctcttttgtctgtcgtcttctcttcctctcccctgtcggtggtggttttatttgctttagtcttttccttgttctgttgtaggctcgccctcttttttcgcttcttgcttgttctgcttcctccccccgctccttcgcgtcgctcctcgccccttgttctccctctcgctcctcgcctgctttgtctccctccctgctgctgtctctttctttttttttcctcttccgccgagtgtggtactctcttcttcttctccctcaccttcctcttttcttcttcgtctccctctccctccgcttcgttctctcttcttcgctccgccctctccttcgccctcctcctccctcttccttccgccgccgctccgcgcgcctcccgcgtaatgtgcgccgccgccgttgttctttctctcctccccgcctcctcttctttttctgttttgttttttttctctctcccctccccgctcgcggcggctttgttctgtttcttttgtttttttctcctctcttttttttccaccccccccccccccccctcccctctctcattactattattatgttttttttttctctccctctctctctctctctcttcttttttataaaaaaacacaccccccctctctctttgttgttttttttttgtgtgtgtgggcgcccccgcgcgcgccccccccccccccccgtgtgtcgtggtggggagagagagaaaaaaaggcgtgcgcgcgcgcgcgcccccccccacaaata

SEQ ID NO: 601035 - DNA, 296 bp, Homo sapiens
gaggcggccgaattctaccttcagcgatatcccagaagaccagaacagctctctgagctgtggaaaccgccctggcagtgcaatggagtgtgcattacatttggaaaaaaaatgtgaatcagtcactactggaactgcactaccgtggccactgacaaaaatacccccatttgtgtgacttctttgtagacacattacctgattcagccggtgaaagccatcatagaattgggtgaccacgttacccacttgcgcgagatgggagcgcccgaatctggcttggcggcatatctctt

SEQ ID NO: 601036 - DNA, 694 bp, Homo sapiens
  misc_feature (18)..(18): n is a, c, g, or t
  misc_feature (81)..(81): n is a, c, g, or t
  misc_feature (94)..(94): n is a, c, g, or t
  misc_feature (99)..(100): n is a, c, g, or t
  misc_feature (103)..(103): n is a, c, g, or t
  misc_feature (105)..(105): n is a, c, g, or t
  misc_feature (122)..(122): n is a, c, g, or t
  misc_feature (137)..(137): n is a, c, g, or t
  misc_feature (139)..(139): n is a, c, g, or t
  misc_feature (152)..(152): n is a, c, g, or t
  misc_feature (162)..(162): n is a, c, g, or t
  misc_feature (176)..(176): n is a, c, g, or t
  misc_feature (185)..(185): n is a, c, g, or t
  misc_feature (188)..(189): n is a, c, g, or t
  misc_feature (228)..(228): n is a, c, g, or t
  misc_feature (231)..(231): n is a, c, g, or t
  misc_feature (234)..(234): n is a, c, g, or t
  misc_feature (237)..(237): n is a, c, g, or t
  misc_feature (275)..(275): n is a, c, g, or t
  misc_feature (331)..(331): n is a, c, g, or t
  misc_feature (592)..(592): n is a, c, g, or t
  misc_feature (605)..(605): n is a, c, g, or t
  misc_feature (663)..(663): n is a, c, g, or t
ccaggtggggtgggtgangctgtccatcgagggctctttggggggtgtgggctctgggcactgcccgctgagaaagaaaangcagaggcagganaatanncancntcctggatggtactgangtgacttgagttttngnaatttggctttanccaaaaagcnggaacaatctccanagcactgtncanngaagggggcaggctggccaggcactgtgggctggggagnagnagnagnaaaacccacgtgtccctgggtcactgggttcgccaacngggaaaggacggggaggccacatgctcatgcagacacagggagttagaggctagtnaggccccacggtacactccacatgttaaggcatcatggttagacgggaccgacagcgacaagggggctggccagggagcagcggggctggaggacggcccggcccccacgaggccgtgcatcccacaccccagctccaccccggagcagcagacgcacacgtccaggggcaaccacggggcctggagaatggctgctccgctccctcctgaagccaggcctcgggtgtgacggggagatagaacctggggggcacagaaanggcagcagaggcntggctgcgggctctctcccccacagcacaggcagaagcagcaacgagacaggagaccnaggaggcttggggctgttggtggggggaggg

SEQ ID NO: 601037 - DNA, 829 bp, Homo sapiens
  misc_feature (3)..(3): n is a, c, g, or t
  misc_feature (34)..(34): n is a, c, g, or t
  misc_feature (155)..(155): n is a, c, g, or t
  misc_feature (195)..(195): n is a, c, g, or t
  misc_feature (197)..(197): n is a, c, g, or t
  misc_feature (203)..(203): n is a, c, g, or t
  misc_feature (208)..(208): n is a, c, g, or t
  misc_feature (220)..(220): n is a, c, g, or t
  misc_feature (229)..(229): n is a, c, g, or t
  misc_feature (234)..(234): n is a, c, g, or t
  misc_feature (258)..(258): n is a, c, g, or t
  misc_feature (264)..(264): n is a, c, g, or t
  misc_feature (271)..(271): n is a, c, g, or t
  misc_feature (273)..(273): n is a, c, g, or t
  misc_feature (319)..(319): n is a, c, g, or t
  misc_feature (329)..(329): n is a, c, g, or t
  misc_feature (335)..(335): n is a, c, g, or t
  misc_feature (344)..(344): n is a, c, g, or t
  misc_feature (354)..(354): n is a, c, g, or t
  misc_feature (359)..(359): n is a, c, g, or t
  misc_feature (365)..(365): n is a, c, g, or t
  misc_feature (372)..(372): n is a, c, g, or t
  misc_feature (378)..(378): n is a, c, g, or t
  misc_feature (406)..(406): n is a, c, g, or t
  misc_feature (408)..(408): n is a, c, g, or t
  misc_feature (443)..(443): n is a, c, g, or t
  misc_feature (451)..(451): n is a, c, g, or t
  misc_feature (453)..(453): n is a, c, g, or t
  misc_feature (495)..(495): n is a, c, g, or t
  misc_feature (569)..(569): n is a, c, g, or t
  misc_feature (571)..(572): n is a, c, g, or t
  misc_feature (594)..(594): n is a, c, g, or t
  misc_feature (598)..(598): n is a, c, g, or t
  misc_feature (600)..(600): n is a, c, g, or t
  misc_feature (606)..(606): n is a, c, g, or t
  misc_feature (609)..(609): n is a, c, g, or t
  misc_feature (635)..(635): n is a, c, g, or t
  misc_feature (640)..(640): n is a, c, g, or t
  misc_feature (696)..(696): n is a, c, g, or t
  misc_feature (823)..(823): n is a, c, g, or t
cgncggtccaccccggcttcccgagatacgctanagttgcccccacgtcctgtccgccgcgcccctacccaccgggttgccttcggggcccttcggtgctgtgtagtcggcgtggcgctgtgagctaggcgaacaggaacccccaggcccgccangtctacgctattagcagccaggtagccctgcgggtcgaanangctcanaagangagtaaatgcanaaaaaaaanaaaanaaggaataaaaaaaaaaaaaaaanaaaaanacgtaananaaacgcactcaaaaacaactttgggattggactttttcaatttcanacgaaaaaanttggantatctgganaaggtttttnaaaangtttangaggganggtganttttctgctgaaaaactcaatctgccananagtagcggccccatctgggatctgtcactgctganagcaccananggcacagccgtaatcttctgcacagcctgcactccccgaaanaccctccttaatcaaaggatgtctgcgcgcctgagctcagctgaccgcgccgggagcaccagggccgttggatncnnccccagcccgccccctccccangcananagccanggnccctcgcgtcttcgcggcacgttaantaaangcggaaaacagacagaggctgatgtcattgctctcacaagatcataaacgtaaaanagtcatcctgtgagaatccctgaaaatgactttaatgaataatttcagagacagttatgactttggggtgattactgagcaagaatatgaaaaccagaattgcaaagcgaaggcggatggtcaaaangcctgg

SEQ ID NO: 601038 - DNA, 858 bp, Homo sapiens
gccctttcccctggctggcagcgcggaggccgcacgatgcctggagttactcgtaaagagaggtgaatcgcagcacggacgttcgtcaagagctctggcagccttcctcaaaaagtccgggaagctgaaagtccccgaatgggtggataccgtcaagtcgtgggcaagcgaacaaacgagctgtgctccctacgatgagaactggttctacacgcgaagctgcttccacagcagcggcacctgtaacctcacggaggtggcgctggggttggctccatgacacaagatctatgggggacgtcagagaaacggcgtcatgcccaagccacttcagccgaggctccaagaagtgtggcccggcgggtcctcgcaagccctggaggggttgaacaatggtggaacaaggaccagagataggcgtgcgcaaactgatcgacctcagggacaaagagatctgggacaggaatcgcctggacacggtgtgcagctgccaacatagaagcattagaacaaaccatgctgggtcaataaagttgcctcaattcgcaacaaaagcataaaggataggcgggaactgcgtcacatgaggtgcgagcgtaccctggggcactggaaaaagacgtctcaagaaagaccatatggggaaggacgactcgcgggagactaagagaaggtgagactaccagtacaaacctgcggggaaaccccccagggataccccaagaagacaaacgccacgggggaagaccgcataagagagctgcccagtaccttaccaaccaaaacaaaaaaaaaaagacgcccggaaggacagcaccacgcagaggtaggactggagaacgggataccgccacaatg

SEQ ID NO: 601039 - DNA, 236 bp, Homo sapiens
gccccaggggcaaagggggccaaccaacctcaggggggagtgttttggggtccccctcctccaaagggcttgggccccccccgagggggcagcgaaaggagtttccccatccccggtcagtcccccctgccccgtcccctttcccttttcctcggtataaatcatgttttaagttatggaagaaccgggccctttttcagaaaaaaacccaaaaccccccaaaaatatacgtggga

SEQ ID NO: 601040 - DNA, 662 bp, Homo sapiens
agggctccaaaatgtgcgagtgaggctgtggggactcgctgagcatcgtagggggagcgtgcagagccgatgcgagcctcacagtaccggagcccggccgtgccgtgccgtagggaacatgcacttttccattcccgaaacacgagtcccgcgaggctggggacagctggcggtatccggctacgtggctataacattcacgtgaatggagtcctgcacatgtcgggtgcgctactagccagctcctggggctgcacgagcaggtgggactagcacccctgcccttgagacagcttcaagcccttccctacacgtggacatcagtgtctcccttatacccgctctatcttgttcccgtagggctgtagtttcccctttaatcactgccacaggttcggcaagacccattgcttgggaagcagcgagactttcaacagtttcctgctgtcgggcacaacaggcagacacagcaggtcccccacagacgcaagtgtcctttgcgaatgtgcctgctcaaccgggcagacaagtcctggtcaacgttgctaacttcagactcagacctgcggatgtcctggaggctgtaagctgcaaagctggatcttccagatgacttgattggatactttagtctattcttagttcgagaaacatgaggactg

SEQ ID NO: 601041 - DNA, 871 bp, Homo sapiens
tgggcaaaaaacaagacaaccgattttttatttatccaaaagtaaattctccaggtgtaaaaagaggccacaagttattgttgtaaaaaaaaaaatttaaccattctggcatacccaaggtgcgtgcatttaaatgtgaaaccacctaaagacagaaaacagagacatgtgaaacacccactggaaaaccagccacccggagctcagatccggctacaaagcaccctcctctacaagagaacacgtggaactcaccaatgggaagaagcaagatcacgtggagggtggaacggcaccgaaaccgtggaaggtgtgacgatgctcaagaagtctcctcacgacagaacctcagtgggccccaaagtgcccccagaaacctcaagagcaggcccccaatagcagagagtgacaaccccgcaactccgtgtacgcggcgggaatcaccccgagccgagaagagaaagaacatgcgtgagctttgtgaggcccaactccgtgaaagttgtgcccacgtctcgcaaccacacacagtgttcaatctagagacgggaaataactgcgcgccaattacacaccgcgggacacgagtacaaacacccagcgacaacgccataaatgagaggctccgtagggagccactcagtcggccggagaaccagccgggaacagaggataaataaatcgcacgcacgcagctgtataccagagcccacgtacgaagggaccgcaacaagggagacatgtgtgacctaaagcggcgcacacagtggagacacactccccccatctcgagcgagcactatgacccgacgtgcacaacacacgcgcggccactagtagaccaagtgacaacaaacgacgcacccgacgc

SEQ ID NO: 601042 - DNA, 224 bp, Homo sapiens
gctatccagctctggagagggaggatcatttgaggccaggagttagagaccagcctgggcaacaaagtgaaacccttgtctacaaaaaatttttaaaaattagccagggagtggtgtggtggctcatgcctgtaatcccagcactttgggaggccagggtggattacctgagttctagaccagcctaaccaacattgagagaccctgtctctagttaaaattcc

SEQ ID NO: 601043 - DNA, 986 bp, Homo sapiens
  misc_feature (463)..(463): n is a, c, g, or t
  misc_feature (986)..(986): n is a, c, g, or t
ggtccgtgcaggtgcataagggcaccgggcgcccctgtgcgactggcgcgcatggtgtcggtcgcccgagttgtgtgacccggcgcgatgactcttcgagcagagtttgcgctgtcgactgaatgacgtgctagcatgactcggctgcagtctgggatctgctaagaagaagttagctctagccgcggatccgcatcttacgccgtggcgcgaatgactcgcgggaaaagggaaccgctccaggagaaagcgtagctgcaatggctttgtatgtgaatgaacgtacccctaccgggcgctacctgattcagcataggaggctcacggaactctaggcggtggggagccgtgtttggcgttctctggatttgagtgcgttgcctatggcctgcataggccagatgagtgcaattctagggatttcatcattgcctgaggatctaggatatatccaagagttgtnttcatatgaacatgagagggcacatgggaagaccacaaggaggtaaattaccacacgtccggagcgtaaggacgcaaaggatctcgagtcacgatcgcaacggacgtctgtggttggcatgaagtcacagcgctatgtggtcccagtcctctctgtcgttcgcgcatcgttaggctcggtgagaacgaatctcctgctcgcgttcggatcgttccgcgcgttgaaattcgcgcaggaagactacattcggagtttcttctgctgtcggctctccccgtaactggggcgtgcggcgttcgcggggccccgcgtgcaagaagcgacagtaattgtccgaagagaaggggccatggggtggggggcttgggagcgggcagagcgacgaagtgaaggaagcgcttaagttctcagcttggtcccttcactttgggcttgcatggaattgaacttcagtaaaactttggcctaaaatggaaagcagggatctaccggcgtatagaaacaaaccgtgacaaaaatgccn

SEQ ID NO: 601044 - DNA, 357 bp, Homo sapiens
  misc_feature (179)..(179): n is a, c, g, or t
gaccaccatccagtcacctcccacaaggccccaccttcaatattgggaattacaattcgacatgagatttgggtggagattcaaatccaaaccatgtccttttgcttttttctgttttgtttgtggagtagatttttctccatccctttactttgagcctaagggtgccattgcatgtnagatgggtctcttgaagacagcataccattggttcttgcttttttatccaagtcaccactgtgccttttaattggggcatttagcctgcttacattcaaggactcagtgacctttgaggatgtggctgtgaacttcacccagggaggagtgggctttgctgggtccttcccagaagaa

SEQ ID NO: 601045 - DNA, 197 bp, Homo sapiens
cagcaggacacagcacaactgtctacacactcggttatccccctagggaataaaacctcaggggccaccagtagaagggatgagagctttccctttctgcactgtatacacaatctatgtgtactgtttgaaaaaaccatgtacaagcactttgttttaactttgacatgaaaacattaaacacttttttttgtata

SEQ ID NO: 601046 - DNA, 146 bp, Homo sapiens
cgattcagcttatgtggagcgagatgcggaaacggggcttcgaggtggtatatatgaccgagcccattgactgacgtactgtgtgcagcagcatcaaggaatttgatggtgaagagcctggtctcctgttcaccaaggcagggtct

SEQ ID NO: 601047 - DNA, 941 bp, Homo sapiens
ggcctggtgtgatccgtcctgcgcggttgtctctggagcagcgtctttaatctccgtccgccttctctcctacctaagtgcgtgccggcacccgatggaagattcgatggacatggactttgatgccccctgaggccccagaacatatcttttcggtgtgtgaactaaaggccgacaaagattatcaacttcaccggtggctcattgcatgacacacatgagcaccagttatctttaagaacggtcagttcaggggcttggttgcacgaggcatggagttgcacatgttgaatccagaggcacatgaattacgaagggccggtccacattaacgtaccactggcaactttttgacacaactgtctgtacagcccaaacggtttccccttgggggcgcttcgacattaccacccaccaaggtggtcttagagggtcttgaagtgtggttcaagggccagtgcattattccgtggacacgcactatagtagctgtggaggaagattgcagagtcaggaagatgaccgaggcggagggactgtgaccttctcaacgtatatctggcacgcggctgccctgaggtggtagcacggttccccagacaacaaacaggtaaaaccttgtctgcttactgacagatgatgcacgctgatgacgcacaggcgctgatcgacgctgcgcagctgaagctctgaggagaggaagctggaaaacaagcccggggagaatcaaaggggataccccgccacattggccaaggtcatcagagggaagctcaaccttccagcccagacaaaggcagactctcagaaaggaaacctcaaacccaggctctggcgagaccagactagcgcgcacaaggctctccaggcgtcaaataggaaccgcgcacagaccctcgcggcgacaaaatcacaccaacacggcacaatcgaacacgtct

SEQ ID NO: 601048 - DNA, 151 bp, Homo sapiens
  misc_feature (64)..(65): n is a, c, g, or t
  misc_feature (93)..(93): n is a, c, g, or t
  misc_feature (104)..(104): n is a, c, g, or t
  misc_feature (111)..(111): n is a, c, g, or t
  misc_feature (114)..(114): n is a, c, g, or t
  misc_feature (117)..(117): n is a, c, g, or t
agacacaagtcttcactccttcctgcgagccctgaggagccttctttccccagacatggccaannagggtccttcctatggcatgagccgcgnagtgcagtccnaaatcgngangangtattcgcggcagctggaggagcggcttggtgga

SEQ ID NO: 601049 - DNA, 812 bp, Homo sapiens
aataaagtataggcgagagaaatggaagacctggcgcaatagatatagtaccgtaatggagaagagatgaccaattataagctcaaagcataactatgaagctaaaggaactagacccctagttactctctctggcaatagagtgacattcaatctagcaatatagaccttcagtcataggagagcacaacaggcataggaccgccgagaccagacgagctacctgaggaaacattctaagaagagctaaggcctagcgccgttctatggtagacaacaagtaggtggagacatattatataggtagaggcgataaaactaccgagacctggtgatggctggttgtccaggatgcatagaatcttagtttcaagctattcaaatttgcaccagcagaataccgtctaaatcctcgcttgtaaacttataatgtggttagtgcacaacagatggaacttcggttcttttggagcagctgagtgaagagataaatgcttgtaacgagagacgtaaaagataattgaaaacaccccataagatagggtcctaaaaagggcaagccatcaagttaacggacaacgcgttccaaaggtcgtcataacaacgcatctacctagaaagaatcccgacccatataattgaagtcctcacataccagatcggaaccagatctatactactcctatagaagaaactgactgtagagtgataagtaacatgaggacatactcgctccggataaggccgtgcggtcagattactatacactgaaactgtacatattacacgaggccaaatatgctacaatgtca

SEQ ID NO: 601050 - DNA, 440 bp, Homo sapiens
ggtgcatagtaggatccccgcatgagtaaatcttgtgttggagatcatcactgcactccagcctgggcgatgagcgagactccgtctaaaaaacaaaaacaaatatgggggccactcagacggtctagggcgccggcctaggtagtaagtcgagaaaggcaattttaaatgtatgtgcctatttccaatttcttcctgagactgctgtgacggcaaatgtgttgggggatgagccttcctccctggtggagtcaaaaccacaccagcgcagggtccttgccttgactggctctgtaagcaggttctggcccttcagaacaggccgttcgctaaggtgtcattgagagcgattttcctcgttctctaactggaggaatggttggcataatacctgagcagtattttattagaatcctaaggtgtagcagcagccgtgattg

SEQ ID NO: 601051 - DNA, 195 bp, Homo sapiens
gcctgggtggtccgtgtccgttcatgttgccctggtggagtgctggccagctccggtctgccaggcgaggcggacggtagcttccttgtccctgtctctgcacagccttttttttttgagatggagtctcgctctgtcgcccactgctctccagcctgggcgaaagagtgagactgcatcttccaaaaaaaaaaa

SEQ ID NO: 601052 - DNA, 673 bp, Homo sapiens
ggccccgtcattgggggtgaatcagaaaaattgccccttgtggggcccaggcttccttctctgtttgccaagattttgttattgttgtcttgtgaaaaaatatcccctggcgcaccccacccttggttaaggttcccaaattgagggcctctccctggtatgctttttgtaagaatttttggttttgttcctttaaacggtagagcctcacccaggggtgggtcttgggggaaataccattccaaaggaagccatccctatggggaaattggttttactgggtaaattaatacttttatttcttcccctatcccttccttcctagttgtgataaacatgggagaggagtgactttgactgctggggaatttcctcctaagaaccttattcccaaaataagccagggattatgtcaaggcttctttcaaggaggctcataaaagcagtgacctcatccggggctttggatagagtgagaattccccaactaaattggacttctctgctttatccccttctcttccttcaccatatgcagtacatttctggctgatcccaatcagattcccgctaatggaagaagtttagaatctttcaggtggaataaagtcacatgaaagcaaaacacaactatatatattttcagcttttttgccaagttaattttttttca

SEQ ID NO: 601053 - DNA, 312 bp, Homo sapiens
tgtgtacacccaagatactcgaaatacaagaagcacactggaagtcgtaggcgtcaggagaccactagagttctacagacagacttgtagaaaacactagatctgacttattattgaacttgtactcaaccctctatttatttcgagagtaaggggttgcccggcccagtccagcctctcatctcatcagtcattccaatgccacaaggcggcggctggctagtgacctgtggcagctgtggcttcaacattacgggcagagaacacggacaggagttagtacagagatagtaacgcacaaaactgcatgtg

SEQ ID NO: 601054 - DNA, 382 bp, Homo sapiens
gaaacataattaaaatagttgaatttttgatgaaaattttctgtaatcttcacttcaggtttcccaattaagaaatgacagtgaaggctaggggcggtggctcactcctgtaatctcagcactttgggaggccgaggcaagtgaatcacctgaggtcaggagtttgagaccagcctggccaacatggcaaaaccccgtctctactaaaaatacaaaaattaaccgggcatggtggctcacgcctgtaatcccagctactcgggaggctgaggtgcgagaatctcttgaacccgagaggcagaggttgcagtgaaccgagatagtgccactgcactccagcctgggtgaagagcgagactctgtctcaaaatcataaataaat

SEQ ID NO: 601055 - DNA, 161 bp, Homo sapiens
gcggtagccgaggaggggagtcatagagggccgactgtgaatgccgggtgcatgtgcggaggccaggagggtcgactctgagtgccaggtgccatgtgcggtggccaggcagggtcgactgtgagtgctgggcaccatgtgcggacggcaggacggggagg

SEQ ID NO: 601056 - DNA, 1514 bp, Homo sapiens
gctgagcacgctccatactgggagaggcttctgggtcagaggaccagtctgcagagggattccatgtggctggaagcgatggaggctcacacagcggacacgttgtcgagcgtacctgcagcgctagggactctgggtcatccagggcgacggccgatgacacccttccgagggctctttcgtggagtgctgagccgtgcgatggttggcatgcgaatcccgacaggccgtgatactagaactgcgatcgacgaatgcggcgccctgcgcccgactcgcgggcgcgcccacgcaaagcgcagtgggctccgcagctgagacgactccttctaacaccaggggcccaagggcgcgagacacccgtgcctgtggcatgcagcaacgacatgcgtgggaagcgcgtgagccctgacttggccccacgccggctcggatcgctgggccagggggaccccttgagcgacatgtcccgatggaagaacggacacaacacccaagaggccctcactgggcagccgcagataggacactcccccttatcggagcgcccacacgcccagtccaacgggcggcctcgagatcgaactgccctgggcaacaggacgagttcccaagggtggcaacagggcgaaacaccggagggcaccatcaacctgggccccggacgtgaccacagggttccccctgagcgcccttgcgccctgcaccacgaaaggccacacccgtggccaggggccacccgaagcaagccaaggacccgcctgcgcctggctggcgctccataggcgcaccccaaacactggacacgaacgccaggcgcatgcgccaacacccaaacaaaaaccccgtggagaaacacctactacaccaaggggtgccaaggccattacataccggcgcaacgggaccccacatgtggccgacccccaaggaaaggtccgttatcatcggaaccccaagcgctccatccaccgacgaggcgccactggaccggaaccgacgtggtctccccaatcgccagaccggctgcacaactggctggccacgagggggtccgcaacgggagccggcccacccaggagaggcagcttatcctggcatgagaccccaaccaatctgggtggttactaatgcccctgggtaccttaggctcaacacagcactaggggaaagtgggccccccactgtgcctccctttcgatgtcggcaaaatggggaggcaccacgggatgacaagggcaaattaggctccgactccaacatggcaacgttggttcggcaccattggctctggcacctctagtctgattgcacccaatggcgagtcacagacgcgcgtcacccttgtcctctgcaaaggggtacactcttctctaacctcccctccgaaacggagggaatctgcggccaatcagaacccctctggcttgaggtgcagagatcaaacaagttcggcttctccaagcaaaaggcgatgtgggcctcatgcagccatccaaatgggcgcgggccag

SEQ ID NO: 601057 - DNA, 173 bp, Homo sapiens
  misc_feature (27)..(27): n is a, c, g, or t
  misc_feature (61)..(61): n is a, c, g, or t
tttactgttcacccgaccggcacaagnaaggtccggacccccatctgggagtttacaccgncatctcatgtcatgaagatactcatgcagtcctatggagaatttcattggatattccatcaaaaacagatgttatttcatcaggggttgtcacagtcacaataattggatgc

SEQ ID NO: 601058 - DNA, 370 bp, Homo sapiens
gaaaccccccagatattttctatgaatttacaattaactgcatttttaagtgggctaccatcataattaggggattcctgcaaatgagaaactcttgaggtagaacacattaatgggtgtgacacagaggcagtagataaatatttgaaaggggtgcatatctgaacttgtttccaaatggaaagggtttcatgaggtgacaggggcttttaaacattcattagaccgattattataattttccttgttaaatcattgcaacagttgcatgggggacaatggatattttttgaagaattgattattccactttcaatttttaaaaatcgaggggattaaaatattactttttaaatatgcatagaaaata

SEQ ID NO: 601059 - DNA, 741 bp, Homo sapiens
tggggggtagagggaggtaggtggtagtttggtgttataatattgtagagtgggggtgatgaggaatagtgtaaggagtatgggggtaattcatggtgggccatacggtagtattaaggtgtggggccattgggtgttaaatggaggtgaggcagggagttccgaggaaggttagttgtgtggcaataaaaatgattaaggatactagtataaaaaaatcaggttcgtcctttagtgtggtgtatggttatcatttgttatgtgaggttagttggattagtcatgtgtggggtgggtgatatagtcggtgtgttgatgaaatattgtggagggtggggatcaaatagagggggaaattagaatgatcagtactggcgggcgggttaggactggttgaacaggtggcataaagggcttgagggggataggctgctctgcaaaagggtactgaggggtaaaggatagacacgataggcctggggatggctcgcccgaagtcagcaatgcgtgggttgctctgaagcatgggggcaaccaccggctgtgaggggtaggggcgccaggggctgacacactggctaggatggcctgggacctgctgagggttgaggggatgtcagaaagaaaagggcgaggcaacaccaaaagggaccccaaccgaggggcggaaacacggagggcaaagaggagggttgacaaacatggaaaaggagctagcccgaatgcaggccagagaagtac

SEQ ID NO: 601060 - DNA, 381 bp, Homo sapiens
  misc_feature (6)..(6): n is a, c, g, or t
  misc_feature (79)..(79): n is a, c, g, or t
  misc_feature (124)..(124): n is a, c, g, or t
cgggangccaaggcaggaagatcagagccccaggagtttgaaaccagccccaggcaacattagtgagaccttatctctncaaaaaagaaaaaaatagccaggtacagtggctcatgtctatgancctagcactctgggaggccaaagtgcacagatcacttgagtccaacagtttgagaccagcctggacaacatgatgaaaccccgcctttacaaaaaataacaaaaaaattagccggctgtggtgttgcacgcctgtagtcccagctactagggaggctgaggtgggtggatcacttgggctcaggaggtcaaggttgcagtgagctgtgatcacaccactgcactccagcctgggcaacagagcaagaccctgcctcc

SEQ ID NO: 601061 - DNA, 147 bp, Homo sapiens
ctagtggacctgtcttcatcatacctacccgtcttcatctcccgggtcagcgattctcctgcctcagcttcctgagtagctagagactacatggtgcacacctacatgcccagctaattttttgtatttttatgtagagatggggtt

SEQ ID NO: 601062 - DNA, 175 bp, Homo sapiens
cctcaaactgcgcccgagctagtctcggatacctggtgcccgctgccatgctcagctcgcttctgcattttcagtaagatgggtttcaccatctctcgaactccttacatctagtgatccatttgctttggcctcccatagtgttgggatcacaggcttcagccaccgtgccccg

SEQ ID NO: 601063 - DNA, 510 bp, Homo sapiens
gcgagcccaagtctgctgtgcaggcattgattggcggtctcggggtgtttatcatcaatcacagcatctggctcgctaatgtccgcctgacgctcacacgccatagtatcgcctagacaccgaggcacttggagcgcatgaaaaaacgccccattgcttgcatgatgcactgattgcctcatagacctatgactagaacgctcccattttcgcacttactatggagctagaacgtgctccgttacccatcgcatattaccgcattcatacagatgtactaatgaacgtgttcctttctctaaattgagctcgaatatgatgcctcatatgacatatcaaccaggcacatactgttaggcttgacttatgcccggaggttataccgcaattgagctcatgcccccgggccatatatcacccctgtcttataccttgccaattttcttccaccctcccttgtctgggatacaagaattccaggaactatcacccacccgattcacccttttg

SEQ ID NO: 601064 - DNA, 478 bp, Homo sapiens
  misc_feature (71)..(71): n is a, c, g, or t
ccccccggggggggctggacccgcgcgggggtgtttttctcttttaaaaagggggcggccccccccggttngggggtttttataaaaggggggggtgtgggggggggaaaccccttcttcagaggggggggggggtctttttttttgggggggggggttttttttttttttttggggggggggggggttttttcccccccgttttttaaaaagaggggggggggggggcccccccccccccccttggggtgggggaaaaaaaacccccccttggccttttcccccaggggggggggggggggggaaggttttttttttgaaccccccttttttttttttgggggcccccccggggggggggggggcccaaggggggttttttttttttttttttttgggggggggccccccccccttgggggggtgtttggccccccccccgggttttccccccggggggggggggttttttttttga

SEQ ID NO: 601065 - DNA, 171 bp, Homo sapiens
gccgtcatcttaccccttcagaccacatacccaaattagctatattctcagtgttgtgctattcagctggctggctgtgctgcagtcacgctgtcccaatcctggagcatgtcacacattcattacacaggtgcaatgaagaaagagtgcatgcatacttctctctccact

SEQ ID NO: 601066 - DNA, 399 bp, Homo sapiens
atttacttcggaatttagagagttatgtgcacaaatttaaagttgaagtaagagacgatcgtggcataacagctatcaccaggctcggtaggtttgtcgcctctgccgataaatcctatctgtaatttgctacatagacgggtgtgctcttctagctgttcataggtagctcgtctggtttcggaggtctcagcattggctcaccttgcatagttaattcaagttaattcattatgcagaaggcataggggttagtccatgctatattatgcttggtcatacgatttaatcttggccatgaggtactagatctattgcgacaggtttcagattcaatcgcatatacataataagggcaaatggcatggcaaaggttgtatgctagagagtagttctgtc

SEQ ID NO: 601067 - DNA, 407 bp, Homo sapiens
acggcctacaagaggtcaacgttataacggttacgcatttgatcactacaggtacttgtagtacctagagaaggaacccatcctggggtcggtgcagctcggtattgctactcgctaacgagtagattctcatttacagagaaagcacacataagccaaagccagaaagcaatccaagccttacagttgtccaatacctcagggccagttggctagaacttttcttttccctcagcccataatcacttagagttagccatacacacaaacagcctgacaatctgaccagcatttccattgatataaaatgtaagcattccttcattctgtagttaggaactccaacttcagccttatctccaacataatttcccaatttaacctatgtactgatatggacatttctt

SEQ ID NO: 601068 - DNA, 389 bp, Homo sapiens
atataccgcaccgagcacgtatcgatctctctaataacggtggatgggcacacacatccagctgaaagaccgatctctctcttgaaaatgtacagtacgaacttgaaccagttttgagaacattagaagagataactttatcctgactgctgtcaatacagctgaagaaaacagagttagagagtgtatcaagtgccattcacctatgtgacaagaataaaatggaattatctctgaacatacctgtaaatcatggtccatcaagaggaatcatgtggatcctctcagctccatgaacatagtggttctcctgaaagttctaggtccctgccagctcctcaagacaatgatttataatctagaaaagctcaagactgttatttactgaa

SEQ ID NO: 601069 - DNA, 198 bp, Homo sapiens
aaaagaagaaatatgccttctccttggttgttccacagagttttagaaaaaatctgttaaggatgggtaaatgtcaaactaccctacgcagtcatactataccttagccatcagattgtacttcttcacaccaagctctgtttacattccgaaaggtgtcatgaaaaaagttctgttcaataaggttttggaatgtga

SEQ ID NO: 601070 - DNA, 175 bp, Homo sapiens
ggggggctttaaaaagggattaaaattacccctgggagggagaaagggacaaggaggggggggtgcatttttccgtcccccccctttccccccgtggaggggggggcagtttttaggggggaagtccccttctgttcagccccaaaaaaaaggggccgttccctgggtccgttta

SEQ ID NO: 601071 - DNA, 324 bp, Homo sapiens
gttgattttctgaactttttacattttttaaaggtatatatcatatgataatactaaaaatagtgctaactagatgttaaaaaataaaagagagaatggtaattatgattatgattgtgattatgactttgattatgatttttggttagtagaagaaaaggttaaacccttaagttttagctctggcttggctgctttaagatctggggtatattttagagtatacttttctctaaatgagtggttctgtgttcttgagggagttttaggctttgtaggagagctttcaggactttcactgcagggagtaaggagggggccaaa

SEQ ID NO: 601072 - DNA, 429 bp, Homo sapiens
atctagcaggataccccttaatacagaggctacagaaacttaaattagctgacttaagatgagcttagcagtggtgtaactaggtctaaggtccttttgaatcactgtagcgatcttaattttgctagatttggagttcaataaattgagtatcctgagttgcccttgctcttctggtctggcctgcacagggcccagcggagagatttgttcttgtgtcacttatagcttggtgtgggtactaacttagcttttttcgactttgtcttgtgattgaccgtggctataggaggattggacttttgagttgggctctgggtctcttggacaactttacaatttactggcttccaagacttcctgcttcttaacccccagccagactattcatggcccattcagatcttcattttcatcccacatgtgcaa

SEQ ID NO: 601073 - DNA, 150 bp, Homo sapiens
atagatcagtcataagcatatatgtactactcatgtagttcatttaaagctaatctgaatcagtgcatgtatgctagagtatttgtagctcatcctgatttcaagcagtttttaatagaaggcctttgttgttttcattaggtggctaaa

SEQ ID NO: 601074 - DNA, 691 bp, Homo sapiens
  misc_feature (307)..(307): n is a, c, g, or t
  misc_feature (320)..(320): n is a, c, g, or t
  misc_feature (382)..(382): n is a, c, g, or t
  misc_feature (391)..(391): n is a, c, g, or t
  misc_feature (394)..(394): n is a, c, g, or t
ctggaaggagatcagcagcagctgtgagtgctcttcctccctgggacggggtggctactcagtaggacaggcggcagcagctggagggccccgaaccctgtcatcccatgagcacctgtcatgcactcctcacagagatcgtgggcttctccctctttaatccgttgttgaacaacgtccacattaataattcagcccagctctgttgtgggacaaacaacccggagtgtagcaaggtgccgcatatttgcaggacaggatgaaagcgttctggagatggatgggggacatggctgtacaatgtggnggatgcacttaanaccactgaatttttcctttgaaaatggctaaaataatagattttgtatgtattttaccacantaaaaaatnaanctggccgggcatggtggcctacacctgtaatcccagcactttgggaggccaaggcgggtagatcatttgaggtcaggagttcaagaccagcctgggcaacatggagaaaccccatctctactaaaaatgcaaaaatcagccaggcgtggcggtacatgtctgtaatcccagctactcgggaggctgaggcaggagaattgcttgaacccgggaggcggaggttgcagtgagctgagattgctccactgccttccaacctggacgatggaacgagactgcatctccaaaaaaaaaaaa

SEQ ID NO: 601075 - DNA, 257 bp, Homo sapiens
aatacagagtgcagaaaataacccaagtgtcgtcagcagagagctggttgcttaactcacactcacagaggggacacatcatatccacctgaagtgtcaagcgtacgttgacacttcagaaaatcactcaaagttaggcacgtgtgaaccgaacaatgttctgttaacttctcattcagtatgaactaaattatactatgccttatacattctaattcgaaccacagtccttgcatattccaacatactgagaggga

SEQ ID NO: 601076 - DNA, 1140 bp, Homo sapiens
cacttccccagccagcatcaccttcaccacagggctagaggcccctcgggaacttggatggccaaggaagtgaccccaccgacaccgcacctgactcacttggactgagcccccagttccggcccgcaggctacctgacatcagacttccacacacccatggtggacagaaccaggagatcctgctcccagtgagggatcacatctcactcagcatccttgtgccatctttccctccacctcctacaatgcacgagatccaggccatgtggggccagagcctcctgaccgaccgatgtccacctcatttcaccacagggtgaggctgcggatccccattccccagggaactgcgagggcaggagctgcagacacaggagccggtgcctccaaggacccagcaccaatcttcctcaaaggaaaccagcagagcggaccctgaacagtgtcaaagcgaccatggagacagatgagggcgtagctgggcatgaatgatacacagcgccagacatgcaattggacacagacacaaaccttcatgccagagaacatgagacgaaagacctaatcacccaatggcaaaagagaacaaatctccatggaagcacgatccctagcgcaagagaccactgagcggacacctgcaacacagcccagacacacacacgagcaggaatgaactaacaccacatgccccgtggaccacagcgaaccatcgagcaccgacagacgagaacagacacccaacccgaatcccacccaagacaaacaccgcagcgcaaacaaataccgcaaacaacatgaagtccaaacaacggaaacgacacgaaactcccagcaacaccaaaaacaaccacgcataactgaccgataacaaggacccaaaaagaaagaccaccaacacagagagaccaacacaagaggaccaggcaaaccgacagccaaaccaacccaaggcccaccggaacaccagagccccagaaacagccaacgacctgaccacacagagacaaagaacacacaacaacccacccaacgaaagaaccacacacacacccaacgccagatacaaaaacaacaaacgagaaagacacaaaagcagaaacacaagccaaaaaagaaacacacagaaacaaaagaa

SEQ ID NO: 601077 - DNA, 735 bp, Homo sapiens
cgcggtggctcacacctgtaatccaagtacttggggaggccgaggcgggtggatcacctgaggtcaggagttcaaaaccagcccggccaacatggcgaaaccctgtctgtactaaaaatacaaaaattagccgggtgcggttgtgggcacctgtaatcccagctactcaggaggccgaggcaggagaatcgcttaaacccgggaggaggaggttgctagtgagctgatgatggcgccattggcactccagcctgggcgactagacaaagactctcttaatcaaaacatataaaaaatgaggccgggcgccgtggttcaaagccgggtatatccaagaacttggggatggccaaggcgggtgggatcagcaaggtctgggagatgcgagaaactatcgcaggtgcctaatgagggtggagaattctggtgctgcatgattagcatattacgagagcccattgtactcggggcagagctagtaggagaggagagtggtgggtgaagccagggaggaggaagtttccagcgaagggagatgatggggccattgtgtgtccagccttgggcgaagagagcgagattcgggctcatataaataggacgatccgggagaataattcattcaaaatgaaaaatctggtaccccatgttttcaagcgcatagaactcggtggggaagcgtaggttcactgggggaatttgggccacggaatcgagggagacatgtctaagggg

SEQ ID NO: 601078 - DNA, 122 bp, Homo sapiens
tacgcagtggtgctgaggagcgcctttatgcagctcctggttgaccaccttgaccacaaaacggcggccaggggaagtcggtttgcatttaacgattgccatgatgcaccccttccttactg

SEQ ID NO: 601079 - DNA, 369 bp, Homo sapiens
gcacgaggttcccggctccccgcaccatcatggctttgcctctgaggcccctgacccggggcttggcagcgctgccaaaggaggccacggaggagcaggagctcgtacctggcgtctgctgaccttcgtgctggcgctgcccagcgtggccctctgcaccttcaactcctatctccactcgggccaccgcccgcgccccgagttccgtccctaccaacacctccgcatccgcaccaagccctacccctggggggacggcaaccacactctgttccacaatagccacgtgaaccctctgcccacgggctacgaacacccctgaggccccggacgcccccggacacaataaaggtgtgaagcttcaaaaaa

SEQ ID NO: 601080 - DNA, 138 bp, Homo sapiens
  misc_feature (109)..(110): n is a, c, g, or t
tgcagtgccgggtttcatgaaaggagccaggttgcttcttatgctggagaacattgacagaaggaaaaatgaaattgtccctatagattctaaccttgatgcagagatnnacttcaggacccatacacgaaacagctt

SEQ ID NO: 601081 - DNA, 770 bp, Homo sapiens
tgcgcacgatttgcaggaggagtgattgactgaatgtctagtgcttgatgtgtgatcgtctccactgactgtccctgtacttttctgtgaatgattgctgtatagatggtactcttgtctgtgaatgaagaaattcatagagtgcatcccgtgtgctcgatatgcagggaaattggctatacaaggtgctgcagcatcttctgaactgtgtgattgtactacctctatgttgagaagatgccctaaagattccatatcagtatgcctggtgcgtcatgctcgagcgagatattgattgggatggtccaagtacaactatgaagaagcttgctcgaagagtgatgtagcatgtatttgttgcacatgaccttgtgcccgaggatgatgtacgtacctcgtacaaaattgtttatttgcctaattctgcgattagttgctcatgcttgtaataggtattcctgcgccgtatttgtcaataatggctgttgcgatgtattagtatgttaaaagaaccctcgatgttccgtccatcgttttttcctttgcgccatttatcgtaatacctgttgatttgttcgcatactaaatcgcgtttaatttgctaaaccaaggattcggatcaacgctgaactattcgttggacattgccgggtttaatctcctcggggatatttattcctatatgacccttccttggcaccattcttctacacttaaggatggagtttgggaccacattgaagggtaaccattctcctgattccttggca

SEQ ID NO: 601082 - DNA, 315 bp, Homo sapiens
  misc_feature (1)..(1): n is a, c, g, or t
nattactggtcacaatatatgaagaactcctaaaatcagcaacaaactgattcaaaaatggggaaaggactttaatagacttttctccaaagaggcacaaatgaccaacagacacataaaaagatgctcaacatcacaattactagggaaatgcaaatcaaaaccatagtgagatactacttcacagttactaggatggctgttatttacaagacaaaaacaaaagcagaaaataacgtgttagctagcaagtggagaaattaaaacctttgtaccggctgagtgcggtgcctcacacctttaatccccggtcga

SEQ ID NO: 601083 - DNA, 117 bp, Homo sapiens
ctattatccagctagctgtgatcatatactatacagacgactcaacactcttgaccgcggggggagaccatctatacaccactatctgatttcggtcacctgacgctgaaatgggta

SEQ ID NO: 601084 - DNA, 126 bp, Homo sapiens
tgtacctccttctggcacgcccattcaacatagtcctcgctacagtatccacaagggaaaaaattaaaaggcatctaaaagaggaaaagaagaaatcaaattatctctcttaactgccaatatgat

SEQ ID NO: 601085 - DNA, 309 bp, Homo sapiens
aggctcagacaagagtcttaaaggtgggggaacgagcttatgatagctgaaacagactcggaaatagaatagccaggagtcccgatcagacttggaagatatggaggaagaggaggggacacggtcaccaaccctggagccccctcggggcagatcagaggctcccgattccctcaatggcccactgggccccagtgaggctagcattgccagcaatctacaagccatgtgcacccagatgttccagactaagcgctgcttccggctggcccccacctttagcaacctgctcctccagcccaccaccag

SEQ ID NO: 601086 - DNA, 716 bp, Homo sapiens
  misc_feature (8)..(8): n is a, c, g, or t
  misc_feature (126)..(126): n is a, c, g, or t
  misc_feature (128)..(129): n is a, c, g, or t
  misc_feature (131)..(132): n is a, c, g, or t
  misc_feature (224)..(224): n is a, c, g, or t
  misc_feature (234)..(234): n is a, c, g, or t
  misc_feature (238)..(241): n is a, c, g, or t
  misc_feature (244)..(246): n is a, c, g, or t
  misc_feature (249)..(252): n is a, c, g, or t
  misc_feature (271)..(271): n is a, c, g, or t
  misc_feature (284)..(284): n is a, c, g, or t
  misc_feature (293)..(294): n is a, c, g, or t
  misc_feature (298)..(298): n is a, c, g, or t
  misc_feature (301)..(301): n is a, c, g, or t
  misc_feature (308)..(308): n is a, c, g, or t
  misc_feature (320)..(320): n is a, c, g, or t
  misc_feature (323)..(324): n is a, c, g, or t
  misc_feature (337)..(337): n is a, c, g, or t
  misc_feature (354)..(354): n is a, c, g, or t
  misc_feature (358)..(358): n is a, c, g, or t
  misc_feature (420)..(420): n is a, c, g, or t
  misc_feature (422)..(422): n is a, c, g, or t
agtagtgnactgactgaattatgcaacaacatggatgaatttcagagacatgagagtacatactacatgattccaaagctacatttagatgctaaaagtcacaacagtggtggtcttgcagtgagngnngnngggggactgactgaaaaaaaaggcatgacaaaactttctaaggtggcggaaatattctaaacaatgatctgggtggtgatgacacaggtgtnaatatttggntttnnnnttnnnttnnnngacagggtttcactctggnacccaggtcaggnggcaggggnncggncgngggtcantgcagccttggnttnnccaggctcaagcnatcctctcacctcagcntccnggggggctgggaccacaggcacacaccaccacacctggctaatttttgtatttttttgtagngntggggttttgccatgttgcccaggctggtctcgaactccaggcctcaagtaatccatctacctcggcctcccaaaggattgggaccactgatgtgaggtgtatttgtcactattcatctaactgcatacacattatctgtgcacttactgtatataaattatacctcaataaaaagtttatttacttctttatattaaatgtctattaataagctgggcgcagtggctcacacctgtaatcccagcactctgggaggccatggcgggcagatcacttggggccagaagtttgag

SEQ ID NO: 601087 - DNA, 617 bp, Homo sapiens
gtacgtggatcgtgcctgtaatccctgcactatgaagtgcttgatggcgggtcatgagagtgtagattgaacatctggctactgtgaaatccgtctctatacaattacaaaaaattagtccaggcgtggtgtgtgggcaaccctgctagtcacagcgtacatagagaggaggctgtgaggctagagagaaatgtgcgtgaaccatgggagagtggaagctttgaaagatagaagtcgaagaatccacgaccacatgtcacgtcacagtctggcgcagacaagaaacagagaacatgatcttctatcacaaacaatctaatttttggagaacaaaaaaggctcatattgatttaagctaaaaaaaataaccctatctataaaagggagtatgctgtggtgtgtgtggtgatatattaaatcactccataagcatattagtaaaagttacaatagtgaagcagatatggtcccaggagaagtgtagaaaactaatttaagggggccaagatggtgtgttcacaatcagacttgacaaactacctacaaatcagtaagcggcataagacggaatgtagtggtaagaaatctcctttcattcaagggtttagcggggggaa

SEQ ID NO: 601088 - DNA, 966 bp, Homo sapiens
cacgcgtccgcccaagcctgaagtttcagtgagtaggggtcctgacgtgagctttagcgtccccctttagcctccctcttcgattccttgaagaccctggtgcagcttaacaagagggcccaggattgttggatccccagccctgtgacaagggttcctgtccagttttccccctcccaggatttcgatctcagttcagcgaagtcaccgacccgtcctgagccaaatgaggacaccaaggtttaggagcacagctcccgaggcgccgtctacctaggccccgtcccctcctcccggctcctgtcgtgctcagctgctgagtagcccgtccctgctccagggctccttctctggggtccagggtccctttgtggcctctgcctcgggcggggcccttcagtcaccgtcgcctcggtctccctgactggttcgcaggcctgggctatcctggccgttttttcctggtcgggtctccgtggtgctggcgactgccgatgggctccctagtcccttcgctggcctccgtccttgatcttcggtgggctcgggctggtgtatctccacactctatgtgccccatgagccgggtttgagcctggagggcccggctcagccctgttcagcgcgtacatgcctcgtgcgaaggttgttgatctaccctcagcgcacctctatggctggcgcccgaccgtccaccgggctccgtggggcggtaagaaaaccctaccgagcaaattatcccgaagtcatgagcaccttgcttcactccccgtgcccaccttccgccagtaagcccaagcaccgcagatgcccttgtggcagattccacaccagcgcagaagcccaacatccgtcggacggcaacgcctagcgcaactgcaagtgtcaccccggaccgcgccagacacatacacacagactatgtaaataaacacaccagacagcgcacagcagggacacacaagc

SEQ ID NO: 601089 - DNA, 260 bp, Homo sapiens
cggtggagtcacacggggcacctgcagctttgctgggcagagactcctcgcgctactgctgctcccacctccttggccagggccagcctgtggccacgcctgaggtcatggcaggtggggatggatgagcctccagaggcgctgggtgggcagcccccgaccctcagcgcctgtcacctcagggcctctcaggtgtggctgcagcatcctctccaggaagtcttcctgttcaccccagccaggtccatgtggtccgagcg

SEQ ID NO: 601090 - DNA, 239 bp, Homo sapiens
  misc_feature (1)..(1): n is a, c, g, or t
ntcagtcggccggtagcggtcatctccggatgcgttgccttggcctggatgtgggcggccgtcgcgccgaactggttgtcgttgcccgcgacctgcgccttcatgcggatctcggaatggcgccgcgcccaggtgtgtcgcgcgctgattctccgaatattcaggccctcgaccagtttggtctcgatcagcgtctcgctggcgcgggtcagcaccaattggccggtcggcgagctggt

SEQ ID NO: 601091 - DNA, 200 bp, Homo sapiens
  misc_feature (124)..(124): n is a, c, g, or t
tatctcaggattcatttctctgctctacttttttgtggggcatggacagctttttttacggcctagaccagcaggcagcatgcagtcctgaactcgggttttatttccgtggcacagcacaggnctatgtgacacgccgtgttgctatgacggcctctggaaagcctgcattttgtaactgtctttgcacatacgccaag

SEQ ID NO: 601092 - DNA, 859 bp, Homo sapiens
  misc_feature (1)..(1): n is a, c, g, or t
  misc_feature (4)..(5): n is a, c, g, or t
  misc_feature (218)..(218): n is a, c, g, or t
naannccataaatacaagtcataaaagacaatacgataagaacaaatctgtgtcttacttaacttgaaaatttggtcgccccattatcccttcccacgtgttggcgcatataagatattatatgttacacgccatttcagaccccacacctattgagtgaccccctttaatttagaggcctttgtttaagcatccgcccccccaagaatccctgttcnccaaacccataattttccggtggcacaaaagttctgcttgcccccttcaatcaacagcgtgtctccgtattttgggcaccacgggtctgtataaaccttcccacatcccggagaattcaatgtcacgctccccccgcccacataaaccaaacgggtaaccccaccccacaagttaccaactgggccgcctcaatcatctgtgtttaacgagcccccccctgcaagacccgagacaacatcatcggtcttttaagtacattatgttgtaaacccgcaaataaatattccgctcgcctatatcaatagcaacaatcttttgatctctacttcggtccaagataatgtcactccacctgcaccccaagggtgaacaacccacttttaaacatgctgcgtcagtatatattccccataagcatacaaaccctgcagcaggacccaattcccacaaatagcggtttggtcacatgcactaacagacccccgcactggttggcgaccccccaataacccccacattgtatataaaatacaccaacacgggcttctacccacatagataattttcttgtttatctgtatgcctccccggtgtacaccgggaaaagttttttattaaacaagacccccccaacaaaaca

SEQ ID NO: 601093 - DNA, 217 bp, Homo sapiens
  misc_feature (27)..(27): n is a, c, g, or t
  misc_feature (51)..(51): n is a, c, g, or t
  misc_feature (68)..(68): n is a, c, g, or t
atcacctaatgcccacaaggtactctntggatatccccttggacaaaactntcgtcaataaggatgtnttcagagatcctgctcttaaacgcaaggccccgacgggaggccaaggtcaagttttgaaggggagatacaagacaggcaagaacaagtgggttcttccagaaactgcgggttttagatgctttgttttgatcattaaaaattataaaga

SEQ ID NO: 601094 - DNA, 597 bp, Homo sapiens
ccggtaccaaacctgaagttgccaaatacttccagtcactgatctttgacaaagcaaacaaaaacataaagtggggaaaggacacccttttcaaaaaatggtgctgggataattggctagccacatgtaggagaatgaaactggatccttatctctcatcttatacaaaaatcaactcaagatggattaagggcttgaacctaaaacctgaaactataaaaattctaaaagaaacattggaaaaacccttctagacaatggcttaggcaaggatttcatgaccaagaacccgaaagcaaatgtaataaaaacaaaggtaaatagctgggacctaattaaactaaagagcttttgcatggcaaaaggaacagtcagcagagtaaacagacaacccacagaatgggagaaaatcttcacaatctatacatctgacaaaggactaatatccagaatctacaacaaactcaaacaaatcagtaagaaaaaaacaaataatctaatcaaaaggtgagctaaggacatgaatagacaattctcaaaagaagatatacaaatagccaacaaacttatgaaaaaatgttcaacatcactaatgat

SEQ ID NO: 601095 - DNA, 212 bp, Homo sapiens
  misc_feature (65)..(65): n is a, c, g, or t
  misc_feature (99)..(99): n is a, c, g, or t
tcgtcattattgtaaccatagagcatgaattacctcttgaggtcatcagcgacgaatttacgacntggtcaacgaaacaggctacgtgaaattcccctnaactactatatataatatataatataatataaatattaaatataaaatcaataatatataaattaataatataaatatatataaaaatattatatatataaatgaaatgataa

SEQ ID NO: 601096 - DNA, 170 bp, Homo sapiens
tctctattgtttgtttgtctctgtgtgtctatgtatgtgcttattgtctgattgctagacgaccacacaccgtgagcccttgcgggccgggtggtgctgcgtgcactcaactgatgtgaagcgtgaccgactagagtagactccagtattgaacgagacaaaggcccatg

SEQ ID NO: 601097 - DNA, 107 bp, Homo sapiens
gagatagcaatgactctcaagcatttgtggttctgaagatgtaggctctagctcctacggtgctgtggacatattgatgctgtaggtgccatcatcatgattctggg

SEQ ID NO: 601098 - DNA, 230 bp, Homo sapiens
ttgttcatagctccagtacaacagctagctttaaaaaaaaaatcaatacttaaactgtagggaaaaggtggattggtgccagagaaaacattatttaatagtgtcagaacatggaactgcaacacagtttgtagcaaggcactgagaaaaacccacaactaatccttcatcgcagctgtctgaactcttgatcatctgccatcccccaaacagtgacttctttttttctg

SEQ ID NO: 601099 - DNA, 1368 bp, Homo sapiens
tcacaaaggggtttccagttttataaaaaatatttcccatataaacaactcggggtattccagggcagggacggggcgcagacaacctcggtaccaggtattacaacaactttccaaacctcccttctctctcaaggggcactaccaattaattaaaaaacaaagaacaccaaaaaaaaaaaaaaaaaaaaaaaaaaaaaaaaaaaaaaaaaaaaaaaaaaaaaaaaaaaaaaaaaagagaggggggggcgcgcgccaacaaagaaatctccccgcggggggcgcgcccccgctccgcgcgcgccaccccgcgttttgggagaacacgacgggggcgcgcccactaagagagaggagcgacgagccatctatatatataaagcagagagcgagaggagggggcgcgcgcggacatcaaaacacgacagcgcgggcgagcggggaggacacaacgagggagcccggacggggcaaacactggaggagagagagagagacacccacaccaatgacgcggcggggggaggagcgcaacacaaatgtgtgggggggacaaacaaaacaccacccccaacgacgaaagcacatataacacacacccacagcaagaggggcaagacacacatccacaaccgaccgccccagaagcggatacatactacgagcgcgcggtaacacccaccacacaggcgcgcgagcaaataatgcgcgcgccagcgcgcggaacaaaaaaacacaatatcggccgccagacgcgggacagagcacgacacacctgacaccaacacaaaaactctccaccagaggcggaatcgaacacccacaacaccacaccaccagagaaagaccacacacacccaccgcaccgaacacccacacgcaaaacaacgaagagcgaagaagaagaaaaaacaacaggcagacacgagagaggacgagaaaaagaaaagacaaaaaaggagagaaagacacggaagcaaaagacccaggaaacaggacagacaaagacgaagccgaaaacaagaaagagaagaataggcgaaacgagaggaaagaagacgggcgagacaacgaaagcaaaccagcgcaaagacacacaaaaaacaaacacacagcaaagcaacacaaaacaacgaacaaagagacaagaaagcgaacacagagaaaaaggggacgcacaacagggagggcgggcgaggcacggacggggaggagggagcacgaaggagaacgacgagcgaggcgaatgggaagtgagagagaacagaggcgagaggccagaagacgacgaacaacggaaagaacagcggaaagagaaagcaagaacaagaacacccgggcagaaaccgacagaacgagaaagcacga

SEQ ID NO: 601100 - DNA, 810 bp, Homo sapiens
acaccagaaaatacatattcactaaaaaccccatgaacagccttgaaagtgggaaagcttacattgagaaagtttgcacttcatcatgccccagagaagtaagtccttctgaagcaggagcgaccacgttatgaggttaactgttaacaaggtactaaaaagcttaagggacaccagacaaatttgtactgacagagaaagacatgcatatgattaaaacccgtgtgtccaaacagagaaacctgcaagcagagcataagtggtgcacaaggtttaggcacattttcacatcaaacagatggcgaacagcaacaatggaggcctgatgtcatcatcgctaccaccatagatctggcagcatcttcgggcagtaaacaagaaaacattcaagtcgtcaaatattgtgaacaggacacagacagcaaataggatgacatggtcatctacaactaagtattaaggactcctgtggatatcgattgagccagagcagaaagagaattgcaaacacaaagagaacgctaagccactacgagttacgaaattagggacattattgatccaacgtggcaatcggggacagctcgcggaaaaataccatgggacacataataagacaggaaaggaggggccgggataggaagtggaagctcacaaaagggcgggacgaaagacgtagaacccaatgaaagcgatatagcaacaaaaaagatggaaagtcccaagacagactcgaacacagccagaaacagaaagggaagaaaggcgaatggcacagaaacagagaccgatggaacccacgcaggacac

SEQ ID NO: 601101 - DNA, 178 bp, Homo sapiens
ggaattaagatgctacctctcagcatgatgatgataacatcgtcaactaccagtggtttttcttcaagagcttcggataaagatataactgttccaaagaacacttcattgccacctcggtggtccccagaagctgaacgtcctcactcactctcacagcacactgccagtcagcgag

SEQ ID NO: 601102 - DNA, 655 bp, Homo sapiens
  misc_feature (41)..(41): n is a, c, g, or t
  misc_feature (71)..(71): n is a, c, g, or t
  misc_feature (94)..(94): n is a, c, g, or t
  misc_feature (138)..(138): n is a, c, g, or t
  misc_feature (151)..(152): n is a, c, g, or t
  misc_feature (162)..(162): n is a, c, g, or t
  misc_feature (237)..(237): n is a, c, g, or t
  misc_feature (272)..(272): n is a, c, g, or t
  misc_feature (278)..(279): n is a, c, g, or t
  misc_feature (325)..(325): n is a, c, g, or t
  misc_feature (369)..(370): n is a, c, g, or t
  misc_feature (382)..(382): n is a, c, g, or t
  misc_feature (403)..(403): n is a, c, g, or t
  misc_feature (418)..(418): n is a, c, g, or t
  misc_feature (443)..(443): n is a, c, g, or t
  misc_feature (449)..(449): n is a, c, g, or t
  misc_feature (499)..(499): n is a, c, g, or t
  misc_feature (579)..(579): n is a, c, g, or t
  misc_feature (652)..(652): n is a, c, g, or t
tttattttttttttttaatctgggttttttgggtttggtgntttttgttcattccttcacattgaataggnggaaaactaaaaatgattttganttcactcgatattttggactcctctgatgaacggttctttgcantcacacttggtcnngagtagaganagagtgaggatatgttgtgtctcccacagggccacgacgcacctgatcaaataatcttgtgttacatgtgcaagnatttcccaaaatgattgtatcatcatttccaaaancttgcnntaacaacaccgaagaaacaataaatgtttaagccacactgtttggnttggggtctttcctgctttttttttttttttttttaattgtttnncttacagagggnatggggggtagtggtgtgggnaagggcagactcganggacgtgtgcggggcaggagggggnttccgngtggggctgggggggggggagggggggtctgggtcggggggggggggggnggggttgtgggtagccatttctttgagttcaggcatgttcttggtcagcctcaggttcctcttctttaccctcgtcctgncgggcactttccttaggtttggtttcatctacagcttctatgttctcttcagcttggctgcactccccagtcnccg

SEQ ID NO: 601103 - DNA, 392 bp, Homo sapiens
ttgaatgacaaagccaggtttattgttctgggttaaacctgtgcagccagcctctaaataggggcacgggtacatatcacgttagtaactgtatcttcatggtcacttgtgggttctcagctcctttggaccctgctaaagttctagttaaggcccagtgctggggcacacgctcctaatccaaacagtgcagcctgtggcatgcctaccatgtggcaatatggaggtaggaggagacgatcatgccgtgcatggaggccactcttcccgcgcccttcacacaaaggggccacagggaccccgcttcctgctcgcgcagcacagcggtctcaggcctagagggctccgttacagttaccgctgcccgggcgggtttctgggccgcggctccc

SEQ ID NO: 601104 - DNA, 254 bp, Homo sapiens
catggcctactgcctctagacaccacctctgtgggcagggcatagctgaacaaaaggtagcagacaacttctgcagacttaaatacccctgtctgacagctctgaagagagcagttgttctgcgagcatggcgtttgtgctctgagaacggacatagtacctcctcaagtgggtccctgaccccccatgtagcctaactgggacacctcccagtaggggccaatggacaccttatataggcagctgcctctggg

SEQ ID NO: 601105 - DNA, 1313 bp, Homo sapiens
  misc_feature (548)..(548): n is a, c, g, or t
  misc_feature (633)..(633): n is a, c, g, or t
  misc_feature (659)..(659): n is a, c, g, or t
  misc_feature (685)..(685): n is a, c, g, or t
  misc_feature (691)..(691): n is a, c, g, or t
  misc_feature (695)..(695): n is a, c, g, or t
ggctactgcacattcatcaacactggtgttctattaacactgacctgttcgagtacaagtttgtgaactgccgtctgataaacagtacattcctgcgcaacaaggagggctgcccgctagatgtgacagggacgggcgaaggtgcctacgtggtatacttgtgatcttcctggggcacgactggcagtgcttcctgtgcgaatatcggtggtctgccctgcatcatggacaagatcggcaaggcgtcagaatgcttgctggcgtccagcgtgaatgttcctggtgttctccgtgtttctctctgtctggagggaacagtgagtcggctatgatcgcgtctgctctgcctttttggcggcgtcagcgattgcatcctggaatgcgctggacgtgtgagtgtagaactctacccctcagagaagatgcgaccacagtttgttgagcttcctgaatgcacctgtgtaagcctggcagactgtgctggggatcaggatcttcacatccttcgtgggaatcaccaaggctgcacccatcctctttgcctcagntgcccttgcccttggcagctctctggccctgaagctgcctgagacccgggggcaggtgctgcagtgaaggggtctctagggcttngggattggcaggcacactgtgagacnaacaactccttccttcccctccctgncctgcnatcntgactccagagcctcaactccacacactccacacgtgtaatggatgtctatacgctgtagtagtgcgtagtgcagtgtgcatgtgtgtaaaccccgatgggcagggactacagggaaggctccttcatcccagttttgagatgaagctgtactccccatatatcccacatgcccttgacatttgcacaagagaaggctgagccaccatccttctcccccgtgtaagagaggggcccttgctatccctgtatccaggggttccagaataaggcattcctgaccttccaccatcatatccctctgactaggcacctggtgaaaacacaggtatgcaattatgctaggggctggggctcaggtgtaaaccatggaccaaaagaacctcttagagatctgaagagtgggcctcgggatgaccatctcacatctcactgtgggatgactgggggagaagcaagaacacatcagaccatctggccatccaatttttactgtaaaataatgggaaggaaatattgaagcctgaattttatgacaattaggtttatggatcttattaattaaatagatcagttctacggggctccgaagattggggtgatgggatgatattaatta

SEQ ID NO: 601106 - DNA, 653 bp, Homo sapiens
tggctacaaaagggggtaaagggggtgctatagggtaaataggggccctatttacaaagattttaaggggaattaattctaggacgatgggctatgaacactgtgggtttggctccaaagatttcagagcattgaccgtagttatacccccggtcgtgtagctggtcgacaagtgggttgggtatacagactgtccgggaattcgcatctggtatcttaagcctaatgtggggacagctcatgagtgcacaagacgtctgggtgagtggtaacttatatatagcaacagtgggggtcttcaaactggggaagatacatatctgcaagtgtgtcaacgtccaaggagttcgacaggtttcgcgcatgggtacttaggacataacggggggaagatatgataggagttttgaaaagactttaatttccgtacgatataacaggaggataattcagaaagaggttaaaggaaccaataggaggagtgccaaatagaattgagaagtggcacagggaggagatacggaagacccacgatccggaaccgtcaaacagctcgcagtaacgacccagcgaacgggcagaacacagcctagagaaagacggcggagcaggcaacaccagaacggcacgactccccacgacgcccgaaaaaa

SEQ ID NO: 601107 - DNA, 349 bp, Homo sapiens
gactctacaggatccccctgtgttgctcaggtctcagcatgggagacgaggactaggtgagttattgttgaatagggtacagtttcatctttatgcagagcatgactgcgttagtgtgatatggatgctggtaattttggaagcccatgtggggttccctggaggtctgttaacttatgatctactaaacttgagctattgtcagtgctatgggataagtattacgcgtgaggagagacgggtgtctggagaaagaggtgatactcttgttacctatcctgagatggctggatggcatgcgctcccaccatgaagactggtgctctcctgggactgctttcatcttatg

SEQ ID NO: 601108 - DNA, 697 bp, Homo sapiens
  misc_feature (476)..(476): n is a, c, g, or t
  misc_feature (494)..(494): n is a, c, g, or t
  misc_feature (557)..(557): n is a, c, g, or t
  misc_feature (567)..(567): n is a, c, g, or t
  misc_feature (599)..(599): n is a, c, g, or t
  misc_feature (676)..(676): n is a, c, g, or t
  misc_feature (697)..(697): n is a, c, g, or t
gtctcaggtatgtctttattagcagtgtgagaatggactaatacactacctaaagcaatctatagatttaacgcaatcccaatgaaaattccaatgtcattttccacagaaatagaaaaaacaatcctaaaatctatatgaaaccgcaaaagtcctcaaatagtcaaagcaatctcgaacaaaaagaacaaagctggaggtatcacataacctgatttcaagatacactacaaagctactgtaatcaaaacagtacagcactgtgtaaaaacagacatataaaccagtggaacagactagagagcccagaataaatccacacctttatggtcatttgatttttggcaaaggtgccaagaacacacaacggggaaaagatagtctcttcaataaatggttttggaaaaactggatatccacatgtagaagaatgaaactgaacccttatcccacaccacatacaaaaatcaactcanaatgaattaaagatttanatgtaagtgctggaactgtgaaactactgaataaaatataggggaaaagcttcttgacattgngcaaagactnttttggatatgaccccgatgtgcacactttanatatatacaatttttgtcaattatacctcaataaagctggacacacacacacacacacacacacacacacatttggnatatttgggggttaccttccn

SEQ ID NO: 601109 - DNA, 112 bp, Homo sapiens
atttcgcattatgagggtggtcggagacgactaagagccatacgatcgcccatatcagtggcgggattccttccacgaagagtaccgtccgccaactgaaatggtcgaggag

SEQ ID NO: 601110 - DNA, 176 bp, Homo sapiens
gtgaagagagtatagtaaatgcctcatttaataacatactccttaaagaaagttgccttttactctaccaccgcttgagtagatccagtataagatagaaactcatgaaagtgggtggagcccatctatgacccctcctcttaactaggacgcactatctgtgactgtgactttac

SEQ ID NO: 601111 - DNA, 129 bp, Homo sapiens
tttccccagagtctccaccccaaacagggagctctagattagatgagagagctcccagtcacactcgagagatttgtgctattgtgctccacgctaaagtgcataaataaaagcgatctggtggcctta

SEQ ID NO: 601112 - DNA, 225 bp, Homo sapiens
taaatcatcttccccaatgtgtctgtgaaaccatgtgaggaatggcccactgtatcacatgccatcagcatcacgcactttaaactgcatgcctgcctgaatgaagtgacatgctggagaaccaggtaattgcatttgaatatgtgatgagatgcagcgattggacacagattaagaactggatggcctactgtgtcgcctatgcacgaggagagcagaagcccc

SEQ ID NO: 601113 - DNA, 552 bp, Homo sapiens
cacgaggcttgatctcagctcactgcaacctccaccccctgggttcaagtgattctcctgcctcagccacctgagtagctgggattacaggcacccaccaccatgcctggctattttttttttttgtacttttagtagagatggggtttcaccatgttggcaaggctggtcttgaactcctgacctctggtgacccacccaccttgggctcccaaagtgctaggattacaggcatgagccaccgtgcccggccccggctgctccttctaatcctgttgttcactgcagcacaaagtatttctgaacactggagaattatatttctgggaggcgccattgcctctacagaggaggaaatttaggcccaagtaggaaaaggacttgctcagcatctttgcagctcactggcttaggcaggatgataatccagctctccatactacctcatcatttcatggcatcagcacctactttgtgcagaaagatgtctctgggatagctgtaggtggggctgaaggagcccctggtccctgggcagtgacaggctgaata

SEQ ID NO: 601114 - DNA, 671 bp, Homo sapiens
gatggcggcctctagtggggctgggaatagcctgctcatgtctggctaacggagcggtgtggggcctgcgtgctgaatgccgcctccgcgccttccccgagcggctggccgcctgcggtggccgaggccgcggcgtacggcagtgtgctgtgcatgtgcctccactggcccctgggctggcctgcctgagtaatggacttctgcgctgctgggagttcgaggccctgcggagctgcttcgcctgctgcggtagtgtgggctgctgggccccttccccccttcccatgcccttcccctccaagatgccagctgggccccggctttcctttgctttccctgtttggttcaatggtttgagctgcctgcctgctgtgctttagactgcctggctgacaaaatcacctgatgccatctgacgaagcccgcgaaacctcggccgtcctgggcttgtccctgcatgtttgtaaagcgggactggcaccaacctcagaaaggatgggagatgtgtgcaaaaaagcgccttgtaaaacgcgccaagaagacgctggagtggaggctgttaggagggactctgagcttcacacctgtctgctgccatgggtgcagagccctagtcctgatggcccctggttggcacatatcgaatgcctaggcagaaaggagtgggatgc

SEQ ID NO: 601115 - DNA, 171 bp, Homo sapiens
gagagagaagatgactcagacttatgcttttgagaccttcaactacccggccatgtacgtggccatccagtgccgtgctgtccctctacgcctctgggccgctacctactggcatttgtcactggactctggagacggggtcacccacactggtgcccatctacgagcggc

SEQ ID NO: 601116 - DNA, 231 bp, Homo sapiens
tgttgctgaggtgacctagagttcccagaacactacgagccactgccattttggtacagccatttagtgtaacagccatttatggtaacatgccatttaggtaacagccatttaggtaacagccatttaggtacagccatttatgtaacagccatttaggttacagccatttaggtaacagccatttaggtaacagccagttagaggtagggtaccgtagctcgtaattcg

SEQ ID NO: 601117 - DNA, 352 bp, Homo sapiens
gcttggtcagctggttgctatgttatttttttctatgacggagtctcatgtctactcaccgagaactggaagctcgctggcacgatcccagctcactgcaacctcatgcctcccaggttcaagcgatcctcccatcctggcctcctaaatagctgagactacaggctcagcctcccaagtaactgcgactacaggtgcacgccaccacacccagctaattttggtatttatagtcgagacagggtttcaccatgttggccaggctggtcccaaactcctgacctcaagtgatctacccgccttggcctcccaaatggctgggattacaggcatgagccgccgcatctgacca

SEQ ID NO: 601118 - DNA, 254 bp, Homo sapiens
gcgacgggtaggtatagagggaagtgaaacgaaagctacagtgggggtgaaggcgacggtgtgggtggcggagcagagactggcccatagtaaaaagtaatgtggagcgttgtggccggcaggagtaagagtattaggggtgcgcctgcaagtgggaaactgcgggtgcatccaatagttgataccggatacagaccgccggcggggccagaaacaaggaaagatgcaagtcaagatagagggtgacgaccggc

SEQ ID NO: 601119 - DNA, 784 bp, Homo sapiens
cgggtcggcgggccgcaggagggggtcatgggtaaagattactaccacgacagttgggcctggcccgcggatgcgtctggacgaggagatcaagcgggcctatccgccgaccaggctgctgcagctgaccacccggacaaagaacaaggagcccggcgaccgaggagactgttcaaggagatcgctgaggcctacgacgtgctcagcgacccgcgcaagcgcgagaatcttcgaccgctacgggggaggaaggcctaaaggggagttggccccaatgtggcaggatagctggctggtggtgccgatggtaccatctttcagcgtactacattccagtggcagacccgtcatgccatgtttggcgtgagttcttcgagtggcagaaatccctttgacaccttgtttgggcgcacgtggaacggtggcaggaaggcagtggcagcattgatgacccattctctgtgcttccctatgggcatgtgggtggcttcagcaacgtgagctttggcggtccccgctctgccctaagagccctgcccgaaagtaagcgatgatccccctagtcacccacgacttccgagtcatcccttgggaagagatctacagacggcttgtaccagggaagatgaaaatctcccactaatgcggctaaaccccgacggtaaaagagcgttcgaaatcgaaagaccaaagatattgagcatcgaagtgacagaggggtggtaaacgaactgaacaagatgatttcccaagaaggggaccagacctccaaaattccgtgaat

SEQ ID NO: 601120 - DNA, 237 bp, Homo sapiens
gctgatttaatcaggaaggtcgtatgtttcaagaatttatccatttcctctagatttcctagtttgtgtgcatagaggtgtgcatagcagtctcgaaggatttttattgtatttctgtggtgttggttgtaatgtctccactttcatttctaattcagcttatttgaatgttgtctcttcttttcttggttaatatagctaataatggtatatcaattttgtttatcttttcaaaga

SEQ ID NO: 601121 - DNA, 385 bp, Homo sapiens
ctctagctccggggggtctggtgggtggatagggcagtgtggtctccttagtactggagtggtcattacctctaccattatggaataaaattatattcaggtattgaggggtccagtaactaataatggcgtgaggtattacacttcacaaaatacttatataatcttacagtcaggggccagggctcggggctctctcacatgagctactctcaagctaagcccctgcaatcaaagcaggtcttcggcatcggatgtctatgtacattcctggcttagcttggacatggtccagggtaccaggcaggccagcggtcctttcgtcaggtacgcccagtctattggcctcagctaagcggagggtcaggatgcaaagcagggcagg

SEQ ID NO: 601122 - DNA, 910 bp, Homo sapiens
aaggaagaagcaaagtaaaagagtgcgcacctcgagagttgctgcgcgctctggtaaaagtttcgtaatgtctttaaggcaggttcacacatggatctcgaacaggacgtcctgtggtcctcgcgtatccacggagttttggtccaccgaagggtggtctcttactcgcttacagaccacagaggtcgtctatatacagcgaggcataactttctttgaacgtagagggattatttgccccattaatactcttactcgcgcaggtaccactagtttagtaagccatctagcgagtcagcacgcctcttcccgttcctggtagtttccggctttctctgggaaggccttcgggtctcccttcctctcaggaatttaaacatgggcgtccccgtccggggggcgtaacaacacacggtaatcgtctcgcgtttctctcaagcagactgaaagtccgcaccggggtgatgcggacaatagttacagtttgcgtctcgtagaagactatgaacagacgctctttcgatgatcccgggggaacattcttggcgtgagagtgaaacattcacaatagaatgccgaaatccggtgttcagaaacatggtggaaaggattctctatttgccacactggattttgctacgtgtctgaagaaaacatgtaacaaaaccagtgcttgaatagggcgtaatttgtagctccactagtgccggctaggtataacatgagccccctctttgtgggcactccacgctaataaagggggaaacaccactctggaaatacaggcccatagactgggatcccacattccaagcataggcacggaccaggcaattcttcgcttgggaaaaccccatgtctattttcttcacgagacaaaaaacaagctttctataccccccacataaca

SEQ ID NO: 601123 - DNA, 965 bp, Homo sapiens
ggataaatgctgactccgctcggaaagttctcaagtgcagagtttgctgtccggctgcctagggtctgggaagctcgggcaccctccctctccggggcgtcctgactccacagcccttccggaaccccccatcgtcgcgctcctccaggctgggcctgtggaacgcggtgtctctatttacatttagcccccagactcgagaatcttagctggctcgagtgcacctccaggagagacatagcaatctacagaaggagaacgatgtggaagggtgtcagcatctagctcgtatcgtcaggaggaacgcgcagtcagctctgggtcctgggcgaagaaggagccagtactaggcacagcctatgaagatgacactgagacgtactagcgtgtggaatggcggcgtatggcgatgcctaggtgccgaagtatgatgtggtgactcctaggtaaccagactgaagaccagctataaggtcatggcttgaacaacttctggtggcaatcgcatgtgtcaagcagtgtaactaggcgattcgcgattcggaggcatctgccaaccattcagcacagtcgacatgtccacgcgcgaagaacaaagtccagagcgccgacagacttcaaacagttgggcaccagtcaatccacggagaaagtggatggagacacacagacaacagttgagaaacgatggttgtcaacagtgaccctggttggaactcatagtaggggtcttactagccattcggcttcattggtggaatcatcgtaagggttatgcgcaacaatgtcgggaaagggtactcgccctaaagagctgaaggggtacgcccttgtgacaaacgtgcttaaaagaagaccgttctggatctgtgcacggtccctgagctcgtgggaaagatgacccggggaccaattggctggccaatcagaatccacggaggaactctacggtgccaaaataacga

SEQ ID NO: 601124 - DNA, 301 bp, Homo sapiens
  misc_feature (262)..(262): n is a, c, g, or t
gaatgcctttaacagcaccctaatcacctcttgaatgctttgctgcttagaaatttcctctcctagataccctaaatcatctctctcaagttcaaagttccacaaattgttagggtaggggcaaaatgccgccagtctctttgctaaaacataacaagagtcatctttattccagttcccaacaagtacgtcatcctcagccggggaccttactgtccatatcgctatcaggcttttgggtgaaagccatttcaacaaggantctatggaaggttccaaacttttccccacattttcctac

SEQ ID NO: 601125 - DNA, 574 bp, Homo sapiens
  misc_feature (228)..(228): n is a, c, g, or t
  misc_feature (317)..(317): n is a, c, g, or t
  misc_feature (320)..(320): n is a, c, g, or t
  misc_feature (401)..(401): n is a, c, g, or t
acccgtccggcccgcgcccccgggtttaggcaattgttgctatcggggactcaaaggcccacgtcggtttgggtggaaagtgttccaaggaggtggcccccgccacccgtggggccattatcctggccaagctctccatggtccccgtgcgcaaaggttattgggggaacaagattggcaagccccccactgtcccttgcaaggggacaggccgctgcggttttgtgntggtacgcctcatccctgcacccaggggcactggcattgtttccgcccctgtgcctaaaaagctgctcatgatggctggtatcgatgantgntacccctcagcccgggggtgcaatgcccccctgggcaattttgccaaggccacctttgatgccctttttaagacctcaagntccctgacccccgccctttggaaggagactgtattccccaagtttccctatcaggagttccctgacccccttgtcaagaccccccccaaagtttccgtgcagcggactcaggctccagctgtgggtccaacatagggtttttatccaaaaaaaataaagtgaattaagggtga

SEQ ID NO: 601126 - DNA, 103 bp, Homo sapiens
gttcatagaggatcccgatattttacgggaaagaggtaagctgtctgtcggggactggctgaacgctctacagagtgaggcgattgacctgctcaaacgtatc

SEQ ID NO: 601127 - DNA, 522 bp, Homo sapiens
cggacctgtatctgtaggatgttctggaatagctcggcgaatagagattgattattctcccaggatacctaattcaatgaactcgagaattcatgagacggagacatattgtcatgttgtgcaacataggaccaaatacaatgcagtatccttgctgtgctcgggatcaggctgtccgtgggcagcagaatcggtgtgaagcctctgttcgcttgtcatgatccccgaggttcagagggacggtatatcagcaggaaggaggaaacatccgagccaacattattcttgttgcttaccgatgatcaagatgtggagctggggtccctgacatggtcatgaacaaaacgagaaagattatggaacatgggggggccaccttcatcaatgcctttgtgactacacccatgtgcttgccgtcacggtcctccatgctcaccggggaagtatgtgcacaatcacaatgtctacaaccaacaacgagaactgttcttccccctcgtggcaggcatgcatgaacaacca

SEQ ID NO: 601128 - DNA, 270 bp, Homo sapiens
caggttgacaggctggcaggatcaagaggtacagggactggacgaggcatggagtggtctgaaaacagaggggcccccatgtgctttccctgcattccaataccatgtgctaaaaatactggatgagcataggccgcgtgtggtggctcacgcctgtaatcccagcactttggcagaccgaggcaggccgatcatgaggtcaggagtttgagacctgcttagccaacatggtgaaaccccgtctctactaaagatacaaaaaattagcca

SEQ ID NO: 601129 - DNA, 842 bp, Homo sapiens
ggaatccgccaacgtccgaaagtagtctcatcaacaatccgactaatcaccaccccaacagagtgactaatcagactaacctcaaagcaaatgataaccatacacaacactaaaggacgaacctgagtctcttatactagtatccgttaatcatttttattgccacaacgtaagctcctcggagcatcctgcctcactcagtgttacaccaaccacccaattatctataaccctagccatggcgatccaccttatgagcgggcgcagtgattatgcggctttccgctctaacgattcaaaagatgccctagctccacttcttaccacaaggcacacctatcacccctgtatcgcgccatgactgagttattatcgaagaccatcagcctactcgattcaatcaatagccctggccgtacgcctaatcgctagcattactggaggccacgcgtactcatgctcctaagtaggaagcgccaacctagcaagtatcagactgtaaccttacctgtacactttatcatcttcacaattctagttcttctgacgtatcataggacatccgctgtcgcccttaatccaagcatacgtagacacacctactaggtagcctctacctggcacgacgaagaacccaaccactgactagtctgcaaagaacaatgcaggaccgaagaaatacacccccgatccgaaacaggcgactaaccgaaacaggtgccgcgcccaggccaccggagaacagacaacataccacactgcagcacaacggcaccgtcacaagcagagccacgccagacacaacaataaacaaacgcagggagacagcagttaccacccat

SEQ ID NO: 601130 - DNA, 265 bp, Homo sapiens
agaatgtgtgccgagaatgatagactggatacagaaaaaggaggactgattgaataatacttataaaataaacaaataagtcctcagattacgtattaaaactggtacccaaatctcaaccctatcactccagtgtttacacttaaatctttttaggggatgggcatggtggcccatgcctgtaattgcagcacttagggaagctgaggcaggagaatcacctgagcccaggagtgttcaagaccagccggggcaccatatggag

SEQ ID NO: 601131 - DNA, 115 bp, Homo sapiens
tcggcctcggtggtgtgttgtcatttcgcggttcttagaagagtatttgagtttcaacgggaaggggtctaacgttgcttggggcgggaaactgttgaaaaaacctgttaaccgg

SEQ ID NO: 601132 - DNA, 107 bp, Homo sapiens
cccccgagaaggccaatacccgggaaaaactttgtgaggttatatattcgcagcaatccagatctctatggcccctgggggatatgtgccacgttggcccttatcga

SEQ ID NO: 601133 - DNA, 216 bp, Homo sapiens
cgtgtcatgaagatgtgcacgacgtacgagcttcctcgtcgtcgactcatgaaatttgtgaacaagctgctggcaaacctcactgatgctaggagtggagatcttgatgaccgtattatcaacaccctgacgaggattgtcccgtcgttgtgagttcgtggcctgcggcagcattttcgtgccgccaagcctgaagttaggtaacccaaagtacca

SEQ ID NO: 601134 - DNA, 718 bp, Homo sapiens
ggcgggggtggagggaagcctcccgttcccgccctcgatgcgttgtcttgagcagggtggagccccacgcatctcttctttgggcgcccgcagtgcctgttttgagccctcttgcctgctccgctcgttcccctcccgcaagcacgtcgtccgtcctggcggggcgttctctgcggggcggttgtattttctatgtgttctggtcgcctgtcgcttgtacttacctgcgtccctgtgtggcaggcacccctcgttggcagtcacgttgagtggtggcctgttcccccccccctgtggcccgcccactcttcggtcgccctgtttcttgggtatgctcccgggctacaactgatggggaccactttctctccccagaaatcgctgcgatagtgtttccccactgtgttactacttctcccgtgctccccctgtctgcgctggcgtttttagcttccacaccccctgcgtatggactgcctctttgcagagacggcggctggcggcgtccctgcagggacggtaccatcttctgttatgtagcctcccggggagcccacactacacacacaccaccagacacacacacacacacacacacacaccctcttgatcccttgcttccctccccccgtgcgttctgtgatcgcccagttcaatagccgtgcacatgtggacactccaataaatgttcattggtgacgagaaaaaaacaaaaaaa

SEQ ID NO: 601135 - DNA, 1440 bp, Homo sapiens
ggcgcgggtgtcgtgtggttggctgtgcggtgtgtcgctgcttggctggtcggtggtcggtctcgcagcgtgggccgtacgtggagttggtctctgttactgtgctgctgcgcttgtttgcgtcggggcggctgtggttgtgcgcggttgtgtttgctgcaccgcgagtgggcgtgctcgttttgatggtgtgtgtcatccttggtgcgcacggggcgtcgcctctcaggggttttgctggcttcacgggcgtgctggtttcttactccttttttttggtaccccgcctcttttcgggggaggtagagttttctctgccggccggggtttcgccgccgtttgttgtcacggactatttggggtgatgttttccgggctgttttgcggtgcgttgggtcgtgaccttcttcgcccggagttatttggggtgctcctctccttgagggggccctctccttggagggtgtaggtccgggcgacagtcttccccgagtcacgtgttgttgccgacaggcatccgtttgttcggtgttcttggtttcggggccttcctgggagccgctgtcagcgcggccggagtgtgccacgcccttatggtgaacgcgtgttggcccccccggccaagaaaggggcgaccctgtgagccgcgcaacgaaccctggtttgttgttggaccacacggtggcacgagtgttcggtaaccccgggcaggcacgtgcaagtgccgcaatggtgtctctggaatggcacacacggaaggataaccaagctcttggggtttctttgtctccacccagaccgtgtagtctccgtaattgtgaagacctggaccccttctccagagtcccttggtggaatgcctggagaagttgaccccgcccccacgctaaatggagaacacgtcttacaaatcttgcccaaaaattggggcacacacacccagccgtggcacacagtctccggtccacacttgtgggaatggaaggccaccagatcttggattcttgcccccgggagtatagcaccattgacagggggctctgggggccttctgttgcttggggcctccatcatcttggtggggatgggccacccttctcatgccaccagggaggagccaagaaaagagttctcaacgaggtatctcgcgcataaaaccagggttctcctgaccatctcacccggtaaagaacattaatgtgcctttaggaccaagccatttgctgtgttttgtgtagcacctggtgtcccaggaccagacacctcagcttccccagaggattactgctgcccagaagattgcttctgaagtccagatttttatcagttttgctctttgattccaagaccctgtttttctcactgggcctccccccctgttcccttttttttagccacccaccaattatccaaaaccccacataagtgtttgttttccct

SEQ ID NO: 601136 - DNA, 597 bp, Homo sapiens
  misc_feature (113)..(113): n is a, c, g, or t
  misc_feature (357)..(357): n is a, c, g, or t
attctagaggtcgaggcggccgacatgttttttttttttggtcttcttttccttcagccgagggggccgagctgacgcaaacatgcaaatcttggtgaagaaccctcacgggncaaaaccatcacccttgaggtcgagcccagtgacaccattgagaaatgtcaaagccaaatattcaagaacaaggagggttatcccacctgaccagcagcgtctgatattggccggagaaacagtgtggaggatggccgcactctctcaggacctacaacttccagaaaggatgtccacctctggcacctggggtttgttcgcgcctgcaaaaggtgggcatttattggaggccttcctctcccngccagtctttggcccaagaaatatcacaatctgggccgacaaagatggatctgggccgcaagtgtggctaatggcctccggcccttttacaaccacttctgtggcttggtcacacatttgggccggcaagagacacgacatgtgggtggggtccaacacccaaacaaaccctgggcgtgtccccaaagagaaagaaggtgtcacacaataagggttgggtcccttcccctttgaaagggg

SEQ ID NO: 601137 - DNA, 866 bp, Homo sapiens
gaggggcggtaggcttggtggggtgagctatgtaggtgtccctgtgggtggacgtggttgagtgataggaagcgatcctggatatccgctaactggtcagaatgcagatcttcgtgaagcacccattaccggcaagaggagcaatcacccttgaggttggcagccctagtgacaccagtcgtagacaatgtgaaggcgcaagatccagagatacgggaaggcattctccccctggtaccaagagagaggctctatctttgcaggcaatcagctggaggatgggcgaacttctgtctgattataatatccgagaatgagtcgatcgcgtgcgccatggtctcatgcgtcttgaggaaggtggtatgcatgatctacgtgaagaacttgaatggatggatcattacgtggaatgtggagcccagggatctcatttgtgtgtgtgaaggctacgattcaggatacagaatggtatcacttccttgatcagaagagtgcttatctttgcggcaatgaggtggaatatggcggttgatagtgactaggaccatttaggtggtagtgggaccctggttctgggtgcctgagcatgatgatggcggtgtgcagatgattctgtgaaataccatatctttgggtagaccagcggtcttggtacgcagaagccaagcgattgtgtgcgcaagtgtgtacgttacagccacaggaatagaggaatcgggccggaccctaaggtcctctaaggaggcgccgcgtgggaatgcggacctttttgttaaattctaaagattcccggggtggtcggcccttttgggagcccaagcgcaaagagggggggagaaaccacggcaacgcgaatgaatagacga

SEQ ID NO: 601138 - DNA, 616 bp, Homo sapiens
gcgacctagaggatcccccatgctgtcttcaggatgctgacactgcaccaggatgctgaaagacaggagtcccaatgcctcccttctgctctactccaagcttttcttcttgggtgcattgactcaagtcaggtagtacttctctatgttttgaccacagacgggctgtgttcatgtatttgtacatatgtgtgaatagacagagaaaactagtagccatggggtatgtgggggaactcattccttttaggggaggagatttatctactgtttttgttgtttagtctcacctcagacccaggttaagctggccagggctcatagttttcaaagaagcacagaaaaaattctgtttagcttacatcctaagcatgttctctttatctttcctggaaagctatccacttttaatctcatctcatactacaggagaaaatattatttgaaactgatagctttccagaaggttactgaaatcacttatttttcagtgtcttcactggcaccattcatagtagctaacattagccactttccgtgggcctggtgctgtgttaaagtgcttacatatattaatttctttaaacccgaccatgatcctttcaggaaggactgt

SEQ ID NO: 601139 - DNA, 462 bp, Homo sapiens
  misc_feature (10)..(10): n is a, c, g, or t
  misc_feature (100)..(100): n is a, c, g, or t
  misc_feature (165)..(165): n is a, c, g, or t
  misc_feature (173)..(173): n is a, c, g, or t
  misc_feature (205)..(205): n is a, c, g, or t
  misc_feature (207)..(207): n is a, c, g, or t
  misc_feature (213)..(213): n is a, c, g, or t
  misc_feature (218)..(218): n is a, c, g, or t
  misc_feature (221)..(222): n is a, c, g, or t
  misc_feature (252)..(252): n is a, c, g, or t
  misc_feature (300)..(300): n is a, c, g, or t
  misc_feature (302)..(302): n is a, c, g, or t
  misc_feature (323)..(323): n is a, c, g, or t
  misc_feature (340)..(340): n is a, c, g, or t
  misc_feature (378)..(378): n is a, c, g, or t
  misc_feature (420)..(420): n is a, c, g, or t
  misc_feature (422)..(422): n is a, c, g, or t
gcctgtgcangcctgtatgtgtgtaagtatatgcggtatgagtgtgagtgtgcatatgtaagtgtgtgtgtgtctgtgtatacatgtatgtatgtaagtntgtgtatttgtgtatatatatgtgtgtgaatgtgtgtatttgtgtatatgtatatatatgtgtgngtgcatgnatatacatgcatgtgtgtgtgagcacgtgtgngngtgtgngtgcntgnngggaaccataaggttctcagaatgtcaganatggagctgtttcacgcagatgctactgaaggtttctttagagtggcncncagactctagagtctgagggncaacaacatcctcaagncaatgtctttctcaaatggtcctgaacatccgctaggngtcccaccttctaccacacacaggtccatcccaatccaaatnantgagacaataaggacatgtctgagacagtctgaacaccta

SEQ ID NO: 601140 - DNA, 267 bp, Homo sapiens
aaatgagctggtaccagatcccctttcatcagaaaaaggaaagaagataaagaaagaaacaaatcattaattttaccagatagcagcttttgatggtacagagagcgacagaccagaaggtgcagagtacataacatcctggctgaaagactcatacgaagaaggactgtcttcatactaacttccactggcgcatccaacagcgttgactcatccacagctgtgggcctgcctccccccaccactgccacctcctctactccttcc

SEQ ID NO: 601141 - DNA, 150 bp, Homo sapiens
ggagaattataggaacctcgtctccctggagttttggtctgtcatcccggctaaagtacagtggtgtcatctctgctcactgcaacctccacttcccaggttcaagcaattctcctgcctcagccttccaagtacctgggactacagata

SEQ ID NO: 601142 - DNA, 271 bp, Homo sapiens
  misc_feature (20)..(20): n is a, c, g, or t
gcatccctggacatcagctnttcattatgcagcttcccttttaggtctttctcaatgagataatttctgcaaggagctttctatcctgaactcttctttcttacctgctttgcggtgcagaccctctcaggagcaggaagactcagagcaagtcacccctttgtactgaattgtcctcatcttgtggggggtttcaggactatttttatctctgacatctctctattgccccatctaccctaatgcatcaataaaaccttaagcccctgga

SEQ ID NO: 601143 - DNA, 184 bp, Homo sapiens
tactggttgcagcggcatcaccctccaggattggggatgatccacctcagtcctgctaagtagctgggaccactggcatgcgccaccatgcccggccgacctttgcattctcagtacagacaggatttcaccgatgatggcaaggctggaaaccttttttttttgagatagggtctcacttact

SEQ ID NO: 601144 - DNA, 769 bp, Homo sapiens
agcggactcgggccgagccatgcaggcgggcgcgcgtggactacagtcgctccctggtgggtcgtgtggctgcacagttgtcccgcacgtcggcctgcgcctgcagcccgtgaacaggaccttcagccccggcgacgagagttaccatggagtcgctgctgttcctggggtctggtggccaccgtgctgcctgggcctgaacctcatcttccttgtggcttacctgggtctgtgcatgccactgccggtcggggacgatgcggtgcagaccgaagcagcaccactccgtgctgcatcacctggacggccgtgagtgagccgggctcatctgctgtgctgccgcgagggcagtggttatctatgtgaagacacgcggatgaccaacgatggggctgtagccaacttgatgtactccttggacgatgccaaccacaacttctctgggatcgatgctctggtttccggaactacccagaagatgaaggtggacctagatcagcacctggccctggctcagtggagatctttgctgcccggggcgattacctgaagaccctgaagttcatacaggcagatggcgggcagcgtaagtcgtccacgctctcaggactggcccgtgtgggagggaggtcaccaatggagctgaccaaagctatccggacaagactggcttacgtgggagtactaaaagtggctactctaaactactgctctttagactggacctgagtcatctgcctcattgccgcctgggatggcaagggcccaa

SEQ ID NO: 601145 - DNA, 274 bp, Homo sapiens
actgcatacaacgccgccggtcgggtcccctcaacttcttagaaggtacaagtggagttcagtcagccgagattgagcaagtaagcgaggtctgtgatgcccttagaatgtccgggggtgcacgcgcgctacactagtagtggctcagcgtgtgtctaacctacgccggtatgcgcgggtaacccgttgaaccccattcgtgatggggatcggggattgctattattccccatgaaggaggaatgcccagtaagtgcggcgttggagtgctagt

SEQ ID NO: 601146 - DNA, 112 bp, Homo sapiens
aggccaggtgttctgggatgatggacaaagcattgatacctatgaaaatggaaattattttttggcaaactttatagcagcttagaaccatcttgcaaatccgaacccttcc

SEQ ID NO: 601147 - DNA, 580 bp, Homo sapiens
  misc_feature (546)..(546): n is a, c, g, or t
aaattcataatatttagagaatttgtcattttgttaacgacaacaccaacacattgtgaaccactaaatgctaaattgtggtagatgatgcatttcttgaggtacgttctgtgtacacaagcactaacactcaatattgagattctcagttgtctctgtgttaaacatgaaatcatgcctaattgggaaccattatattggttgcaagttgaattgtgttatctccaaagacatgctgaaatcattaacttccagtaccttgtggtgactttatttggataattaattcactgcccatgtttattggtatcatacctaataaatctttgcctaacccctaatcatcaaagatttacccctacattttcttctatagacctgagtgactttctattttacttttaggtctaccgagtatattttgtaataatttttatatagagtgtgatatccaattgaaatccaattgttccagcaccgtttgttgaaactgaattgccttttgcactttggaaaatcagttttccatatatacgtgggtctatntttggaataccacaggggtgaagtacccttttca

SEQ ID NO: 601148 - DNA, 203 bp, Homo sapiens
gaacataaaactaaatggatttatactaacagttacttcagcatttaagagaggcagtacaaaatgtgtctgcttatctgatataattgcatgtataccatgatttaaacaatatcagttatataactaatgccatgagatatatcttactcagaagctctgatgttcatatagacagaaatgcagtgtatagcactgagttc

SEQ ID NO: 601149 - DNA, 183 bp, Homo sapiens
gcagcttccccgcgagcggacgcggcagcgcctctgttctcgctttttcttatttttcccccctttcccctttcttttttatgttttcctttcttttctcccctcccacccttaacaatttcccctgcggagggagttcaccacgggaaggggaagagacaggttaagcacgggaaaattaag

SEQ ID NO: 601150 - DNA, 1043 bp, Homo sapiens
  misc_feature (457)..(457): n is a, c, g, or t
tagttatgtggtgcggcacggtcatttgttttagaaatataaggccgcgctctgttgggtatagatataaatgcggcctcagacacactgcattttgtttggtagaacccctcggtgtggccagttaccaaaaatattttgggtgaacaccatcgttcgtcggtgtgggttatatattccctccgtgtggagcaggaaataatctctatctggaccaacgtgatctatttgtggtcgtctttaaggagcaccatgcagtaggtgtcggtatatagttggccttccgcgttgtgggacatacatctgtctcctatctagtatcgctcacaattgttgggctctcctcgtggtgttgtgccacacagacacactttgtgtgtatagccaagacggccccttagtggagattttcaacaggggcacgaagttgcaattcttgttattaatttccgtcccncacccagggggcgtgtttagaaaatatgcattcataactatctatttttttgtctcgccgtgtccgccaaaagatctccgtcaatttcagttggactgcgtcagactctcgtcgctagtcgtctgcggccttctcataaagatctcgctctcttctcgaaaagagggagttttctcccacattctgttttagctcgcccgtattagaagagttgttggtttgagagtagttttttatggaaaaccctgtcgtaacatcatggcgcatgacgccccccgccatatttacactcacgtgggagaacattttctgtgtgttagttacacaaccttttctcagtgtcgagaatacatctgctatctccctagggagccgacaaaatgttgtgccaaaccgccgaaatgacgtctcctcttctaaataaaaatgttccccacaccacccaaggggggttacctttccccgcccccctttaccacatttacaccccctttccccggggaaacaaccctcctttttaacacccttccccccttttcctcttttcccccaacccccaaccatccccggtttttttttttaaaca

SEQ ID NO: 601151 - DNA, 1020 bp, Homo sapiens
ccaccgacacccacgggcggagatcacctgctgccccgcagacccctgtcccttcctcccggaccagcagctagaggctctgactccagccatggccccgctgctggtgagcccacagaccgtgcagaccaaccacacggtggtctgcctgcagctgtaccgggagaaggcctcccaccatgccctggtgtccctggcagtggccttcaccttcccgttcatcaccacggtcacctgctacctgctgatcatccgcagcctgcggcagggcctgcgtgtggagaagcgcctcaaggaacaagggcagtgcgcatgaacggcatatgatggtgggcactactctccctgtggtgctgtgctcgcgcgctataacatgataaagcgctgccgtactatgctggctgctactagccgcagccatggggcctcctgcgccacccagcgcatcctggccctggcaaacctgcatcacctcctgcctcaccagcctcaacggggcactcgaccccatcagtgtatttcttcgtggctgagaagttccgccactgccctgtgcaaacttgctctgtggcaaaaggctcaagggcccgccccccagcttcgaagggaaaaccaaacgagagctcgctgagtgccaagtcagagctgtgagcgggggcgccgtccaggccgagcgcagaacgttaggactcagcagacccagcaagagggcatctgccctttcccaggcagctcccaggagcaactgaaatctcacgagatggcccacatacctagaatggctaggccagccctaaaggagacggccaagggacaacgcaacctcgaggctgtgatggtacaggtctagaaccaggtcccgggcggacaagggccggaacacccgaagagggccactcacaggccacaccccgaagaccccgcgggcacgacacccagaggaagcaagcggaccggggagagaacagggagagcacaccgcgcacgacgaacacaggcaggcggaaccatcagcaacgt

SEQ ID NO: 601152 - DNA, 419 bp, Homo sapiens
gttactcgtatgtgacacgggtactgtctgagtgtttccataaatccatcagatttagaacctcatctgtccctattgcgaggaggagtagagatttttcgtgccctagcacccatcccatcgatcgatctataacatgcacactacagcaacgctaccacaaggtgtcatcgagcgtacagatggaaccttctgctcaccaacaatcctacttcccggtggcaggagagcaagagaaggacagacagatggcaaggcatgtccaaaagacgagactcagcacaaatgaatcctccccttcgccatctccaggcgtggaggcctgaggcacctcaatccccgataccctactccttcccacccacatctccttgcacccatctggaacctcggttgatgtgagccggctacagagaagc

SEQ ID NO: 601153 - DNA, 221 bp, Homo sapiens
ttccccacagtgagggacacatgccttcccccagctgcgtttattcatagtagatttttaacaaaaaatggggagaaataagtgcatttctgtgaatacggagcccagcgccctcctccacttggaaacggtatcctccctacccatccgtctgtctgtcgcccttctcccggccctcactaagccccggtacttctagtggtctcactgtggagcaaggg

SEQ ID NO: 601154 - DNA, 364 bp, Homo sapiens
  misc_feature (163)..(163): n is a, c, g, or t
actctaagatcctcctttgataggggaggtgtgtgcacataaacggactgcagtgtcaaactttggtgcagtaggaaaactctcagcatgctacatattggaaggcttcaaagcactgaccaagtgttgttttgccccccgtgcagcacattagactctgttncagtgaaatgctacattcaaagtgctgtcccactcagaagatcccagaggatgccattctggctgtgctgggaagtgctaaagttccctccatatgtcactttggagaaggaagcagccaagcagccatgttgattcctctttcaacctttggcatcatggacgatggtagcgtgtaaaatgtttgctctcttcatgccta

SEQ ID NO: 601155 - DNA, 174 bp, Homo sapiens
atcgctacaaaccctcagagaaataatgattaagatgtcccatctattatacaacaagcaggatcctacaacaatatcaccgccaggcattgaggcagcatgcctagtagtcctagcccactcacagaagctgaagatgggacgagtcacgttgagcccacaagccaggatcag

SEQ ID NO: 601156 - DNA, 216 bp, Homo sapiens
tatccagatgaagggtgattatcatgtggcaaaccacatttgcatacgtggcaaactacagagatctcgatactttagtcaacatatcttaaagagttatatcacgcatcagttcaaaatcatgatgagatgctgatcgttgcactatattcatgtctcgtattgttgcacccaatatttcggttcacagttgatccagggggatcctctatatgt

SEQ ID NO: 601157 - DNA, 882 bp, Homo sapiens
gaccatggcccaagggcatggaagcatgtggctgctgagagggtcgtgggccatctccaccaccaccctcgcgtaagggcatgggcccaggctggcgttaagggcactttgcctgcttagtcaaaaggtggcatcgaatcacctgggctgtcacatgttttgtttagtttcatggatagtatgggaccaaacttgcaaattaatcattgcaatctaaggggaaaatagaagaaattaaggtgggggtggggggacggggagcccatggggataaaagtaattaaaatccattgaatttagctatttcacttggggcaacatttaatctccaagattaaatcttggtttatggggaaggttatatattttcatctcatttttatgtatcatctttaagacaaattgttaagtacaaatgaaaatcaggtaacatacaaaggcatttcatcaaatagttaaatttcctatgaaagttagtaaaatacatatttttataataccatgttcaagtgaagtgtttttgctttctgccaagagtcattaaatgatatagcaagtatttgggtctctcttggtgttatcaggattaattgcccaaggctgcgattttgtgagcatagaagaggaaagcaagcatctctcacaagcagtgacatgaatctgtaataatgagtgaggctgttagcaaattttgtgtgatggcagataactcagttttggagaaaattagaatcacagctaccaagaagcacatatcgtttcaactttcccacccaagtattagtgaagtgatttaggaccttgatttatatttcttagagaagctggctcgaggcctttgtttcattactgtttgatgaggcatgatcccttactttaaaa

SEQ ID NO: 601158 - DNA, 112 bp, Homo sapiens
atccccctgcatctggggcttggcaggtctgtcccatcttcagcaaattctgatgtcacacagtggtcagcccaaactgagcgctcagccctatgggctcctttatcagtca

SEQ ID NO: 601159 - DNA, 1398 bp, Homo sapiens
ggagagagagaactagtctcggtttatttttgatgtttcttttttgggaaaagggaagcaaaatttttttcctctgggggggaaaaaaaaactaggggggggtttgtgtccgggacccccatccctaacccttcccaaaaccaaaagaaagacaaagcagcggccaccaaatggggtccctcggcccaaatgtagaaacgccagagaggtcagcggcgtctgggctggggagagcgcaggtgtagacgcgcacaacgggcacagggcgcagggcgcgcgtgcgcatgtgcgacagcgcggggcggccaagggcggggcctgtggcgcccagggggtagagagggggagaaagagggcgccggggcatcgcatgaggagatacgcgggggcaaacgcgcttggagaggggccgtgccggagctgtggcacgggggcccacaagaactctacaggggccaccacaacaaacggcggggaaaggggggcgcctcgcctggagaatgtggtgcctgcgttccccccccactattggggaacacacacagttcggtgttcatctccccctctgtggtcctcttgagagccgcggtttagcgcaccccgcgcgtgttaagaagccgcgggtgtggccccaggtgttgtttcccacgcgagggcaatacctccctgcgggaggggaggatctctggggggccctttggaaaacaccccccacaccacagtgacaagtggacatttggttagagttagcagcacatgaggaattatagggtgcatgaggaaaggccaatcacgtgggcgggaaaaccgcttggggcctcatatccggtgggggccgccataacgggatagagcgcacattgaggaactacaaagggccccccagaagggcgccctttggtgggggcccccaacaacaaacccttcgtggcttgaggagggtatgtacaaagacaagggggcccacaatagtagaacccccggggggggggcccccccacattgtggctcgtccgggggggggcgacacactatgggtgggggcgccctatttgtgggggtcccagagagaagaggagtttcccataaacaacagaaacgagtcggtgcaagcgtagacagggtttcaccccagaggagggaagcagaagccatgtgagtagcgactctgtactggcgaaacccgacaaaaccaagcgggggggggggcccccgtgtgtacacacctctgtgggaggcgccttcgtcaaagagggggcgtgtgtggtgcccccaccacaaattggggggtgcatacaaacggggagcaccggcgccgaaacaactgtatgtgcaaggtgagaacgaactgcacagggaacaagacgcggccacaggaggtgtccccaatgggggggt

SEQ ID NO: 601160 - DNA, 403 bp, Homo sapiens
  misc_feature (13)..(13): n is a, c, g, or t
  misc_feature (22)..(22): n is a, c, g, or t
  misc_feature (26)..(26): n is a, c, g, or t
  misc_feature (32)..(32): n is a, c, g, or t
  misc_feature (36)..(36): n is a, c, g, or t
  misc_feature (41)..(41): n is a, c, g, or t
  misc_feature (53)..(53): n is a, c, g, or t
gcaagtgccactntgtgagganaccnataatngaangccgngtgggggtttanaaacagctgtcgctcgatccggatgagcacctgttgtcgcccgagagagagtacgtcgaagcaggagcagcgagcggactgacagctgatcggtcagaacgagcacagtcgccttgcgaacgaagggctcgcagtggatggaggaggccagcctgaggtcacgccaacaggctgctggcacggcctacaggctgggtaggcgggcgtgccgacgtcaggcttccctcagtccgggcgagggctacctgggccggaaaagccgactcggcctcgggacagagccccacccgatcggaagcggatctttaccgggccataggcagtgactaggccgggctgggcctcccatc

SEQ ID NO: 601161 - DNA, 688 bp, Homo sapiens
agtgagaccctgtctccaaaaaaataaacaaaacccatttttttatagttcatttctttatttattttttggaaagggagtctggctcggtggtccaggcgggcatgatctcagctccattgaaacctccaattcaaggtccaggccaattctcctgccttcaagcctcccaagtagatggggactacagactcacatgccacccacgcctgtggcaaaattatgtggttattctatagctggacaactgtcgtaaaaccccgtcttctctactaacaacatacaaaacacttagctgacgcgctagtagcaacacgccggtgtagtacacttaagttcccagcaacctcaaggaaggtctgagagaaccaaaatgtgatatgaaacacaggagggttgaacagatggaagctggaagccaacagatttggtgccccagtggcacataggcagagctgagcgacccttgggctcaccacacaagaaacaatatcaacaatacgtgggacacctacccggaggatcaacacaatcacgcgaggacggatcaataataaacatatcaacccataggttccgaaaacataaaaataaacaacttaacaaaaaaggtggaatatgacaaagtggggtgtcaacaaccgcaggggcaagagagccaaggctggtaaccccaacgggcgggcat

SEQ ID NO: 601162 - DNA, 530 bp, Homo sapiens
caagatcaccctgaccaacatagagaaactctgtctcaaaatattaaaaaattagctaggtatggtggcacattcttgtagtcttagctacttgagagtcttaggcgggaagatcatttgagctctggaggttgcagtgagccatgattgcaccactgcattccagcctggacaacagagagaccctgtctcaaaaaaataaaaataaaaaaggatcatccttgcttgatcacccaaccaaaggtctctgcccttccagaacgaactgtagccactggctactcaatctcaaaacatcaggggtttttgaaagtcagacatttattttctaaattcagtgataatcagcttgtaagaggcagtgaagggacatctaccaagaaatttccacatgattctgtaattatgaaaagcttctatgccaattaaattcctggaacaaacatcaacaacaaagagtaatagaagaactttgtggaaaacaacaaatatatggcattctttacctcatcctgatccaacatctgttg

SEQ ID NO: 601163 - DNA, 762 bp, Homo sapiens
gaaaacaggcacacaaaccaatggaacaaaatagagaacccagaaataaagccacacatctgtagccgtctgatcttccacaaagttaacaaaaaaaaaatgaggaaaggactgtctgtttaataaatggtgctgggatatctggttagccatatgcagaagaatgaaactggacccctaccttttaccatcttcaaaaattaactcatcatggactaaagatttaaatgtaaggcctcaaacagtaagaatcctagaagaaaacctaggaaacatcattctggacatcggcctggggaaaagaatggatggctaagtcctcaaaagcagacacaacaaaaacaaaaattggacaagtaagacctaagtaaagagctttgtgcacagcaaaagaaattatccacagagtaaacagacaacccacggaatgcgataacaatatttgcaaactctgtttccaacaaaggtctaattactagaatctataagaaaactttaaactagccaacaagacaaaaagaaagaaaaaaaggtataccccttttcccaagtggccacagacaggggacgaggccttttctccggggaagacctcacagtgggccgcaatccttgaacatggctcaccttgtgctttttcccaggaaatggggccattttaaacacccccttgaatttcccgtcttccacccattgcgcggttttttatggaagtccaaggtgcctaaggccaataaatctagaatcgtggaggcgaagggg

SEQ ID NO: 601164 - DNA, 1628 bp, Homo sapiens
  misc_feature (629)..(629): n is a, c, g, or t
ggggtaaacttggcagcgatacgtccaccacacacagtgcattcatcttatagaaaattaggatggtctgtgatctccgtgacctctgtgatctgccggcctcggccctttgcaacaggtgctgagataacaaggcgtgagcccacccgacacgattggagacccaatccgtggtacaaacacacgtgacaacccccggtctctacgtaaaaacttacaaacacaatattaacgccggcgcgttggctgtgttgcgcaacctttgtatgcccccgagctaacctcgggggagtgcttgagacgacagggaacgaaactctgcctttgaaaaccctgtggggaacggaaagcacgggtctgcacgtggacggcccaaaagtgaattcgggcacccaactttggtaacccttcccccggatctgggggatggaataaggggggcggaaggaacatccccaattccttcgacatatatacactgcggatctacacgcaggcaccccagcaaaccacttgcaaggacagtgtgggcggccacatctataatgttcgcaaaaccaaaggggctaaggatcatacttggcgctcctgttgttctgcccgttgttggtcgaaccacaacgtctggntctgggcacactagttggttcccacaggcactccaccacgtcaacacacgcctgcgtcgtgttgggacaagtatatctcgtttaaagcaaactttgacccttgggccgaaggtggcgctcctaggctacaagggcgcgcgcaaccaacacataacggattacaattcgcccgtttccgtggcaagcgtatacacacagacacttaatttgtacgcaaagcacaaccccactgtgtacccaaaagtatctcttggggtagcagaggcaacaccaccagggctccttatgaggtttaacacaaacggtttcaaagacaactctccgtagaagttggtacacaagcgcgggtcgctatcacaaacactgtccaagcgctattagcagggcggctctatggcgggttagacagaacaactcccgtacagttgggggttctaccgcaagcgcgatatacccagacgttaattatacaccaatgggagatgcccgggctactaaggcgtacaacccacatatcattacactacatagtggtggtgtcacaaccaacaccagcagacagacatcgtgatgtgagactgacgcccctctatgagacgacaccactggtgagatgagcacgactcacccacatactagtgtgatccacacaataaccgtataagaggacggagcgcacacactcaaagccgcagtgtctccacaaccatcgcagaacacaccgcatcatagtatagctgtgttagggtactatcttttttttttcatgcctctcatctaatcgaatcacagcatcacacagagccagacggagaactaccacagacgagcatcggagcatacaccagacgcctagcacacatgcgaactaagggtcaaatgcacggagcaagctcactgacacgcagtccacgcaacgcatcagcacaggcaagcaagtcgcacgccgcaagcacaactactcaacagaacagccacgacgcaccaggacagtccccc

SEQ ID NO: 601165 - DNA, 159 bp, Homo sapiens
gacgggcctcattccttaccgtcatgaactaatcgcaatccctcatctcattcccagagacactggccaacaagaagtactgctagagagagacccagtaaaaagatctcagaagttggatatcaaaaataaaaaggtacagacagttttccaggtagc

SEQ ID NO: 601166 - DNA, 116 bp, Homo sapiens
tggttgctctgaggatccccgattggtgggcgttgcgcgggcggcgtcgagttcggcccgtcaggcgcgccagcgtggcatgcagggccgcacgttcggcggcggcctgggagacg

SEQ ID NO: 601167 - DNA, 140 bp, Homo sapiens
  misc_feature (5)..(5): n is a, c, g, or t
  misc_feature (12)..(12): n is a, c, g, or t
aagcnagtaagnacctcctcaaaggtcacgtagtaccctgtaaaactgtgtgtttgtgtgctttcaaagatgttgggaatttatctggggacagtgtgtatggtaagacatgcccttctattaataaaactacatttctc

SEQ ID NO: 601168 - DNA, 600 bp, Homo sapiens
gggcggatcacgaggtcaggagatcgagaccatcctggctagcgcggtgaaaccccgtctctactaagaatgcagaaaattggccgggtatggtggcaggcgcgcatagtcccagctgctcgggaggctaaggcaggagaatcgcttcaacctgggaggtggaggttgtagtgagctgagatcacgccacggaactccagcctgggtgacagggcaagactctgtctccagaaaaaaaagaaaaaaaagaaataaattggttggaaggaccaggcgccggtggctcatgccgtgttaattcccaacacttctgtgggaggcgcaagggcgggcgggataaccgtgagggctcaggagtcggaagaccagcagtgtgccaaatgatggttgaaaacccctgtctcaaaagtagtactgtgtaaaaaactagaaacgggcaaacaccaggggacacacagacaacgcaaagcacaggggcacgagaaatcctgaggatactcacaaggatggaaagagacgggaaaatacacacacgaaaaaacccccaagagggaaaggaaacaaccgagacaaagaagacaacgcaaaaccaaaagacac

SEQ ID NO: 601169 - DNA, 103 bp, Homo sapiens
aggctgcggtacagtaattagatgtagaatcttgttgtaggctgaattttaatctgtatttattgtctttgtatctcagaaattagaaacttgctacagactc

SEQ ID NO: 601170 - DNA, 361 bp, Homo sapiens
gccttagccttgggaggtctgggaagggctggaaatccctggggacaggaaaccccttccttttgccaaatcagatcccgtccaaagtgcctcccatgccttccaccatcatcacatcccccagcaagccagccccctgcccaaccgggcctgggatgggcccccccccccctggatatttctgggagtccctgctgaccccatctctcccaccagtcttggggtttgggtgggaaacattggtttctaccaggatccctgccccccctctccccaattaagggccttcccccagctttggtttaatgtttataaacaaaatagagaaactttccttataaataaaagtggtttgccccga

SEQ ID NO: 601171 - DNA, 557 bp, Homo sapiens
  misc_feature (59)..(59): n is a, c, g, or t
  misc_feature (92)..(92): n is a, c, g, or t
  misc_feature (99)..(99): n is a, c, g, or t
  misc_feature (105)..(105): n is a, c, g, or t
  misc_feature (158)..(158): n is a, c, g, or t
  misc_feature (396)..(396): n is a, c, g, or t
  misc_feature (435)..(435): n is a, c, g, or t
  misc_feature (441)..(441): n is a, c, g, or t
  misc_feature (450)..(450): n is a, c, g, or t
  misc_feature (473)..(473): n is a, c, g, or t
  misc_feature (480)..(480): n is a, c, g, or t
  misc_feature (492)..(492): n is a, c, g, or t
  misc_feature (553)..(553): n is a, c, g, or t
ttggtcaggacttttcagggcctgggcccccacccaagttccaggtaacactgaatttntgggaagagagccatggctccagccatactccncagaatnttatcncagtgaagatggagcaggcctttgcccgatacttgttggagcagactccagancagcaggcagccattctgtccctggtgtagagcctgggggacccattttccccctcacctctttgtttttcctgtttcctttgaagtagactcatttttcacccgattgacctgtcctctttgtgataattttcagtagttggccgtgataattgtgtcctgaaaatcctcgccccccctgggtggtggagaactcaagggtaattttttatcccttttttttttttaattttgaganatacgccctctttcatttgtaaggggctaggaaattccnaatggngtgaacccngggggcctttcccttttccctgncctcccnactttaaagccnagccctttatattttccttttagatattccctaagggcttaaaataaaattttattgaaanagga

SEQ ID NO: 601172 - DNA, 780 bp, Homo sapiens
catggtggcaggcacctgcagccccagccactcggaaggctgaggcaggagaatggcgtgaacccaggaggcagagcctgcagtgagccgagatcacacaactgcactccggcctgggcaccagaagggggcatctcctctctcaaaaacaaaaaagagaaaagaagaaacatccatacagagtgatgatgaaatggcacagtgaacatgcactgtcttatatgaaccacaagtacagttatcagatctatcagggttcatatgtcatatataaaactcttaactacttctcaaacaggggaaaggtcacattaattactccaagagaaagaactggttactaactactttaatgcaggagctcgtggataaacaacgatgagtggataacaaaagcacagtgagtattcacaacagcatgacaaacaacacaggtatactcacatatatggcattgataatcagagacagcactttagctgcctttcttcactgcctagagaaatgggcagcaatcaaggcattcaaaggtctacctcctttccttcttccaacattaaaagcaactaactcaaaagaaaggtatttcaactctttatagataacaatgactagaagtgacaaacatacatccattcgtctcttctttcattcattatcaagatggtggctatgaagaactaactgatccgggtctgtacagtcacagatgtaatatgtcatattgtgatgcaagatgaggcttatcctcagtcctggaatgggtaccaccctttggtc

SEQ ID NO: 601173 - DNA, 332 bp, Homo sapiens
taagatttaacctcagctgcccacagtggctcacacctgtaataccagcactttgggaggccaagacaagcagatcatgaggtcaggagttcaagaccaacacggccaacatggggaaacctcgtctctactgaaaaatacaaaaattagccgggtgtggtggcacacgcctataatcccagctaccagggaggctgaggcataagaatcacttgaacccaggaggcggaagttgcagtgagccaagatcgcactactggcactccagcctgggcgacagagcaagactccatctttaaaaaaaacaaatcgaggtgggaggatcacttgag

SEQ ID NO: 601174 - DNA, 1039 bp, Homo sapiens
  misc_feature (751)..(751): n is a, c, g, or t
cgacagtcgtcgcgtgtctgtaatgcatcacttaaactctggcgctatagtgtaagcgctagagcaccggaccttgccggctctcgatctgacgtgccatgatctgtacatctgtgaaatgtctctggtatgagactgaaatttcgttcgaaactaacgaggatcataatctgtcaatgaatagtcgttggtagaatcctgcgaagtgacatgtgatcgtgcatcgtaagtggaatgtgaatcggatatatttataaaagtggatgtcattgacttaagtagatcatgcatgatcgcacgtctataccctgtgaaatagagatttgtgtagtcgttgtaatttatatattaataagcgtgaatgttgtctagtgtctattgatatatattgatcagatgtagtctgattataagggatttttatcagattcagattatggcattagaaattataataatattatttgctgcatggtatccatagtcacaacactacaagaatagatagcgttagatgtgaacgactagttgggcatctggtagtgaaactactgacaacagtggctggactgaaaaatccgcgggaagcctgggttctcctctagcttattggtgtctccagagctgtccagggcatttgggtcttgccccgggttcaaaagcaaccgtgacccagactatgaaagggtttggaatatatcttggctcactgcaagggaggccctttcaaaacacttgttgagaccgccanggaaagccaaggagcaagggaagggacggcaggcaggtcccgaaaaaggccaggactcgccggaagggggccccagaagcggacgcgccgcaccagttgggttgccgttatcaccccagcccggaaggtatggtagcctgtcccctcaggatcattaaaaacctcgcgctgaaaacaaaggggcgcgtgaaaactcgggcggataccattaagcgagtcagtataaacgcggaacgagacatgaggacggcggaccacacacagtgtggcggacaatacacgcaatca

SEQ ID NO: 601175 - DNA, 143 bp, Homo sapiens
tggaaagggaaaatatactttattttttaatacaatagctgccagcaataaacgggggcggatgttccaaagataaaagaaaatacatgcattctataaaaagcttccatttgcctggccaagaaattaaaaagaaaaaaccc

SEQ ID NO: 601176 - DNA, 186 bp, Homo sapiens
cggcttggccgccacagcgtcggatgttcagagcagcagaagccggcgtcgtcggatgttgtgttgcccgccaccatgagctacacaggctttgtccagggaatctgaaaccactttgctgtcgggctagtcgggggggctagcggggctgtcgggctagtcggggactgtcgggctagtcggggg

SEQ ID NO: 601177 - DNA, 154 bp, Homo sapiens
cttgtgtagctgagcattgatgctggattattgctctgtgttatgctgttgtcctgccgactgcgcccagtgtgtgatccatctagagtctgacctgctgtgcagtcaatgcttgtgcacttggcctgtctgttttaccaactgtcgttgactt

SEQ ID NO: 601178 - DNA, 634 bp, Homo sapiens
  misc_feature (145)..(145): n is a, c, g, or t
catgctgtccggcgcgtcggcatctctccgcttggttcccattctcttatcctgattgacctgcagagcactccctggtccatagactgaggatagcttgcgcattcctcgaaccaagtaaaaagagacatcggctctcgcgtgnggtcattaggcggattctgtgccttgtaaccacaaatacagcactgcgtatctctctggagagttccatgtacctgttgatcaatccaaccaagtgagatccagggaccgacactcgtatttctacatatcacgcacggtccacccgtgctgaacatcactaccacggatctgcctcatcagcgagaaaaggggacttttggccaatgtggcctcgccactcatgtttcggaacttctaccagcaagccccatgccatgcataaagtgtctttaacaagcatggactttttaagccaacaaacccaccctattgcatgggggcaaacggcaaggttaaaccacgacggcaaggcccgaaaggcatggccatggccctggttgccaaaaggcctttccgaacttggaactggtcagggggtccacaacccaaatggatcaaacaaacagaaaaacacaaaacggaaaattcccaaaaccggttttcattc

SEQ ID NO: 601179 - DNA, 471 bp, Homo sapiens
caggaagtgtggagcacacctgctgtggagcacacatgctgtggcgattgcagcgtgtctgaggtttgtgtcgtcgtggaagatactaggtatgtagagcaagtcgcaaacatggattgagactgcatggtggcataaatgcagcaacttgcctgtagcatctagtctacttgcaggacgtggagcacatcacggagagacacaaaacaggtttgtgccataaagtactttatcaaagacaccaagcatgtggtaaatgaaaattattagttcacttccctgctgccatgaagcttagccttaagaaggtgctggattccaaggtttgtcacggcatctcggtcaagactgctttcggaatgcctatgatttcgcatcagctagactgagttgattctgaccagaattgatggtactaagtcggcaccgctaactttacaaaggagacaactacttgacctattgtataaa

SEQ ID NO: 601180 - DNA, 418 bp, Homo sapiens
ccactgtgggccgacctgcctgccacccccctggacaatatcctggatgaattacccctgcatgcttcacctacaagccagctcactgcaatcatccaaagcccagaggagagagccgcaaagacagggttggacttctgcagagggctcctgagctggctctcctccggagctggactttggagggaagcccagacctgcagctccacctccagctcacctatgtgcccacaggaaggccataacaagccactttacctcaccagctctgtgtgcccatctaggaggtggcaagaaagaaaatcttctgacagtttctcaggaacttggggaagaaaaacttgtttgcaaaaacctacctacttagaaggcatttttattcctatactactttgaataaaatcatatatgatctaaa

SEQ ID NO: 601181 - DNA, 342 bp, Homo sapiens
aaggatccccgacgtctgtaaccttctaacttctgcaccaccagaaattaaattagatagggcttttaaaataaattaggttaccaataatttacctcattttattcagtagctattttatccaatttattggctttatatttttctatctatctattcttactccaatacttgtctatagcttgtttttcatttatctatctagaaactcttgacaataattatcattatatactatacttgtatctatctatccaattttcttactaagtaatgtaacattttagccctatagctatatattgtattacctaagcttagtactttatttcttactagcta

SEQ ID NO: 601182 - DNA, 242 bp, Homo sapiens
cctttgttcaatagctatggaaagtatgttgtgaaacttttactggatgggttgctggagaaagataccaattgatgacttttcgccttttgatgaagataccaatttattgcttccagctccaacttatgaatttgaactgtggccaatgcttttgtttaaagctattatcaagctggcaaatattgagtatgtaatgcccctatccctcacatgaataaaaaaagcaaacaaaaccatta

SEQ ID NO: 601183 - DNA, 128 bp, Homo sapiens
gcactggtggtcctcagccattgcctggaccgttctcctctcgtctctctgtactcacagtcttttgtacctcctattgtcatacctcacccaccccgtgggttcaactgccccaagaaaggctgccc

SEQ ID NO: 601184 - DNA, 764 bp, Homo sapiens
actaaagagttggaaagaccggggggtccctttttggcgccccgtgatgtgtgtttttgttcctcacacacattggggggttgtgagtgttctctaatgggcccacaagacagcgacaatttgtttttgagaactcggagagtaaaaagtggtgaagtcacacagacactttgttacaaaaaggaggggggttgcaacaaataattaatctcccccgcacaggtttttgttggcgcacacactatgttcacaacggctggggttattacacaacaaagtatctttttgtagtaagtaaaccctcctcccccccctctttatttaaaaaataccccctggctttttattatttatgtgctccagactacccagagcagcccccccaccattatttcttaaaaaaaatattttatcatatgaataaatatttattattgtggaacaacacacggacttgtgggtgatgaatatttatctacgggcgcacgcagatagttttttaaagtgaatagagagggacgcacaacatattgtatagacctgttttttttgtggaagtttgagaaatgttttctgtggggggaaaagaaaaaacaagagagagtgctataatttctccccccccctccttctgctgataaatgagcactcatggggagcaaccaacattttcctggaaaaatttttttttaaaaaaagagaggttttttccaagggggaactggggggaaaaaaacagggggaaaaaccccccttttttttta

SEQ ID NO: 601185 - DNA, 327 bp, Homo sapiens
agggacgttctctatagccacaatggcagctcagcccccgcgacaccatggccttctccgtggaagcagggcagtgcacactggatgccaccctacatgtgaccattgccctagagggccactgagcccactgaagctggtccggcacaagaagatctacgtcttccagggagaggcagctgagatcagaagggaccagctggaggcagcccagtgaggcagtgccaccttgcaagacacctgtattcccatgtgaagaagcccacctgatttgccgggataccatgggtgattggttgtctgcggtggcggccatttggcagaatg

SEQ ID NO: 601186 - DNA, 499 bp, Homo sapiens
  misc_feature (103)..(103): n is a, c, g, or t
  misc_feature (170)..(171): n is a, c, g, or t
  misc_feature (213)..(213): n is a, c, g, or t
  misc_feature (372)..(372): n is a, c, g, or t
  misc_feature (448)..(448): n is a, c, g, or t
  misc_feature (494)..(496): n is a, c, g, or t
aaacataagaactggtcttctacactttctctgaatcatttaggtttaagatgtaagtgaacaattctttctttctgccaagaaacaaagttttggatgagcnttttatatatggaacattactccaaccaggaactgagaggaccaaggaaacccatgatggggtgagnngcagagaagggacaagaagtaaaactgtagactatagctttntgtcacggatcacatagctgtatcccctcacggtctagctgcaaacaacagacatggagagacacacgatgacttcttgtggtagtatggtcattttatgtctgacacgtgaatgtatcaaccagatttgccacaaggaactgaggggatacagtaatnatgtctatagtggaccaggaggtcatgaagatacacatggaattatactgagaaactgtggtttggtaaaaactangtagtataatcaaccccttgccatttttcttacccaaaaatatatnnnttt

SEQ ID NO: 601187 - DNA, 122 bp, Homo sapiens
aaaatcagggatgatctgattattatcatgttggggttcactttttatttttgcagtgtgtcccaaagcagcagcacgtataggtatagccctcttgctaatcagcttgagggccttagagc

SEQ ID NO: 601188 - DNA, 156 bp, Homo sapiens
aaatcacaatattcttttctgtgcgtaatttaaagtttaaattaccccactctctccccccccctgcttttgttggcgtccaaattttccgtattatttgttcgaagaatatcaaatgtagaatactcatatacgtatacaccatatttctgaaat

SEQ ID NO: 601189 - DNA, 212 bp, Homo sapiens
aagatgacttgcctaagccatacattaaacgtgttttgttgttgttgttgttattgagactgaatctcgctttcttgcccagccgcagtgcagtagcgccatctcactgcaacctccacctcctgggttcaaacgattctcctgcttcagcctcctaagtagctggcattacaggtgctcaccaagcctggctaatttttgtatttttagta

SEQ ID NO: 601190 - DNA, 657 bp, Homo sapiens
ctgaagtgcaagaccagtctgggcattagactatagaaagcccctgtctctacaaagagcagctaaattagctgagcatggaggcatgtgcctgcaggctgagctgatccgagtactgaggctgtaggatcactcaggcccagcagttcaaggatgcagtgagctatgatagcgtcactgtactcctgaatgggcaacagagtacgaccctgactcttaaactgctactattcaaccaatggtgcactgacaatttattcaccagggagcttttgaccctagccatgagtcaggcagagatcatagtgcatgtgatacgttagcgaacaaaccagacaatggctccctgacgatgcgcagctgatcattgaatgcgagtcatgagtggacagaagctactgtcccgactcgaactgtggcagtgaacgctgagacgcgaaacatgagttagtgaagaggggtactatatggtaacatgatagatgatgatgacaggggcttgcgagatgaacggaatgaccttagatgctcgccagactgatatactagccattgcaagaactgtatgtagagagagagcatgctaacccctatggtaagcctcgcagagacatgctgtgtacaatactttaagggcatttgctgagattgtctccc

SEQ ID NO: 601191 - DNA, 275 bp, Homo sapiens
  misc_feature (219)..(219): n is a, c, g, or t
  misc_feature (253)..(253): n is a, c, g, or t
  misc_feature (264)..(264): n is a, c, g, or t
  misc_feature (270)..(270): n is a, c, g, or t
tgcccccccccagggggtaccaaaggaaagttggcagcaggggcctcctcccccaaggcatcccagccagtgccatgtcctttgcagggggagttattggcctactccttccccatgagccctccctgtttgccctgcccaggccaaagggtaaagcacaggggtttccccatactccctcccctccccaggacactcccaggcttgggttttttttanaggtttggcggggggccccagggaggggcccctnccaataaaaanattggntccca

SEQ ID NO: 601192 - DNA, 522 bp, Homo sapiens
  misc_feature (91)..(91): n is a, c, g, or t
  misc_feature (93)..(93): n is a, c, g, or t
  misc_feature (140)..(140): n is a, c, g, or t
  misc_feature (308)..(308): n is a, c, g, or t
  misc_feature (314)..(314): n is a, c, g, or t
  misc_feature (329)..(329): n is a, c, g, or t
  misc_feature (399)..(399): n is a, c, g, or t
gtattaacaagactaaccatgatggatggactgctccagtccccccacctgcacaaaatttgggggccccccagactggcccggacacgantngctaatagcccttgtggctcagcttctcccccacccactgccaagtncaatgacaccttcctctgaaacatcagtgttaccctcatccctgtccccagcatgtgactggtcactcctggggagagactcccggcccctgccacaagagccccagggtctgcagtgtgccccttagttgagtgggcagggcgggggtggtccagcccttggaaggnccccancccagctgcccttgntattgtctgtggttttgaagagtgttaaattatggaaggccctcaggtttccttcctgttcccggagganctttttatttattattaaagtttcctgtttttttcagggggtttgttccctttgggaggagatgatgtaggaggactgtgtgtgtaatttgtgggttttaggagttcgtttttcccagaggag

SEQ ID NO: 601193 - DNA, 912 bp, Homo sapiens
ggacgtgctggcatgacgggtgtccgtgtagaaggatcagtgggcttgagaaattcgaatggtgtgcaaaataatgcctgcaccgatgggggctccataatctggttgacagaaagaatcgtgcatgtgacttgaggtagatgacgtgaaaaatggggcctgatcagaagcgtttagagcaagtaagataaacagaatagggcaggttgggcttaggctttggaggggaatcacggatgttagatacaaattaagacatgatcaggtaactacggggaagcaactttcaggggagtgtgatagtatgatgcgctagagcttttgaactagattttgcgcaaggagatgggaaggcgaattgcgcatactgattgggggacgccatttaggggggatatgaagtcactcccatgcctgagtccacgttcgcgatagatgtagagcccaaggtactaagagctctactaagagtagccttcctatgtgttgttgtcacactggagggacacatttagacatcggctacatgttacggcgtaattggactggatctgctactattaacgaaaggtctgtggtgagcaatatttaaggcattgaactatctggtgcgtagcctccaaaggagacattaggctggctcctccggaaagacttaggtgtagaaatccatctggttaagagccacggtggtgtagagcaattgacaacacagtactgcggtcattggtggaaatgcaaatattctggagggggacctagaaagctgctcagcgaccgacgtttggttggcgacacggacatttctttttcctgtttgcaccattaggaacgtccaccggggcacgcatgtgaaaccaatagtcccggactaccgttcctaccaggttcgtgcgcagtggctgaacacaa

SEQ ID NO: 601194 - DNA, 350 bp, Homo sapiens
  misc_feature (156)..(156): n is a, c, g, or t
  misc_feature (232)..(232): n is a, c, g, or t
  misc_feature (235)..(235): n is a, c, g, or t
  misc_feature (283)..(283): n is a, c, g, or t
  misc_feature (285)..(285): n is a, c, g, or t
  misc_feature (293)..(293): n is a, c, g, or t
  misc_feature (295)..(295): n is a, c, g, or t
  misc_feature (297)..(297): n is a, c, g, or t
cagatcactccctggtggataccacacagcacagagataacaaaacgataatccatacgtcgatggaacacacacagcgaatgtgaattcacagaggtcacccacctgaaagtctactttcctgatattagttgattaggctgggatagtacgccngatgggtctgggctacactggcagaatggaaccaaagcaatattcgacagcctcagagagaactcctacaagaccnctngcatagctacattctgaggcaaacgacagactcttaatcagtaaagtntncactggcntntntgaaggcatggcccaagagaagagacacctacgccataaatcgtagattctat

SEQ ID NO: 601195 - DNA, 117 bp, Homo sapiens
tatatcgagctcggtaccatgatggggtcattgatggcacaatatcactttaccagattaaaagcagccctggtgacaggcgcccaatacgaccaaatccccgtctaggagcgtaat

SEQ ID NO: 601196 - DNA, 86 bp, Homo sapiens
ccctcccccccccccccggtttaattggggttagggcccaagaagattggggtttagccctaggaattaacctttttttaaagcca

SEQ ID NO: 601197 - DNA, 354 bp, Homo sapiens
  misc_feature (354)..(354): n is a, c, g, or t
cttgtcgcccgggctggagtgcagtggtgctatcaccactcactgcagcctcgacctcccaggctccatccttctgcctcagcctcctgagtagcagggaccacaggtgtgcgctgctatgactggctaatttctttttttttttggtagagatggggttttactatgttgcccaggtgagtctccaactcctgggctcaagtgatctgtccaccttggcctcccacaggctgagattacaggtgtgagtcactgcatcttgccagtaaatagatatatgtatttttaaaaaggtacaatggccaggtgtggtagctcatgcctgtaatcccagcgctttgggagttcaaggcn

SEQ ID NO: 601198 - DNA, 116 bp, Homo sapiens
  misc_feature (74)..(74): n is a, c, g, or t
ttgtcgtcacgttggcaggttggctcaagactcctgagctctcatataatccacccgccttggcctcccaaggntgctgagattacagatgtgagccaccggcacccagctagacg

SEQ ID NO: 601199 - DNA, 477 bp, Homo sapiens
aaatgcactgtagtgatccagatgaaccccccttaagagggcatagtgctggagtgtccagacttcgactccagcaaactgttgagataggggccaccgaggctagtgattagtacacgcgatcacttcagtgaagaggagattaccactcacactctggtacctcggaatcagaactccgcaattcgttcgacctggcaaatgtacactcgttctgtcgcccagtcctggagtgccgtggtgtgttctcggctccttgcgacctctgccttccgggttcaagcaattctcccacctcagcctcctgagtagctgggattacaggcgcccaccaccacagccggctactttttgtatttttaggagagacggggtttcaccatgttggtcaggctggtcttgaactcctgacctcatgatccacctgccttagcctcccaaagtgctgggattacaggcgtgagccaccatgcccag

SEQ ID NO: 601200 - DNA, 244 bp, Homo sapiens
tcccacgatgtaatacgtctcttagcgatcttatttcggaatcacaatgataggctggcatgcgcagttcccagactgacttttccctttggctttgtgattttggggtctcaagatttattatcctttcacacctgcgagagagatctttctgatgctccttctctgcccgtcgtgcttccatctcatctgccaactttgcgctttggctggtgtggtggctggaggtggcctaattgacaaa

SEQ ID NO: 601201 - DNA, 245 bp, Homo sapiens
  misc_feature (197)..(197): n is a, c, g, or t
ggcggcgggaggactgaggccagcggatgtcgctccattcacgtcgtgccgcgcccgtgctgcgggtgtcctcccgttccagctggccgcgctgccagcaggacggaacaggtcgatctcctttcggccaagaggacgttcgtggccggaggcattcggcctgtcgtgattctcgcagggactggccgtggcatccngatcggagcagggtcaatgctgcgtgctgcacggtctcgatgcaactg

SEQ ID NO: 601202 - DNA, 544 bp, Homo sapiens
  misc_feature (229)..(229): n is a, c, g, or t
ccatgatcctctttgtagcactctcttcaacattagttattctcatattaaaacgggccatttacattggtaaacattttaaaaactgtgatgtatccatgctttggaatgcaacactggcacagtgattcatgcctgtaattccagaactttggaggactgaggtgggaggattgcttgaagccgggagttcgagactagcctgagcaacactgcgagaatctgtctntacaaaaaatacaaaaaaatttaggtgagcatggagaccagtaaaaggcaaaacagtagggacagaaaccaggccagtggctgccaggactgtgctgacgggagggctgagcatggtggcacatgcctgtaaccccagctacttgggaggccgaagcaggagaatcacctgagaccaggagttccagaccagcctgggcgacatggcaaaatcccgtctctactaaaaaatacaaaaattggccaggcatgcaccacagggcttttaggctcagccaggctcaggcggctccatggtgcttccaacaaaaattga

SEQ ID NO: 601203 - DNA, 202 bp, Homo sapiens
caggttgttatagactcagaagatgtaatctagaaaaaagtctatagaaaaaaaaaaagtttccctaccctcatcaacaaaaagcccaccctctaagagacattcaaagctagaacttatcacaattctttaatcagtttacaatttacaaacagataagtttaaaataaacaatttacaaaatttttggaaggcatacctt

SEQ ID NO: 601204 - DNA, 166 bp, Homo sapiens
cttgccccattattcctagaaccatggcgacctgcgactccttgacgttgacaatcgagtagtactcttgattgaggcccttattcgtataataattacatcacaagacgtcttgtgatgtaattattatacgaatgggggcttcaatcgggagtactactcgatt

SEQ ID NO: 601205 - DNA, 332 bp, Homo sapiens
  misc_feature (72)..(72): n is a, c, g, or t
  misc_feature (280)..(280): n is a, c, g, or t
gcacagcacgtgctgactactgtacttccagaccccctgccctcaagggactgcccagtccttgcacctcanagttcgccttttcatttcaagcataaggcaataaatacctgcagcaacatgggagaaagaagttgctggaccaacagaaatggcacttatgaagccaattcattttgaaggaagcacaatttccaccttatttttcaaactttggcagtctcaatgtctgtctccgttgcttcaggaaataagctgatcaccatctagtcaggaaagnaaccctacagggtttgtggagacatgatatatatgccaatttgaaccctgaa

SEQ ID NO: 601206 - DNA, 224 bp, Homo sapiens
ttagaggactccccaagcagttaatacagactcaggttgtgattgatgcaggagagattcgcgtcttatcccagcctgctcaccaaccccaaaactaacagtcaggaaggaagctacgtggagcaactgtcaaacatcacaggcggccgtcaggtaccagatacagcaagttgtgaatcatggattagtcccattccttgtcagtgtactctcgtaaaggcaga

SEQ ID NO: 601207 - DNA, 392 bp, Homo sapiens
cacgagggctgcagtgaactataactgtgctagtggccgggcgcagtggctcacgcctataatcccagcactttgggaggccaaagcaggtggatcacttgaggtcaggagttcgagaccagcctggccaacatggtgaaactctgtgtctactaaaaatacaaaaaattagctgggtgtggtggcgctcgcctgtagtcccagctacttgggaggctgaggcaggagaatcacttgaacccagaaggcagaggtagcagtgagccaagatggtgccactgcactccagcctgggcgacagagggtgactcctcaaaaaaaaagaaaaatagctaaaatatgattgtaccactgcactccagcctgggtgacagagtgagacccctgtctct

SEQ ID NO: 601208 - DNA, 211 bp, Homo sapiens
atgctcccggtggaaacaagggagcccaaacggagccatggccagtacagtgttagcagtaggactgaccattgctgctgcaggatttgcagtgccgttacgttttgcaaagccatgacgcatatggagcctcaagtaaacacaagtttttcaaagactcacaaaatctagcttcagtggtggctattctagagccctactgccaataaag

SEQ ID NO: 601209 - DNA, 375 bp, Homo sapiens
  misc_feature (76)..(76): n is a, c, g, or t
ttattccagttccacctccaaaaatccaggtttaaattaaaaaattaccacttattattaaaaattaattccaggncatgtgcattaccaaagtaaaggaatcaggaaaccgtttagggcttagttcttaaagagttcctagacccacatcttattgccattgggaaggttggaaagttgatttctggctaatgatcatcacaggttctatgacacagaacagcaaggagttttctaaccatcatcaccatatgctagccatcagcgctcagtaatagtgtaatatcctttgaaaagcacaaaaagattccttgaatgtagtcactttgggaagaggaataaacaggtctctggattcccacccctcccccacca

SEQ ID NO: 601210 - DNA, 778 bp, Homo sapiens
gagaagtacaaagaactgatatttaatttgacagtcttcagactggtcagcattagaaaattcttgcgcttgtatggtactgggtattaagcaccttgctttttcctagttccttcttaattgctgtgtgttctgtgaaccttcttccccatttgctttgtaaattttgtttttcaagcaaattcgtatggtcttgctaggtgttcatcctatacagaacgcgagggcattgatatagtgcagaatcaatgattgtacggaaagttgctgagattagcggaatgtatggttcaaccttaattatagcttcattgcaggactttactgtttctccattttctggaacgctgctgttgctgctttgtgatgacgtgagatcgataagaagaacctagtctagagacaaggatgctagttctgcatatgtctttcccatgcccactagttgttttcccagttacttcaaaacgcagctgtctatatgtagagatgcaaattattaagtgtctccaactagcaataaataaaagcatctgtgttcgaactcatgaatactcttcaatcagccacatagccttgtagcagcagcccatcctcaagcaatctcccggaagcttcggcggggcgggcccctcatagatcgcccacgggctgtcatcctcggttccagggagcctgggagtcaaatggggggccttacgagaaaaaacccgggggaaggagttctttcaacacccgagggttggggcctcaggggcccaaaggcgcgcccaattag

SEQ ID NO: 601211 - DNA, 217 bp, Homo sapiens
ggagtttgagacacagccttggcaatgtagtgagactctacctgtcccagaatatacatataggagaaattagccaggtgtggtggcatgcacctgtagtctcagctgcttgagaggctgaggcgggaggattgcttgagcccaggaggttgagactgcagtgagtttgtgtgtaccactgcactctagcctgggcgacagagcaagactccgtctc

SEQ ID NO: 601212 - DNA, 126 bp, Homo sapiens
tatacatatacgactcgagctcagtacccaggcatgcagcttgtcagattaaaacactgaactgacgattaacagcccaagtatctacaagtcaaccaacaagtcattattaccctcactgtctac

SEQ ID NO: 601213 - DNA, 944 bp, Homo sapiens
  misc_feature (148)..(148): n is a, c, g, or t
ggtggctgtctcctctctccgccatggcgtgtgctcgacccactagatatcggtgtactccgaaaagggggcagtccatctaggccaacacacagtgtccgacgtatatgccgtgactggtcatatccacacggcatccgtcaattcngcacaccagcaatcagttgtagcaagctattgttccacaccaacacttgcagcccaaaccgacaccagcaccagccctatgctgtcagtgcacattagcaggtcatcagactcagtgctagagtctatggggtactggacagagctagtggatcgaataacccagagttcgaggtggtgggactacaccgctactaggaccagggtgctatatggaaacatgtgtcgtaggaggccgaatgttaagcaccaaccaaaacctggcgccgatggcatacgtagagtgaacacaaaccagaaacgatacgccatctgttctgccctggctgcctcagacctaccagcactggtcatgtctaacaggtcatcgtattgaggaagtacctgaacttcctattggtagttgacggataacaggttgaaggctacacagcaagaccacaggaagctgtataggctccgataagacacttaaagcctggaaatgatatcacgaaaggtcatatgcctctcagcgacatgaagacgcaggaaaacaggcaacatgacaaaaacggacgccgaaatccaggagacaggaagcccgggaaagtacatcgaatcaaagagggataaatggggtacttcatcaatggcccatgcaggaagagcgtcaccatggcaactaactactagatatcactgatacagccaaacctgaaaccgtgtatgcaacactatggcgtcccagaaggagcacactggacagtaagccagacatgggaactgaacagagataacggaaactgtgaataaat

SEQ ID NO: 601214 - DNA, 588 bp, Homo sapiens
  misc_feature (205)..(205): n is a, c, g, or t
taataactaaataaccacagacagtgataccggatggtggcaaaaattccgtagaaaaataaaggggattgtgcacatatgggaggtcaggacagtttgttctgatgagtggggtttgagctgagatccagtggaagcaagagagcaagacatgctggtcagcttcttggtgacgggcactccaggcagtgccaatggcaacggnaaagtctatgtgtgcgtcccacgtgggcagaggctggggtggaatagcaaagtgggctgaggatgagggctaagaatggagctcagagaggccacaggagccaggcctggtgagcatcctgtatcagggaaggatttctacttttgccgctgaggatgtggggtgtgactcgggagctttacacagacttgggtctgaaagaatcactggagatgtagtgtggaaaacacttagaaaatgattttcatctgttagagctgctggacatgacaaggtgggatctttggggaatcttggtagaattctgggtatatcttgaaggcagagtttggaggatttgctggtgagtgtgagaaggagaggagccaagttggaatccaagg

SEQ ID NO: 601215 - DNA, 113 bp, Homo sapiens
ttacctattgatttaaaaaccaaaaacccccaaaaaaaagttaaatattaaacccaattaatgttttaaaacccctgggaaaaagaatttcccccaaagtcccaaaatttaaa

SEQ ID NO: 601216 - DNA, 496 bp, Homo sapiens
  misc_feature (84)..(84): n is a, c, g, or t
  misc_feature (94)..(94): n is a, c, g, or t
  misc_feature (123)..(123): n is a, c, g, or t
  misc_feature (132)..(132): n is a, c, g, or t
  misc_feature (134)..(134): n is a, c, g, or t
  misc_feature (204)..(204): n is a, c, g, or t
  misc_feature (211)..(211): n is a, c, g, or t
  misc_feature (237)..(237): n is a, c, g, or t
  misc_feature (242)..(242): n is a, c, g, or t
  misc_feature (332)..(332): n is a, c, g, or t
  misc_feature (376)..(376): n is a, c, g, or t
  misc_feature (388)..(388): n is a, c, g, or t
  misc_feature (399)..(399): n is a, c, g, or t
ctcgtccatccaccaaacttcacagcatgctccgtgcagtgcaaggaaagctccaacccggaaatgtgaacacacatggaccanggcctagatnggtgacccagagaaggagcagtgccattngggtcaggncngaagaatgcccaagaattaatcagaaaaggagaggggtagggaaaggaattcctgacacttcactttttngtgcctnggtgtcttcagaaaaataaagggttnggagnccgggcgtggtggctcatgcctgtaatcccagcacttcgggaggccgaggcgggtggatcacgacgatgtcaggagatcgaggccatccnggctaacacggtgaaccccgtctccactaaaaatacaaaaaatngccaggcacagnggcacgcgccngtagtcccagctactcgggagtctgaggcagaagaatcacttgaaccaggtaagctggagattgcgtgagctgagtgtgtccgcacacgtcttctct

SEQ ID NO: 601217 - DNA, 369 bp, Homo sapiens
accatggtcaacatcagccgtcactccaggcacaggcgactggagcagccaccatctggagcactgctggttgccatggcacagggaaagagaactctggatgctcatgcatcagcaattaaatgctccagcccagaggtggcacatgacacttctggttagagctcattggctggaactagccatatgacttcatccaactaatgtgtcagagaaagtgcaatcctatgtgtcatgttagtgaaaagctgaaatattgtgaacagcctcagttgctgtctctagtcactttcccagtggcggaataaggttggggctccacttggctatttcagtcactgggttcccttctttaggggtccaaatatc

SEQ ID NO: 601218 - DNA, 312 bp, Homo sapiens
gatctagaggattccgacctctagaggatcagacgaacaggggtttggtattgggttatggcaaggggcttttataattagataagttgttgtgatgaaattgctggcccctaagatagaggagacacctgctaggtgtaacggagaagatggttaggtctacggaggctccaggttgggagtagttccctgctaaggcagggtagactgttcaacctgttcctgctccgtgcctccactataggcagatgcgagcaggagtaggagagagggagagtaagagtcagaagcttactgttgtcaatgcgggga

SEQ ID NO: 601219 - DNA, 328 bp, Homo sapiens
gaaccaggaggctgtgtgaatggatgtggaggtctacccacccccagagtatccaaggactgcatgtggcatcctaccaggaatgccattactacctggattccttgatagcccatgtgggtccctgatgtcccagctgagacacttgttctctagaatattcccccagaacccatcccttcggtgctcctctagtagtacaatcgcacccccagctatctgacttcctggcgcacattcttccaaaacagacagaggtaggccctgaccttgtgcagctccgacgatccactgggcgactgacacctggcaagggacgaaatgtgac

SEQ ID NO: 601220 - DNA, 804 bp, Homo sapiens
gcccgttcagtatcgcgcacggaagatggcgtccgccacccgtctcatccagcggatggagtaactgggcgtccgttataacctgagggagctgacaccaccaggagatctcaaggaactcatgccatcctcgccaagtctccctgtgtgaggtccatagccacaagctctcccaacaatttactatgtgcactcgcgattggccgccgggaatctgtgcccccttccatcatcatgtcgtcgcagaaggcgctggtgtcaggcaagccagcagagagctctgcgtgtagctgccacttgagaaagaagggggtgactccagctcctcccataaagaggtggcagctgtcctcggaccagcctttacctgtgacactgcaccctcacggccacccgataactttgcctcctgtggattcctccagggagactgtgaccctactttatgacaaatacgtagagcctcaggtatcaacttctagtttacttttacaaacaactacagacactacgagacaggagttctcacccatggtccaaacacaacaacaacagaaccgcacacaacaaacaacagtgtctgggcccacctcggcgccataaagaaacggggcgcccaagaaaacttcttccaaccaccacctgccgttggcgccggccgccccaagacggacgacgcgcgaccccggccaacacgccgtgcccctgagagaaccccgggccacacgacggcgcctgggctccccccaaataaaagccgccggcggcacccaggcgctctcgaccaccccagggggccgggcc

SEQ ID NO: 601221 - DNA, 206 bp, Homo sapiens
tccccccgggccccccccgggggggttagggttttttttcccccccccccccttggtttaagggggaaaaaaaagggggggaaacccccctcccccttttttttttccccccggggtgggggttgggggttggggggtttttttttttttccccttttttttgaaaaaaaaggagggcaaaaaaaaaaaattccgttttttttcca

SEQ ID NO: 601222 - DNA, 128 bp, Homo sapiens
ctctagaggatcctcctgggtgcatgcatgtgccctggtatcacgcctgtgctggcagctatttcttgttgctcacatctcctgaggcccaggaccctggaggggacggaagaagcagagagcgcagc

SEQ ID NO: 601223 - DNA, 245 bp, Homo sapiens
gagatggaggggcctttgtccgtgttccggtgaccccagcacttgggaacgattcgcttcaaaacggtattgcttcaacttcggttggccaatatttgttaaaaaggtctctttgggccccaagttggctttggataaaaatatttggtggatgatatttggttatgttaaacccattacttacgcgttgggccaaacccatccctaagggtactcggggggagaacacaccctcagatataaga

SEQ ID NO: 601224 - DNA, 200 bp, Homo sapiens
gtgtcacagcaggccccgtgtagatggtatctttctcctttttttcataaaggtgagatgctagacatatgtgacaatgaaaataagggaagagaaacacctatcacattgcatttctattgcaagcaagaaaagaaaactaattcttctacatagaacaaaacaaaaaactctgtgtatttacatacctgaatgttact

SEQ ID NO: 601225 - DNA, 335 bp, Homo sapiens
gaactagtctcgagtgttttgtttatgtttttctgcttagatttaacacattctatcagagagtgcacgatatcaccatgccttatcattggtgaagataaccttgaacttggataaggtgctgactgccaagcctcttcactgtaaagttactggttttccctcttcatactctgttcttttgaaagtgcgttctacatatatatatttggaatttttctgtaaggaagattagcttcttttctgccaagtatttatttaggcaatcatttattttcaacatggatttatagatattgactttattttttagggtatagacctcctctcatttt

SEQ ID NO: 601226 - DNA, 313 bp, Homo sapiens
atggaaggagtgttgtatggcattgatactcggctgaaggtttgttaacacagtgtccaaagaagggacagaggtatacagaatggtctcgtctgcgtagaggtggatcagagaatcacaaacagcaagagcgacatcattgatatatataaaagattcggcccgagaattgaaccctgtggcacccccatagagactgctagaggtttggacaacaggccctccgatttgacacactgaaccctgtctgagaagtagttggcgaaccaggcgaggcagtcgtctgagaaaccaaagctgctgagtctgccaa

SEQ ID NO: 601227 - DNA, 437 bp, Homo sapiens
gttttaaaaaaaaaaaaaaaaaaaaaaaaaaaaaaaaaaaaaaaaaaaaaaaaaaaaaaaaaaaaaaaaaaaaaaaaaaaaaaaaaaaaaaaaaaaaaaaaaaaaaaaaaaaaaaaaaaaaaaagggggggccctttttttttttccccgggggggcccccctttccccccccccctttttttttgccaagggggccccttttggggggtttttttttacccgggcccgggcccggtttttcccccccggggggggggaaaccctttttttggggtttttttggggggccccctttttttgggggggggccttttgggccccccccccccccgggttttaaccctttggggggaatttaaaatttttaggggttttggggggaaaccccccccctttttcccggggggggggggtttctcttcccgggttttttttt

SEQ ID NO: 601228 - DNA, 230 bp, Homo sapiens
ggggggcccgcagcttcccaaggagaaccctgcatgaacagtatccgttgtttgggctcatgctgggatgtcccagtgctcctgttgccactcctcccagccagcccggtttgctgggggcccggctgggtgtcctccccggagtgagggcttccccccattcccaaagccttagaaaagagaagtggaggggggggcgagtgtgtgaattaaggctcccctccggtcca

SEQ ID NO: 601229 - DNA, 851 bp, Homo sapiens
cctcggtaggtcggcctttttgttccgctatactttagcaaatcttttccaagcgatgatggtatgaactttcacgccgcaaccgtatagtgacatccacaatggccataagctcctataactattcactgggaagacctactactagaatccttcgttcgacagtagcgtgcgttatattcacctgacgattgagcatcgtcagatctgatgcgccggagcgcttagaaactgcctatgtctaatagtcttgacgtggaacgattgtgattccacttttcttgaccttcatcacttcggcgtaataccctagtggcaacccgggcgctatgaacaatcacgcttcgttactcctatgctactcgaatgttaatccctgtactggaacctgccgataagacaacatgcctcctcggaaagggtttactactttaccgcgcttaacagatagtcccggcaccaatcgcacgcgttccatgctagtgtacatgctgagatgctctctgcatcacggtatttccggccactaccatcaagaacgattatcctcggtcctctacaagactctcaagatggcgcaagtagtatcctgtaatttcactaacctctctaccggcgacttccgtctgctcatccccctgccacctctgtttacatctttggtcgatctagaacgaagtagtgcattgagacgagctcctcgcgccgttcctccactttagcacctctcccacatcgcccaattaccggtcgctcatatctatatctcggcttcatgaccctatcgcctcatctcatactagataaccccttatcattcaactgtgccttacgttagtttcgctcccccg

SEQ ID NO: 601230 - DNA, 102 bp, Homo sapiens
aggcatatttaatcttagagcgaaagctataatcactgcgccgtcataaggggatggcatggctaggttatagatagttgggtggttggtgtaaatgggtga

SEQ ID NO: 601231 - DNA, 1018 bp, Homo sapiens
gcacgtctagggcagagtgccctgccgagagccctgtgctgcctgctggagcctgcctgcagacgcggtcctcgtgccccacgtgaaccagtgctcggctgtgcgaatgcccagccttgtgagacacccatgtgatggaatgtgcctgtgctcctgtgctccctcctctgtgccctgtccccacttccctgtgtggcctcggtggcacacatgctgggtgctgcccccaccctgaaatgaccctccactgctctgtcctctacatgatgtcctggcttctggtgaatgtgcctgggtgctcctgtggccctgccttggctccctacgacctttgggctcgatggccatgctcctccccatgccctgctgtcccagctccttgagacttggagatgcatgccaggcaggtgccctggcagctcggctgccacggcttgctgacagctgggagggtttctacggtcttggaggcgtacgttttgaaatctcacatcacccagctgtgcacgcgttgagtgacgtggactctggtctgctgtggggggcatgcaggactggcgccactctctgccctgccatgcggctggtggtgccacaggagcctcaccgtgcctgagtggcgtgcccaggaggccgctctccttcagtaaatgtaacacagtcgaggcactgtcatcgggcagccttccctgtgtgccaacgccagcctttcgcttcttgaaaaccaaattccagccgctgccagtctggggacttggtccgccctggctgctgcagaatgtccactgccagccggaccccctgctcggtttccttctgtaagtggcacacaggcacccagctttggggtggtgctgacgctcccaggggtgcatggagccattgtacagggtgaggttccagaagctctcgaggtgccagtctccagtgagcttcttgccaatggcgtttacggattgtcataaccgccgtcccttgacaggcagttctagcccgactctgcctatgacctcggcaa

SEQ ID NO: 601232 - DNA, 164 bp, Homo sapiens
tatggctcatctttcctcacgtatctgttatcatccgccaactaatatttcactgaacatccaaacttcacgtgtggcttcagaagccggcgtcatgatacatggcatagtggtagactatggtctgacttatttctgtattgtctccgcgtattgagtgagca

SEQ ID NO: 601233 - DNA, 183 bp, Homo sapiens
tgttctatccagccgtgccagggcgaacagcccaccccctagtaccaactgatgctcccctgagacaacctgggagacaccctggagtcagccacatcaaatcagttgtcccccacacaggggagattttgaaagttttttgtttttgttttgttttgaaaaataataaacaggccactgtta

SEQ ID NO: 601234 - DNA, 494 bp, Homo sapiens
gactctagcaggatctccgtgcagataacaacagtgtttataaagtctacagtaatgtccagtaatgtcacaggccttcacattcacttaccactcacttaatgactcacccagagcagcttccagtcctgcaagctttatgcatggtaagtgccttgtacaggtatatcattttctatctttttcttttcttttcttttcttttttgagacagagccttgctctgtcatccaggctggagtgcagtggtgtgatctcggcttactgcaacctctgcctcctgggttcaagcaattctggtacctcagcctcccgagtagctgggactacaggcatgtgccaccatgcccagctaacttttgtatttttagtagagacagggttttgccaagttgatcaggctggtctcgaactcctagcctcaagtgttcctcctgcctcggtcacccaaagtgctgggattacactgcctccagcctttttctatcttttat

SEQ ID NO: 601235 - DNA, 571 bp, Homo sapiens
ccgtgatctcagaagagtgatgctagtccgaagaaatacaatgggacagaagtggcctctccagagcctccccctaggagtcacagctctctacacttctgctaagacagcattatcataagtgctgcaaatgtgccacaagagaattgttttacataaacagggtttttatgctcttaaaaaacttgaagacaagcacttgattctattagctaaagtacactgcagctagcaaaggattcacggtggaatggagccacatactgctgtctccaaactgacatcaccggcacttaaaagattgaattcttaaacacattcggctccagggaagcgctcccagactaattagagttatccatgcaaagttctagaactataagtgtgctttacatattttttactgcatggtatgattgtgtttctcaactgggggaggccactcaactaaaccataattactattgcagattacctgggaagaaaaacagtatgcattaaaggcttcagtaacagccagctttaaagcacagacagtgaccaggactgtcagatgacttccctaggggac

SEQ ID NO: 601236 - DNA, 3805 bp, Homo sapiens
ggatcctctcggggaaactgagttccagtgtcatgggtgaacaacagaagagactagctaattcttgtatatcccagaccaagctgaaagctcctcccacttcacccctcatcgtgattgttatctataaatttgattgcacaatgttgcagacccctgggactccagattggctgggagagccttcctgtgttatggtcaagatcagcctgactttctggaaggaagctggccgatgtcctgttttcagaccattccctggcttggtaaagctgagaagtgcccagatagggagctgtgatacttcgattccatccccacagccaaatctgaatctctaaacttgtttcctgatcatttggaacaggagttgttttcctaatgaggaatgctttcctctattctttgggcttgcctggactgagtgattcaacctaacaccttcccaggtctcaagtgagtcaccccagggctgcactccagcctaggctcacaaaggggaaaaagagggaactatttaagagcaccccctgctccccccttttgctaatcctttgaactactcaaagtatttcaaactactactggggtttgtgttttcttttgaatgtaggatagagggtgtaacagtttgaagctgagggtgagtctaaaagagccaaaaataagatcaaaaactaaatgttaaacgcttcaatagatcatggggggggggtgtcaaagatagtaattacttattggtttatgaatgatggtgaattaaagtcccaaagacactccaggatgctagagaccttctcagagcaaatggggtcatttaggacatttagggtacctttctccctggactttacctacatgtttcagtttctggtttggattgtggcttttcagaggcttataattaataagatacctgttccaaaaggctttctcatgggccattgatgagcgtgtgtcatgagtgtgagaaagtgcttgggaggaaggcgagcttgcaatttctaaaataatgactcatgtaaaacaaggttttattttatgatctgaccagtagcacttctaaactggcttcttcccaggagcaagcagggatctgattttaaaaactaagtgggtaaggtaggagtgagctatgtgcctctgagtacacacaacaccctccaccccaaccccccaatccacaaacaaggaggggaactgaagtctaccagttcttgagtagtgaagcttacagtcccaaagccccagccaaggttgtgaggttaggctttgagcatgcattttaattccagcgcatcagttctgtcagaaggaaccgttctccttactctcacgagagattccagctcctcctcgagttaggtcagtttatgcaccagagtttcgaagctgttcgagtttgtgtttcaactgttctcgtcgtttcctcaataagtccttttcagaggtgagcttgtgctcgtctgcttgaatggacaggatgtaggcggtggcttttttgaggatcactaccttgggggccttttcgttgttttccaattcagggatctggtcacgcagggcaaaaaagctgcgcttcagctcgttcctcctctgacgttccaagacgttgtgtgtccgcctcttgtcgtttcctccgtgtctgaggacctggggctggagcacttgcggttgttgctgatctgcttcaggaccctgccactgtccaacttggccctcttggcagctggatagtccttccttgtggaggggggtgcggcgtagttgtgctggtgagtggagacgtggcacctcttgaggaccagtgggctgtgcggaggtttgctgtggcctcgggatggagatgagcccgactccgacctcttggcaggggtttgcctcttctccacagacaccacatcaatttcttcctcatcttcttgctcttcttctgtaagggaggaagtggaagatcacacttagccacgcctcctgaatcccggacgctatacataggatttgaccgatgctatccaaataccaagttggaaagggaagaaagtaagaatcagatccagacaccatcttcccttctcccagaaaggcagacagggttagggcacaggtgagaaattaccatgtaccaggatatggtatccttgccaattcttacctaagatttaatgaggcttcagacacacccaaagcaaagcacatttcccaagcacctcctatttttaagggactttaccgagaacctttcaggtcccgtgagggatagctgcaaatctcttgctatgactttagcaactccctattttactggaagcacaattaaaaaaaaaaaaaaaaaaaaaagtcttgcagctttgccaaacgtcctggtgttgggggagtgttgggacggggggagaagtccaaattgaacagaatttgctttgaagtgttcaaaagaggacgaaaaaacaaagcaaaacaaaacacccaaaagagcccagctcttcaattctttaggaactttcactagtgcctggctctaaggctataaaggctatcccagcttctgtcattgcttctcttgggtcttagacaaacgtatccattaaattcaaatattcttctggcagtcaagaaaagaagcaggtaattcacccccctccagatcagttcctttatcctcattcacacccttcccagggtaattaaaatgcttaggaggggtaaagggagtggatggagctgaaagataagccagaagatttaaaaacccaaatgaaattcctgaggggtgggaagggtggggggtgggggtgacaaccagggcggtctgggggggggggggaggggagggagggatagctgaagcacgggaatccagggatgaagagctcttagacagaagggaaagaaagggggagccccggaggccaattgaattaatgccaatgagtggtggagaaggaggtccatccaacctctcgcttcctaccctgctgtgaatggggtagcttaccagagtcgctgctggtggtgggcggtgtctcctcatgcagcactaggggctcagggctggcccgtggggaggactcggaggacagcagcgagtccgaggaaggagagaaggccgtggaatcggacgaggtacaggatttgggcgagctgctgtcgttgagcgggtagggaaagaccactgaggggtcaatgcactcggacgcggcggcggtgaggtcctgcaggtacaggctggaggtggagcagacgctgtgcccgcgggcggggctcaggctggtgctgtctttgcgcgcagcctggtaggaggccagcttctccgagaccagcttggcagcggctgagaaaccgctccacatacagtcctggatgatgatgttcttgatgaaggtctcgtcgtcaggatcgcagatgaagctcttgttcaccatgtctcctccaagtaactcggtcatcatctccagctgatgatcggcggtggagaagttgccaccgccgccgtcatcgtcttcccttggggagaaggacgtagcgaccgcaacataggatggagagcagagcccggagcggcggctcggggacaggggcggggtgggaagcagctcgaatttcttccagatatcctcactgggcgcgggcggctgcagctcgctctgctgttgctggtgatagaaattctcttcctcgtcgcagatgaaatagggctgtacggagtcgtagtcgaggtcatagttcctgttggtgaagttcacgttgaggggcatcgtcgtggctgtctgctggagggggcacagcaagggaagcaagtctagag

SEQ ID NO: 601237 - DNA, 273 bp, Homo sapiens
gcggcgccgactactactactactcaccctcgcggccgtcgacgggtgtgtgtggagtatgcggtgtgtccggagtgtgtgatgtgtggtgtgtgtggagtgtgtgattggtgtgtgtggagttgtggactgtgtggagtctatggtgtgtggagtgtgtgtggtgtgtggagtgtgtggtgtgtgtggagtatgtggtgtgtgtgtggagtgtgtggtgtgtgtgtggagtgtgtggtgtgtggagtgtgtggagtgtgtggtgtggggtgt

SEQ ID NO: 601238 - DNA, 562 bp, Homo sapiens
ctgtttgagaggtggggcctatctctgggggcgacggtccgtcgtggtctggtggtggttggagtacctcagcggcctggggtgtcctgagtgcgtcgcgctggctgtggtggtgccgctttgtttggactttcttcttttctcagctcgtcttgtgttgtgcaagcactggtgctggggtcgagcggtgtcgcgaggttaggtgagagcgctctgcgtgttgttcccgcagggggagcgtgctggtgttcatcgtctggtgtctcgggttcttagctgctgcgctggtatgggcggcggtggaatcagccactaggtgttcggcgcatgtgcttgcgcgtgtcgtctgctagaattataagtcttacaggaaatgagggattcgcagatgagtttgttgactacgtgttttgcttgatttcagtgggcggagcacactccgccgccgccggggcgtgagatgacaggtcaatttttcgttagggtcgagtattgactcgttggtttttggacggcttccaaagaaaagaaacaggaaacaaattttcagcccaacaagaca

SEQ ID NO: 601239 - DNA, 1453 bp, Homo sapiens
ctgtgatctttgggtgcgtcatattgtgtgccgccccactgttttttgtgtatgcttggctcctttggtggcgcctcattggggccccccctgatgttgggatttgccacattgtgcccatctcggtcccttggtaggctccattggggcggccaccaacagatttctttgagtccgcgaatttggcccctcggagagcgcctcaattgtgggcgcgcacctaactctcgtccctttttgtggtggccgtcacacttggtggccccctgggtgggccgcactttgtggggttgccgcccaccatgtgccttttttagtggcggtcattgtgggggcccccccgcgccccacatgggggggccaccggggcccccctgtggggccggcttttgggcaacatgtgtgagggctgccacacatgtggggcaccttgggccaccacttggtgggttgtggccccgggttgtgggccgcggtggggcaccaccgctcctttttggatccccctgctgtgtccaccacatcccgaagggattttgggagagtccgtgtggccacaaactttctctgtggagagggaaatgagctttttcgcgcacagggtttcccccctttctctgggtgtgggagcgtctctgggaggagcgccccactactggtcttctcactctggggggggttggtgccaccgccagggagatagggccgcctctgccccacggagtatagtgttgtgtgtgagagaacattttttggccacacatgtctgaagatgtgtccacacacatggggagaagagattgtctattatataggacgcccaacaaatgtccacaacacggagagtttgccggggccccacacagttgggcttggtatacgccgctgagcacactctcacacagagatgtgagagaataattgcgtgagaaagtgccccacaagggggggtgttgtgtgtgtgtgtgtcggttataaaagtgtcgcgagtgtctcgcgctcaagagaggtgtggccccgagagagagagagccccttgctcccgggagtgtgagttgagatttggccacttgagacgctgtgagatgtgcggccgcacgaggagtttgacacgctttcgacaattgactatgagaaacgcgcttataagccacgcttgccctcttgtttataaacacttcgaatatacgaggacccttctgaaatttggtaatttttttcttgttaacccacatctttaatcttgttgggctggaatgtataaaagatcctttataaaaaattcacgttgctcttttggggtaaatttgaattacttttttaaatgagctcggggttccactcttgagctcgtttgcacttgagagttgcacaagtgcgccattttttttgtagttgtggcattttggttgacatcgaatatgactttgcctcactaaataccggttcctga

SEQ ID NO: 601240 - DNA, 89 bp, Homo sapiens
gcggccgcctactactactactgctcgaattcaagcttctaacgatgtacggggacatgccagcctgggttagggagcaagaccgtacc

SEQ ID NO: 601241 - DNA, 273 bp, Homo sapiens
gttgcactaggttcgcaatcacaactgattaatattgataaacaaagtagctctccaacacaaaatgatgagctagttaacttgaaatacactggtcaaacagttgttgaagtcaatcataaccaaccaacatttacacaagatgatttacaaattaaacagggtggctggcaaaactttcgtccttagattggttaggcagaccacacgttgctaatgcattgcttaaccagaaattgatgccgccttctcaaagtatagagcgcgtgagcg

SEQ ID NO: 601242 - DNA, 125 bp, Homo sapiens
ctgtgtgctgcagaagcactgtgtggcgtacaggtcttgcggattcacgtacacttatgatgagtagaggtagttcgtgatgcaagactcatgccaggagaagtgaagagtgctcaggcagcgga

SEQ ID NO: 601243 - DNA, 252 bp, Homo sapiens
caagacactgaagaccctgcccaagaagaagacctctggcggaggcgactcagcttgagcccctccacccccgaaggctgtagagcaaggatgaagcctcaggaggggcctcagacccaggccctggtccacactgtgccagtagcctaggtgtctcaggaccctgggccccgcagatggccagttccggtgactgcccagcggccactcttctggaaggggcttgtaagggacgaataagccccatcttgt

SEQ ID NO: 601244 - DNA, 413 bp, Homo sapiens
tgatccaccttcatatgatacccacagggtttttcacttgcagtatagtatccaataaattacatgagatatccaatacttaattataaaataggcttggggtgggatgatatggcccaacggtaggcaaaggtaagtgtccggagcacattgagacgtaggggtaagcaaaccaatgatggtggggaaaataagggtatataccaggggtattttgggaccttcggatatttcacaacctaaccgacgattttatggggaatggtacccccatcttaaggtcaggggagcatcggtaatcaaaacatccatcatcagtgggggagtgggttaaatatcccagggtggcatccgaaggggggatggggtccaaatggcaaccaggggaccctccaaaagtcgaccggcaggca

SEQ ID NO: 601245 - DNA, 347 bp, Homo sapiens
taaaagtctgtaatactagacagtaacttccaaataaataattacatatttgtacggaggatattcagatgtatgtgcccttcttcacacagacacataacgaaatatcaatgtcatgaaagacaggagacataagagcacgatggtatgaatagtagatgtggcctttgaattctgtttaattttcacttttggcaatgactcaaagtctgctctcatataagacaaatattcctttgcatattataaagggtaaagaaggatgatgtctttttattaaaatatttcaggttcttcagaagtcacacattacaaagttaaaattgttatcaaaatagtctaaggcc

SEQ ID NO: 601246 - DNA, 288 bp, Homo sapiens
atggcacatgcagcgcaggtaggtctacaagaggctattcccctatcatagaagagcttatcacctttcatgatcacgccctcataatcattttccttatctgcttcctagtcctatatggcccttttcctaacactcacgaaaaaattaaattaaatactaacatctcagaggctcaggaaatagaaaccgtctgaattatcctgccgcgcatcatctagaacttcatcggccctcgtgatcgccggatcacctctgagacccaccttggctcataaaaaaaatgcc

SEQ ID NO: 601247 - DNA, 996 bp, Homo sapiens
tgctcgacagttcgccgcacttttctggtgtgtcggcaggggatccacttcgctcatacgctcactcttatatggtgaagtgtcgcgcaatgctcacggtaggttgggccgtatccgtggcgcctgtggctcaccagaggctgctccctgaacactggttacagggcgtttcacttgttggcaacaactgagcctcattagagtagaccgtcatggtagactagctctctatactgtttcctaatgatgactaccatccagtgtgcgaagaataacaggaggaccggtcaatggcctcgagaatggccaaggcgtctgatacatcgaagggtagaaatcccaatcatgcagtgcttccaggagacttacgcacttccgtctccacacaaatcgaaggggggtggcgacgactgtagctggagattacggtgcggttcgagtgccatgtgtgagtctatcggcccaccgatgcgcaggaatgggctcggggcctccattacgatacgtggtgggcgcatggccaaatagggtcaatctggctctcctgtgcccgtctgtgctgcatggcacacgccatgtctctggtcagactggggatgtgaaccggatggagaagtattgcaccagaaaagcatcaagcatcgatccatcaatgcctgtccctgtgccatcaaagtggatctaggggacccccatgtggcaaaggtcatccgatgaactactatagaaaatccgcgagaatgtgacctcgggtgtgacccacttggccatgccatcaacttgccacccaggaagacttgtggattgggccctccggggaaacatgttgggcgtgaatgggcggggggggcttcttccaagaacatcatcccttgcctctactggggggctggcaagggttggtggggcaagtcatcccttgagcttgaacggggaaagtcactgggcatggccttgccggagtccccaactggcgaagttgttcaggtggtggac

SEQ ID NO: 601248 - DNA, 365 bp, Homo sapiens
  misc_feature (119)..(119): n is a, c, g, or t
  misc_feature (158)..(158): n is a, c, g, or t
  misc_feature (185)..(186): n is a, c, g, or t
  misc_feature (192)..(192): n is a, c, g, or t
  misc_feature (205)..(205): n is a, c, g, or t
  misc_feature (220)..(220): n is a, c, g, or t
  misc_feature (230)..(230): n is a, c, g, or t
  misc_feature (239)..(239): n is a, c, g, or t
  misc_feature (244)..(244): n is a, c, g, or t
  misc_feature (260)..(260): n is a, c, g, or t
  misc_feature (263)..(263): n is a, c, g, or t
  misc_feature (271)..(271): n is a, c, g, or t
  misc_feature (275)..(275): n is a, c, g, or t
  misc_feature (278)..(278): n is a, c, g, or t
  misc_feature (284)..(284): n is a, c, g, or t
  misc_feature (286)..(286): n is a, c, g, or t
  misc_feature (294)..(294): n is a, c, g, or t
  misc_feature (314)..(314): n is a, c, g, or t
gtgggtttgcttgtcaaggccagttttccagtgacaggcccaggggctgccccccaggtgtgctgggcagacttcagctgggacagaagtccgatctccctagggccccccctgggccnttttccccccgttttattttgttaattaaattctttccnaattgggtcgctctgggatttcttccnngggggncttttgtttctgntcttgttttccccgnggatattggngggcagcgnggttntttttgatactaaaanccnttctttcnggcngcnaatgancntgaaaggntgcctgggcccgctggagcnaaggaaagcgattttgtttggataattaaatggtctgtttttttccttcca

SEQ ID NO: 601249 - DNA, 349 bp, Homo sapiens
acattcttcatcactcgtgggaaagacacccaacagcatcatcttcgtttacgaatgtgtgtcatcactgctgtggtcctggacgaggtaacatgcttctatattttctgggggaaatacattactgtgatcctggaaactttaaaatctcatcttaaatgtatgatatatataaatatatatatatattatttataaagttgtgagttttgcatttaatctgttaatcttccgaaatagtaaaaacttctttaaaactacaacttagaaagctcatctgattcttgtcaaacatagggaacttgtaagatcatttccagctaaattattaaatatgaaactgaataaa

SEQ ID NO: 601250 - DNA, 123 bp, Homo sapiens
gcgatatactccggcctgagtgacaaatgacgtacgacaggaatcgttgaacaaacgaacctttaatagcggctgccaccaatcgcgagggactgaaccaagatcgagttcgtaatttacgat

SEQ ID NO: 601251 - DNA, 453 bp, Homo sapiens
tctcagcaggagcaatttgcgggagggtcagaatcttgtagcctccagcttcatgactcctaaaccacaacaatttccaactcttgtggccaaaatgttagtcctataaaggcagtctagatccccaggcaaggaggtttgtttccagaaaagggtatcatcttcgctttaaactataaactaagttcctcccaaaattagtttagcctatgcccaggagtaaacaaggacagcatggaggttagaagctagatagagtcagttaggtcagatctctttcactgtctcagttatagttttgcaatggtagtttcaatccctccctttcttttttttttttgtggagacggagctctgtcctgtcgcccgaactgaattgcattgccttgatctcagctcactgcaatctctaacccccgggtccaagcaatactctggcctcaggatccccat

SEQ ID NO: 601252 - DNA, 424 bp, Homo sapiens
ctgtgtactgttagtcaggggaggtatgagtgaataagggtctggtctgtactcaaagctcagtataaaaggacattgatcctggctctttatctactggttatctcgacacaccacctgccagtgcttggtttgggaagtaaaacttcctgcgtggtcacgttgttcattttggttttggatgcctttactaatggaattacggggtgggagacctaaccataggtaatttatctctgagggttgctggttggaaaaattactctggactgggtgtatgtttaaggtccagaccattaacacttttatctctagggcattcgattcagatatttctctgcacacagaagagtcatacaagacagccccctagtaccgtacccgacaactggaagacccggtccgcaggaacaccgtttctttc

SEQ ID NO: 601253 - DNA, 144 bp, Homo sapiens
ttcttagtctcattttgctacgctaggtcgggctggtttattcggcgagggacgacctgtaggcgggccgggctcgggggcacccggggtcccgggccatgtgatgtgcgcctgtctgaaggtgaacgaacttcgcgaggagct

SEQ ID NO: 601254 - DNA, 195 bp, Homo sapiens
ctcagcaccttttggactgaatcgatagtctagactacatgtatttcaaagtctctttggcaagattgcagcaagatcatgtgcatatcatcccattgtaaagcgacttcccccatatgggaacacagatagttgattttacacatatatttttgtttatgtgtgtgcgtgctgtaactatgtaacaacagctat

SEQ ID NO: 601255 - DNA, 100 bp, Homo sapiens
aggattactaatagtctatgcacctcttattctatttatcaaaacacattgtgtgagaggcgaggtacacttttaagcactccaattgcagcaggatgat

SEQ ID NO: 601256 - DNA, 435 bp, Homo sapiens
ggtgaagagaaattacaagaaataatactttttgtgtggagatggagtctcgctctgtcaccaggctggagtgcagtggcgtgatctgggctcaatgaaccctccgcctcccaggttcaagcgattctcctgcctcagcctcctgagtagcggggactacaggcatgtgccaccacacccatctaattatggtatttttagtagagacggggtttggccatgtgggtcaggctggtctcaaactcctgaactaaagcgatccgctggccttggcctcccaaagtgcggggattataggcatgagccaccacgtacggccctgagtcctctagctttaaaacaggaggaaataccttctactcttgaagaaatctctagcaattattgggtcacacatcttgcagtgttaaaaaaatctggggatggggatcatta

SEQ ID NO: 601257 - DNA, 285 bp, Homo sapiens
caacttggacaacttcactgactgctatcaactgcctgcccatcgcggcatagtggacgaaaagatcttctgctgccacggaggcctgtccccggaacgtgcagtctatgagagcagattcggcggatcatgcggaccacagatgtgactgaccagggcctgctgtgtgacactgctgtggtactgaccctgacaacggacgtagcagggctggggcgagacagcccgtggagtctcttaatacctattggagccgaggtggtggacaagttcctccacaagcac

SEQ ID NO: 601258 - DNA, 1792 bp, Homo sapiens
cacgcgtcgatcggagatgactcccacgggggcaggcctgaaggccaccatcttctgcatcttgacctgggtcagcctgacggctggggaccgcgtatacatccaccccttccatctcctttaccacaacaagagcacctgcgcccagctggagaaccccagtgtggagacactcccagagtcaacgttcgagcctgtgcccattcaggccaagacctcccctgtgaatgagaagaccctgcatgatcagctcgtgctggccgccgagaagctagaggatgaggaccggaagcgggctgcccaggtcgcaatgatcaccaacttcgtgggcttccgcatgtacaagatgctgaatgaggcaggaagtggggccagtggggccatcctctcaccaccagctctctttggcaccctggtctctttctaccttggatccttagatcccacggccagccagctgcagacgctgctggatgtccctgtgaaggagggagactgcacctcccgactagatggacacaaggtcctcgctgccctgcgggccgttcagggcttgctggtcacccagggtgggagcagcagccagacacccctgctacagtccattgtggtggggctcttcactgccccaggctttcgtctaaagcactcatttgttcagagcctggctctctttacccctgccctcttcccacgctctctggatttatccactgacccagttcttgccactgagaaaatcaacaggttcataaaggctgtgacagggtggaagatgaacttgccactggagggggtcagtacagacagcaccctacttttcaacacctacgttcacttccaaggaacgatgagaggtttctctcagctgcctggagtccatgaattctgggtggacaacagcatctcggtgtctgtgcccatgatctccggcactggcaacttccagcactggagtgacgcccagaacaacttctccgtgacgtgcgtgcccctaggtgagagagccaccctgctgctcatccagccccactgcatctcagatctcgacagggtggaggccctcgtgttccagaacgacctcctgacttggatagagaacccgcctcctcgggccatccgcctgactctgccccagctggaaatccgaggatcctacaatctgcaggacctgctggctgaggacaagctgcccacccttttgggtgcggaggcaaatctgaacaacattggtgacaccaacccccgagtgggagaggttctcaatagcatcctcctcgaactcaaagcaggagaggaggaacagccgaccacgtctgtccagcagcctggctcaccggaggcactggatgtgaccctgagcagccccttcctgttcgccatctacgagcaggactcaggcacgctgcactttctgggcagagtgaataacccccagagtgtggtgtgaggccttgtgcctagccatggagacaaggccggtgtcggagaaccattctgggcaaaactcagtgctgtcacccctggctccccatcacgccttgtagcgcggcagaggcagtctccttggagactgcgctgaccgagaataaatgatgagcagcagagcctcctgggatgtgggtttgtttggatactggggtgacagccagaagctggcactctgcacaggactgccactctggaagaaatttggaccaaaaaactgtttgtgacaccaaaaagcacccccccttttttttatttgaggacagaaattgggttttaacattaaaatgcacattatcccctt

SEQ ID NO: 601259 - DNA, 365 bp, Homo sapiens
  misc_feature (23)..(23): n is a, c, g, or t
  misc_feature (62)..(62): n is a, c, g, or t
ttgagaacatttttcatcactcnttaaagaaccccaacaaacacacccatgacagccactcngtgtttcccccttcccccaatcccctgacaattattaatctactttttatctctatttatttccctagtctggacattttatgtgaatagaatcataccatatttgtccctttgtgtctgtcttcttgcactaaatatgtttctaaggttcatccatgttgtattatgtatcagtacttcatttcattttatggttgaaatattccattgtatgtatgtaccacattttgtatatccattcgtcagctgatggacatttggattgtttccactttttgagtattaataaataatgcttctatt

SEQ ID NO: 601260 - DNA, 97 bp, Homo sapiens
gagagctgtgtcacctataggggctagctcgtcgatgcgacgacgagcgcaggagtagtgagcgaggaagcggcgcatacttcgtatagcatacatt

SEQ ID NO: 601261 - DNA, 327 bp, Homo sapiens
  misc_feature (138)..(138): n is a, c, g, or t
  misc_feature (141)..(141): n is a, c, g, or t
acccccacgacctggtgttgggtctgatcaccccaacactccaccccttggcagtcgacattctgctgtctctatgaatttgactaagtacctcatataagtggcatcgtccaatatttgtcttttttgtgtctggcntanttcacttggcatgtcaaggttcacccatgttgtagcacatgttagaatttcatttctttctaaggctgtatagtattccactgtatgcctacaccacattttgctgatccatttgcctgttgatggatacttggttgcccccaccttttggatttgtgaataatgctgctataaatattggtgtac

SEQ ID NO: 601262 - DNA, 1478 bp, Homo sapiens
gcccggcgattcccacgccagggtcttgactgacggtggtcttgctgcactgcgggaagtgccacagtggttgcatggcaggatggtccaggagtggtggcaatgtcctgccctgcgagagacatcatacttcgcgtaggtaaccactggcgaattcacaccgtgtagtgggcagaattgcccacgatgacaacgagccatctggtggacggggacgactcacattcgaacacccttcttactgctgacaactggtagcgtgggaagaacacagctaaccacacgaggaccaaattgaaagtaggactactagagagccataacggtcaattgactagaggataccgagacatgcgtcgccattagccagatccagacatatcttccactacgcagagacaagctacatacactagggaaacaagacggatagctggcgcgaacgaacgtatgacaccgtggctccagctataaccatatgggcaacggacgactcagttgaccacagtagctaggatacggatccagaaagctgtctagacacaggtgacacaagggaactatcaagggactattcgctaggatagattccaaccaggactataaagagaagagggagacaacataggcctaccatggctaacaaccctacaactcactagcatagagaagccggcatactactagttagaactcatgggacaaaaggagaattccaaaggactagggaaagttactatcccaagtcataacaacgatggtcacacagcacaaagggttgctactaaacaagaacccggaggatccgaaggccacatactaaacttcgtagtaccctagaaagcacaccaaacaagcaacgcctagagaagccacacttcagaacatgatgaccttcaatggtaggaaccaaacaggaaacagcgccagcctacattgcacgactcgaggcccaagcccgaccgaacccgtaagaacaactacgcagggacgcccaaaggcataaaaacacaaacgccacaaaacagacacaataacacaacacacgccaagaccaaagggacaaacagtcacgagtcagcaagagaaacatagagacgacaaaacggaagagagagcccccacacaatgacgagacacaatgaccacgacggataccaaagcaccgcacaacatggagagagcaaaaccgcaagcaatacccaaaatcaccccacatggggcacacccaaataaccgacaaaggaccaactaattagcaaaaagagcaggggagtaacacacaagaagcaacgaatgacgaggaggagaacgaacaccaacgagaagcgaaaaggaatagagacccgaggagccacaagcaaggaataggaggataacacaggcgcacaagagcaaacaaaagagacgtagacgaacagagacccacagaaagaggagaccaggagatacaacaccacaggagagcaaaaccagag

SEQ ID NO: 601263 - DNA, 1035 bp, Homo sapiens
gatagcacatctatgcattccatccaggtcatcgttctaccgactactatctttctcgctcactccgtctctctgcatcctctaatatgccgtaagaaagcttcccattgatcatggtccagtcatatcttatttctttatagatgcgcttcaacatttccgtctttcctcctaaaggctgatgatgtgtcgcacgtattgctcatgctcctgattagtgagcctcgcgatcccacaagatcgtagctcttgatcttacatatttcctcggatacgccagatggagttgatggccgggcgtgacgataacccttgattagaacgtgaagaggcgtacatccaggatggggagagtagctagaatccgcaccattagggaaattacctagttaccctaaaccaggtggaatcgatgattgtaaccggatagaagtctaggtatatttgtggcatttgcagacgtctaagactaactccacaggctaggttaccttatgatcattctcctctgctattttcttaaactctaaatatcaacaacagacctatttgagctgttcccgcaatacttgtttcctccgactccctctaacaagccccctgcctgaataactaactacctgagtcctaccgcctcacaatcagggcaaggcaacgtcagttatccagtgaaccattatccgacgaagaagaaactgctagctctctatactaatctccctacaaatctccttaattatgacattcacagccgcagaactaatcatattatgatatccttcttcgaaagcacaacttatgcccaacttgggctattattcaccgatgaggcaacagcagaagcctgaacgcaagggcaatactttcctattctagacctaatagggtccctttccctaatacattggatggttaactctcaaacccctatggtgcctaacttctataatcactcttggcgcagaaaataaagtcgggcgcaattaataattagggtccaaagcttattgaaggacaccttcgagcccataagcc

SEQ ID NO: 601264 - DNA, 118 bp, Homo sapiens
acaattaaaaaaaacattcttaaataggaagtagctaagtgttgaccctattacaaaggaggagggcagtattttgggatttctaataaggatccctctaggggttaccgatgctcga

SEQ ID NO: 601265 - DNA, 658 bp, Homo sapiens
  misc_feature (361)..(361): n is a, c, g, or t
gaccacccatatggaaccgtggagtacctacagcccttcaggacagtggtgatcccattgcccacgagtcctcacctgatgggtcctagtctccgccgggtttgatgctgttgaaggacatctgtctcctctggtgggatactctgtcaccgcagaatgttttggccacttgcccaggcagctgatgacctggcaggggggcgggtggtgctggccctgaaggaaggccataccttgaccgccatctgtgatgcctctaaggcttgtgtctcggctctgctcagtgagagctgcagcccttggatgaggcagtcttgcagcaaaagcccaacatcaacgcagggcccgctagagaaagtcntcgagatccaagcaaaccctggactgtgtcaaagtttccccgctggtttggccggtccctcgaaaggccccaacaaggtaaacccaaggaggcccaaatttttgagcccaatggcctttctgtcggtgggggccaaacaggcccaggtttcggcagcccgggaacacagccccaggccggcaaaggagcccatggagcaggagcctgccctgtgacgccccggcccccatccctttggggttccccattgtgattttgtttattttttctattaaaaacaaaaagtcccccattcca

SEQ ID NO: 601266 - DNA, 112 bp, Homo sapiens
  misc_feature (1)..(1): n is a, c, g, or t
ntcgagtgtattcaccactgcggtgcttgctccctgtacaagttcgtcgacacgtgagcacgtgtgacctccaaatatcgttagctggagctggtcgatctagaggacctcc

SEQ ID NO: 601267 - DNA, 313 bp, Homo sapiens
ggagtttgagaccagcctgggcaacatagcaaatgttatgttgccacctctacaaataattagccaagtgtggtggcatgcacctgtagtcccagatactcaggaggctgaggcaggagaatcacaggtcgaggtttgtagtgagctgtgatggcactgcactccagccttgggaacacagtaaagacccgtctctaaaaaagcagaaagggctgggtgcactggtcacaccttatgatcccagcacttttgggaggcgagacgggtggatcactgaggtaggagttcagatagcggggcaacatggtgatac

SEQ ID NO: 601268 - DNA, 1822 bp, Homo sapiens
ggatataaggccccaagcacctactgtaccccatacttgtatgtgaagaacgtatgtctcaagtaaaccacatttggagtaaaaaaaaaaaaaaaaacaaaaaaacaaaaaaacggggcgaggccgcgccgaacaaaatatctcccccacgacgggtcacacgggatcaacagctgcgcacccacgaccacatctgggccacaaaggggcgcccacacacacgcacacgccgaacacacacacacaccacggacacagtggacccccaaaaaccaacaaccgacagagaaacggagaaaacaactgcagcaaacacaacgagcccaacaacgagagaaagaagaacaccaaacacacacaacacggcgaacgcgagagagaacaacaccacattaggggaccaccaacaaacaaccaccaccacaaaacgaggagaaaactaaaacacagcgaaatcaaataggaggaaaaaacaaaacaatataaaaaagacgaacagcaccaaagagtagaatacaacaaaacagcgggcagaacaaaccaaacccacagaaagcgacgcgaaacaacaacccccacaagaaccgacacataataaaacaaaaactatctatacggctcacaacacccgagcccacaaacatcatcaatcactattcaccacacacaaccatcttctcacaaccacaccacatcaacaaccattaatccctgtacaaataaaaacacatacacaaacaatctcaaaccaccaaatcacacaacaccacccactcaactaaccaccaaacaacaaagaaacacaaacactaccaaaaatcacaaccaaacaccaataacacatatacttaattaccacgactcaataacacagaacacctatcacaaatactatacacaaatcaccacagaaatctcacaaataacacacactaccacaatcacaaagataaaaaattaaacaccaaaatcacataatcaccaaaaaacaacgaaaacacaaacaccacatagataaactcaactaatcaccaaaacaatacacaccaccacaaaaacaacacgaaccaaaccaacagaaaacaccaaacaaacacacaacaaacagtcaacacacagcgacagtacagcgggggaacaggaccaagagaacgcacatccgacaaccgacgagagagaagaggcagacgccagcagcggaaagagaaggaccgaggcccggcagagagcgcacgaaagagtcaacgacacacagagtgacccaacagccaagtcagacgactcgacgcactcggaccgcaggagtcaagccacgaacgcgacgaggacgaagacagtgagagcaagacgagctacacagaggcgtgccgacgcacaccgcggatgcgggaggacggaacgcagcagaccagagagacgaagacgacacagctgcgcatgacaagagcgcgcacatacacatgaacagagctgaaagcacgcgacaagaacagacaagcacagcaagatcattgcgcgccattccaaatacaacaacaacaagcagcaaacacacacactcaataatcaaacacaaaacatcaaataacacatcatacataaacaacgaatcaatcaaaaaaagaaaatatataactacacatactcaacaaaaacaagacaagacacatacccaaacaacactcttaccgcaaagaacaaacacaatgaaaacaacaaagaaaagaccaacacaacataaaaacatcacacacaactcatgcacatgcgatactatacaaataacaacacacaatcacaaacataataacaactaaacaac

SEQ ID NO: 601269 - DNA, 244 bp, Homo sapiens
aaacgcctgtatcttaatgtcttcacatcttcgaagactattccgtctagtatctggatcatcgctggccatgtctaattcctcatctcccaatctgaatacctggggtatctgcttccacaaagaatccagtagaggctctattagcaggagctttatgatcaggatcagaacgtgccaatatatacataccacttagcttttcctccggcggttatccacatcttctgaccatgaataatat

SEQ ID NO: 601270 - DNA, 551 bp, Homo sapiens
ttaccttaggctgtgatgaaacaggaggagtactgatcaaaggctttgatagggactgtggcagtttggagttttggtctctgatccgtgtttattacgatgattttaaaatatatatacatttataggctatattctatctggcattaataatatttggtattgataatacagatacagacttgattatttgggaaagacatgaagcagactccattatgtctttaagttgagctaaagtatacatcttaactactgatagtatatggaaagacggaactattctgtacctgttagtatccttcacagagagctagtggcatctgacacagaaccatgatacctggctgacactccaggatggcagtaatgcccaagtcactctgtaaaagcccaacactgtaaatcatacgtaatgtttatatgcaaaccagtagtcaaaagttaataattttagaaagaagaggttagctcataagtggctgtgttgtaatgaatgcagtagctgtttggcagctttctgaatccttggaaggccctttgtccacagt

SEQ ID NO: 601271 - DNA, 185 bp, Homo sapiens
gtagcatctgaaagatacaccgtgagagtagcaaggtagcattcggcatcatgccttgagcacgtggacttgtgaaacaggaagcaagggcttcagtgtagcccattcttgatccagagctgttgcctgttacagctgttactcatggatgtcaaaggcagctgcctggtgccctgctagcatct

SEQ ID NO: 601272 - DNA, 146 bp, Homo sapiens
gatctagaggatccctgcagtttagccacaaggggaaggggaagtttactaggccaaggatgatgaggtttcgttgagtttcaaacaatgtatgtcaggcctaaaagtggatgccaaggcagcaagtatattgtaacacatttatg

SEQ ID NO: 601273 - DNA, 172 bp, Homo sapiens
ggtctcggcccgaccccgtccgttgtgcatgctctctttgtttagcttagtaattaggacgctgcgcactgtcacatgatctggaaaatcatcaaaatgcacttattgaaagatgctcaatagttgagacttccagtgacttatttgggcctcagccccaactagctcaatc

SEQ ID NO: 601274 - DNA, 186 bp, Homo sapiens
acaaatccaattactggtatctaggttaaagtacattttgggaatcactgtgctatacttgcactttcctgaaagtataaaattttttcaaaataaaaagtgttttactgacaggcgcagtggctcacacctgtaatcccagcactttgggagactgaggtgggtggatcacttgaggtcagaaaa

SEQ ID NO: 601275 - DNA, 450 bp, Homo sapiens
  misc_feature (217)..(217): n is a, c, g, or t
gggagccaggcccgaggctggccgggcagccgacggtggtgagcggcctctggcagccagcccgccaggcaccgtgaaggctgaggagcaccagcggcagaacatcaacaaatttgaacgccgacaagcccgccctccagatgcctccgcagcccggggaggcgaggacaccaatgacctacagcagaagctggaggaggtgcggcaacccccaccncgagtccggccagtcccacctcccatgggtgccccgggagcgccgcgcgagaacatcaacgttgtcaagtacgtgggcaagcgatcataagacacctcaaatgcaggattctgtgaggtggaattccaggggccccctctccatccaggaaagagtgggctgcggaacttacagcaggcagcaatcctggagatgaaactttatccaaaagcggacacaccacaaacatgagg

SEQ ID NO: 601276 - DNA, 369 bp, Homo sapiens
  misc_feature (48)..(48): n is a, c, g, or t
  misc_feature (85)..(85): n is a, c, g, or t
  misc_feature (96)..(96): n is a, c, g, or t
  misc_feature (98)..(98): n is a, c, g, or t
  misc_feature (127)..(127): n is a, c, g, or t
  misc_feature (131)..(131): n is a, c, g, or t
  misc_feature (186)..(186): n is a, c, g, or t
  misc_feature (195)..(195): n is a, c, g, or t
  misc_feature (200)..(200): n is a, c, g, or t
  misc_feature (224)..(224): n is a, c, g, or t
  misc_feature (260)..(260): n is a, c, g, or t
  misc_feature (279)..(279): n is a, c, g, or t
  misc_feature (325)..(325): n is a, c, g, or t
tgggtatgcgccaaccctattttagggagggctcaaagtaggtggagnagatgtagccaccccgcatggagcgctgcacgttttntttaaaaagcngngggttgttttgcaggacctttgggggttntttntttagtgggtttttggggttgggttttaagaagagatattggagggaataaattntggagtttnttgtnaggattggtttttagttttttttnaggatgttgagggagatgttgcttttgaggtcaatnttggggtgatagaccattnttttacattttaccttggggggatcatgcgggtaaccctggcccancttaaaactgaacacaaacttcccactcttgtagaagccctcat

SEQ ID NO: 601277 - DNA, 921 bp, Homo sapiens
  misc_feature (42)..(42): n is a, c, g, or t
  misc_feature (263)..(263): n is a, c, g, or t
  misc_feature (311)..(311): n is a, c, g, or t
  misc_feature (388)..(390): n is a, c, g, or t
  misc_feature (406)..(407): n is a, c, g, or t
  misc_feature (409)..(409): n is a, c, g, or t
  misc_feature (411)..(411): n is a, c, g, or t
  misc_feature (424)..(424): n is a, c, g, or t
gccggtggagcggaagtcactccctgaggcagtggcgacagnggcgcgagaggatgaacaacaagttcgacgctttgaaagatgatgacagtggggaccatgatcagaatgaagaaaacagcacacagaaagatggtgagaaggaaaaaacggaacgagacaagaatcagagcagtagcaagagaaaggctgttgtccctggaccggcagagcatcccctgcagtacaactacactttttggtactccaggagaacccccggncgtcccacgagctcacagaagctatgaacagaatatcaaacagattgngcacctttgcctctgtggagcagttctggaggttttaatagccacatggtacgtcctggggcacctgacagggccannngtgattccatctcttnnanangaaggaattaaancccatgtgggaggatgatgcaaataaaaattgtgtggcaacgtggattactcgggtgcggaaagggctgtggccttcccgttgctgggagaaatctcatttggggcattgctgggggaacagttacattggttggggaggagatctgtggggctgtggtggttgccgttcaggaagaccttatttcactatggaataagactgcagtgaccaaagcaacaagcagaatcggaacattcggcgagtgttaaactactccaaacattatggataaaactcaaccgaggattaaatgcaggagggtgggccaaaggtcctttccaactctggagccgggtgaaggcaggacttccttgggtggcatatgaggggctcgagctggtgaggtaaccgagacttggtggaaatgggatttttaacgggcaggaaaaggcatatgtgaaaaaaaagggggatatggggaatatagtgtagattatcactgttaagtagacaaac

SEQ ID NO: 601278 - DNA, 954 bp, Homo sapiens
  misc_feature (123)..(123): n is a, c, g, or t
  misc_feature (190)..(190): n is a, c, g, or t
  misc_feature (237)..(237): n is a, c, g, or t
ctctcctctcttggccgtggcttctgtctgtgaggaggcaggagctgggtgagtgggagcctatgatccccagcggtctggacagaccagtgtccacactgctgacccaacaggcttcgcgcnccacgaagacctcgcagggaatcacgcgcagacagaattagcatccagcagactaccgcactgaccntggctcttgtgctccatcgccctagtgcagtgcatcgaggtagggcntcaatagcatgtgtcctagtgagaagcgccccttgtcccctcagaagcggccaccgacgtaaggcagcaatgtaggctcactggagcttaccctatcagccgaagggctatgcctgcctgggagtccacgagaggatcatgggcacgatgcgagtacttggacgagcccatccgtgagagaatgcgcatcgacatcgcaaattctcgcatcataccaacggtcagcttcagatccaaagtcggctacaaggtgtccttatggtgctcccaccacttggagagctcaagctaatgtccctgcgtgtccagcagcccatcagatgcgaaccttgggagggtggacaggtgaccccgaccttcctatccctttcgcgaacgggcgcttccattggaatttccaacctttggggccctccggccccgtcgggttcccggcccccgcccccttctcccccccctgacccttgggggctttggtggtcggagccccttgagggttggggggccacaggacgggacgggttaactgctgccggttccagacgagaagggtggttggtccatgaagcgttgaccattagattccccatccgtacacaagggcaggggacgactttcgatcattcagaagccacgccgcagcacaccctagggtgataaaggtaaatgatcgggggcttcaccgctttgcccaagtggaaaggccttctgttcacc

SEQ ID NO: 601279 - DNA, 794 bp, Homo sapiens
  misc_feature (148)..(148): n is a, c, g, or t
  misc_feature (355)..(355): n is a, c, g, or t
  misc_feature (565)..(565): n is a, c, g, or t
gagatggagtatcactctgtacccaggttggagtgcagtggtgtatctcggctcactgcaacttccacttcccgggttcaaacgagtctcctgcctcagcctcccaagtagctgggactacaggtgtgcgccaccatgcccggctaantttgtttgtatttttagtagagacagggattcaccatgttggccaggctagtctcgaactcctgacctcaactaatcccccccaccttggcctcccagagtactagaattacaggcgtgagccaccacacccagcctgaaaagtgatttttgctgaaagaaggagataacccctttccatcctcagcatgtcaaagcacacggtggnggcccttcctcactattttgtcctagaagtagtgggaaggcacaagaattagcctctctgaaaccccctcatctcaggccctgccctccctgttgcgggacacactgtgcatgctgtcatctgtggacccacggcaccaggcagtggcgtttattgacaagttcgtctctttctgctaactgtatggacccatgtggcgggaaagactcntgattatcaatgcatccccagcacatagcacagggcatatacctgctaccaaaaatgttactgaatggctgccagggactttagaaacattatctcccttgatcctcaaaaccaccctccgtgtcagcttctaatgtccccattctgcagatagcatgactgcagaccacagaggcacaatcagctgtccgcggtcacacagtggggagctgcagggacagggtgcagc

SEQ ID NO: 601280 - DNA, 740 bp, Homo sapiens
  misc_feature (148)..(148): n is a, c, g, or t
  misc_feature (511)..(511): n is a, c, g, or t
gagatggagtatcactctgtacccaggttggagtgcagtggtgtatctcggctcactgcaacttccacttcccgggttcaaacgagtctcctgcctcagcctcccaagtagctgggactacaggtgtgcgccaccatgcccggctaantttgtttgtatttttagtagagacagggattcaccatgttggccaggctagtctcgaactcctgacctcaactaatcccccccaccttggcctcccagagtactagaattacaggcgtgagccaccacacccagcctgaaaagtgatttttgctgaaagaaggagataacccgtcctagaagtagtgggaaggcacaagaattagcctctctgaaaccccctcatctcaggccctgccctccctgttgcgggacacactgtgcatgctgtcatctgtggacccacggcaccaggcagtggcgtttattgacaagttcgtctctttctgctaactgtatggacccatgtggcgggaaagactcntgattatcaatgcatccccagcacatagcacagggcatatacctgctaccaaaaatgttactgaatggctgccagggactttagaaacattatctcccttgatcctcaaaaccaccctccgtgtcagcttctaatgtccccattctgcagatagcatgactgcagaccacagaggcacaatcagctgtccgcggtcacacagtggggagctgcagggacagggtgcagc

SEQ ID NO: 601281 - DNA, 414 bp, Homo sapiens
  misc_feature (3)..(3): n is a, c, g, or t
ggntcgacaaaatatatatatgtgtatttttagacatagtctccctctgtcacccaggcttgagtgcagtggtacgatcaggtgcacgccaccacatctggctaatttttaaaaatgtattctagggacagggtctccctgtgttgcccagggtggtcttgaactcctgacctcaagtgatcctcctgtctcagcctcccaaagtggttacatgcatctatccatgtgttaaaatcggtagaactgaggccgggtgcagtggctcacacctataatcccaccactttgggaggccaaggcaggccgattgcttgagctcaggagttcgagaccagcttgggcaaggtggtgaaaccccgtctctaccagaaatacaaaaattagctgggcatggtggctcacacttgggtagtc

SEQ ID NO: 601282 - DNA, 108 bp, Homo sapiens
cctctgcttatggtcatcttgttttatctattagcctacctctacacttccctttccctttacccttttttcctgcatggaacatagattgacccctagacatgctgc

SEQ ID NO: 601283 - DNA, 719 bp, Homo sapiens
gtatccagttacttcagcatcatgaagttctaaaccagatttggatcccgcaactataatccctttatgttataccaattactatgatttttacacgttctgagcaatattaaaattctactggatttccaaaagagacttataccccactgactaactaacacccaatatccactttgtaatactccatgaatttttttgccactttacactttgacccttggctttagtgaatgtccactatttaattttttaaggcacccctgtacacccgtttatcctacactttatcaccctttcttaaagtgttaagattctatggctcacattctatgtatttttcttaactttaccaaataaccctgagaaccacgtatagattttgtacacttaatttgagccgcttttttattaccttgaattatataaagtgcactgttaccttagaaaaattaatatttgctgctttactcttttgccaaacctttgctgtaatgaatggatttgtatttcccatatgtatcttgactgccttttgtaatatttactgctttattcctaattctgctttaaagtactgaactgggcatgaaacattaaaatattaatcccgaaactgtataaactggatgttgcttaaaatctgtatcactgccctgttgaaaactcagactgcttttgtgatgtttccaatgaataaaactatcctcccctcgtta

SEQ ID NO: 601284 - DNA, 217 bp, Homo sapiens
tttgagcttgcagatgttatggtacttgtgtacaagtggtgttgtaatatggaggagttggaaaggcttttagtttgatgaaaatgttggaaacagtggacacatatctgagagggaggaacgaggcagcgtggtgaatgcccaggaacaagatggctaagctttttgttaaaaccaaatcacagacggtgggtggcaaagcatgaagttttcccca

SEQ ID NO: 601285 - DNA, 465 bp, Homo sapiens
tctcaccccatcattaggctctgactagctatcttgctgtgctaccgtaatattctccctcacataccaggtgcagatgtctacattcctcgtggcccactttatgacttttgcactctgatttatattttaaaagcatctctgtggttgctgtgaagaataaaggaaggaggcaaggcaagtgtggaagcaggctactcacttaagctgttgtaagtcatgacttagactgtccttgaggttggactagggtgctagtggtgcaggttgtgagatttgggatcgtattagttgtctatactgtggaacaagttatcctaaacttagcttaagacagtaaatgttatctcacagcaatttgagtgtagcttagctgggtgcctcaggctcagggtctcacaaggttacagctgagatcttctctgaggctgctgtgctctcaaggtttgaggggaaaagaccctg

SEQ ID NO: 601286 - DNA, 122 bp, Homo sapiens
tctagagtatcccccgacgtagaatcatcaggacagcatcctcaatcacccaacagcatattcggttgcatcttctacacactacagctatagttaggttgcctgcggccacgctgggcctc

SEQ ID NO: 601287 - DNA, 315 bp, Homo sapiens
gcgtggctctagtgctggggtttaacatcactagaggtatggtcataggggtcttcctaggtacagaaggtcctagagaaatacccactttcttttataactatataaatctctttactgtacagagattgccattccagcgttcagaacacaggtgagatagtgtatctcatatgcataccccagcaaacattaaaattgtcatcttcacacatggacagggtccactggtaagtcctgaatctcacacatggaaaaaatacacagttgcaattgtagactgtcatatatgaacatccagcaaagaaccacacg

SEQ ID NO: 601288 - DNA, 193 bp, Homo sapiens
  misc_feature (35)..(35): n is a, c, g, or t
  misc_feature (119)..(119): n is a, c, g, or t
agtggcgatcactgagtcagagtcgagacagctgncacacagagaaatccgtctctactaaaatacaaaatagcgaggcgtgtgcacatgctgtattcctgtactcggacgctgaggangagatcacttgaaccgcgagcagaggttgtgtgagttgagacacgccattgcactccagctaggcatcagacag

SEQ ID NO: 601289 - DNA, 86 bp, Homo sapiens
tgggggggggggggggggggggggcccccggggaaatcccccccaaattttttttttttccccaaaaaaggggttttcccccccca

SEQ ID NO: 601290 - DNA, 140 bp, Homo sapiens
aaaaagggggggggggggtttttttttcccctaaaatggaagccccctgagggcagggggggggcccctttttttatcaaaaattaaatttaaaggcccccccaaaagggggcccaaaaaaaaaatttttttgaatgata

SEQ ID NO: 601291 - DNA, 115 bp, Homo sapiens
  misc_feature (64)..(64): n is a, c, g, or t
  misc_feature (80)..(80): n is a, c, g, or t
  misc_feature (101)..(101): n is a, c, g, or t
ttcccaaagtgctgggattcaggagtgagccaccgggcctgggctggctttaatgacttttttnaaagggatggctcaancaaagcacctgtgtgtgccantggaaaaaccatgg

SEQ ID NO: 601292 - DNA, 495 bp, Homo sapiens
aggtaaagtccttcctggagtggatgctctcagcagtgtttagtgcttttctgccttttggttcctgtgcatagcccctaagtcaacatagcactgtctgcatctctgcttggcattagctaatgtcttcccctttgtcaagaatcagctagtagccaagggatgtagcgccaggaaccctcaaacagttgcagaacatctcagctcatctttgctgtacctggaaattgcctatattcttcaagatcccatttgaatttcttagagactaaaccgttatgcattcttgagtacatatatttatattatgcctgttaaaacaaagtgggctgtgttagcttagttctctttctgaagtagcttattctgattcgctttgtcattgtttcaccactcagcacggaaacaagatgaaattccaattactggtacggagggagatgaagttggtgatatattaaataaataaaaagatccattgaaactggaaaaaaa

SEQ ID NO: 601293 - DNA, 880 bp, Homo sapiens
ccaaagggcacctttggattccatgtagcccatggcagtggccggcgagactcaggctctatgtgcaggccatggctgacctggacaccgcgaagctgtactcggggctgctcagggtcggggatgagattctggaggtgggcggggccaaggttgctggactgggcttggctcacatcaaagagctactggctcatgcggagagcttgtccattcgtgtcctgagacaaaggccggtcccccagtgacccagaagtaccgctgctcttgctgacactcctacaggacccctgacccacacacgcagcaggaggggctagaaacatgccacccagagataacatgtgaacggaaaatgcagttcacagatcaggcatctgtctgggcagtggcagaagctgttctgatcggccccctgcaggaagaggccgagtacccgtgtgtacgttcagttaagatcactaatttatacaggtctagagacagagaatcctggtctcctccttcacagaagtggtcacgttcctttgttggagggagagaactgcactgactaatccttgggttggtccctgagagctggctcagcttctggccacactcactgagaaggctccccagccccagaaacagagacagcgtggcacctggctttgtgccccatctctttcagcgtggcttcctggttcctgtgaccctttggtctggtccgaaggggcccggtcttggccagctgaagcaggggccatattcctactggtgttctgggaaaatgccgaccgggttgggcccctggtgtgcctctgggagtcgggcgctttaatctcgttttcgccccttggagttcgcctcctggcctaatgggggggccccttcccag

SEQ ID NO: 601294 - DNA, 1007 bp, Homo sapiens
  misc_feature (57)..(57): n is a, c, g, or t
  misc_feature (95)..(95): n is a, c, g, or t
  misc_feature (118)..(118): n is a, c, g, or t
  misc_feature (124)..(124): n is a, c, g, or t
  misc_feature (140)..(140): n is a, c, g, or t
  misc_feature (151)..(151): n is a, c, g, or t
  misc_feature (164)..(164): n is a, c, g, or t
  misc_feature (173)..(173): n is a, c, g, or t
  misc_feature (196)..(196): n is a, c, g, or t
  misc_feature (210)..(210): n is a, c, g, or t
  misc_feature (218)..(218): n is a, c, g, or t
  misc_feature (221)..(221): n is a, c, g, or t
  misc_feature (226)..(226): n is a, c, g, or t
  misc_feature (241)..(241): n is a, c, g, or t
  misc_feature (283)..(284): n is a, c, g, or t
  misc_feature (293)..(293): n is a, c, g, or t
  misc_feature (329)..(329): n is a, c, g, or t
  misc_feature (340)..(340): n is a, c, g, or t
  misc_feature (362)..(362): n is a, c, g, or t
  misc_feature (364)..(365): n is a, c, g, or t
  misc_feature (428)..(428): n is a, c, g, or t
  misc_feature (435)..(435): n is a, c, g, or t
  misc_feature (443)..(443): n is a, c, g, or t
  misc_feature (446)..(446): n is a, c, g, or t
  misc_feature (484)..(484): n is a, c, g, or t
  misc_feature (491)..(491): n is a, c, g, or t
  misc_feature (518)..(518): n is a, c, g, or t
  misc_feature (522)..(522): n is a, c, g, or t
  misc_feature (537)..(537): n is a, c, g, or t
  misc_feature (559)..(559): n is a, c, g, or t
  misc_feature (562)..(562): n is a, c, g, or t
  misc_feature (576)..(576): n is a, c, g, or t
  misc_feature (585)..(585): n is a, c, g, or t
  misc_feature (588)..(588): n is a, c, g, or t
  misc_feature (671)..(671): n is a, c, g, or t
  misc_feature (686)..(686): n is a, c, g, or t
  misc_feature (767)..(767): n is a, c, g, or t
  misc_feature (801)..(801): n is a, c, g, or t
  misc_feature (888)..(888): n is a, c, g, or t
  misc_feature (901)..(901): n is a, c, g, or t
  misc_feature (915)..(915): n is a, c, g, or t
  misc_feature (942)..(942): n is a, c, g, or t
  misc_feature (986)..(986): n is a, c, g, or t
cagtccagagtggactacattctgagtgtgatgaacgtgcctgactttgacttcccncccgaattctatgagcatgccaaggctctgtgggaggntgaaggagtccgtccctcccacnaacgcnccaacgagtaccagcngattgactgtncccagtacttccnggacaagancgacgtgatcaagcaggctgacnatgtcccgagcgancaggaccngcntcgcngccgtgtcctgactnctggaatctttgagaccaagtcccaggtggacaaagtcaacnnccacatgtntgacgtgggtggccagcgcgatgaacgccgcaagtngatccagtccntcaacgatgtgactcccatcancnncgtggtggccagcagcagccacaacatggtcatccgggaggacaaccagaccaaccgcctgcnggaggcnctgaaccnctncaagagcatctggaacaacagacggctgcgcaccaccnctgtcancctgtccctcaacaagcaagacctgcncgcngagaaagtccttgcngggaaatcgaagattgaggacnacnttccagaatttgcncgccacacnacncccgaggatgccacccccgagcccgcgagaggacccacgcgtgacccgggccaagtacttcattcgagacgagtctctgaggntcagcactgccagtngagatgggcgtcactactgctaccctcatttcacctgcgctgtggacactgagaacatccgccgtgtgtacaacgactgcngtgacaacattaagcgcatgcaccttcgtcagtncgagctgctctaagaagggaacccccaaatttaattaaagccttaagcacaattaattaaaagtgaaaggaaattgtacaagcagtnaatcacccaccanagggcatgattaanaaagcaacctttcccttcccccgagtnattttgcgaaacccctttttcccttcagcttgcttagatgttcnaatttagaaagcttaaggggg

SEQ ID NO: 601295 - DNA, 378 bp, Homo sapiens
  misc_feature (40)..(40): n is a, c, g, or t
  misc_feature (73)..(73): n is a, c, g, or t
  misc_feature (97)..(98): n is a, c, g, or t
  misc_feature (130)..(130): n is a, c, g, or t
  misc_feature (135)..(135): n is a, c, g, or t
  misc_feature (158)..(158): n is a, c, g, or t
  misc_feature (163)..(163): n is a, c, g, or t
  misc_feature (205)..(206): n is a, c, g, or t
ccatttggcgaggcagtctcgtgaggcctgtgagtgtctngttttgtcctgggtgcctgtggctgactgtggnagatttctggggaaggctggagannagctgggagacccaggagagtccctgaaggcnggggntgaagaggtgaaagaaatggggnatggntgcagtaaggtccgtgagtttgcagctgattccagggtgtgnnaagctgactccaggtgaaatctggagatggttggagagtagctgagagagacagaagagtccctgagggctgggggtgagaacatgagggagactggctagtaagtcagtgaaattcgtgagttcggtggtgactcgtgggtgcctggaactgactccagctgtaatctaga

SEQ ID NO: 601296 - DNA, 238 bp, Homo sapiens
actccttgctagtgtcaataggttccatgctcgtgtctgcgcagatgggctttgcgagcatatcgtggtcaaaaatgcctggactacggaacggtttggacggcatcagcctcttgaagccaggacaggcagagcaggggaaaagccaggagcagggacgtccatgagcactggagccattgccactaggtgagctgtccacaggaccctgagtggttcgagaagtgcgcgggtgggc

SEQ ID NO: 601297 - DNA, 208 bp, Homo sapiens
caagcgaacatggggcatgtataatttctccccttttttagttaaaaagagacaaaggaaagccacctgggctgaaaggaacactggtgtccatcaggcccccaggcctagactcacctcttcagcaacaccaagatactgggtaacatctcttcattctgagctccaaacttggccagagcgctcacagctcccgcatgtgcgctgg

SEQ ID NO: 601298 - DNA, 840 bp, Homo sapiens
taaaaccctccacctccagtggctgtaactggtcccagtgattatacgttatgggttgctgtgggtctgggcgggcctgaacccagggagggcagactttatttttttctctccttattgccaccccaggttggggaggggaggggagggtttcaagactcacagtttctccctttgccctttttaattccacaagcctccttggccccagatataagtgtgggagaactctctgcaagctttccgtgagtttcgtgcctataaaaatgtggcccccacagcactgtggtctgtggggaacaaggggccaaatgtgtgggtagaccacacagtctcatgtgccatagagacctgtggggccacaaaaagccggggacaacctctctgtggtctttcacgagggggggccccagtgtgggtgtgcccctctcccagagtgtgtgagagagaggagggccgggtgtgtattctcgggcctgtgtgtgtcccgttcagagtgttgcacagtgtcgcctgtgtgtcgccaagagagtgtgtgcgcggagagagtgtgagagattcctctcacaaaggagctgtctccctgtgggacggggggtgtcactcctctctctctctgctgtgacccctgtgtgtctcagtgaggctctcactatgtgatgctctcaccaaacggacataaggcgtgtgcatcgcacttattgtcaagagagatatctagagagagtgagatatccctctcgcacttatccccaatatattttacaaaggggtcacgtctatatatgtgtgcgccccttaagtgagaggctttgacatatgaggagaaaaacaaacaaa

SEQ ID NO: 601299 - DNA, 870 bp, Homo sapiens
  misc_feature (106)..(106): n is a, c, g, or t
  misc_feature (137)..(137): n is a, c, g, or t
  misc_feature (149)..(149): n is a, c, g, or t
  misc_feature (154)..(154): n is a, c, g, or t
  misc_feature (179)..(180): n is a, c, g, or t
  misc_feature (211)..(211): n is a, c, g, or t
  misc_feature (233)..(233): n is a, c, g, or t
  misc_feature (237)..(237): n is a, c, g, or t
  misc_feature (240)..(240): n is a, c, g, or t
  misc_feature (302)..(303): n is a, c, g, or t
  misc_feature (325)..(325): n is a, c, g, or t
gcatgatggcgcttgccgagtgattctcctcgaatacctcctgccggcgcggagacaccggggcgggggtcctgccgcaactacctcccttcctcctctcccccgnccccggagccttcatccttcccttccccccnccagctcgaggngcggncctggttcaccgggacaccatgtcnngactctgaggaggagagccaggaccggcaanctgaagaatcgtcgtgctgggngacnggnaccatccgggaagacctccttaactacgtgttttgctcaagaacacttttgggaacagtacnnaacaaactataggactggattncttttgagaaggataacattgccaggaaaacttagaattgttaccgcttcaaaattttggcgatatacggagggcagacaactagtgagagccaacaaactgttggataacaatatatctactggagcacagggagtcctcgttggtatatgatattacaaattatcaaagctttgagaatttaagaagattgggtaatacatgtggtgaaggaaagtgagcgaggagtcagaaaactcagccagtggttgccttggataaggcaataaaatagattgtggagcatattgcgactcaataaaaccctgagacacacacctatacggcgattggcaggaaaagtgggtgaaggtagccactttgtctcaaccaagacagggaaactcctggtcctccctgtgcattaccagagagttgctgcgtgaacatccttgggaatcaaattaacaaagcagaacatagcaacagtcgcagcgtattgtccgggccggacttagtgaatacccggaggaacgcaaacagatacccctctactcagaagtaaa

SEQ ID NO: 601300 - DNA, 666 bp, Homo sapiens
agcggcagcatcctgataccgaaacctggcaaagacacaacgtaaaagaagacttcagtccaataactttgatgaacatagatgcaaaaatactcaacaaaatactagcagaccaaatctagcagcacatagaaacaaacaaaacaaaaaggaattcaccactatcaagtaggctttatccctgggatgcaagattggttcaacatatacaaatcaataaatgtgattcaccacataaatggaattaaacacaaaaaccacatgattatttcagtggatacagaaaaggcttttgataaaattcaacatcacttcatattaaaaaccttcaataaacgaaacattgaaggaaaatacttcaaaattacgagagccatctatgacagccccacagccaatacgatactgaatgggcaaaagttaaatgcattcctcttgaaaaccagaaaacgacaaggatgccctctctcaccactattattcaaaataatactggaagtcttaaccagagcaatcaagaaagagaaagaaataaaagccatccaaataggaacagtgaaaatcaaactgttcctgtttagcagatgatgtgattctttacctagaaaaacacacagtctctggcccaaagctgcttataaacaacttcagcacacttttaggata

SEQ ID NO: 601301 - DNA, 412 bp, Homo sapiens
  misc_feature (62)..(62): n is a, c, g, or t
  misc_feature (75)..(75): n is a, c, g, or t
  misc_feature (174)..(174): n is a, c, g, or t
  misc_feature (202)..(202): n is a, c, g, or t
  misc_feature (340)..(340): n is a, c, g, or t
  misc_feature (347)..(347): n is a, c, g, or t
  misc_feature (390)..(390): n is a, c, g, or t
aagggaaagggccccacaaggccaagaaaacggcacaagggaaaaccggaacaaacaacagncaagggagggagncaggagagaaggcgaccacaaaagaggggagaaaaggcgacgaatcaggacacagagaacaagggaatcaagaggcagcagaagggaggagagacggcngcaaaggcagcagaagctgagctggagncaggggcagaaagccaacaggggaggaccagcccaggaaggccttccagagaggcccaccagagaatacattctcgataagtttaagaagagtttttgtaaaatgattttgcacaagtaggatatgaataagcagtanacaagtngacatatagactaataagaaataggtcgagcaaagacctctgnagtaaaatgtgaaaaagccccc

SEQ ID NO: 601302 - DNA, 275 bp, Homo sapiens
ggattggctgtccctcttgttcttgcctgtgatctgcaatgccgccctggctgctcgttccctcctgggtgcgagtcggaggggcatgagatggtgtacgaacgggatcacattctccaccaagctgtagcaccaacgttgatgaggtcgtgcgtcaggcgtcctcggactgcccatattctcttcctggccacaagctttccccaggcaggccccagctgtgacaatggcacgacactccgaatgcagtgtcttgctgccactcctccacgtgg

SEQ ID NO: 601303 - DNA, 499 bp, Homo sapiens
  misc_feature (4)..(4): n is a, c, g, or t
  misc_feature (15)..(16): n is a, c, g, or t
  misc_feature (20)..(21): n is a, c, g, or t
  misc_feature (23)..(23): n is a, c, g, or t
  misc_feature (32)..(32): n is a, c, g, or t
  misc_feature (36)..(36): n is a, c, g, or t
  misc_feature (38)..(38): n is a, c, g, or t
  misc_feature (47)..(47): n is a, c, g, or t
  misc_feature (54)..(54): n is a, c, g, or t
  misc_feature (59)..(59): n is a, c, g, or t
  misc_feature (84)..(84): n is a, c, g, or t
  misc_feature (104)..(104): n is a, c, g, or t
  misc_feature (108)..(108): n is a, c, g, or t
  misc_feature (112)..(114): n is a, c, g, or t
  misc_feature (117)..(117): n is a, c, g, or t
  misc_feature (120)..(123): n is a, c, g, or t
  misc_feature (128)..(128): n is a, c, g, or t
  misc_feature (131)..(131): n is a, c, g, or t
  misc_feature (136)..(136): n is a, c, g, or t
  misc_feature (141)..(141): n is a, c, g, or t
  misc_feature (150)..(150): n is a, c, g, or t
  misc_feature (152)..(152): n is a, c, g, or t
  misc_feature (154)..(155): n is a, c, g, or t
  misc_feature (161)..(164): n is a, c, g, or t
  misc_feature (168)..(168): n is a, c, g, or t
  misc_feature (171)..(171): n is a, c, g, or t
  misc_feature (184)..(184): n is a, c, g, or t
  misc_feature (189)..(189): n is a, c, g, or t
  misc_feature (194)..(194): n is a, c, g, or t
  misc_feature (197)..(197): n is a, c, g, or t
  misc_feature (201)..(201): n is a, c, g, or t
  misc_feature (227)..(227): n is a, c, g, or t
  misc_feature (229)..(229): n is a, c, g, or t
  misc_feature (252)..(252): n is a, c, g, or t
  misc_feature (256)..(256): n is a, c, g, or t
  misc_feature (260)..(261): n is a, c, g, or t
  misc_feature (264)..(265): n is a, c, g, or t
  misc_feature (270)..(271): n is a, c, g, or t
  misc_feature (273)..(273): n is a, c, g, or t
  misc_feature (278)..(278): n is a, c, g, or t
  misc_feature (282)..(282): n is a, c, g, or t
  misc_feature (285)..(285): n is a, c, g, or t
  misc_feature (295)..(295): n is a, c, g, or t
  misc_feature (300)..(300): n is a, c, g, or t
  misc_feature (308)..(308): n is a, c, g, or t
  misc_feature (311)..(312): n is a, c, g, or t
  misc_feature (319)..(319): n is a, c, g, or t
  misc_feature (351)..(351): n is a, c, g, or t
  misc_feature (357)..(357): n is a, c, g, or t
  misc_feature (363)..(363): n is a, c, g, or t
  misc_feature (368)..(368): n is a, c, g, or t
  misc_feature (377)..(377): n is a, c, g, or t
  misc_feature (381)..(381): n is a, c, g, or t
  misc_feature (390)..(391): n is a, c, g, or t
  misc_feature (396)..(396): n is a, c, g, or t
  misc_feature (398)..(398): n is a, c, g, or t
  misc_feature (403)..(403): n is a, c, g, or t
  misc_feature (407)..(409): n is a, c, g, or t
  misc_feature (415)..(415): n is a, c, g, or t
  misc_feature (419)..(419): n is a, c, g, or t
  misc_feature (433)..(433): n is a, c, g, or t
  misc_feature (486)..(486): n is a, c, g, or t
tacncctaatatttnntttnncntgttatccnaccncntccaaaacngcccccntggcncggtatggaatagagcagtgattcnggcacaggaaatggtccccnaaancccnnnacntcnnnnccccnccntgtcnagccntccattaantncnntgcccnnnnttanccngcctaccgccccnccccnccacngtnagcnatggatgggccagagagatgtcaaancnacatgggtaccgccatgcccctngganagcnnccnnccccnnanccganaccnccnttcccccccnttgcngtcttccnaannccccccngacaggccaatggctgattgtggacaaattcnccagantccggntccgnagccaccgnaganggccaagcnnccggntnccgancccnnnggcccngaancccgagcccgaggngacccccccagagccctgctcacagccacaatccccccaccccctgacaacgntccggggcacctc

SEQ ID NO: 601304 - DNA, 278 bp, Homo sapiens
tctggcagattgtagcggggcacgcagaggaggaggaatccgctgcctccgtggtagatggaacgcatacggatggacattcgcaaagtggacgccgtctttgtgggcactggggacctgtagctagccatagtcctggcgtggacacacagagcaccccaagtaacctcaaggtggcctgtagagaagacctgtgtctacctttgcaccagcgttctgcagagtgaccgatccatgtgtgcaaaatgcccatggccggggcaaggatgtgaggccca

SEQ ID NO: 601305 - DNA, 260 bp, Homo sapiens
  misc_feature (3)..(3): n is a, c, g, or t
acncccccccctggggggggtttgggccttttgcctgttatacccccttccccggggagggggaatggtttttatccacccgggaaaagttttcttgtttttgccccccttaaaagggaccccccccggggggtaaaaaaagttttttaattgaaaatttccccccgcctggggggtggtccaaaagttttcccaaaagaatttttgctttttgggggggatttttccccccccgccctttaaataaatttgccccccta

SEQ ID NO: 601306 - DNA, 185 bp, Homo sapiens
acaactgagctcgttacccctaattgctcttcgatgacgcagcctccagagtagctgggaccacagtcgcatgccaccacacccactaatttttgcgtttttatttttattttttttggcagagacagggtttcgtcatgtttgccaggctggtcttgaactcctgagctcaagcagtcctcacg

SEQ ID NO: 601307 - DNA, 344 bp, Homo sapiens
tctagaggatcccgagggttggttgtgggtagaggagatggggagttgtttaacgggaacagagtttcggttgggaagatgaaaaagttctggaggtggagagtatggtgatggctgcataacaatgtgaatatacccactgccactcaactgtgcacttacaaatgattaaggctgggtgcggtggctcacacctgtaattccagcactttggaaggccgaggcaggagtggatcgcctgagctcaggagttcgggaccagcctgggtaacatgatgaaaccccgtctccactaaaatacaaaaaattagccaggcatggtggtgcctacccacaaacacctg

SEQ ID NO: 601308 - DNA, 1773 bp, Homo sapiens
  misc_feature (1036)..(1036): n is a, c, g, or t
  misc_feature (1115)..(1115): n is a, c, g, or t
  misc_feature (1134)..(1134): n is a, c, g, or t
  misc_feature (1172)..(1172): n is a, c, g, or t
tggcacttcccatgagcctttttttttaattggaaacaagttgtggattcgataatttacaaaactttgtacaaaaatttcacagcgccgtgtgtgaggagcctttgggtgtggaacgtgggtgacacctgtggtgcctcttccggacgagaggaaggaagtcccaccccgctcttccagcagcagcagagccgtgtgtgtctcgtggacattctccctgtgttctccgctgtgctatccacacccttcagcgtgtgtggggcacgcagtctctttagggaaccattctcagcgtgttcaaaggcggtagaaaacccagcgcccaacaggcctgtggcgcacctcgccaggggcttatcagggaggcaccttgtgtgtgtggcagctgtggttaggctctcaggagcgctcttctctccccagggctctcccgaggccccatgtgtgggctgtgggaaagaggagaaacaggggtgcagagagaaaaacgaacacaatgtctctccacctttctgctaggaaagagagcgacacgttttatacaccaagacactctatatcaataaacagcgacgagatgtgtaaattcaaaataagtcgccccagaaaaactgcgggaaatctgcgtggagtccaccaagtgtgatctccgcggcgggggaatttgtgtgggcccgtgatgggagacccagcgagccatttgtggggacaggggcggacggtataagggggagcactactttctatcccccatttatcgtggggtgtataaaacaatttgtccaccagtttcgtggggcacacacacaggaagagcacacaaacacaaagtggtttgtgaccccctgtttctaacgacatcctacacaacctcgtggccatattaatttttaccaggagaagtgtaatcaacaacacaccggaaggaaggagggcaaaagaaactgtatggcaacccgcaggacagaccaacactgtggggggggcgcacatatacacaatgtccattctagcaaagtacatcgattgagtggcncgacgcattgtctttatgccagtacgccactatatagataacacgcaccaagtattttgttatggggaaccagcacgcnaggaatcaagacacgtcgngtgagtggggaagaaacaagaggccacgccgtgtgtgngtaataaacgcgagggccagagcccacaccacgagagaggatacagaagggactaccgcccccgcccgccactttgtatacttggagcagcaccaacaacgagcgagagttctattaacaagagaggaggaggcatatatcaacgccagaggagaacgcatcgcgcgatctatcgtcgggcagtacctataaggagggccctggcatctatgaagggaggccgaggaacagagagatccaccgcgggaggatgagccacggcgacactaagtaggagagttagtcccacgggaagcgccaacatatggtgagaggagcacggcgaccctatagtgacgagaaacaacttggaaggaaagggaccctccctagaaaaaagtgcgcagtaaagagggaaagcagggcgcacaccaagcaactacagacaatacaagaaaagggcgccccccactatatacttagagcggaaggagtacaccacacggagggatacaagaaggtcgacgatagcagaaacggagaaccacgaacggcgagacgagaaacaacgaagatgaagggaagccagcgtaagcgaacaaggtacgaccaaccaacgcga

SEQ ID NO: 601309 - DNA, 1183 bp, Homo sapiens
tttgccgccagaacacaggtgtcgtgaggataactacccctaaaagcctaggtaatgggaacatggaagaatggcaactcactagtcgaaacatatgtacgctcaattgggagcacggtagcattcgggacaagtccaccagcatagcgtggaccgatctgatctactaaactgcggttggcattcgacaataatgaaaccagttgatacaaagtttgaccaaaggagcgctgtctgtaagcatgggacatacgggctcctatcagagctatgtcctggggtctctgggactaaccagctgtagatacgtctgagccgtgaaccgatggatactcacgcaattgactactctccctctggtcgggaaaagtattgatgaaccagggcagatgctatcgttattgctagatctgatcaatatgcaatggctccccagggaacaccgagatgcatctgtgtaatacacaagagacgaatgattacagggggacagtctcccaggcatgacttcgttagcttggtcctgcattgtagtcttggctgctgcgcctgttggagctagcatagttatcgtaacgacatagggtcatcatcaccatagggatataggcgccgagaccctgaagtagcgattgtcccgtgtcttggacttacgacacctgtcgttgatgcaaaccaaaccgtgaagtccgatcgggtggttagacaatagatgggaattctcactggatcacaaccctattacatgatccaagacacggagcatcatcgtacggacacatttggttctcaacgggccaaattgtccacgcccacattcaccatctggcaacgactacatttggcggttatcgaaagccctcgtacatacatgtaaagcattgcttgatagcccaaatttcccatggggctttgcgtaaattgcggtggccgaaacacattgccgtgggtacgaccaatagtgcgcgtaaaccatttgacccttagggacttcccaattggggagttgcgacctatggtcaaccccccgtcttacgggaatgggccctatcgtccaagtctcgtaaaactccaccggcgggccatggaggggtatcctgcggaacctggctttcccttaccccacgccaaacccgcaatccaaaggtgaaacaaggccccttagacggcatggacatcttcc

SEQ ID NO: 601310 - DNA, 487 bp, Homo sapiens
  misc_feature (8)..(8): n is a, c, g, or t
  misc_feature (86)..(87): n is a, c, g, or t
  misc_feature (173)..(173): n is a, c, g, or t
  misc_feature (191)..(191): n is a, c, g, or t
  misc_feature (193)..(193): n is a, c, g, or t
  misc_feature (195)..(195): n is a, c, g, or t
  misc_feature (259)..(259): n is a, c, g, or t
gttcactntccaatggtttttttactcattgcctttcaattccttttttttgttattgctgggttggtactttaagttcttttttnnctgtttcttttggccttaaaccgtaccaactcttttgttcaaaaaaggccacaaccgttaagattgttttacttgttttttttttnccctgggtggtgggcggncnangttttccttattaaggttggcaattagcttcactcaatatttttgatattgcacattaaaaaanagtattcatcttacaaattcttctgcaatccaaacatacaatagcttggagaacatttagaaaacaaaagccaatgtaaaaagacagattaaaacaactagaacagtacaggttttatttatatggctcgaattttacagttttcttactgcatcatcaatgtcagaaatctgttccttcagctggctccattgttctggatttaaagaaataccttttcttcctggt

SEQ ID NO: 601311 - DNA, 302 bp, Homo sapiens
  misc_feature (6)..(6): n is a, c, g, or t
aactcntatgggaaacttaaatacttctctctaccccaggaattggcttattctgtaaattttctttttgagagtgttgccccaggctgcagtgcagtggtgcaattatggctcattgaagcctcaaccaatcctcccacctcagtttcctaagtagctgggactataggcacgtgccgccacagcccactaatttttaaatttttttgtagagacagggtctccctgcctaggctaatctcaaactcctcgcttcaaatggcccttccacctcaccctcccaaagtgctgggattacaggt

SEQ ID NO: 601312 - DNA, 168 bp, Homo sapiens
actagtccacggtgggctggttgatacatctcccaaaaacggagtgtgtggttcctgggttttcttgaagctggcacaaggtagctgaagaaaaacaagagattgtactctttttgtctttgtagagacagaagtctcgttatgttgctcaggctggactcaaactcc

SEQ ID NO: 601313 - DNA, 156 bp, Homo sapiens
ctctagaggatccgttgtggtggggctgaaattgtggccgaggctgtgaagaacctgactaaggttcctgatgagcgcttttatctgagctcatccccgcagtttgatttagtcatgggaatgataaaaatgaaaggtggtgtgactaatgagtga

SEQ ID NO: 601314 - DNA, 101 bp, Homo sapiens
ttagagcatgcgattagaccgaagacaataaaaaaactcagataattagacacagattaactgtaaacagttctctactctccatgtgaacaaacaagaat

SEQ ID NO: 601315 - DNA, 909 bp, Homo sapiens
agaagaaaagggagccgcgcagacgcctacggtgagttcggtcgcgcagcatgcgcggtacctggctaacctacgggctagtcgtctcaggggaatctctgatcgttgagtgccagaggctccagtccccgcgagtccacgatgcctgtccagcctccaagctaagacacagaagagatggaagccgtagggtttattctgctgctgagcatgaattggggaggaggaacggagatgtgagcgacggacgtcggacgctggcatgctcaagacagacgctctggaagcacgcgagagctccgagatggagtgatgaggactactgagcgatcgccgcagcgagtgtgtcacgtgagatgctggacctagagaagcagttctcggagctaaaggagacgttgttcagggaacgactgatgtcagctgcggttgcggcttggacggaagtgggggctgatgagagcccctgaatacacggcagccccttgggggtgctgcagtcggagcctcaacgttcgcgattcacggtggcagtggatctacatagtggcttctgtctggatgtgatcacggaataagtacgaatgtgagctgcagggagcctaaacatgcacctggagagtgagaagctgctgctctatgacacgctgcagggggagctgcaggagcggatccagaggctggagtgaggaccgactagagcctggacctcagctctgacatggtgggacgacaaatctggacgccagaggcaggtccaggtcttgggacttccctgtcgcccagcaagagggaagaaaggcaacctctggtttcttggcccatacatcgtgtacattgcttcgaagagatcgacatcctggagtgactgtacatgccatcgaaaaacggtaaggcagctgtgtccca

SEQ ID NO: 601316 - DNA, 391 bp, Homo sapiens
  misc_feature (155)..(155): n is a, c, g, or t
  misc_feature (388)..(388): n is a, c, g, or t
acatgcgtaatgtggggatctcaagaagcagactgtcctggaactctttccccttcctgtgcttctggtattgaaaaccattcatcacctgcctgaattcttaattagtcttcaaggaaaagtaaataaaatgttaaaaagcaagagattgattnggtaaagaactgaggagaggaagcacagagttcagcagtccacagcacactcaccatgtctccaaaggcgttcatggctgttgtgaagctgtgtttcccttggctgtgttcctgattgtgctgctcaatcatcttcatgttctcccacactgctctcctccatccttcttcattctaaagacaaacatgtaactgatgctctttatttctaattaaaacccagcctatgctancca

SEQ ID NO: 601317 - DNA, 448 bp, Homo sapiens
  misc_feature (2)..(2): n is a, c, g, or t
  misc_feature (17)..(17): n is a, c, g, or t
  misc_feature (34)..(34): n is a, c, g, or t
  misc_feature (56)..(56): n is a, c, g, or t
  misc_feature (444)..(444): n is a, c, g, or t
anatatgaaaatgtgangttaaaattaaaactcnaatttccttgagttcctagttncaaagtatccctactacttagtgacccctggtgcccttagtgaagagagaaagaaaagaagaaataatctctaatggcttctcaccccataagtaaaaaaggagtggctgggtgccgtggctcatgcctgtaatcacagcactttgggaggctgaggtgggtggatcgcctgaggtcaggagatcgagaccagcctggccaacatgatgaaaccccgtctttacaaaaaatacaaaaaattagctgggcgtggtgacaggcatctgtaatcccagctactcgggaggctgaagcaggagaatcacttgaacccaggaggtggaggttgcagtgagccgagatcatgccattgcactccagcctgggcaagaaaggtttctccatctcnaaaa

SEQ ID NO: 601318 - DNA, 835 bp, Homo sapiens
gatagttctccctgagtgagacttggctggctgcttctgggcgccctggtcctgtcctgtgcgtcctagctgtgggtgtgtcgtgtaggcatcgccgtgcgaggcgtccatgctcatggcatgttatctggaccagttgtactcactgcactgggtgcgtgatctctccgactgcgtttgggctggtgggactacgcaggagcgcacggttttcgtatgtgatgtactgcgtcatcggtctggagctgtctattctcgttcaaatgtggacgggagacgcggtgcggttcctggatcagatactgtctataaccaacgcggagtacgtgcgcttcgacgagcgacgtgaggggacgttccggggcggagaccggatgctgaggcgctggactgatcgacgcgagtacggtgaacagccacgaatggactatcctggcgaacgaccagtgcgtggcctgctggtggtacactcttactggcagacggcgaactacggggctggtcggagagcttcagcggtgcgagcggtgagtccatcctaaggtgactgctgtatccttcagaagaccccagtgccacatgtcggctaccgataagatgctcctggtctgttctgtgagatggctatctatcgcaggcagtccttgagagatccgggttggtcacgggaattgcccacggaatgagaacgcactggggatgtgtgtccagaagggccttgatcccacggatgggagacctggagctttcagaagcctggtggatgttggaacacagttacctcgagagtggacacggtatccatctggcggagtgggtgaacccaagggtgaca

SEQ ID NO: 601319 - DNA, 466 bp, Homo sapiens; identical to SEQ ID NO: 496277

SEQ ID NO: 601320 - DNA, 235 bp, Homo sapiens
agtcggagcttcctttaagcagctcccactccagtggagcgaaagagcaggacagagggagataactcaggctgtgaagagatttctgggagaatgacccttgcactaggtcttcggtgtgtttaggtcttcatgaagtggctttcacgtgaagttcacgctttctccagaaaaggttcaccatcgtcagggaagggcatacaagggcagaagcggccttgataggagctgggag

SEQ ID NO: 601321 - DNA, 378 bp, Homo sapiens
ctctttggaggctggggatagtagcatcaacattctcactgattaatgaagtggtgttcacattggatttgtgaacagacccatcatatgcagacttctggtctactgaggagcatgtgtctctacatgtttacagtggtggagtttccttgcccctctgccaataaccacaaaatgatcagtaatgagaaataattaagtatctagaggaagaaaacaaagacatgaatttcatgatactctcatgctttgtattatcagtgacttcattgtttctcttggcaaatttttaatgcatctgtgcttggcccaggggtgcatactagggtaaagaaaaattttgtaatagcaacagtggtttggattttcagggtccaa

SEQ ID NO: 601322 - DNA, 495 bp, Homo sapiens
aaaaaaaaaaaaaaaaaaaaaaaaaaaaaaaaaaaaaaaaaaaaaaaaaaaaaaaaaaaaaagggccccgctcgcgatttagaaccgccatttttttggaaacctctgcgccatgagagccaagtggaggaagaagcgaatgcgcaggctgaagcgcaaaagaagaaagatgaggcagaggtccaagtaaaccgctagcttgttgcaccgtggaggccacaggagcagaaacatggaatgccagacgctggggatgctggtacaagttgtgggactgcatgctactgtctagagcttgtctcaatggatctagaacttcatcgccctctgatcgccgatcacctctgagacccaccttgctcataaacaaaatgcccatgttggtcctctgccctggacctgtgacattctggactatttctgtgtttatttgtggccgagtgtaacaaccatataataaatcacctcttccgctgttttagctgaagaattaaa

SEQ ID NO: 601323 - DNA, 133 bp, Homo sapiens
gtgtttgctgctctggtaattttgagtaaaaatgcagtattccagggatcagaaacggaaacacatgggaaccgcttttaaactttaaaatataccgaaaacataagggtccaaggttgtttgtggggcaccc

SEQ ID NO: 601324 - DNA, 213 bp, Homo sapiens
taccaagctgttacagaacatttcacgcatgaggcatgatcgggccatggagacgctcaagatcctctacaagtacgagcagaacaaggccaatgcgctcctgatcctgggagatgcaccgaggagcaaggtgaccacctttcgagcatcagtacgtcatgtgcatcaagaccctgtggcaggacccgggcatacaggaatgctacgaccgca

SEQ ID NO: 601325 - DNA, 751 bp, Homo sapiens
  misc_feature (42)..(42): n is a, c, g, or t
  misc_feature (68)..(68): n is a, c, g, or t
  misc_feature (84)..(84): n is a, c, g, or t
  misc_feature (86)..(86): n is a, c, g, or t
  misc_feature (111)..(111): n is a, c, g, or t
  misc_feature (115)..(115): n is a, c, g, or t
  misc_feature (174)..(174): n is a, c, g, or t
  misc_feature (198)..(198): n is a, c, g, or t
  misc_feature (201)..(201): n is a, c, g, or t
  misc_feature (212)..(212): n is a, c, g, or t
  misc_feature (223)..(223): n is a, c, g, or t
  misc_feature (227)..(227): n is a, c, g, or t
  misc_feature (260)..(260): n is a, c, g, or t
  misc_feature (268)..(268): n is a, c, g, or t
  misc_feature (278)..(278): n is a, c, g, or t
  misc_feature (296)..(296): n is a, c, g, or t
  misc_feature (299)..(299): n is a, c, g, or t
  misc_feature (319)..(319): n is a, c, g, or t
  misc_feature (323)..(323): n is a, c, g, or t
  misc_feature (331)..(331): n is a, c, g, or t
  misc_feature (340)..(342): n is a, c, g, or t
  misc_feature (364)..(364): n is a, c, g, or t
  misc_feature (373)..(373): n is a, c, g, or t
  misc_feature (381)..(382): n is a, c, g, or t
  misc_feature (394)..(394): n is a, c, g, or t
  misc_feature (416)..(416): n is a, c, g, or t
  misc_feature (430)..(430): n is a, c, g, or t
  misc_feature (439)..(439): n is a, c, g, or t
  misc_feature (444)..(444): n is a, c, g, or t
  misc_feature (451)..(451): n is a, c, g, or t
  misc_feature (500)..(500): n is a, c, g, or t
  misc_feature (541)..(541): n is a, c, g, or t
  misc_feature (556)..(556): n is a, c, g, or t
  misc_feature (729)..(729): n is a, c, g, or t
ttggcacgaaagtgttgaaacaaaattaaagttgcatacatnagtaacataactcaacatccttaatntggcatagacgtgacncnttttcttgccctcttgcgttctgcnaaancaccatacctaaactgctttataaaactgctacgctgaaatccacccctaccgtctccncctacgccccgccccccaacaaanccncccaaaagccncccctatcccngggnccatcccaccatcaatatcatccaagtatggancaccagcnccggataaanctgttccattttcttcanaanctggaaaaaaggcctctctngcgngtagtgcnggggattgnnnttggtaatccggatcaggggcngtgaaaggnacaccatnngatggataaaangttgggtcattcataaagtagntaggatcattttcnggtgtggcntctcnatatgtngaagttgcatggactctgccccagttacttgaccggagttctacaagcntcaagagcatctgttttacatctctactgcagtttgcatcnaggacaacgttttcnattctctgaataattgcctccatatccatctttcctttttccttccaagcatcttccaaaactgatcctgtcaactttaacaattttactgcacaaattaaattgtcatccataggattagaaaacagggcattcagcaattctcgaagaccaacctgaagaatatctgctcntgtaacctgtccatttgttccc

SEQ ID NO: 601326 - DNA, 317 bp, Homo sapiens
tagaaatggggtctcactgttgcccaggctggagtacagtggctactcacagacacaatcccactactgatcagcactggagttttgacctgctccatttctgacctgggcaagttcaccccttcttaggcaacctatggtcccctgctcctgggaggtgggaggtcactatattgattcagaattcagcgtggagacccaatcagcatagagcactatagcccagaactactggactatttctgtgtttatttgtggccgagtgtaacaaccatataataaatcacctcttccgctgttttagctgaagaattaaa

SEQ ID NO: 601327 - DNA, 1029 bp, Homo sapiens
caaacagacagctcgactttgggcacatgctgtatgctggagcaccagctttctagctccagaatacaccaacaaaaatagaaaacctatgtgctatgggcttcgactaggaactgcacgtaatagtggccttgtcttcaaaatcatgggcactgtacgcagactgcaacagaattgcttctgagtaactgaggcactagagagctgctgatatagtcaagcttgcctcttcttgaggagcaccaacatctgcttactctccaggatctctgcatagatttctctttaaacctggcattcttgcctaactgatgtctatctaggcaccattggcagactgaacaacacaaaaactcccgtgcctctgtaccctaaagctaattaaacgtctgtgctaaccttcaccaccggggaacatacctttaacttttctcttcctcaatagctgtccaaatcccctgagctacagctaaacaccatggcacacaaacccagtggctacctttagctgctcacccacgtgtacccaagacactagccaaagaacttgcggctccccggcatcccggccggacaccacatctcacgcatacactacttcccgagctgtcgtcaggggccccaatcccaaacatcgctcgcgtgctgcacttcccaaggtttacgctttaaacactggctattttaaaccagtggcatccctcctggtgcccttgtgaaactttacacctcggccgtgcccttgtacccttggacctttctataagggcaatggcgatcagcttgcacaaaagcaaccacccattttatcaacgcccaacttctgcagcaaattctcttctaccactattgccccactctctactcccagcgaattttcggccacgaaatggctggaccctaatttcgagcagcccccttatccgggccccttggctcacaccaggacagtggggacagtgtcacactcacacatactcccaccctgtctcgaacgaagcgcggcacgaggccggcaactgcgacaga

SEQ ID NO: 601328 - DNA, 449 bp, Homo sapiens
gcggccgcctactactactaaattcgcggccgcgtcgaccgccatttttttggaaacctctgcgccatgagagccaagtggaggaagaagcgaatgcgcaggctgaagcgcaaaagaagaaagatgaggcagaggtccaagtaaaccgctagcttgttgcaccgtggaggccacaggagcagaaacatggaatgccagacgctggggatgctggtacaagttgtgggactgcatgctactgtctagagcttgtctcaatggatctagaacttcatcgccctctgatcgccgatcacctctgagacccaccttgctcataaacaaaatgcccatgttggtcctctgccctggacctgtgacattctggactatttctgtgtttatttgtggccgagtgtaacaaccatataataaatcacctcttccgctgttttagctgaagaattaaa

SEQ ID NO: 601329 - DNA, 726 bp, Homo sapiens
gctttgctcgctgctgcggtcctgcggccgtgacggcaccaatgtcgcagtggacgcaccatatcgcagtgcacccgcccgccgcgagcggccgcgcaatggaccctgctgctggcagcctgctgcactgccggaggagaaggctggcgggaccgtctgggtgtgctccgggctggcccaaacacctgtgtaccctgcaggttggtgggcagctgggtaagcctgtggaacttcgggggcgcctggtggcacttagcgttctttctcctgagtttcagacccggtaattctcttacaactgttggacgaacgggcgttccagagaactcattgcagggacgcaccaaggtttaccaggggtttgctcgcccttggaaccaaagcattattccctttgaacgcaccggaaaattgcaacttggaggtcctttaacgtgggtttcgggagacgggcgcccttattaaaacgggtttggcggacacgtttggaacttttccctttattaaccctctttttttcacgcacacggggtgacagaacaacctcgggtgggaccttttcccccgaaaggagacttgcttggttaagcttatttaccttgggcaaccctttccgaacgtaaatcttgggccagacacatatttaacgctttcgggaaaagcgccaaacttcccaaaaggagagttaatttttatttcccgtgggggtctccgcgaattttggga

SEQ ID NO: 601330 - DNA, 468 bp, Homo sapiens
  misc_feature (41)..(41): n is a, c, g, or t
  misc_feature (45)..(45): n is a, c, g, or t
aattcgcggccgcgtcgactacgctgcgagaagagacagangggnctctcggccttagcgccatttttttggaaacctctgcgccatgagagccaagtggaggaagaagcgaatgcgcaggctgaagcgcaaaagaagaaagatgaggcagaggtccaagtaaaccgctagcttgttgcaccgtggaggccacaggagcagaaacatggaatgccagacgctggggatgctggtacaagttgtgggactgcatgctactgtctagagcttgtctcaatggatctagaacttcatcgccctctgatcgccgatcacctctgagacccaccttgctcataaacaaaatgcccatgttggtcctctgccctggacctgtgacattctggactatttctgtgtttatttgtggccgagtgtaacaaccatataataaatcacctcttccgctgttttagctgaagaattaaa

SEQ ID NO: 601331 - DNA, 1023 bp, Homo sapiens
  misc_feature (16)..(16): n is a, c, g, or t
  misc_feature (67)..(67): n is a, c, g, or t
  misc_feature (80)..(80): n is a, c, g, or t
  misc_feature (140)..(140): n is a, c, g, or t
  misc_feature (217)..(217): n is a, c, g, or t
  misc_feature (277)..(277): n is a, c, g, or t
  misc_feature (289)..(289): n is a, c, g, or t
  misc_feature (320)..(320): n is a, c, g, or t
  misc_feature (322)..(322): n is a, c, g, or t
  misc_feature (329)..(329): n is a, c, g, or t
  misc_feature (331)..(331): n is a, c, g, or t
  misc_feature (336)..(336): n is a, c, g, or t
  misc_feature (410)..(410): n is a, c, g, or t
  misc_feature (415)..(415): n is a, c, g, or t
  misc_feature (424)..(424): n is a, c, g, or t
  misc_feature (427)..(427): n is a, c, g, or t
  misc_feature (450)..(450): n is a, c, g, or t
  misc_feature (470)..(470): n is a, c, g, or t
  misc_feature (491)..(491): n is a, c, g, or t
  misc_feature (527)..(527): n is a, c, g, or t
catttttattcctatntcaacctcaacattatcctttcctaccccaaccatatcttcctttttaccntccaatccttcanctactccattcctctttataccacctacacttacacttcttaccattccatctctccctncaattcccaatcattttacaataacttcatcacatcttattatcttcttatatatcttcccccctaccattcctatnacttcatctccctcatttctccataccatttcccttactcctttcccttttccctctacnacaattccttcnccacttccttttatttctatatctacctttnantccccananacctnacccaacaccccctacttcctccattattttccttttcatccccacattcccattcctccactctttatctatncaaancactctctncantcccccttttttttttttttttnaggcaggggctggggcaggntctctcctctctctcttgtgngtggccaggaggttcccccgaccaggttggggaganttggggccagcgcttctggtctggtaaatatgtatgatgtgtgtgcttttttaaccaaggaggggccagtggattcccacagcacaaccggtcccttccatgccctgggatgcctcaccacacccaggtctcttcctttgctctgaggtcccttcaaggcctccccaatccaggccaaagccccatgtgccttgtccaggaactgcctgggccatgcgaggggcagcagagggcgccacaccacctgacggctggggacccacccagcccctctcccctctctgctccagactcacttgccattgccaggagatggccccaacaagcaccccgcttttgcagcagaggagctgagttggcagaccgggcccccctgaaccgcaccccatcccaccagccccggcctgctttatctgacatcgaattcctgcagcccgggggatccactagtactagagcggccgccaacgaggtggagctccaggttttgttcccc

SEQ ID NO: 601332 - DNA, 187 bp, Homo sapiens
ggtcaatttctacacagtaatcagatatgtcaacatcagtgtgtctgctgatataatgtattgagacatagatatctctggtatccttaacgtaaaaatcaacctaagatggagcaaatatcagatagactcaaatttaaggacattttacaaaataactggccagtattccctgaaagtattgagg

SEQ ID NO: 601333 - DNA, 271 bp, Homo sapiens
gaaacaactgtctaaaaatgagccccaaatgaggagcctttgctccagtgaatgagatttggcagttctgcaaaatgaggaaattcttccttgtgcggcatcttgaagggttgagtcatgaaacccacagcaaatattagtgggctggattcctgaaaggcatgccagatggacgcattctggttagttttactgtgtgatgttcccttctgtacttctgtcaattttagaagaaaagagtgtgaataaagatttgagaagtgaacttaaa

SEQ ID NO: 601334 - DNA, 434 bp, Homo sapiens
cggcacgagctggtagtaagcttgggaggtaggagttggcgagtagtagcgaggagagccaagtggaggaagaagcgaatgcgcaggctgaagcgcaaaagaagaaagatgaggcagaggtccaagtaaaccgctagcttgttgcaccgtggaggccacaggagcagaaacatggaatgccagacgctggggatgctggtacaagttgtgggactgcatgctactgtctagagcttgtctcaatggatctagaacttcatcgccctctgatcgccgatcacctctgagacccaccttgctcataaacaaaatgcccatgttggtcctctgccctggacctgtgacattctggactatttctgtgtttatttgtggccgagtgtaacaaccatataataaatcacctcttccgctgttttagctgaagaattaaa

SEQ ID NO: 601335 - DNA, 750 bp, Homo sapiens
  misc_feature (197)..(197): n is a, c, g, or t
  misc_feature (218)..(218): n is a, c, g, or t
  misc_feature (254)..(254): n is a, c, g, or t
tcgactacaagtcttctccacggcgtcaggtgcctggagtgaccgtgttaggcccgagagacttgacgcaggctcccgacggctttaggaggggctgggcgcccaagtcccatcctccactctgtattatgaaagaccactctctgcgagtcctccggggctagtggtgggctgggcaggcaggggctggggcaggntctctcctctctctcttgtgngtggccaggaggttcccccgaccaggttggggaganttggggccagcgcttctggtctggtaaatatgtatgatgtgtgtgcttttttaaccaaggaggggccagtggattcccacagcacaaccggtcccttccatgccctgggatgcctcaccacacccaggtctcttcctttgctctgaggtcccttcaaggcctccccaatccaggccaaagccccatgtgccttgtccaggaactgcctgggccatgcgaggggcagcagagggcgccacaccacctgacggctggggacccacccagcccctctcccctctctgctccagactcacttgccattgccaggagatggccccaacaagcaccccgcttttgcagcagaggagctgagttggcagaccgggcccccctgaaccgcaccccatcccaccagccccggcctgctttatctgacatcgaattcctgcagcccgggggatccactagtactagagcggccgccaacgaggtggagctccaggttttgttcccc

SEQ ID NO: 601336 - DNA, 339 bp, Homo sapiens
tcagggctgcccggccaggttggtttgctctggttacattttggccaagctgccccttcctgttgacctgcatgtgtattgttgtcaccttcagctttcagcacctgggcccccttgggcagtaaggaagggccctggaggcgaggttgggaaaaaggatagctaaaacaggatcctgcggggaacaagggtgtgggcagctttcacccggggctgcctcacttaaagcccccccgagtgggggtgggggtgtccaactttccagccccaaaccgcttcctccttgtttgcaggctgtgcaggtttggcctgtgagtaaacccatttatcagcaaccca

SEQ ID NO: 601337 - DNA, 494 bp, Homo sapiens
  misc_feature (13)..(13): n is a, c, g, or t
cctgcgttgggangccgtgtacaatccatagacatctgacctcggcacttagcatcatcacagcaaactaactgtagcctttctctctttccctgtagaaacctctgcgccatgagagccaagtggaggaagaagcgaatgcgcaggctgaagcgcaaaagaagaaagatgaggcagaggtccaagtaaaccgctagcttgttgcaccgtggaggccacaggagcagaaacatggaatgccagacgctggggatgctggtacaagttgtgggactgcatgctactgtctagagcttgtctcaatggatctagaacttcatcgccctctgatcgccgatcacctctgagacccaccttgctcataaacaaaatgcccatgttggtcctctgccctggacctgtgacattctggactatttctgtgtttatttgtggccgagtgtaacaaccatataataaatcacctcttccgctgttttagctgaagaattaaa

SEQ ID NO: 601338 - DNA, 493 bp, Homo sapiens
gattttaatgggccccctcgagtccgcggcttaataagctgattcaagtggaccaggaggggccagtggattcccacagcacaaccggtcccttccatgccctgggatgcctcaccacacccaggtctcttcctttgctctgaggtcccttcaaggcctccccaatccaggccaaagccccatgtgccttgtccaggaactgcctgggccatgcgaggggcagcagagggcgccacaccacctgacggctggggacccacccagcccctctcccctctctgctccagactcacttgccattgccaggagatggccccaacaagcaccccgcttttgcagcagaggagctgagttggcagaccgggcccccctgaaccgcaccccatcccaccagccccggcctgctttatctgacatcgaattcctgcagcccgggggatccactagtactagagcggccgccaacgaggtggagctccaggttttgttcccc

SEQ ID NO: 601339 - DNA, 832 bp, Homo sapiens
  misc_feature (518)..(518): n is a, c, g, or t
  misc_feature (525)..(525): n is a, c, g, or t
  misc_feature (538)..(538): n is a, c, g, or t
acccggcgctccattaaatagccgtagacggaacttcgcctttctctcggccttagcgccatttttttggaaacctctgcgccatgagagccaagtggaggaagaagcgaatgcgcaggctgaagcgcaaaagaagaaagatgaggcagaggtccaagtaaaccgctagcttgttgcaccgtggaggccacaggagcagaaacatggaatgccagacgctggggatgctggtacaagttgtgggactgcatgctactgtctagagcttgtctcaatggatctagaacttcatcgccctctgatcgccgatcacctctgagacccaccttgctcataaacaaaatgcccatgttggtcctctgccctggacctgtgacattctggactatttctgtgtttatttgtggccgagtgtaacaaccatataataaatcacctcttccgctgttttagctgaagaattaaaaaaaaaaaaaaaaaaaaaaaaaaaaaaaaaaaaaaaaaagggggggggggcnaaaaaancccccgggggggnccattgggaacccgtttttggaaaagggggccccaaaagggggggacgcaatatgaggccaagagacagggggcagcatgtattcaacaagccttcgctgcaagcgggaaacaacttgtctgcggggaatctctgtggaaaggaaccccaactcgggggggcaaccaatctggggacaaactcccccggaaaattacacctccggggaaatacaaattgcgggtaagtgtgaaccacgcggtatattgccgctaaaattcctcacggatacatgtgaaaaatttacggcggaca

SEQ ID NO: 601340 - DNA, 391 bp, Homo sapiens
gacataagattgaaggcaagggcggggatagaatgttatagttgggtatttgtcctgccaaaatctgatgttgaaatgtaatccccaatgtggaaggtgagtcctggtgggaagtaattgggtcatggatgcagatccctcatgaatggcttagtgctgtcctcatgatatcacatgagttttatgagatctggtcatttaaagatgtgtggcatctcctccctctgttatttgctcctgcttccaccatgtgatgtgcttattcacgctttgccttccaccatgataaaaacctctctaagccttcaccagaagctgagaagatgccagtaccatgttccctgtaaagcctacagaactgtaagccaattaaacctctcttctttataaa

SEQ ID NO: 601341 - DNA, 613 bp, Homo sapiens
gaggatcccctcacacgccgaagatcatacatcaatgagatatggtgattggatttagtgagagagaaatagtacctactgtatacagttggtaagatagttgcatgacagaaagtggagaataaatccaaaaaaaactccagggccttctacctcagtgaaatttctagggcatattgagatactccttctatttgatattttttttgttgtttgcttttttttgagatggagtctcactcttgtcgcccaggctggagtgcagtggcacaatctaggctcactgcaacctctgcctctcgggttcaagtgattctcctgcctcagcctcccaagtagctggaactacaggtgcataccaccattgcccagataatttttgtatttttagtagagacagggtttcaccatattggtcaggctgatctcgaactcctgacctcaagtgatctgcctgcctcggcctcccaaagtgctgggattacaggcatgagccaccatgcccagcctgaatttttaatttttttgagacagagtctcagtctggacgttcggcgtgtgcatgcacacgccgaggcaccatacaaatcggtgtggacgaagttggggtacc

SEQ ID NO: 601342 - DNA, 398 bp, Homo sapiens
gcggccgcctactactactaaattcgcggccgcgtcgaccgaatgcgcaggctgaagcgcaaaagaagaaagatgaggcagaggtccaagtaaaccgctagcttgttgcaccgtggaggccacaggagcagaaacatggaatgccagacgctggggatgctggtacaagttgtgggactgcatgctactgtctagagcttgtctcaatggatctagaacttcatcgccctctgatcgccgatcacctctgagacccaccttgctcataaacaaaatgcccatgttggtcctctgccctggacctgtgacattctggactatttctgtgtttatttgtggccgagtgtaacaaccatataataaatcacctcttccgctgttttagctgaagaattaaa

SEQ ID NO: 601343 - DNA, 491 bp, Homo sapiens
  misc_feature (83)..(83): n is a, c, g, or t
  misc_feature (119)..(119): n is a, c, g, or t
  misc_feature (125)..(125): n is a, c, g, or t
  misc_feature (133)..(133): n is a, c, g, or t
  misc_feature (143)..(143): n is a, c, g, or t
  misc_feature (186)..(186): n is a, c, g, or t
  misc_feature (458)..(458): n is a, c, g, or t
  misc_feature (472)..(472): n is a, c, g, or t
ttcggcacgaggtaatgtttaaagatcactacggaaaccatgttaggttagaacaggctttgcaaatgcaaatgtgaaagggncaagcacacagacagcagtgagtgaggtagcatggnggaaangggagganaggtttggcnagcagggctcttggagagcagctactcctcagccccacccagntagtgccaggccaggcgggaatgtgggcccagggcggtcacatcttccaactttttgcgtgaaatctcctgattttgaaattttggcaaactcttagattcgtggtaaatattctgtgtgctgaaccaagttggccttggttggcagctctgccttggaggaactagccagggaggtgattcaccagccttgctgcccctccgtgggccaccctcacaaagaagcaagccaaggctgctctgcctatggagtactggttcttttgtttcttnactttcttaataancttgctttcattttaaaaa

SEQ ID NO: 601344 - DNA, 252 bp, Homo sapiens
aactccagagatgagtgtctggagcgcacagttcagctttaaaggcaggacgggcacacgtggctggcggcctcgtttcacgtggcggcacgtccttgggcgtctctaatgtctgcagctcaagggctggcacttttttaaatataaaaatgggtgtatttttatttttttttgtaaagtgattttgggccttctgttgacattcggggtgatcctgttcttggctgtttacaattgtgagatcggtgcgtt

SEQ ID NO: 601345 - DNA, 748 bp, Homo sapiens
  misc_feature (578)..(578): n is a, c, g, or t
actagttctagatcgcgagcggcgccatttttttggaaacctctgcgccatgagagccaagtggaggaagaagcgaatgcgcaggctgaagcgcaaaagaagaaagatgaggcagaggtccaagtaaaccgctagcttgttgcaccgtggaggccacaggagcagaaacatggaatgccagacgctggggatgctggtacaagttgtgggactgcatgctactgtctagagcttgtctcaatggatctagaacttcatcgccctctgatcgccgatcacctctgagacccaccttgctcataaacaaaatgcccatgttggtcctctgccctggacctgtgacattctggactatttctgtgtttatttgtggccgagtgtaacaaccatataataaatcacctcttccgctgttttagctgaagaattaaaaaaaaaaaaaaaaaaaaaaaaaaaaaaaaaaaaaaaaaagaaaaaaaaaaaaaaaaaaaaaaaaaaaaaaaaaaaaaaaaaaaaaaaaaaaaaaaaaaaaaaaaaaaaaaaaaaaaaaaaaaatttgtgacccttttgtcccaatnttttttaaacttagaaaaattttaatttggcgcccaattgggctattttggcaaatccccctattgggggggtttaaacaataaggggccctgtttttaaaagtgtggtattgaaaaaaccctgggtgtacccatttaaaacgccttggaaacccctttttgggtggggc

SEQ ID NO: 601346 - DNA, 210 bp, Homo sapiens
  misc_feature (85)..(85): n is a, c, g, or t
  misc_feature (121)..(121): n is a, c, g, or t
  misc_feature (133)..(133): n is a, c, g, or t
  misc_feature (163)..(163): n is a, c, g, or t
  misc_feature (165)..(165): n is a, c, g, or t
ggagtatggaagtgaaaagttaaaactgaacacatacattctacttacttgttatgttactccatcaacatagcaagactccatntatacaaaaaatagggccaggagcagtggctcatgnctataatcccantactttgggaggctgaggtgggtggttcancngaggttaggagttcgaaaccagcctggccaacatggtgaaacccc

SEQ ID NO: 601347 - DNA, 281 bp, Homo sapiens
ctacatcagtggtgaccagttcgaaacctggggctggcgcctgccgttcctgctgtcgatcgtgctactggccatttccacctggatccgcatgagcatgcacgaatcgcctgcgttcgcgaaaatgaaggcccagggcaagatcagcaagtcgccgatccgtgagtcgttcacttcctggccaaacctgagagtggtgctcaccgcactgttcagcatcaacgccggccaagccgtgaccttttacacggcacagttctacgtgctgttcttcatgaccc

SEQ ID NO: 601348 - DNA, 885 bp, Homo sapiens
accaaaaaaaatagatgggggaaccctcctgggggaatccccttcgggcgtggctccgacgggccgctccaaattgggggcccccaaccgggaataagggaccagtggctggaatcctaaaaggggcgaacaaaaatgggccgcctcccccacgcgcgggaggaccaaagagttgctcccacaaagagggcttctcccaaagagagatagtagcgtctcgcgctcgaattctgggcgcgcgatatctctggctgcaatatataggcgagcgacacccgcccctcctgggtcgtgagaagtaaacgcgtacagacaatagggggcgacccatatatatgtgtgtgggccaaacactcacttccgtccccggtttggttggatatagcctgtagatcttttggtcgcctcaaacttctctgggagacgcctcacactccgggtgacccacgggtgtttccaaatatggtgcacgctcccgcagaatactccgcgccatttgtggagagatgtaaacacctttgttttcgatacaattggtggtatgcgctttgatatgaacacccacggagcctttattctattgctcctcacgggcgtatggatgaaccccatcatgggtgcaattaacaagggagttggtttcgcacccacgtggttctagaggtcgttaaggagagagaatgaaattgtttcagatggacgaagtgttatactccgcccgttcttgtactgaccagcgggttcgcatactccccaacatgtctaccgggggagttcatcatttcgtagagcacatcgacgaagatagccatggtccgccacacagcctcactattccccactttgtcccctgtggaacccaaaacaaaccttctaaacccgaca

SEQ ID NO: 601349 - DNA, 355 bp, Homo sapiens
atagcttcctagaaaatggtgacttccttgaactaagtcatatttgattcttagcacatgagtgacagctccgttgggctgcttgcctggactgttaattacctgctttttgctctatgagacataggaaattttgtgccccaccgtgttgaggttactcagaggatgtccgcactaccacgttcttctttgctcttttgagcaacttccacagattctttgagtcttggttatggagttcctaatagcactcctgcctgaggagacttttgagtattatacttactgagaaattcttgattgattcagacagggtgctactccagccttgggcgatagagtgagattccatctc

SEQ ID NO: 601350 - DNA, 839 bp, Homo sapiens
  misc_feature (702)..(702): n is a, c, g, or t
ggtgaagtatctgttttcatttttttcacgttataaataaaaatactatgctggccgggcgcggtggctcacacctgtaatcccagcactttgggaggccaatgtgggtggatcatgaggtcaggagttcaagaccagcctagccaagatggtgaaaccccgtctctagtaaagataacaaaaaattagctgggcttgatggcatgcgcctgtaatcccagctactcgggaggttgaggcaggagaatcgcttaaacccaggcggcagaggttgcagtgagccaagatcgcgccactgcactccagcctcagcaatagagtgagactgtctcaaaaagacacaacataacaacaaaaaaaccccttggcacaattttacaaaaattacccgggaaagaatttattttcccagggtggcccattttatattaggatatatcggccagaaagggcgactttacctctctggggtttcgcaccagagattcgccctctggggccaactggtttgagtagtcgctggcaagaacatattatcctataagggagcgccaactactacataacggagaataattcgcatcatagtgcaagaatttgtaagcacgagacacggggcgaatttaaacgcccgttgggggcatataatttctacacgccccttccaaatttgggggtcgaccaacaagggggcgtcctaangaaacgcacctattactactttattatgtaaatatttggccggcaccatcatattgtgtacggggagaagacatacggggggcacacaacaaccctcgctggttccacccacctggtggaatagagagcgacacaag

SEQ ID NO: 601351 - DNA, 995 bp, Homo sapiens
gaagaaagggaggccacaaaggccgggcgaggcagtatacaagccctgaggagatcgacgcgcagctgcaggctgagaagcagaaggccaggaagaagaggagcaaaaagaaggtggagatggggctgcaggtgaccccaaaaaggagaagaaatctctagactcagatgagagtgaggatgaagaagatgactaccagcaaaagcgcaaaggcgttgaagggctcatcgacatcgagaaccccaaccgggtggcacagacaaccaaaaaggtcacacaactggatctggacgggccaaaggagctttcgaggagagaacgagacagagattgagaagcagaaggcaaaagagcgttacatgaaaatgcacttggccgggaagacagagcaagccaaggctgacctggcccggctggcccatcatccggaacacagcgggacggacggctgcccggaacgacacggaacgagcgacaacggcacacgcaacaacgacgactgccacactcgtcacggaaaacgacactgcacgtcactctccctgactacgtaacctgcgacccgtggcacgcgccgatgcccggggactgcggccgcgctgccaaggacctctgcctgtgtctcgcccaccctgtgcccctggcgccgctgcacacgcccctccatggccaggagcccccccatggcctgcgggcgccctcctcttacctctcggcacaagaaactcgataggagcgaactgacgagagcacaccacgcacacacagcacgaaacagacacacaccgaccacgacaaacaactgccacacccccactcccatccccgaacaccctcccaacacgccacacgccgccacacacaccacaagaccccctacgctcagagacggacaacggacaacacccacacacaccgaacaccaccaccccgacaacaactcacaccacacgacgacgacgaccccgcgcgcacacggacaacatgacccccgg

SEQ ID NO: 601352 - DNA, 128 bp, Homo sapiens
aatcatgcgaacggactgatcccaacaccttttcaggacaagcttcgcaccctctcatgttcgctcacaatatataggactactaccatggggcactgcagaactcacgatcagtccgttcgcatctt

SEQ ID NO: 601353 - DNA, 495 bp, Homo sapiens
ggagagaactagtctcgagttttttttttttgtttgtggcactaccaaaacatgctttattgggataaaaagtgtgagtgtgttaaagggggttgagaacgaggggggcagggctagaaagggtgcaggtgtgtggaggtgtgggggcgggggttctacatagcgtgggcaccgtggcccgtggggggttggcacgtctttatcaggaacgggaggaaaacgagagaggctcagaaagttctccggagagggtgggcgagcccgcttgtggtataccgagacatccatgtgttgttttctccgaggggagtgtgcaagaagagaggcagccctcgcagaagacaccgtgaaagtatagagcagtggcgagcgcgcacagactgtgtcgtcccgcagtgtgacaccactctagagggggaaaaagccccagagagccccgcagagagaaagacagagacacagaggacacaccctctgtggggggcagcaccgaga

SEQ ID NO: 601354 - DNA, 391 bp, Homo sapiens
  misc_feature (32)..(32): n is a, c, g, or t
taggatccccggacgcatcaaaaagagatagngacctcagtgtcaaggtcacagccaaattctggaagatattcatgtgtgctgagtgagtgatggtgctcattgaaggtgtgctggccttgttgtggatgttccgatgggcttagtccgacatagagcaacagtgcattgatgagctggaggttgtagcgattcccaggttcattggataactgtaggttgctgcccagatcagacaggaaagggaatggtgatcgagttttaagataggaatccaaatcctttttgaactgaggtggcattactccagtgaaattggtgagaatccggggagcaatgttaatttcactcaacatgtccacctttagattaggagtgaatggtgtcgaag

SEQ ID NO: 601355 - DNA, 89 bp, Homo sapiens
aatgaactaggtaggaaggctacccggggcatttcatcacaggagctagggcaggggctttcagggggactaacgtctcttttctacaa

SEQ ID NO: 601356 - DNA, 392 bp, Homo sapiens
ccaagtgctttagttgggcaggacctgggagtcagcgaggaactggccccgagaacagagaaaaggttggcacggagaggagatgctgatggcatctggaaacaagtcttacagatggtctgcacccaaagggaataaggggagacatccccaactggaatgcgtcctggagcaactgcctgggaagaagtcctcgagtttcctcaaggtgggggacagaggtcaaggatgaggccgaactaaatggaaggtcgacagctacgcaagcgggctttaaggctggggattcttcatgctggcggctgtcagcaccactttcaggatccttggggcatggaggggatggagactcgtgaactgaaaggaccagatggacatgcttttcggcttca

SEQ ID NO: 601357 - DNA, 651 bp, Homo sapiens
ttaatccaaacaatacctaacgtaatcgcaactcttttaattgatctctcccttccggccaccaaaaggataacgacccgattacaccggttcactctaccttcaatacggcgaacttgatcacctttgatgacccatctgtaaagacagtcaagaaaacgatcgataaacgtcggcgggattcctagttatcatcatggctagatatatgcggtggagacaccgcacattgctcggacgcttcgaaaggcgtcaacacccccagtacgcgtgatgactttgatgatcattaagccgacggtagttactacttacttggtttttagggagaaggttgatactgagttccccctaaaaggcgcgcggacgtcggtaacttgatcgttatgcaccccgaagtctcgtgcgcctcaatgtacgaatgcgataccaagggagttactaattctccatgattctacgccttactataagtttacgtaatatccgtccgcgtgacatcccctacaaccgatggcaacgaccatacgggtgttacgccctcaaattcacctgaatgtaactaccacttgcctacgataaaagagacatggggacccgcgcgaagagccttccggaggacccaaagaagccctgtttcttacaacaaca

SEQ ID NO: 601358 - DNA, 333 bp, Homo sapiens
tttcacccaggaggcccaaatccgaggtgggatgtagaaagttgtaaaattaaaaaggggggttggggaaccgggtgttctttccccccctttggaagattgtcataaggtttttagcaggttccccctttttttcccccccccctttgttttttttttaatcaagagaaacttccaagttaatggggggggggggtttccccgggtgggaactcgttccccccccagcctttcttgaaaaagctggtttttttttttcctcccacctccccccctggtgtgaagggtttccccattctttccaaataaaaagtaatggctttggacctgcca

SEQ ID NO: 601359 - DNA, 175 bp, Homo sapiens
  misc_feature (168)..(168): n is a, c, g, or t
gtggcatgccacccatgcaatgtgcatccatttcattctttcttcaacgtctcagttctttggttcctccacaggttgtgtttgggcatgccagcaactcacgggcaacttcgcagcgtgcacatgttttcatcaaacagcaaggcagcacactcaggggcatcctcntcagcag

SEQ ID NO: 601360 - DNA, 842 bp, Homo sapiens
  misc_feature (438)..(438): n is a, c, g, or t
taacagtttgaaaaaaaaattttttctcaaaataatgcaaaaaacaaaggttgaggctactttgtggaaagtttccctccccttctttttcctcctttccctcctttttaaatgccggggaaaacaacagttaaaggaaggaaacttgcaatcccaaacaatgaacaatcttctaaagacaaaagggttggtgtccaaaagaactccaactattatttaatcccaatgactggtaaaaagtctccactgagtcagcgtattaaaaattattgcgattaatgtatgtggttcccacaggggggctccttcagtgccccaggggggcctgcttgagggaaatgaggactgaccgcatgtcgggaaacatttttgggcctgcttgtgccacaacgtgggggttaaatatcacacagccggggcccacccgttcccacctcnatgtgccttggggaccgatctcgtccaatggtcttttccaagggcgttctctcgtggtcgcccgtgattgttggcatttgtgttttctctggtagctgcttcgccactgtcttgcattaccattcttttagccccttagatggggcttgtgctttgcccctctgatgttctttggtttccccgagaatatgggagatcaagggcgtctccccaagagggtccccattgggttcttcaccaccaattaaggggaaataattcaggggctctgggctgaacgcgaccccctttgtgaaaactggctgcaataccttgtttgtgggaccccattctttccggggatgtattcccccttctattcgcccttcaaggcttctcgcccccccgggggtccccggccacac

SEQ ID NO: 601361 - DNA, 181 bp, Homo sapiens
gggcattacagttttactgggcctctcttttcacctcctaggagcctcggagttcttcggcttctccctccaccgtatccgacggcgtctgcggctccacctggccggcatccaccagcttccacggacttcacgtcattattggctcaactttcctcactatctgcttcgtccgagcgga

SEQ ID NO: 601362 - DNA, 706 bp, Homo sapiens
  misc_feature (607)..(608): n is a, c, g, or t
ataacctgcgagcgtcgaaaaaaatcagacattcttgattcttatgagtatgatgggatctacttttttaaaaactctcagatattatgatgtcacgagtcactagtatagactatctatctagtgagttgtattataagcgatgaaatactctaaaagctacccagtaactctcgggattaattttatgaaataaattctgagctgttgctcttgatatagtcagactcaagactgatccccagtggacaggcactagatatagaattctgggtagctaattgaactcttgtgacctgtgtaaaaacacatcaaatttattgagcacatgacacggcacacatactctcagaattgtatttcagttttgaagatttaaaaaaaatgtgtaaatatatattagaatcctctattttaaagtcaattgtgaaccagaagtactgtgattttggtgatttgatggctcacacctgtgatcccagtgctctgggaggctgaggtgggaagattctctgagcccaggagttcaaggctgcagtgaattctgatcgcaccactgaactccagcccgtatgacagagtgagaccctgtttctataacacacannacaacaacaaacaacgtgtcttactgactctggaatggagatcttatattagtggtgtatttttctgcacatgtgattagtactcgtgagacttctgt

SEQ ID NO: 601363 - DNA, 183 bp, Homo sapiens
agagaaaaacacgttcacacaaaatatagtacatgaatgtttatagcagcgttttaaaaagtagccagaaaagtggaaatgatccaaatgttcctcaactgaagagtgaatgtgttgtattcatacaatggaatattatttggccataagaaggaagtactaatatataccacaatatggata

SEQ ID NO: 601364 - DNA, 411 bp, Homo sapiens
agtctttgctccctgcatttcaccttttttgttgactttccttttttgttttcccccatttgtttgccaaaggggtgggactggcaacaaaacaaccgtggctgctttatttttcctttccacggggtattcaggcctgagtggtgactcacgggagcctggcccccttgcagctgtttgccccctcaacctttgaactggaactggtggctcccacaggggttttcgacaactgcagttgaatttcatggaaaagttggattcctttgccttacgcaaaaacccccgggctccatttgccaggggcttgcccctggtcctggcaaaaatgggggctgctgaaagtgcccttccaaatccttgggggcccttcagcgccccaggctttccaataaaaacccttttccccca

SEQ ID NO: 601365 - DNA, 210 bp, Homo sapiens
  misc_feature (6)..(6): n is a, c, g, or t
gctatnaattatccatgatgggaagtgggagtcgaacatgcctttcatacctccagcattaacatcaacacagaccttaaggctgataagaagcatttacaatctattctctctgaagtcttctacctggagacttcatctgcatgataaaactttggtctccacaacctcttacaacccaggcattcctttctatcgataatgtgatag

SEQ ID NO: 601366 - DNA, 292 bp, Homo sapiens
gtgtgtgtctgtctcccggtcagggccagctgataggtctagagctggtgtgtgtctgtctccaggtcaggaccagctgataggtctagagctggtgtgtgtctgtctcccggtcagggccagctgataggtctagagctggtgagtgtctgtctccaggtcagggccagctgataggtctagagctggtgtgtgtctgtctcccggtcagggccagttgataggtctagagctggtgtgtgtctgtctcccggtcaaggtcgacgcggccgcgaatttagtagtagtaggc

SEQ ID NO: 601367 - DNA, 109 bp, Homo sapiens
cagagtccaaacagtgcccagagtccaaacagtgccctgagtccgcgatggagagagaaaaggaacagttccgtaggctctttattgggggcttaagctttgaacccac

SEQ ID NO: 601368 - DNA, 1054 bp, Homo sapiens
cgcatgtacacagtgtggcctttcctcgagcgccagtcgcgaacgcggtgtctccgcctgttttctggttctatgttcgctgcctgggtaatttccgcagggtaccgcgctggattctgctttggagaggttcgcttcttagggcgatctccgcgggtttcagccatttagccgcgcacacatgacggtgggccagaccgagccagagtctccgcgcatttggattccagaattggggcgcttccgcaagtcggccggttctccatggcacttacagcgtttttgccaagcaacctggaatgtggtgtccgtctggtgactttgatgagttcaagaagatcaatgccagtactcccaacaaacagaaagggaagagaagcgagtcctcggtctggttcttctgcgaggggagaattctggtctccatgcacactagagggacctcctccccaagatactggtattgctcgagttccccttgctggagcttcccgggggccccgggtatccgcccgggcttcttggccagaggaatccccacttggggttccccatgcccccaggctcctgccaggacttgctgggcccagtccctggggttggcgggcccatccccaccaggtgatgacccccccaggaagaggtactgttccaacccctccaacttctgcccccagcccagtattccggggctcccaccccgttcccccctggccctgggggtcctcccccaccctattgggccgaggagcacccccctcccggcactgatgggcccccctccctggtattgagaccctccctattgggtccccccactggggatcccccctggaagagggactcccatgggcatgccccctccgggatgcggcctcctccccctgggatgcgagggccccctcccccgggaatgcgcccccccaggccctagactcatcttggccctcctcagctccctgcctgtttcccctaaggctcctacatagctccttttatctcccttgtggcctatgaaactggtttataataaacttcttaagagaaccattta

SEQ ID NO: 601369 - DNA, 1481 bp, Homo sapiens
  misc_feature (1480)..(1481): n is a, c, g, or t
tccagttcccaagtcattttatcccaaaattttgtggttggttccctgattcattaaatactatacaaaacaatgtaaaatattggtctaccatttttcttctcaccccgtgtttccccccactcgggggacaacccccggggcaacctcacttaaggggtaaaaggggttctccctaccagattgggtccagcaaagtgaggcgtgagtgtgacaatagtctccctttgatctcacttttcaaaggaccctcagctgtgagggtgaggaaagcctctctgtgggactcgggaggttacataggtaagggaaatgtggatatagggttattattattttattttgggggaaaaagaacccgggcccgcgggggggaagcccttaccccaaaagaaagagggggtgttctaaacagtgtggtccacgggggtccactttctttggagccctctaaacaaggggcgccacttttaattctcaaagaacataacaaagctgtgtgacaagatttgtgtctccaattcccactgtggagaccacccactatataccatatccccccccctatctgtagtgaggcgactcatctaaaagccgccccagagaaaagttattgagtaccccgctggagatcagaggaacaatgaagtactggacaagaacaagcgcaccccctctcaaaaaatagtgacgagggcacccaccgaaacacacaaattggagcgagggggggacaacatctacaccccaacaaagagggggaaggggcgcgggtacgccaacaaaaaagagctagcaactaccaatagtgagtctgcaccgcacgaaaaaaggagcctccccagcatggatgagtcaatacactaagcgccgagtgagagccaccccagggaggttataaacgacgcccgcagcaaccttcttttataaggggggcccaaacagccgaggacgaaccaacccgtatcaacagacagacatcatgtgcgggggagaaaaaatagaaatgaccacccccaggtagagtgggggagggaaagacgacgaccaaatagaaagctaggacaccaagaacacgcgtcggtgcgagacaaacaagacgacccactaggcgacacacaggcggcgcgagggagaataccacaacactcgatgaaagaccaccagcacagaagaccccgtagaaaaacaagccgctgggcgccctagggggcactactaccacaggagcagaggagtaagaaaaacgacaaaatatatatagtcggagagacaaccaccattcccgcggtgttaagaaacatcaatggcgaggagccggaccagacaacgaacagttgggacgccccccctcactagaataagaagatacagcaccacctttagaaaagacgacataacttgtctcaacacaggcatccacgatggttaatagactgtccattctattattactattcacttctgctcctcatatagnn

SEQ ID NO: 601370 - DNA, 93 bp, Homo sapiens
ggatttgctggtgcagtacaactaggcttaatagggctcgaattcgagctcgaattcgagagcaacagagcaagaccaagtcaccaaaaaaaa

SEQ ID NO: 601371 - DNA, 756 bp, Homo sapiens
ggtggttgctcttccgttggccccgtggcttcagctcatctttggcaggaaggcgaggcttccgcccggctacaggggatgtccagctcgccgctgtccaagaaacgtcgcgtgtccgggcctgatccaaagccgggttctaacgtgctcccctagccagtccgtgttgtcctgaagtgccctcggttgccaaccaacgagaatgggcaagaactggcagtgaagcagacatagacgagggcctttactcccggcagctgtatgtgtggggcatgaggcaatgaagcggctccagacatccagtgtcctggtatcaggcctgcgggggcctgggcgtggagatccgctaacgaacatcatccttggttgggggtcaagggcttgttacccctacatgaccatgggcaacttgcccagtggggcttgatctttcctcccagttctaacctggcgggcatggacggacatctggtaaaaaacccggggccgaggtatcacatgccccgcctcgctgaggctcaacaagctaattgtgccctgtccacgtgcgtacactggaccccctctgttgaggacttccttagtggtttccaggtggttggttgctcaccaaatcccccctggaggacccagctgcgagtgggtgagttcttgtgacaaccgttgggattcaagcttggtggtggcagacactgcggggcctgtagggcagctcttctgtgcacttgggaaggactgtcctccagattccatggt

SEQ ID NO: 601372 - DNA, 386 bp, Homo sapiens
gaaatatggggaaactgcaaattaacaggctacatacatctaatatgaacaggctgtaagatattcccttactttgggggacctggggattgcaacggaaagatttgttctggtattcaaccaaaatagacagaatcgggaattctatttttaggaagtaaatacttttttgaatctattggggagaaactgattcgttttcagatgaagactatatagatatatccctgtcagagctactgacttcatcttttattgagagccaaaccaggtcttatctaaatgacaaaaaatattacagctaacaaaagcaaacgggggtgtttttaccactggaaaccccaacttttaaggtgttgttgtggagaggctattccccgccggaa

SEQ ID NO: 601373 - DNA, 895 bp, Homo sapiens
  misc_feature (580)..(580): n is a, c, g, or t
ctgaccttcttgttctgaggccaggccaccaaagacatgccgacgacaaggactagatgagcagtaaagagccagctcctcagactatcgtgtccctgctgggagtaccaatcgaagccagttacctggctgaacgtgacgtccgcgaatcccctgccacgcatccaggtacccatccgtgcgtttgttagtccgggttgctttggacaccgaatgtgtgactagctcccgtccttggtggaccgatggcgtggctggagctgcagctagctagacagttgaaagtgcacatcctgacatccgtgagcaggactgtccgcgtgtcgtgctccgatgcccagctgtgtgaaagttgccacatgagacacggcaatgtcgtgggtcgcgaccaagagcaacctagtcagtcgatgctggcagagaggaccggaggatggattactgcactagatcgaggccgccaagagagtgtggcacaacacctggagacaaaggagacttccatgtcaagttcacaggcgatccaatgatatccttacaagacctccagtgcagtgctcaacagggctagaaagtccangaacatgtatggtgggacgcccagaagcatccacatgccaagctcgcgcacaatccttcgcatgcgtactctgtgtgttcgggcatcatacccttggttccccccaaaacacacaccaagagggtagtgggtgaagctagggtcagctagacttgcatcaacttacagattgccgtctacgctagtagtgggcgagaacccggctgcaggagtatctagtctctcggaaagcttgtctgtggacgctggggtccctaggggtggaacttggatgcatcccactcgagcctcgtatagcgcggtcagcaatgtaga

SEQ ID NO: 601374 - DNA, 267 bp, Homo sapiens
  misc_feature (40)..(40): n is a, c, g, or t
  misc_feature (251)..(251): n is a, c, g, or t
gtataagctgcacgatgtctcagctatttgggtaccaagntgggagaattgcttgagcctgggaggtcaaggctgcagtgagttgtgactgccccactacactccagcctgggtgacagagcaataacctgtctcagaaaaaggaggtacattttatgggtatgtcaaacacactctgaataaacactagtatttaaagcaaacaaaaaacctttgggaaaattacaattcagttattattacctcttagntttggccaacaattga

SEQ ID NO: 601375 - DNA, 235 bp, Homo sapiens
  misc_feature (221)..(221): n is a, c, g, or t
aaagaagggaaaagagagttatctcttttgcaggagcacatttcaatcacttatcactctgggttagcataaatcagataaactatcctgtgggttgtgcaaaaagcaaaacaaaacaaaaaaacacaacttgtaaaaaaaacagagcaagataactgaagtagacaaactctgcacagaagtaactaatgggcagggaggagaaaaattattactgtgtnttaatttttgtatt

SEQ ID NO: 601376 - DNA, 863 bp, Homo sapiens
gacctccagcctgtggaagctttctttccgctcctcagcccctgacttgtaaactgtgatgccatgcagtctggagccgtcgggggacgcgactcggtctcatagcggaaaacgaacttggttccagtcgtgtggtttctcccataccctgaccaaggtccacctctgccaggatcgcaggatgattggtgcgaagacccatcgtcttatgcattgaccattgaccatcagcaaagcctggtggtcttgttctcatagtcactcgagaagaatatttatgtcatggaacggtacgattttttaaacaaagggattggaatcatgtctttgtaggaatgtgtgtgtgtgaagtcctcagctgtaaggtgctattcgagtcctgtgaccccttattgtggaatgtcttcattactgtgctctgtctcgtgacttcctgtaggtaaaccgtctacttggtgtggtgtcaccttgagctgtgcacataggacaccagttttgattaacgtaacaggcagtgtttatctctagctttttcaagccaggtattgagcagtctcttggcaacgggctgagaaaacaactgtcctgtcaggggtggctatggcataagggagaagtatccatgtacctattcttaactgctaggagtgtcttgggtccctggggcccctattttccccaagcaacaactggagggagagggttctcaccaaggccgggagagggccgggggggtcagctggacaaaacacagaaaccatcggggggggacaccacgctaagaataacaaaacctaacaaaagatacagactagcgcataaaaaacccttctctcgtcatcattatctagcgttactcacca

SEQ ID NO: 601377 - DNA, 106 bp, Homo sapiens
tggagtataaaaacaaaataatagctaagtactcctagggatttggattcagttattatgcagtgcaaccggggcatggtgatttttctatcttcggggtcttggc

SEQ ID NO: 601378 - DNA, 217 bp, Homo sapiens
agaaattccagcagcatcagccgttgctggtaagtctggagtcgctgggccgtcataccatccagatgctgcacgacgtgctggacgcgttcgcgcggatggacattgacgaagcggtacgtatttatcgtgaagataaaaaagtcgatcaggaatacgaaggtattgttcgtcaactgatgacctacatgatggaagattcgcgtaccattccgag

SEQ ID NO: 601379 - DNA, 317 bp, Homo sapiens
gtgtttgtcttgtgtgatggggtggcagaatgattgtagccgcctacagtcgtatctttctgcagcatccgttctcagctcctcacatggggcaggtagcgcactccgaggtcaactccatgtcagaggtgagggcactcaaactagccctcctgctgagtgttcagcaaccttcaccattatatccaaactgcatcaatgaatctcaagtgcggggggacatcggcaggtcaatggtaattgctgcaggtcgttgggagtcacacagataaacttggtctatcaggtattgcatcagcgcaggggatccctctaga

SEQ ID NO: 601380 - DNA, 148 bp, Homo sapiens
ctgagtgatctacagatctattctgcaccacagcaggtgcactgctacatccgtctgtgagtaggtgagagcagggaagtagactttgactcaacgggacggtgctcacagtggactctagcacaggctttgcattagcagcccaaaa

SEQ ID NO: 601381 - DNA, 1086 bp, Homo sapiens
ggagagagagagagagagagagagagagagagagagagaggtccggctattagcctactgtggctagtcacccccgtgtgtcccggccttctcgtggctgggagcccgccgacaccgcgggagagacggggagggtcgcgcctagtggctgtctctgctgtggagtgacgcctggacctctaacgacaagggtagttagtgtgaatactacaaatagtgtattttcctggtatgattcaagcgaagcagcaatgtggaaggactatcacctattgtgatcttctttctacgacgggcagctataacaatcatcgctcgtgcatcatgcttttcacctagtctgtcgatgacctctaagtgtactttcgggcctttttcaccaggaggtagtcgatcgtcgtgtttccaagaaagaacatactactcgtaggaagagagctactccctccctcgtgtttagtctctctctcttcgtccttctttttattctatcgatggtggatgcttacgtcctctctcccccgatagtgtgctcctgcttcattcctcagacctctctactccgagctcttttagtcggcagaacgtgagctgttggtggcgatcttcatggtgctgtctctaactttctcgttgtgcccctggatacttccatatctccttctcctgatactttacgacgctaggtgcttacatactcttcttatagtggtatttgggtctacgtactccaatactcttcgtatagcgccaacaaggagaaaagcagtaatgttcatgaggaatggtagctgcgttgtagacatcgtgcccagtgttgactcaccgtgtaggacgagcgattcatcagcccacttttgactattgtggtgcagtgtggacatctcgtgggggcgtggcgccatgaagcgcgctttggctggactcccggtagttttacgggctccttctgcgttgcaccaactcagttatttaccctggggaagtctgatgtgactctctttccttcagtggcattcttcttccccaattttggccgcgtgcctggggggcatccaaggtcctctgctggaaccttccttgttt

SEQ ID NO: 601382 - DNA, 237 bp, Homo sapiens
  misc_feature (80)..(80): n is a, c, g, or t
  misc_feature (199)..(199): n is a, c, g, or t
gagcaccccagcccataacacagaactcgtccccctacccccctcagcaagccggagaggctagcccaagtaatcataanaacagccgcccgagagcagccccagtagcagccccatggccgggcggaacacctacatcgacaacctcatgacagacgagacctgccaggacgcagccattgcgggctgcaaggcctcncccttcgtctgggccgccgtccccggagaaacgctcgt

SEQ ID NO: 601383 - DNA, 871 bp, Homo sapiens
  misc_feature (148)..(148): n is a, c, g, or t
catttttcaacaaattcagttttaagatctctggtttagcgggagagattttatttctagctgaaccagttctatagaaattattttattaggaaatttgtctttggaacaaagtggcagctataaaattcactttttgtctaagccntcagaagatatgaggaaagccgtgtaaaactctagtgggggcagatagtttaacttggtagacctatatgctctcgtaagactatgtcatttaaacgtgttggtttattcacgctgtgtcttcagttctctaagaatgattttcgtttctaccagtgattgcaccgagcttatgagcatgggtgctgacacatttctatagacacgtggttcatgcagcgaggtttgaaataaatcgctctatacaaggtgtctagaatcaatttgaaaagcgtaaaaagtggaaatttccttttatgtagaccgtaggaaccaggaacttatatgcatttttgactaagtagtaattttacagctgaattgtaaatgtttcttacagtgagttttattacatgagaatgcttcaccttgaattgggaaacaataatagtctggactaaggtcttggtgactaaaggcattggctataagttatgtttagaagaaacgaacagatgaaaacctcagagaaggcatgtggacttagtaaggatattgtctagtaacaaatcgtacttgagatactgttcaaatagtctaatttctcatttaggggggtgatattttttcatgtctacgatggtgtctcacgctatctgccaggtctggagtgcagtggcgcgaactcgagtcactgcagagctccggctcctgggttcaagcaatgctccttcctcaggctccc

SEQ ID NO: 601384 - DNA, 472 bp, Homo sapiens
ccacattgtactagagtttgacaaacatagggcaactcaggtgagactaaaatagcacttctactggcttccactccatatctcattcatgaatagcaaaagtagtactacaggcacattagttctgttcgggcagatttggagcacctctacaaccttaccttaacataggtaattaatcgcaggtaaggtagagtctcaccttcaataccccacactccagataaaactaccagagaggagggaatggttaggccgttacaaccaataagcaccaaaaataatgataatataaagatatcataggacaatacatctatatgataaataactgtgctttaaaaactgtcatcacagggaaagcaattacaagatcatattcacatcagaaagtaaacattgtatatccccaaaaacacctcccatatctaaggacgcaacttggctaccgttcggctagatcaaccaaagt

SEQ ID NO: 601385 - DNA, 212 bp, Homo sapiens
gtatgttatagaccccgcctattcctaactcactgatggctgtagaagtgtacccaagattgatgtagaggactctatctcatttctgtgaagcaatctcactgcgtggatctcagaatatgacacttacctcccctgactacaagctcgtagaaataacagccttatacaaaaatggtcagggatgagtccatcatacgcccaggtatgca

SEQ ID NO: 601386 - DNA, 648 bp, Homo sapiens
cccgggccccccaaaggcccccccccccagggccggggcgcctgtgggccctattccagaaaaagcccctgtgtgtgggggggggccccccccccccccccccctcccccccctcggggggctgtttaaaaaaagtggcctttgcaagcgaggggggggtttacccctctccgtgtgcctctccttggcgcacgccccccccccacccggggccagggggccaaaaaaaagcgcccttcggggttggcccaccggccctcccccgtgccttaggtttcccttaattttgggtggggggggcccccctctttcccggacggggccgggccggggggtggggaaccccaccaaaagggtggggtggggccttcaatggggccccccctctgggcccccagggggacccccccccgggggggcaacccccccagccccgttttgttaggggccccccccttccccccccaaggccccccggggccattgggggggctggggggggttgggcccttcccccccccgggggggggtggggcccccccccccccccttttctcctttccccggggggtttttttccccatttttaaagtggtttttaaaaagggaaaaaaaggccttggggtttttttaaaaaaggggccccca

SEQ ID NO: 601387 - DNA, 160 bp, Homo sapiens
  misc_feature (86)..(86): n is a, c, g, or t
  misc_feature (125)..(125): n is a, c, g, or t
ccctctcacaaccaacacacacatgacctgtcccctggcacccccaaatttaagagtggattgcaaatcttttggagaccatggcnctgctacatgtagaaaaacctgttctgctattcctgggnccacaataaacccagaaattatgttttgagttact

SEQ ID NO: 601388 - DNA, 324 bp, Homo sapiens
atggaagctgataagaagttcagacgctacgtgttgcttatgttctgctttgttggcagcctgtctctttcagagttcctaaacacgatattcccatgggcttctaattcccagctgtagtgctccaaagccatgctgtgtatcagaatgccatcgggaataacttctgcactctaggactgaggttggttcaagcatctggatgatgtcgaaagtccacgttgtgtgttggcctaccctgaaggaccctatctagttctagcctttaaattccttctgtcaccaaatctagagttacatggcatctgtacaagctaggtagct

SEQ ID NO: 601389 - DNA, 504 bp, Homo sapiens
  misc_feature (278)..(278): n is a, c, g, or t
  misc_feature (284)..(284): n is a, c, g, or t
ggccattgttctgtgatggaataatagcaattggtgtagtcacgaggagtttgcttaattcagagtgtcaatcagtttcccatttatactaatttcgtgggctaatacatctgattagtggttgtgaggagtgcagaagtatggtaagcttaacctagaatttccttgttactgccagtaccaaagcgattttatacatagagcacaagtgactgcagtccattatctcaaattgcatgcttaagttcttataaattcattacagtgctaccccaaanttgtgnttcgcatctcagaaggatctcacttgttaacgtgctttgtcaacccacctggtgttacccattggttactccattgaggggagacagcgctagttatcattggactcaatcaacgtatggactgaacaagtatacggagataatttatacagggggtagtactgggtagggggtagggatgacatatttggacatcgtgtttcctgggatgaaatttaac

SEQ ID NO: 601390 - DNA, 328 bp, Homo sapiens
catctacgttgcacttggacgttatcgcgtgtgcggaaccattctctcctccaccgtatacctgattctccccacgttgactgactcctcgttgtcgttcaaatcttagcttgagatgatacttccccagaaggcttggtccccccgaacggggtaaggttctcctgatgtgtgtagcatactatagctcttttgtagcattcaacagatattggttcattctgtatttattgagtgactgctctgggctgggcactgggctagggctgagtatttcataaatgagagctgtggtccctggcgcccatggtacttaccagtctaagaa

SEQ ID NO: 601391 - DNA, 162 bp, Homo sapiens
atcttgcggcatgcggctgtatacctaccgcgatggcggggtatatggtgctgtatacctaccgcgaaggaggggtatatggctctgaactacctgccatgaaggacgggttatatggagctgaatacctaccatgaagagcggggtatactggtgctgtat

SEQ ID NO: 601392 - DNA, 172 bp, Homo sapiens
gcctgcgtgtgggcgtatgaactcctgggccaagcattccgctaggcctcagacactgcacccagacagatttagtcatatcttgccaattttcaacttcatcgcaactttctgcatgttgatgcccgaagaaaatttcactgccgaccatccattccttttctttattcgg

SEQ ID NO: 601393 - DNA, 290 bp, Homo sapiens
ctcctgggctcacgagcatcctcctccctctgcctcccaaggtcactgggattacaggcatgagccaatgtggctcagctccatgctatccacagtctaatatctgacagcttcttttctggtgggcttcttcagtcatttgagttatatttcacattcagtattaaaaatctcatgccatcagggttgaagcaggattcaaaatcaaataatcatcatgtcaccagtagtttcactcatcagtgccaaggcactcaagcaaggccccttctccagtcaggccagtctgg

SEQ ID NO: 601394 - DNA, 133 bp, Homo sapiens
tggggcagtagtttctgtgcgtctagacaaaaattccctgtaaatcaaagtggtgggacatcccataacacctacatcatttcccatccggtcatcggcccatcggtctacagatactttcattgaccaaaat

SEQ ID NO: 601395 - DNA, 338 bp, Homo sapiens
  misc_feature (71)..(71): n is a, c, g, or t
tgccaccgtacctaggtgttaccggacctcaagtgagtctaggtatgtccgggttcggcagtatcttctgngttaagttatttttttaaaattcttcttaaattttaatttaaaaaaatttctcatccaagcttaaaccaacagggaaaattgcaagggaatcatggtccgggtaaaatactaaacttacttaagtgaaaaggctcaaataaagataaagtttggtttgacaggcgtgagtcaccaggccgggccttaattttggtattttaagtagaaacccggtctctactaaaatacaaaaaatcagccaggcaggggggcatcgataaacaccg

SEQ ID NO: 601396 - DNA, 270 bp, Homo sapiens
cccagatcgttagcctctgatggtttacagctcgcatttcgtatgaaatcctccacgaacttgctcagttgtccataatacgtggtgtcctacagcctgcgcgtgattccagagccagtcctgtcctcagggacagtattgactttccatatcagtgcctggtacatgtcccccgcgtcacactccctgtcagtgagcactaggtctaaccgtaccccccaggcaaagtccctcacacacacatccagccttgatctaatgctcatggtg

SEQ ID NO: 601397 - DNA, 729 bp, Homo sapiens
agagccgtaagcacttggggtcgtggtattcccagtgtttgctgtgtcctagttgaccctttctaaacactgtcctttggaaagtttgaatatatccgcattctattgaagccttgaaacctaaaaattagagtcttatcgtcatctaagtgcttcatgctacatcttaatctcccaaaaagcagtatctaagtcacatacagtgatgtcttgggcatttgctgagccagtggagaacctcgtgaaacggaagaatcgcgtgctttgtctcaagcaagatcgggttctgggatgtctttaaggtctctcctgtgccttgctcctgatgctgggacccctttgatgatcagagggctctagaataatggatggtcttggatgcatggataaatagggacagggacgagttgaacttgggagcctttcttacaaccttgatgggattttttccccccaagtttccttctccaattgaatatgccacattaatgctggtgggatttcaatgaggtggccatgaccgagtgtagtggttcggtcgtcgtataatttgcgtaagcttccgcttgagaggactaaagtggtacatggatacgaactattttaccagggtcggggttctttgggcacacagtattaagttgcctggtaaatatgcttgtgaagggatcagttggagacgaataggggaaacaccttgtatggttggagccttccataagctaattg

SEQ ID NO: 601398 - DNA, 396 bp, Homo sapiens
agtgaattcagaatatttggtggaccatgtgtaaacagaagtgtgtcatctaggctttgctgttccatttacagagcataggcagggtagatttagcatggttgttagacgccctaagattttcagaatggtaaatgagcactggcttcaacttaagtcaccagtggcattagttcctaacaagagagtcagcctggcccaagctttggcactgatttctcctctgcagctgtaaaagtcagagatggtaacatcttctaatagatggttgtttcatccacattgaacctctgttgtttggtgtagccaccttcatcaatgtctcagctaagtcttctggacaccttgcggcagcttagcttctacacacagcattcggtgcttcaccttgcactt

SEQ ID NO: 601399 - DNA, 862 bp, Homo sapiens
  misc_feature (2)..(2): n is a, c, g, or t
  misc_feature (374)..(374): n is a, c, g, or t
  misc_feature (452)..(452): n is a, c, g, or t
  misc_feature (479)..(479): n is a, c, g, or t
  misc_feature (499)..(499): n is a, c, g, or t
  misc_feature (507)..(507): n is a, c, g, or t
  misc_feature (511)..(511): n is a, c, g, or t
  misc_feature (525)..(525): n is a, c, g, or t
  misc_feature (532)..(532): n is a, c, g, or t
  misc_feature (546)..(546): n is a, c, g, or t
  misc_feature (557)..(557): n is a, c, g, or t
  misc_feature (563)..(563): n is a, c, g, or t
  misc_feature (593)..(593): n is a, c, g, or t
  misc_feature (597)..(597): n is a, c, g, or t
  misc_feature (689)..(689): n is a, c, g, or t
  misc_feature (693)..(693): n is a, c, g, or t
  misc_feature (855)..(855): n is a, c, g, or t
tntatttatttattttttgagaagagttttgctctttcaccgaggctggagtgaagtggcgtgatctcggcttactgcaacctccatgccctcccccgcctgccgcttcccccgggttcaagccattctcctgcttcggcctcccgagtagctgggactataggcacctgccatcacacctgcctaatttctgtattttttgcagagacgaggtttcaccatgttggccaggctgttcttgaactcctgacctcaggtgacccactcgcctcggccacccaaagtgctgggattataggtgtgagccgccgtgcctggccttttttttttaaatgaagccttgctgtgtcgcccaggctggagtgcagcggtgnaacctccgacctcaggtgatgtgcccaccttggcctcccaaagtgctgggattacaggtgtgagccactccgcctggntgacattttccttttttttttttttgngagggggtttcattgttgtngttcaggngggngtgcaatggcacgntcttggntcaccacaacctcngtctcccgggntcaagnaatcctcctgcctgagcctcccaagtagcngggnttaaggcgatgcgccaccacacctggctaagtttgtatttttagtatttttgtatttttagtagagacagagtttctccatgttggtcaggntggnctcaaactcccgacctcaggtgatctgcccacctcggcctcccaaagtgctgggattacaggtgtgagccactgtgcccagctgagattttattaaaaggaaatttttttttctttttttataaacatgctgttgttattttctaacaggactgtcattccntttttat

SEQ ID NO: 601400 - DNA, 281 bp, Homo sapiens
  misc_feature (24)..(24): n is a, c, g, or t
  misc_feature (26)..(26): n is a, c, g, or t
  misc_feature (90)..(90): n is a, c, g, or t
  misc_feature (122)..(122): n is a, c, g, or t
  misc_feature (217)..(217): n is a, c, g, or t
cctatgcagggtgggccagtgagnanttgaaatatgggaggtctagccccttctcagggcagggctgtttctcaatctttggcccctagnctggagtgcatgattactggcatgattactgnagcctcaacctcccaggcttcaagcgatcctcccaacctaagccctccagaatagttggcactacaaggcaggaatcaccatgccaagctacctngtatatttttttgtagagatggggggtctcaactaatgttgcccaaggctgggttttcgaggtt

SEQ ID NO: 601401 - DNA, 94 bp, Homo sapiens
ggcaccatggcggcttaaatgtattctctggtaaatatactcctagtaatttaagattgtgtttttaaacggggaatacaagatggtatagtgc

SEQ ID NO: 601402 - DNA, 387 bp, Homo sapiens
  misc_feature (114)..(114): n is a, c, g, or t
ccccaaatttttttttaacaaaaaaaacaaaaccctttttttttttagaggggcccccctatgggccccccccccccaaagattttttacatggaacccgggctcagtgaaaantatttttcccccccaaaatttgtctttgggctgtctcaagggacaaaattattaaggaatcaagcgggttaaacagttcaaggctttttatgttgttaatgaccctccaaaaaacccgttaaaacatgaaatacaccagcaggttcccaatgcgaacaggtagttcgcatttatgtaaaccattcaaaaaataaagttttgaatttgttggaccattcaaaggacttgagagcatttttttgtaacttaaaaaaataaaaccccctgtcccta

SEQ ID NO: 601403 - DNA, 111 bp, Homo sapiens
acctaacatgatagaatcgagctctgtaccctatgagcctgatttttttttccaaatttttttcttttttcattctttttttttctggctattgaaacttctaaaactagg

SEQ ID NO: 601404 - DNA, 334 bp, Homo sapiens
ccccaactagcctgatcaaacgaggtaaagatgggaagtgcagccgtattttctcagcttttcaccatacaggagtttcacgctcttcccacttctctggtcactttttctgatagtcctttgtgtgacagctacaatgttttctatgatgtgctcgatttgcttgccaacgtgaccaatgacgttatgcactgccataaccacttttataaatgtttacagactgttccacctatacagtcattgatctctcttgatacattcttggacagaaggtttacagatactggaactttctttcttctgatagaaatgtctcccaatgagtgagggt

SEQ ID NO: 601405 - DNA, 376 bp, Homo sapiens
taccctcacactgggactcgtgtggcctgtgtggtgcacctgctggtggcctccctcgttttgaatggcttcctcagcacctgggacccaccagagaccagcttctagcagcggaggacggccgttcagctgtgacgaaggtcctgaagcacaggattaggactgaagcgatgatgtccccttccctacttccccttggggcatccactgtgctcaggtcacagacaaagatctgtgggtaggtctggcttgcggcgcgagagatcgtactctctggtcatagcccgaactcgtattggacaagtcccaaaggaggcttacaactcctgcatcacaagaaaaaggaagccactgccagctggggggatctgcagct

SEQ ID NO: 601406 - DNA, 277 bp, Homo sapiens
tgtacattcgtgtctttcgtacaggtacgaatttgaagtagatagaaaccgagctggattactccgtgtctgaactcagatcactgtacgactttatatcgttgcacaaacgaacctttaatagcggctgcaccatcgggatgtcctgatccatcatctaggtcgttaaccctattgttgatatggactctagaataggattgcagctgttatccctagggtaacttgtgccgttggatcggttattggatcaattgagtatatgctagttcgcttt

SEQ ID NO: 601407 - DNA, 210 bp, Homo sapiens
cggattgtcacgaacccgaggcgaaatgagtaccatgccggcgcagtggccggactctctgcggctgtgaggctggcgatggcgcctcccatggagtgtgccagaaggcagcaaggcagccccatgtagtctttctgcatggaatccacatgctgccacacatccctgacgaacacgtggacgtcagacactaccatcctctccccttcg

SEQ ID NO: 601408 - DNA, 670 bp, Homo sapiens
ggtgaagagaaaaaggcataggggggagggggaaaaaaaaggaaaaaaagggtaaagcggggtgaaaggaataaagaaagcaaaaaaaaaaaaaggggggtggaaataaaaaagagaaaagagggcaaaaaagaaggagagagatgggggggggagaagatcaaaagagaagagaatgagcgagaagagggaagcaaagaatgttaagaggaaaaaaaaaagggaagaagagagagaaagaggaaaaagcaatgaaagaagaaagaaggagttggagaaagaaacgagaagggagaaaggaaaatagaggggggggaaaggagaaagtgagaaagaggggaaaaaagaagaagaagaagaagagatggaggagaggggggaagaaaagaaaggaaggaggaagaaagaggagaagtaagagaagacatagaagaggaataagagaataaagaagaaaaaaggaagaaaagagaaagagaaaggatgagtgagtcaagagaaaaagagggaaggacaagagaggtaagagtaaaagaagagaaagaagagaagaaggggcggaaggagtagaaaaaacaaagaaaaggggggggaagagaagagatagaatgataaaaaggtctcagtatctctctctctctctctctctcacactctacactctctctac

SEQ ID NO: 601409 - DNA, 205 bp, Homo sapiens
  misc_feature (4)..(5): n is a, c, g, or t
  misc_feature (43)..(43): n is a, c, g, or t
gggnnacatgtcacacgctcacacaagccaggccgcagtgccntcggagagctagcaggttacattcaggcagtatggccctcttcccaccaaaacccagagaaccgcaaatatggcatcaccaggaaagacaggggaaagccaattcactgttgacccagggacagagaacctttggccccattgatgtcccaggccaccagca

SEQ ID NO: 601410 - DNA, 1679 bp, Homo sapiens
  misc_feature (1)..(1): n is a, c, g, or t
  misc_feature (1497)..(1497): n is a, c, g, or t
nctcgtccgagcaggctcgacgttgcgcggggggcactcgtgtggtgggctgccgtgctgggggggtagccgacagagtgggccgggccttagtgtgaggaggcagtgtcggtggtgttggtgcgaaccgctctggttgttgtgtctcggcggccgtcgctcgcagctagctcgtaggtcgtggtatctagcggtgtgtgtccgcgcgccggttgttgtggttcgagcgcgcacgagggtgtgttggctggccgcgcgcgagaggagaggcgtgggtcgcctgctgggaggagttgtggaagtgggggggccccccctgaaaaatgtgtttgaacacgcagtggccaccgaggaagtgttgcccgacgagacccacaacacactgaggggtggcccccgccttgaaagcccgctctggtcgatattccccccaatagtttgcacccccgtttgtgggggcccccccacaaaataatgtgggccccccgcctgggtcaaatatcattttgtcgctgggaggggaagaataatcccccttttctccgcccatggtgtgaccgcaaggccgtgtttttctgtgggttaacgccgacaggaagggtatgttcctccccccgcagacatagggccggcttgcgggcgttttggttggaagagaccgctcaagcccgcaacacaccacaaggaaattggggttgtaaaaaaaatgtggttggaggccgcccttgtgggccgccctttaggcggtatgaaaagaacacagatgggggcgtcgtgggcgtgcggccgcctgcgtgtgggggtgagccccccacttgtgggtggagaagacccgtgtggggttgtgtttccccccagaagagagattggtggcccaagatgtggccgtggggccgccacatgtgggggcgacgccacacgttcgcgtgtggagccgcccagagcgctcagagcactcccacgagtgttttgtggggaatttggggtgcccccccccactgggggctttatcaaagagagttgtgggcacgtgcacagactatgacgcacgcgcctcgtcccacactggtgtggggtgccccctgtgtgtggggagaacacctgtggccccacacaggtacacacagaagaaggcctgtgtgtggacacatgtcgtgagagcacacacacgccacacacagccacatttgtcttgagagcgaccctgggcggtctgcgcctggagccacacacaaggtgtgtgagaccgtgaagtgtaatggccacacagcggggccctgttggttcacctggtacaccgtgggtagaaggggaatgtgagaggaaagcgcgaagggtttcacagaaggccccgtgaaagaataatggcctgcccctttgaagaaaggagattaatagaaggagaggtgtggtggtggaattctgcttgaaaggaagaagggtgacaggaaagaaaggaagaaggaaatatctaaattaatccacttcctctttggnccctcgcacagcacatgtcacatgctcccacagaaatttcacagcttcacagcttaaactgaccacagaaccttataaactttctggttagaattgttttcaccttggtgactccagtcttttcccagtgtacccgtaaaaattttccctcatatctccaagtaaagtccattaaccatcca

SEQ ID NO: 601411 - DNA, 927 bp, Homo sapiens
gataagaaaataactaatacaataagctaatcgcacgacctatattccatatagctgatcagcatattcccaaagtacacaaccaggatgcattaaaatgccatatcgaatacgctgacaatgtatcataatgcaaagtacttttacatggtataagtactattgcagacactgtataatgaacaaaagatggcatttgcagtaactggagatttcatggccgcacttccacgcaatgtatctaacgggcgcttcatgagaatcagtagtgtgtatgtgtaggccaatggtgccgtggtctcagaccgtggatgtacggtatatactcccatgtccgatcataacttatgacttgagtgacgggtctggaaaacatacagatatagccgtagcaggatggtcctcttgctgtgtcccaattagttaactatgtcatcagtcaattgatggtgaatgacgagatatatgaagtctctataaagacatgcttatattccattgttacattcaaaagaaagatggctcggaaggtggagggtaacagaactctcatccaaatgtacaaatctcgcatttgataccattccacctgcagttatcacgtacactaccccaatcttacttgcaggagacacggaaaaccatctcgaagagaaaagtgcaacatgaatgaaagaaagtccatcaagtggtgacccggagtaccagcgatgacttcggcacttacactagcaatgacaagaaagcagaaaagacgcaaagagtacgtctacaagacacccaatccaacaactcaaacacagagaagaaaccaaacggaacaaaaggccaccgactcttagcagccagacatgtgaaaaaagttgacgaagaccctcagaagagaaggaaaagcgccacaaccacacaacacgaaagcagacaacg

SEQ ID NO: 601412 - DNA, 219 bp, Homo sapiens
ggagcacactgcaaacaactatagcaataacaatcacagcaatacccaaacatccaaactgtcaaggtattccttcctcaggtttaggatattctggataatttgagactggaggcttgtaagtacggcctaggacctgacggcactggacgcgtggagatatatgtagatgaacagaagtacgacacttataaggacacttatggacactgggtggat

SEQ ID NO: 601413 - DNA, 254 bp, Homo sapiens
gggctgtttacactccctgcggaaatcagcttcacaacagtcattttcagactgctccggattacacgatagtcggctacgaagttctctattatccaaagccagtgatctcacagcttgtagccaaacatggtgatcgttatacatcgagggctgagcagatgtgtctgtatagtccgggatggctgcgcacacctgccctccttggaacggatcttcagcaaggcaatgtcgttctgttgatgcaacgctgt

SEQ ID NO: 601414 - DNA, 724 bp, Homo sapiens
  misc_feature (64)..(64): n is a, c, g, or t
  misc_feature (99)..(99): n is a, c, g, or t
  misc_feature (102)..(102): n is a, c, g, or t
  misc_feature (104)..(104): n is a, c, g, or t
gacagagcccgggccacaggcagctccttgccagctctcctcctcgcacagccgctcgaaccgnctgctgagccccatggcccgcgccacgctctccgncgncnccagcaatccccggctcctgcgggtggcactgctgctcctgctcctgatggccgacagccgacgcgcaacaggagcatccccgagctctgtggtacccggttcagactcggccggcatgtgccccaccagtctaacagcaccagccatagcagcgctacccatatagcatcgatacagccttggaaacgctgttgctgtggactcaaggcggacactcacgatgaaatccagctgggccacattcacaacgtgacggagatttcagaggctcccatccgtgaacgctcccaggtactactcgataccctcatccatccagacagcaatcttcagatgaccgccagaaatggtctgttaatcaccgaggtcctgaagatcgccggtatagcgtagggacgatgttatatcgctgctccactctgagaccttcatgaaccacttcctggacaccgcataggccacgatcaagactatcgattactggaagatagggacgccaggtgaacctgtcgagttagaaatgagacctgccgtggccctgaattaagcccgggtgaatacaatctcctttaaagggaactcccaaggctcattgaagacacggacccggagacgggcc

SEQ ID NO: 601415 - DNA, 278 bp, Homo sapiens
  misc_feature (237)..(237): n is a, c, g, or t
gccatccccccgccccattgcggatatcgcaaccgtctagggccgcaagcctgaactcatagccaggaacagggtcacccacagactgggtgtgagtgtgaagatggtcctgatgggggggagatggacccgccaaatccagaggaggtgaaaacgcctgaagaaggtgaaaagcaatcacagtgttaaaagaagaacgttgaaatgatgcaggctgctcctatgttggaaatttgntcattaaaattctcccaataaagtttacagccttgtggggg

SEQ ID NO: 601416 - DNA, 711 bp, Homo sapiens
caatctgatatgtttgatcagaggttacagatcaagagttttaaaattgagttgatatatcctatggtggtgaaaatggattcaaccaagctagttgagttatctactgaagtcctctccaacgtgaactttcatctcaggagacagaagattattaggacgatcaccttgatgaaatccagccaggacacgggcaagctactgtcttggcgcgttcgaagatacactaaacggcttaggaagatgggagctgtatgaaattctaatagtctatgaaaatctggatatcatgagatatgttcttcattgccaaggcacagaagaggagaaaattctctatctaactccagagcaagaaacggataacactctcatttcacagactaagagaccggacatggaacatgagcttatctgagagcatgcccctgttggaagtggttcgctaagcaactataaaaacatttggatgctacgtttggaaactggtcacgagataacctcacaagaagggtctccagtttgtgaaccggactttgcgtcggaacttggaggtatgcttgcggtaccgagtagatttccagggaatgggaataccaaggaggaagacagatgaaatttttttgaccttgatgactactaggtagtcgaccatgggtcccggcaaaaacgtgctcaacctccaagattcaaaccaagggagcataccca

SEQ ID NO: 601417 - DNA, 653 bp, Homo sapiens
  misc_feature (31)..(31): n is a, c, g, or t
  misc_feature (296)..(296): n is a, c, g, or t
  misc_feature (312)..(312): n is a, c, g, or t
tcatcctatctcaccgcatagacaaccactncagacggcattatagacctaccccaggatgcatccttcccaggttctccatgctggaaagatcacgcaatatttctcctactgcacatccttcataggcttctgcagaaagaaaatatggctctatctgccgacccgcaggcatccgggtatactgatttcatatggtcaaacacacatgtttacaatccatttgtgcaatagtagtcctgaggtgaattccattctgagcttatgaagataacaggattaagagattaaagtanagataggcataagaanctataagagtgttaatggggaacgtgataaatgtccatgaaatcttcacaatttatgttcagagattgcagtaaagacaggcataagaaattataaaagtattaattttgggaagtgataaatatccatgaaatcttcacaatttatgttcttctgcctcagctctggccgatccctccattcagggtccctgacttcctgcaaaacaatcaatgccctcactttaacagtagatacttggcgaggctgtgcatggtgaggctgtgcatgcacctttcattgcaggtcagccactaacatgataagagcttatgtctatttttccacaatttcagttcttt

SEQ ID NO: 601418 - DNA, 323 bp, Homo sapiens
ccccttttcccgggggggggggggtttttttaaaagggggggcgggcgggttttccccctggaaaagggggcgggggggccccccaattttttttgggttgcccccccctttgggcccccccggttttccctttttgttttcgggttgttttttttgggggatttttagggggttccctttttcccccgggaacagttttttcccttttttcccccaggttgggttttaccccccccaaaggggaaaaaaaaggggggtcccccccgggggggggcccttttaaaaaaaggggtcccccccgggggggggaattgggccggga

SEQ ID NO: 601419 - DNA, 157 bp, Homo sapiens
aatatgctacaacgaataatgtcaaaatacttaggtttggaaaatccgaacctatgaccaatacataaagagaagggtaataacccctcttctgttcctctgtcccggggctaatattggactaatgcgggtctgccattctaatgtccatccattt

SEQ ID NO: 601420 - DNA, 122 bp, Homo sapiens
caggaggaatggcagcagctcctgagagtcatgctgctggtagcccaagaaattgagatgcaaaatggccaaccttgttctaagaagatgggcaggatcatcagagagagagggagtaagga

SEQ ID NO: 601421 - DNA, 113 bp, Homo sapiens
tagaggatccccacactgggtcgagtctgcttaagtgcattacattgaaatgaatctcattctcactataatatttttctctttaactttaatcaccagcggctggtcaactg

SEQ ID NO: 601422 - DNA, 80 bp, Homo sapiens
gggaaggtgttccagggctgcgtgattccgggagtgtgctttctctttcaggtgtggggaaagaaagaaaaaaactgcct

SEQ ID NO: 601423 - DNA, 258 bp, Homo sapiens
actcatatcatggcagagcactaccatcggggggttctagaacaagagtcagtgataaattcgatgcagtgtgtgaccatgtgagttattctatcttcatatgtaactgatagttgggctgcatagtttgtactgagtatgctattcttcatactgttgaagctggccgtcgtacaacactcatattgaaaaattggtatttcaacttaaagttactttaaattcgtatatcaaatgaaagtatctgatgtctaatag

SEQ ID NO: 601424 - DNA, 112 bp, Homo sapiens
atgtacacaataataatacgctcactgtatttcaatgtcaaaagtgagatacctaaagtccctacagacaaaactagagctatgccagtccaattttaaactaatttccatc

SEQ ID NO: 601425 - DNA, 109 bp, Homo sapiens
taagtgtgaaaccgtagcttgagattacggcgacagcgattactaggatagtcagtagaattagaattgtgacgatgatacagtgtagagggacggttaataggttgat

SEQ ID NO: 601426 - DNA, 311 bp, Homo sapiens
ttactgtgggctgtgggattaatttcaacgagaacgctatccataaggagggctgtgtggagaagattgggggctggctggggaaaaatgtgctggtggtagctgcagcagcccttgggattgcttttgtcgaggttttgggaattgtctttgcctgctgcctcgtgaagagtagcagaagtggctacgaggtgatgtaggggtctggtcgcgtcagcgtcctcatctgggggagtgggggagtatcctccggggtgttcgggtaaacggattgttgtgtcagggcgaaaagagaggcgcggacggggtct

SEQ ID NO: 601427 - DNA, 895 bp, Homo sapiens
  misc_feature (563)..(563): n is a, c, g, or t
atttaaacaaaatccgcccacatccgtgcctcccctgtaatcgccctttaagtgtaaccctggcccagaacatttaatgtcgagaaaaatatggtccaaccacctcataatattcttcaccccccccgtttatcccccacccaccacgggggcaccactgaaattgggcccctttagtcgcccttatcgctcctgtttaatttgccacatttcaaatggtaggaaagcttaagaacgtgttatttacaaacccccccttaggcgtggtcgaataaccacccgctggatcaaaatgccccctcatttctgggggtcagagaaacttaggttttcaaatattccaggggccgccaaaccttgatacagcgaaccacgttggtggaaggtacccccctctcctcctcttgttttttgactccagggtccgcgcaccatgtcctcttggaagaccctgggccctcgctttacttcaaggaaatgcacgcccagacccacagtcttagtaggaatggacctacaagtaattgtgaggggcatcaattagtagtgaggcaacccccgangaccagttcccgaagaattttttggggcgcttcggatagaaacttgttcttgggagagactattcaccgcatctttttcgtgcttgtccctccctttacattgccccccacagcagcaccttgtggcaatgctcccaccaccaaagacatgagacgtcccgaaagccacgcactagtattgacccccgcgggccctcggagacacttgcgtcttttaattattgcaaatcgggtaagcacgttgttctgcaaaaataaatactctgttaataaaaaaacagtatttagatgttcaaatactatttttcaaaaaaatctccttcttcataaca

SEQ ID NO: 601428 - DNA, 148 bp, Homo sapiens
gtttccagcatttttagtgatgtgtggccctcaccactctaaatccagctttattgcaatctgcaagtgatcttgcatcctcctcttctggcactaccacaataacacacccctaccaacgtccccccagcacgctagctactatcac

SEQ ID NO: 601429 - DNA, 436 bp, Homo sapiens
  misc_feature (112)..(112): n is a, c, g, or t
  misc_feature (436)..(436): n is a, c, g, or t
aaaccaccgccgcccacagaatgctggaccgtgatacttgtagctgccagtgagtgcatgagggtcagactgcaagcaccgggagctggctattcactcaacgtcgggaggncaccacaggcagttgcccacccagccgtgggctctcagtggctctccgggcctccgccaagacagtagctgcagggctgactgtcagcagaccccggaggccagggctgggaggcctctcatggccccctttcctgctcagccgaggactctcggagcgagcaccacttgggcgggactgtgggggctgtagggccagatggtagctggaggaacggtcaggtaccagcgtgggcacagaaggtcctggctcttgcccactgtgtgagtgactggcacagcttccacttgctgctgttgaagagagtggagagaaggcttgaan

SEQ ID NO: 601430 - DNA, 110 bp, Homo sapiens
cattccattcgattccactgcattccattgcactcctttccattccactccacaccatttaattccacttcactccatccatcctcattccaacacattccacatcatta

SEQ ID NO: 601431 - DNA, 102 bp, Homo sapiens
tctgcttcttccgtaggtcataacatgcattaatattcaaatcgcttatcaaatagaggctgatagagaacagcatacttcctttcaagaagcaggaactgg

SEQ ID NO: 601432 - DNA, 637 bp, Homo sapiens
  misc_feature (16)..(16): n is a, c, g, or t
  misc_feature (118)..(118): n is a, c, g, or t
  misc_feature (465)..(465): n is a, c, g, or t
  misc_feature (537)..(537): n is a, c, g, or t
  misc_feature (550)..(550): n is a, c, g, or t
  misc_feature (556)..(556): n is a, c, g, or t
  misc_feature (573)..(573): n is a, c, g, or t
  misc_feature (633)..(633): n is a, c, g, or t
gtggttttcgcctganagaccacagggccaatcaccacagcttcttgtagagaacatggagagtgctaagatcaccatcaggtgccgcttccttcctgtggctttccatcttccagtnagcctggtcttttgccttgaagggccccaaaacaacagccctggctatcatcttcatcccaaaagcggagaagatgggcaggcaagaacacggagggtgttacagagaggttcccatcaggttcaaagggcgcacgctgtacctcttggagatgttagcttcaatcagcttctgcagctccttggtcttctccagtagcaggtccagcttaggctccagagccgccctgctcctcaagtgccttctgcctgcttctgccacccatcagcctcctttcttcaaagcccagccagcctggcgcactgccttccagccttttgcctgcgcaggcaattccagtccactcngctcccacatacccttgcgtgcaggcccaggcatccataaaaccaggctgcttgccagcctgcaagcactgnctaagccttgccncaattnagcatccctcccagccnctgcacacccatggctaacccatccttcctccttatggctctggcccctgccaggcatgncctg

SEQ ID NO: 601433 - DNA, 366 bp, Homo sapiens
gtaaatatctgttcaaattcttggaattctctcccagctcacttcatgtagcctttcatcagggacttagatcttaatgctttcgccacctccttagtagtctgctagaaggcttccgtggcagcttattttcactgccaacagcaggattgcatcaaaagggcagtagaccataatatttaggaattcaggctctagtttggagtcagagaccggggttcacatgtcactccagctccttgggcaaattatttaacttctctaagcttcagtttccttatctgctgagtggaggtatagtattcaccctaaagttggctgtgaatattaaatgatattatgaatataaatgcattatatattgcc

SEQ ID NO: 601434 - DNA, 1288 bp, Homo sapiens
gttttcctgcgcagtgagccgcagcggccgtaggcagccatggcgcccagccggaatggcatggtcttgaaggccccacttccacaaggactggcagcggcgcgtggccacagtggttcaactcagtcgcggcgcctgtaagatcctgcagactgtaagtgcccggcaagccaaggcggcggctcggcatcgctcacctgaaccgccgcctgccggtcggaggtccccagtccagggcccaatctggtgctgcatgcaccctacggctatcggggtaacctacgacgacaagggtgctgctgccgtgtcgcggcgtgcttcacgccctaggacgagagctcatggggtgggctcgggcatttcaacaaaggaattggtggcgccggggagcccattcgggcatattctatgttgggactccgatgagacgagctggaaacaacgtccagccggtgaagtcacctgcataggcgcgaacgggttgcagtgcgggtgctggaaggtgaagtagccagcttcgcgaacaacctcaattcccgtcctttccacccaatggaaacgccgcttcgggggcccctcgccgaatgacagggggagtgaacacagttttccgtgcgtttgaacacggaaacgttgaagacgatctttggtggccgagcgcgacaattgtccttgaacgccgggaactccgggggatccaattggctctctgttgcccctggggaaaaacctggctgcttaattaacaagaacacgtgtgagggaaacagacttccgcgaagcgtccagtccaaccttggaaggggcacagcacggaaatgtcacgacttggtatccacaacaatgcgccgccgattatccagaccgataatgagattcttttcgcccggattaaattggtggccctcccccgtgattgaccccctataatacccggcactcacctgtgggccacgtcatactaccgggaggccataattaaacacagcggtgccccaatatcaaaagatacgtaatagacccccaacatgggtgtgacaaacgggcccctggcccgatggcgaaaagccaaggtggggacagttgggctcctggcaaaaaacagcaagtgcaacacccaagtgcaacagatttcgaccgataggccacccacgttcccaccttgagggagggcgcaaaccttggtgtgcggcacacaacttccgagagattgccgcgggacgcacagacttaacacgacccagaacccaggacgagaccgaagatgacgagacgagcgaacgtgcag

SEQ ID NO: 601435 - DNA, 177 bp, Homo sapiens
gccggacctggtcgtatttcactcgccataatggcactgggggtgagtccagctattgggagaaatttgaacgatgagaacttcatcctaaagcatacggggtcctggcaatctatgtacactggcaaatgctggatccaacacaaatagttcccatgtttttcatctagcactggc

SEQ ID NO: 601436 - DNA, 863 bp, Homo sapiens
gctgaccagcacctatggcggtaggcaagaacaagcgccttacgtcaaggcggtgattaagggagtccatagaagaagagtggttgatccattttctaagaaagatcggtatgatgtgaaagcacctgctatgtccaagtatcagaaatatcggaaagacgctcgtcaccaggacccaaggaaccaaaatggcatctgatggtctccacgggtcgtgtgtctgaatgtgagtcttgcgtgatgttgcgagaaatgcactgaatgttcgcaattatagaagaagttcaaagctgattactgagacgatgttcaggggtaaaaaactgccgtgacgtaacttccatggctatggatcttacccgtgacaaaatgtgttccatggtcaaaaacactggcagacaatgatggaacgctcacgtcgatgtcaagacctaccgatggttacttgccttcgtctgtcctcgagtaggttcttactaacaagaacgcaacaatcagataccggaagacctcttatgctcagcaccaacaggtccgccaaatccggaagacgatgactgccacatcatgacccgagaggtgcagacaaatgacttgacacacgaagtggtcactaaactcgattccagacagcatcgcgaaaagacactagaccaggcttgccaatctatatatccctctccatgatgtcttcgctcagcaaccacgtcacaatgctgaagaaagcccaagtcgactcgggaaagctcatggcagccttcatggtgaacggccagtagttctgcaaaagccactggggacgaagacaggtgccacagttgaacgacctgatcgcctctgcacaccaccagttccaggaatcg

SEQ ID NO: 601437 - DNA, 188 bp, Homo sapiens
cccccccccccccccccccccaaatgggggggaccccctcacggcacaggtttttccaaaggttttaggggccctttttttttttaaagccctggcccctttaaaggttttttttttggttttattttttggttttggccgtttattggggaagggaaagccaaaaaaggcccttttttaatggggga

SEQ ID NO: 601438 - DNA, 176 bp, Homo sapiens
caagattcttgtgctgaagcagtctatatactgtttgttatgttggcataaaggatacatagaaacattgcagcatctaggcagataaagtgtcaaaaggagaacttaacttatggtatttcatcattgaaagtagtgggaggggtagggaataggaaaacactagaatggtactg

SEQ ID NO: 601439 - DNA, 183 bp, Homo sapiens
  misc_feature (142)..(142): n is a, c, g, or t
acagcatttgccctgaggagcaggacagcgggcagctgaactctaggaaagaattcccttctaccactttcagagcctcacccaccagtgcgcgtaaaacgccagggccatcttcttacttaagccacatcctgaaccaggnagcttctctgcagagttactgagctaagacattgcttcacg

SEQ ID NO: 601440 - DNA, 525 bp, Homo sapiens
tggcccggctataacttctgccaactttaacccatttttttacccgaaaaaatacccgggggccattcacatagtcttggcacatcccgacacatgactgtattcccaaccccgtggacctgccaggctgtttcccgcctctacgttaacttattccgggaattttatccccatggggtttgcaaagggggaccctttgtgcctggttcatccgaattgtagcatttgtaaggccttcatttgtttttacggctgaataaaattgctttgtatgggtagactccccccccactttttttttttttttttttttttttttgtagagacagggtctcaccatctagcccaggttggtcttgaactcctggcctcaaatgatcctctcatcttggcctcccaaagtattgtgatttcaggcatgagcctgaatctgaaaaagcaaaattcatttagtaagacaaagacacccaaacatgtcagtaaattaaatggactaaactcaccagcttaaaaccttacgtaata

SEQ ID NO: 601441 - DNA, 105 bp, Homo sapiens
tctcgacttccgttgtaacgttgactggagcaaagagtgaccaccataccgggtgtgtgagaacaccagtctctcactcggccaacaggaacagtaccaatacca

SEQ ID NO: 601442 - DNA, 190 bp, Homo sapiens
cgtggttgcatccatctgtaatcagtctcaacagcgtatacctttctgctagttatcctcccgtgttccacgagccttatccatcagatcctcctcgaaagttacttcctggtcctggtccgaaatttccaccgcaaccgagtgggaggccacaaccaagtgggagtccgcaaacaagtggtgaggccag

SEQ ID NO: 601443 - DNA, 630 bp, Homo sapiens
  misc_feature (154)..(154): n is a, c, g, or t
  misc_feature (414)..(414): n is a, c, g, or t
cccactgtgcacatgggggccacgtcccgctgtggagagtaacaaccgtgaaagagcacacacacgagggggggtcgtgccgtccggagcgctgtcacttgcaactggtgcgactcccaaccgtcgcactactcccaccactgtttggaacgangctgcggcgactgtgcgccaacatgcacacagtccagtcgtgcccaacacgtggagtcaaagtcatctagtgtgttaccgtggttggttgagcaaaaacgtggagtgttgcgtagacagtccactcaactcgacctaggtgcgtccattcagatgagcaaccagcctgtgtgctcgctctcataagaacgtctatgacactcacgtggacccacctaagtacacaccctgccacacgaaaggcacccagtggttatagtnaaagcaggatcgccgtctcgtctgacagtggaggaaggtctccgtggcacgactccgtcttagtctccccaccgccccacgtgaagttgtctcccgtccgtccccgtctggcaatgttgaacactcccttaagaagagaggtaggggtccctcgaggaaaccgaccaccgtgtcgtctacgggacacagtccagattaggtaccccggtggctcca

SEQ ID NO: 601444 - DNA, 81 bp, Homo sapiens
cccgaagacacggctatttattactgtgcaagatcggaccccccgacccatccccatgcttttgatgtctggggccaaggg

SEQ ID NO: 601445 - DNA, 394 bp, Homo sapiens
tgcagtgtaactctggatctgtctgttagacttcctacatgatgtacccatagacctcttgtcaacaatggccttattggatagacgagggatcgagcaggaaccattgtagtggtgaaaaactctctggtctttctcggggattattctgctgaagctttggctaagttactcaaaagactcccatgataagcacgttaccattcttgggccctacagaaagtcaacaagcaaaatgccttgagcattcaaaagctgttgccatgacctttgctctcaaccagtcctcttgtgctttaactgaactacttatcttggaaaccactgcttggtgtatggtcttcaggattgcgctggtaaagccatgtttcatctcctgatttccaccttgcca

SEQ ID NO: 601446 - DNA, 170 bp, Homo sapiens
  misc_feature (18)..(18): n is a, c, g, or t
  misc_feature (97)..(97): n is a, c, g, or t
ggggctgggtgcggctcntctttgcctgacgggttagtgctctcgctatacgcgctgcacgtgaaggcggcccgccccgggaccggattaccgcgcntctgcacgtgggcaccgcatcagctgttcgcgcgtcttctcctccaggtggggcaggggtttcgggctggtgg

SEQ ID NO: 601447 - DNA, 143 bp, Homo sapiens
tgcctcgcattaacctgtcacccatacatgatattaataggattcacattatacgtgactaagaaaatcaagttaactcacttgccatttctccggacaacagcaaaccgcgaccctcctatagactaatgcaatggatgaat

SEQ ID NO: 601448 - DNA, 647 bp, Homo sapiens
gccgggcgcggtggctcacgcctgtaatcccagctctcagggaggctaagaggcgggaggatagcttgagcccaggagttcgagacctgcctgggcaatatagcgagaccccgttctccagaaaaaggaaaaaaaaaaaaaaaaaaaaaaaaaaaaaaaaaaaaaaaaaaaaaaaaaaaaaaaaaaaaaaaaaaaaaaaaaaaaaaaaaaaaaaaaaaaaaaaaaaaaaagaaaataaaaaacaaaccaaatcgaaacatcgccgtgctatagttcctatctctgagcttatcattccttcagcactctgcatctttctcggctgtgcctaatcaatttaccaactcagttctacaccctttgtctcctcttcacactactcttatttttgccaaacctgtacttggccggctcatccctactcagcccacacgtcctaacattctccgcttcctttaaccgtcctcacatcttaactctctgacgcccttctgctccacctctccttctttcactcaacttcaccgcactattttttctcatctcatctccagtaccccctcaaacattcctactcgttccactctccttttggctctcttatctccctttaacagagatctcggttcctacctctctatctcccc

SEQ ID NO: 601449 - DNA, 446 bp, Homo sapiens
caggaaagagctagtgacttgtggtttcatagtcgtgaagtacttgatcactttgcatgactaatggcacaggataaacctattcgtaagtttacaatacaagtatagaggggtcttcagcgtaacttagtgatacataaatgctgaaaagattatcttgagctgggccttgggagaagaatttggccttcagaactgccatatcactgagcctgcgatctatacaccaccccacattttgttggtttcacagtcttgtgcaagtaacctctggtcttacgtgtgtaactgagagaagagtgtgtgtttgtgtgtgcatgtgtgtttattgttcctaagaatttggcacaagtcagagataattgcctatactaagaatctatactgcagaatatagtgtatcaaaaacttttttcttttaaattattaaagtgtcttttatactt

SEQ ID NO: 601450 - DNA, 170 bp, Homo sapiens
gaaacggggggaaagtaaccccggggttgttttgggatttgggggcccccccctttgggggggcttttttgcaaatttgtttgggggcccccttcccaggtgggccaactgaagctttgggggttcccaagaaggttttttttttggctggaattaaaccttggccccca

SEQ ID NO: 601451 - DNA, 408 bp, Homo sapiens
taagggctacctataggattatggatttggatggtgctgtagcctctttgctttggccaatttctcccatttggaatgggtatatatactcaatgcctctatcccactgtatctaggaagtaactaacttgcttttgattttaccaggctgataggtggaagggactttccttgtctcaaatgagactttggacttggactttttggttaatgatggaatgagctcagactctgggggactcctggaaaggcatgattgtgttttgaaatgtgaggacatgagatttgggaggggccagggcagaatgatacggtttggctgtgtacccacccaaatctcaccttgaattgtggttcccataatccttacttgtcataggagggacccagtaggaggtaactgaatca

SEQ ID NO: 601452 - DNA, 268 bp, Homo sapiens
tgagagcttgtttggaggttctagcaggggagcgcagctactcgtatacccttgaccgaagaccggtcctcctctatcggggatggtcgtcctcttcgaccgagcgcgcagcttcgggagggacgcacatggagcggtgagggaggaaggggacacccgcctagccagccagatcagccgaatcaaccctggcgatcaatggggtgacagatgtcgcagccagatcgcccgtcgacgcggccgcgaatttatagtagtagtagtaggc

SEQ ID NO: 601453 - DNA, 325 bp, Homo sapiens
attatattattagcaggaaaaaataggtatgattataaaatttggcagatcactgtgtcatgtccaagaaatgttatgctaaacaattatactaaacaatgtatactatgttatactaaacattatactaaatttcacaattgcttcaaagagaataaaatacctaggaatccaacttacaagggatgtgaaggacctcttcgaggagaactacaaaccactgctcaaggaaataaaataggatacaaacaaatggaagaacattccatgctcatgtgtaggaagaatcaatatcgtgaagatggccatactgcccaaggtaatt

SEQ ID NO: 601454 - DNA, 480 bp, Homo sapiens
  misc_feature (24)..(24): n is a, c, g, or t
  misc_feature (81)..(81): n is a, c, g, or t
  misc_feature (103)..(103): n is a, c, g, or t
  misc_feature (438)..(438): n is a, c, g, or t
tcaaagcacagcagaaatccatgnccccctctcccatgaaattggaaccttggtacaggttaaagtatccccctaatcctnaaatctgaaacaacttgtggtncccaagcattttggataaggcaaaattcaactttcagtctcttttctgggggaaaaaaataataaaccctagcctagcccaggcgtggtggctcatgcttgtaatcccagcacttcaggaggctgagatgggtggatcacctgaggtcaggagttcaagaccagcctggccaacatgtggaaacctcgcctcaactaaaaatagaaaaaaattagttgggcatggtggtgggcacctgtaatcccagctacttcaggaggctgaggcaggagaattacttgaacccaggaggcaggacgttgcaagtgagccgagcattgtccattgcactccancctgggcgacaagagcaaaactcttcaaaaaacaaaaaaaaa

SEQ ID NO: 601455 - DNA, 204 bp, Homo sapiens
attaagatccttactgtggtgacgtgtacgaatcgactagacataggtggggttcggttctgcctttcagtggttacgatcgggttgctgactgtggtgtaggttgcagagggtcggatccgcgttgtgtggtctggtgtagccggtggtacagctccgatttgaaccctagcctgggaacctcacggtaatacccacagtacg

SEQ ID NO: 601456 - DNA, 131 bp, Homo sapiens
cttttcttgttacatttatataatttaaaaaagcagagacgacgtctcacgatgttgcccagagtggtctacgaactcctagagctcaagttgatcctatccgtcttcggctgcccaaagtgctggggact

SEQ ID NO: 601457 - DNA, 593 bp, Homo sapiens
aataagctgctacctggactgtgatctgtagtcatctagctcaagggaaagctaagaaacaaaacaatccgtgtcttttaaaaaggttggggaaaagcaggtatagacggggccacagagcacccttaaatgttgaactataatgacacctaagtcatccctgtatttggcaagtttccatgaaagggtggttcaaaatgactcttaattatgtttttgggttttttctagaaggccatctcagaagttttttttttttttttttttagttggagagcagccggtccaacatgtggtgaaacctcatctctactaaaaacacacaaaaaattaaccaggctgtggaggtgcacacctgcaatcccagctactgtgggaggctgaaccaggagaatcgcttgaacccgggaggaggaggctgcagtgagccagggtggtgccacggcattccagacggggcgacagggaaaaattccctctccaaataaaaaagctctaagtaatcaaataaccaagttattaattacccaaagtcagtcagcaaatgagtcagaattcaagccacaatagctattattcacactagtcactcc

SEQ ID NO: 601458 - DNA, 299 bp, Homo sapiens
  misc_feature (215)..(215): n is a, c, g, or t
ctcgggtgctggcccggctcctgattcccccggcgccgtctgtgcctctgctgtggtcctcatttttcgcccagcgctaggcagtgctccttaagcgctaggttctctcgtagcatctcctctgtgcggccctccagctcgtccagcttttgccaacagccgcccaggttctcgtgcacggcccgggatgcttgggtcccgaagagcttctatcntcgtctgcgccgcttgcgggcgctccgagtccaggatagcagcagaggtccgcatttcacggttctctgcttgcagacgcctgt

SEQ ID NO: 601459 - DNA, 271 bp, Homo sapiens
tccactagtgtaggctgacttgttcctgatttccatggtaagacaccccctccccatctccctaaagagccaagagcctgctatgagctctgctccaccacttctggttcctctgctgatggtggccagtaagtacctctatgatgaaggggaggaggaggatgtcttcaacgacgaatggggagctgctgggggtgtggccgtgcccactctcaatgccttggagaggggcttcctgagtgccatggattggcatctctacactgaccct

SEQ ID NO: 601460 - DNA, 162 bp, Homo sapiens
ggtgcggtcgtgctgggctgaattccctgctgacccaatgttgaaccggagggttgggccgtgcttccaccaggtgaatgagaagcctccacagtgtggtagctggagccacagagagtcgtggtagagggccaacacacaacagccgtgctgcggatgctg

SEQ ID NO: 601461 - DNA, 366 bp, Homo sapiens
  misc_feature (36)..(36): n is a, c, g, or t
  misc_feature (38)..(38): n is a, c, g, or t
  misc_feature (101)..(101): n is a, c, g, or t
  misc_feature (213)..(213): n is a, c, g, or t
  misc_feature (230)..(230): n is a, c, g, or t
  misc_feature (239)..(240): n is a, c, g, or t
  misc_feature (250)..(250): n is a, c, g, or t
gcctagagagctaagacacaaagacctccacatctntngctgagagtcaagaacctgaacagagtttccatgaaggttgtccaagcactagaagggagagngtctaaacaatggttgaaaagcaaaggaaatataaaacagacacctctttccatttcctaaggtttctctctttattaagggtggacttagtaataaaatattaatattctngcttgcttatgcagctngacattgtnngccctccctnaaaggcaaccaagtagcctttattttcccacagtggaaaggaaaacggctggcctattcagtttacatttacaaaaggcagattttcaagagggattgagtaagtaagttggatgg

SEQ ID NO: 601462 - DNA, 961 bp, Homo sapiens
gaatcataaattaggatgcaggctgggtatggtggctcatgcctgtaatcccagcactttgggaggaggccgagctgggcggatcgcttgaggagagttcgtgatcagcctggccaacgtggagaaaccctgtccctactaaaaatacaaaaattaggtggacatggtggcgagcacctgtaatcccagcttctcgggaggctgaggcaggagaatcacttgaaccagggaggcagaggttgcagtgagcccagattgtgccactgcactctagcctcggtgacagagtaagattccatctcaaagaaaaaaaaaaaaaggtgaaaatggccatgggctggggttatggacaatacgagtggaaacgtctggtcggtcttagatatacaattccatagtggacgaatgttagaacaactctgggagactgggccttggacacttgggactctggcctaggctggtgtcagaacaacctacttacctccaaggccttataatttcccaattgggcagtgggagctaacctcattcacaaaatccaggagtccactggggtcctggaacttctaaggggaaacgggtctcccctgggacgcaggagcttcaagagttggatcgagagggcaaaaggcaaggtagagtcgattgggccagtgggcagggggtccccctgagggacaactgggcatgagtttgtgccggggaagcgaacttttaacccatttggtcgatcacgaaggtgacaataagcaggacaaacacagtgtgggaactcccacttgtggggtcaaggtaggttcgccacccacaagtgtaatatatggacaggcggtacgcacctaatggttataatacgggtggctattgagcagcattagatgtgtatgagggcaaaacccccctgtgtgccccaggggatgcgctaacaacagggggagatactaccagtggccccgtg

SEQ ID NO: 601463 - DNA, 336 bp, Homo sapiens
tcgtgcctataactagcatagagcatttgataaagagatggactaggttcagagttccaatagaactaagctctcgaatttctgtgtcacagtacagttcctaactaactgaaatagtaccgtgataagaaactaaagctatttgacacaacaggtaagtcgatggccatgctggagatagacggtgtgatggctgcacagcaatgtgaatgtgcttaatgccacagacttgtacacttaaaaatgattaaaatggtaaattttatgttatgaatgttccaccacaataaaaaaaatagtggatagcctgaatattaatttctgtgcccatttcaa

SEQ ID NO: 601464 - DNA, 165 bp, Homo sapiens
ggaaaggaaaagactcatatcaaacatagtcgtacagtggagcgacgatagcattcggtgcagagtcgcatcactacgtggtgcatctgatctataaatgcggtggcatcgacaaataggaaccatggaagaatttggcaaggaggctggctgagatgggacaca

SEQ ID NO: 601465 - DNA, 417 bp, Homo sapiens
tttttggacagcgtcttctcatctagatccgcaaaagagtttcattgtctcactacgctataaggctcggagattgcgccttcaacgcttacgcaccgattttcggctcctcgataaggaaagcacgcttgatcttgtcacgaacacattaagctcacatgtatccacacataggccgtgcagacatgtttctttgtttcgcacaatctcataagacctataggtctcacagcacgagcccgtggaagtgtgcgtgggcacacaccacacgcagattttggtgcttcaccacctttcttggaataaaggtacacatttctaagctcagtggttcgggcacaccatagttatgttagactctgtattgtagtacagcctacgtcggtatgacagcccttgccccattgtgagcgcctg

SEQ ID NO: 601466 - DNA, 132 bp, Homo sapiens
atatgatttattcttcacggattatgctcccaaatatcctctcatgcatccatggaaatttaacgatcctggaatagcgtctaccatgtggaacatcttaaaagatagtctttagcctatcagtgagttaca

SEQ ID NO: 601467 - DNA, 580 bp, Homo sapiens
agtaaccctggttatccgagaatccctgctcgtgacgtaataaaagggtctttagagcaccctaaaataggtggtctaggtgtgctacctaccgatgtaaccgtatggaacgtattaggtgctttgtcctcggtagtgcatgcgttattaaaatgacggagcttttatctgaattattgaataactgtacaactttggatttaaaaccatttccaacataagaggtgaaagttatttctgtcctcaattttagtcttcttcaagggggccatataacctaggttgagtttgtgactttgccttgagaaatgaggtaacacagcatggaacagtctatcttttccagaccttgaatgaggaaggcaaatgatctagacatttcttagaactagacgaaaaatagtcatagcgatgactaggagtagttttatctgtagttaggcgaatgcggcttctttacattattggtgcgatgaaagtatgggaaagtctcaacagaacagactggacatttgagagacttccatttttcaaaaatttcagaatcctcgcggcaggtgtttgaaacaagggatgtgga

SEQ ID NO: 601468 - DNA, 102 bp, Homo sapiens
tgtgacagctccgaggctgggggccagatcccccagcaaggactaccacttcacaggagctcacatttatggaatggatgaatcaataaattaattcacttt

SEQ ID NO: 601469 - DNA, 277 bp, Homo sapiens
gaccgagacaacaacggctaggtacgaggctgggtgtcgccttaagctcaggagttcgagacagaaagccaatggtcctcccttctcaagaaaacaagagttggccaggtgcaatggctgacatctgtaattccagtatttgggaggccaaggtgagaggatcacttaagctcaggagttcgagaccagccaggtcaacatagcaagactccatctttacaaagaaaaaaaaagaggctgggcgcgggtaactgtatgcgactggaccgaggcggac

SEQ ID NO: 601470 - DNA, 634 bp, Homo sapiens
  misc_feature (291)..(291): n is a, c, g, or t
cacgaacctgcgggtaatggtgtccatgatgagttagcattacctgactataccttacttcctctacgaggagctgagctgcacaggggtggagctgaagtacacaggcacagccagagcactattcatgctccctgatcatagacaagatggaggatgtggaagccatgctgctaccagagaccctgaatcggtggagagactctatcaagctaacagagataagtgagctctacctaccaaagatttccatatcgagggacatatacacgaacgacatactgttgcaangtgggcatggctgaagtctccagcagtaacgctgacctgtcaggaatcacatgcagacacgaacctagcatgatacatgatgctcataaggctgcgctagatgcatcagaagactggacatgagcatctgctgtcacagatgtgaatatcagtctgctgtctgcattagctgagacacggaccactgcgcgtttgcacatggcctaactgatgaacattgtccctacagtcatcaataacaatgtagttatcatggaatatgaacctgggcgatgatgacttggtacatgggacatcactgcacatattaccgagtgccatggcattcatcccctttttgttt

SEQ ID NO: 601471 - DNA, 292 bp, Homo sapiens
ggctcatctttgcatgcaagcagctggaagatgggctcactctttcttgactacgacatccagaaagagtcgagcctgcacctggtcctgcgcctgaggggtggctgttgattcttcagtcatggcattcggagtgcccagtgatggcgattactctgcactatagaccatgtgctcccaacttatagtttagaagattgatcatgttctcagtaatgagctgataccgtgtatcaagacactgtttaagtaacaggtttcggttgcatgggcttcaggaaaaaacatataa

SEQ ID NO: 601472 - DNA, 275 bp, Homo sapiens
cttttttttaaccagccccccccataattccgaaggccccgtttcatctttcctgggtccccccagtgaagtattaccgttggcccgttccccgtctggcccgggcttgctcggataaacctttggatggattttgtagggcctagattctatattggaatgaggtcctatcccaaaagaaaaattaacgaaatgggaaattttattgttttaacggggaggcctgtttagggccgtttcccttttgaaataaaatttatgattcctttttttta

SEQ ID NO: 601473 - DNA, 125 bp, Homo sapiens
ttctacgctggcctgacgtttggtggttccaggacggcggaatcaagaataaatcgcctgcaacaccacaggccacgcctgatggtttcattgccacggctgctgataaagaggaacgattaata

SEQ ID NO: 601474 - DNA, 230 bp, Homo sapiens
  misc_feature (43)..(43): n is a, c, g, or t
tcggacccgcggttatgtcttacgagttgggaacagatgaaanctgtcacctcacgaatacgaggggttctcagtgaagataatctcacaatgcaagtaaaaagtaaatctgatgaccccagtgagacactaaaattttaaaaaggcaatgaaaaaaaaggagagcagcggagaggaacataatagctatgaaaaagtttttctaagtaacccgtaagacataaccgcgg

SEQ ID NO: 601475 - DNA, 389 bp, Homo sapiens
attttgacaatttcaatcctgtatatagtatgctaggatcatgctttcttttcccctccctcctcctgctccacttttcacacaaacatcaacaatagagttttccaaataagttttcttaatagacttatctgtctcgtttacttgagtcaaagtctttctttgttgtccaggctgcctcggcttctccagtaactaggactgcaggcattcactgcctggctctgggctttattttggggactgttgactgaagagtgaggaaatggacgcccctcccctccctcagatccacttattatcattagctgaagcccagaaccctagtgttccctgcttgtgctggacattccgtgtcgacgcggccgcgaatttagtagtagtggcgg

SEQ ID NO: 601476 - DNA, 982 bp, Homo sapiens
  misc_feature (280)..(280): n is a, c, g, or t
ccgcagggccgtacgcagccatgggcgcccagccggaatgtgcatggtcttgaagccccagcttccacaaggactggcagtggcgcgtggccacgtggttcaagcatgccggccgctgtaagatcgcgcagacgataaggcccggcaagccaaggctgcgccgggatcgacccgcgccctcgcgtcggggtcccatccagtgcaccatacgttgcggctgccccaagggattcgagtacgcacacagaagtgttgcgcgcctgggccgcagtgtttcatnggcatggacggtagcgtcagagggctgtggctggtcagtttcatcgagaggaaggtgttggccctcgggaatcgcattctgcgctagttctccttgtgcgagtcccgcacggagcgctgtgaacaaagatcccactgggagctcccttgcaaggatccaagctgtgacatgacgtgactgacacgtgacgtactctggatccatagactccattctcctcgttccaccatggaaaagcgccgtcgggcacccgcaaggcaagggcgagatcagctatcatggctgacagtaacttgtaaaacctggtccatcgctcagtcgttgaccgtgacctggtcgatgcctcagtcccggcaagcgctcgtattacagagaggtgagaacacgcttccgagctcgatcgacatcgatgcgaagacagaagagagttatccaatagcgctttcgcctaagatcgtcacgataatgggtccccggtgtccaaagcggtccgcggcctcgtttcggcgaataccggggacagaaagagagaccaagggacatgccgcagaagcagggatgttggaaagctgaacttgacttggaaagcgcctctctggggaactttggaaatcgaggtcggtcgagtcaagagaaagaggaaacagaattctgcggggggattcaaaggtcaggtagtgcggaagaaagggggtaattgca

SEQ ID NO: 601477 - DNA, 166 bp, Homo sapiens
gccggaggatcacccgagcgcaggaggtcgaggcttcagagagccataattgcaccactgcactcgggtctggttaacagagcgagacagaaggtttgacttttaaatagattttgcgggtcacttgaaaaaatggacagcatgttgcatatgaaaagtcttaaaa

SEQ ID NO: 601478 - DNA, 329 bp, Homo sapiens
  misc_feature (10)..(10): n is a, c, g, or t
  misc_feature (19)..(19): n is a, c, g, or t
  misc_feature (111)..(111): n is a, c, g, or t
  misc_feature (131)..(131): n is a, c, g, or t
  misc_feature (232)..(232): n is a, c, g, or t
  misc_feature (256)..(256): n is a, c, g, or t
  misc_feature (304)..(304): n is a, c, g, or t
ggagttcaanggtgtaaantccagtctgagtccacaggccgaagagcgaggagtgctgatgtacaagggcaggagaagatggatgtcacagctcaagaagcgagaacaaanttgcccttctatctttttgntctattcaggtcctcaatgaattggatgatgtccatgcacattagggagggctgcctcttcattactcggtctaccaattcaaatgctaatctcttccggnaacatccccacagacacacccagnaataatgttttcccatctatctcagtaccccatgatccagtcaagtgnacatataaaattggctgtcacatct

SEQ ID NO: 601479 - DNA, 202 bp, Homo sapiens
cgtggctctgaccggttgatggccttgtagtcgagatgaaatcatgaaattgagtcaaagtcaatttgacattgaaatgacaagaggaaactcttataatacattaaaacaagctctcatttgcctatggataagatactggtcttataaaattaagactgagacctacgatgttctgagcactagcaacaaggtcgtctca

SEQ ID NO: 601480 - DNA, 742 bp, Homo sapiens
gggcatcgggtgctacagcgactccaagcaagagaatgtgcgtatgctgggcttgactttgacgcattcctggtgcagactggcagttctccagataagacctcacgtgcccattggtggtcatgccccgcggggggccccattcatccttagtcactgcctggatgctgttcccagtggcatgctttgcaagatgggactttcgcggtacgtacgtagatgaagctatcgtgtgctccagcgggcttttggccaggacagcatcctctccctcccaggcaatgtgggccaccaggatgtgcaaggatgtccagctctcgccatgggaactaggtgctccgaggcatggaacactctgatgcagagccatgtggcccgttatgggtaggttcccgatggtgcgcttcatttccgtgccactatgattaggtcagtacgccagagacactacagggccgtgcggtggcaccggaaccccggtgatcaagatcgggctccatgttgggctccacttgacatccctgactggtgcgtgcgtggaggctggcttgtcctttcagcaggtgtactggctgaccaggacctcagcgttgtgggctgacgatgctggagcaaatcgcccatcagatacattccctcaggttgaagacaccactgtcactgatgttgggccaggaggatcggcgtgtgcccttcaagcaagggcatggagtattagccgtgccctcaagatccggaatgc

SEQ ID NO: 601481 - DNA, 476 bp, Homo sapiens
  misc_feature (16)..(16): n is a, c, g, or t
  misc_feature (58)..(58): n is a, c, g, or t
  misc_feature (168)..(168): n is a, c, g, or t
ccagtgcctcaagtgnctgtaatttgcattgcatggagaaagttctaattgggcagtnccacatcttaaaggccgaatgatccactttttctttacttttaaattttctttctttatatttttagagacagggtcttgctctgtagctgaagctggagtgcagtggcnctatcttagctcactgcagcctaaacctcctaagctcaagctgtcctcccgcatcagcctcctgagtggctgggactgcaggcacatgctaccacacccagctattttttttgttttttttgtagagatggggtctcactatgttgcccaggctggtcttgaactcccaggctcaagcagtcctcccacctcagctactcgggaggctgaggcaggagaatggcgtgaacctgggggggcggagcttgcagtgagccgagatcacgccactgcactccagcctgggcgacagagcaagactccgtctc

SEQ ID NO: 601482 - DNA, 308 bp, Homo sapiens
tgaacacttatatgtacacaattctccgcgtcactgcggtggcggggccaagccgtttccggggtactcggacctcccgttcgagcagtcggggcactgggtgcagcaagcggtcccccgttcaaggctcaaccacaggattcagccaactatttgcccacattccatcacccggccaagcaacccctgctccttggattcaagtctgctttctctccgtatcagaccccagtggcccatttccctccaccccgggaaggagccaccgcacaaagcgcatggggtacggagctcggaattcggtaaca

SEQ ID NO: 601483 - DNA, 240 bp, Homo sapiens
acacggaacagccgcacatctctgaaagaatatgatggactactgtatttggaaaactatcctaagttgaaattaaaacacatacattggccgggagcagtggctcaggcctgtaatcccagcacttcgggaggccgaggcgggcagatcacgaggacaggaatcgagaccatcctggctaccacggtgaaaccctgtctgtactacaaatacaaaaaattagccgagcgcaacaccggg

SEQ ID NO: 601484 - DNA, 966 bp, Homo sapiens
atgacccaaaacgcaaaactgaccccctaatacaataaataaaccgacatcattcatctgaccttgccccatcacgcgatcatacactagtctccggcatgatggaaacttcggctcacctccttggagccgtgccgtgagtcctccagaagtcgatcccatgaggcactattccgtatgcgcagtgcatgtagtcaccagaaggcctctaatccgccagtgtatcatcaagtcgacccacgatcattcgatgacgtaacattactggtgaatcatccgctaccttcacgccaatggcgcctcaatattctttatctgcctcttcctacacatcgggcgaggcctatattacggatcatttctctactcagaaacctgaaacatcggcattatcctcctgcttgcaactatagcaacagccttcataggctatgtcctcccgtgaggccaaatatcattctgaggggccaccagtaattacaaacttactatccgccatcccatacattgggacagacctagttcaatgaatctgaggaggctactcagtagacagtcccacctcaacgattctttacctttcacttcatcttgccttcattattgcagccctagcagcatccaactcctattctgcacgaaaaggcatcaaaaaacccctaggaatcactccattccgataaaatcaccttccaccttactaaacaatcaaagacgcctcgggttacttctcttccttctctctttatgacattaccatatttcaacagagcatctagggagcagacatattacctagcaaccttaagacctcccaattaaggcggaggatatactattcgcctaacagtctcggatcgtccttaaaaataggagggtcctgcctattatacaatcctaatctaaatatccatctcatatccgaaaaggttatattcgcctaagcatcattttgagtctagggaa

SEQ ID NO: 601485 - DNA, 1281 bp, Homo sapiens
  misc_feature (874)..(874): n is a, c, g, or t
ggagcagaggcagcagccggacgagcagcggatgcggtcgggagcgatggtgaagattgcgtgcgtgcggggcggcggaggcggcggtgtgccgctactacgtgtggcggcagtgagggcgtgccgggcccctaagcggctcaagacttgacaacgcctgtgctgaccaagcacaggagtgcgtgctgtgctggtggctgggtggaggagcctggggctgtgcgggctggctggcgtgcggctggggagaactacggatgaccctgaacaaaacccctgcctccccagttgtccacatcaggggcctagattgacggtgctggtgcaagcagacctttgtggaggccttgcaggagtttggacccatcagctatgtggtggaaaatgccctaaacaacgagacaagcactggttggaagtttcgaacgactgtgtagggggggggcttgcaacacgcagcatgaaacaaacagcaaaacccgaagaaaaggcataggtattacgaatttggcatgggtccaagcaccaaacgtataacagaaacgagattacatatataaccagaccaggaaaagactctacaaccggagccatggggcgacctaccggaaatagaacataccacgggaaagcgttgcaaaccacgatgcagcaacaacgtcattattagcacaagtcacttggaaagccacgaaattataaatttacgaaaatagcaacacaacagggacttgtatacactattcaagaagacctaaatccgttggtaagattcccctatagatggagcaccctaagtcccccagccaaaaacttaggcacacatcagttaccacggaacagcgaacctggcgaagataccacagccgcgacnatagggatcggcacaccatatagcaaccatccacagatctacaacatcagtcgaccacaaggcaggacacacacagcactatactcgaccaaagacgtcgaggcacgaacaaaatccatcactttacattggggaactggcagcgctcagcactcagtgaaaggaaaactgggaagataactgaccaaaaacccacactaacgacgggcgatttaaacaatgtgcgtctataccactcgaaagtagaatcgaagagaaatcaaccattgcaagcacacatacgagaacaaacacccccgaagaacaatcaaatgtgagacacaaaggctgaaacgccacctggacagacacaaaaccacgactaaacaagaccacaatccgacgcacaacaacatcactaggtacga

SEQ ID NO: 601486 - DNA, 538 bp, Homo sapiens
ccagtgttgcccagcgggtctccaactctggggctcaagcaatcctcccaccttggcctccccaaaggctggggattacaggtatgagccaccgcaccgggcctctacggtcaataggccctagtataggagaggatgacccggggctggaagacttgagggtcaggatatctcctctaccacccaggccaagaatcaaccttcggggaaggatctccggctgaagctccttccatggccagacagacagatggcagagatgggagggaaagatgtcgtgtgatgccgggtgccctctgtgcgggggggttgggtcagcagctgccccattacgccagcctcgggcagtagctcccaggcggagggtgctagcagaccggaagtaaaccggttataaaacatctcttttcggttaatttccaagtggcatgtatggcagaaggacaaaagcctaaattggctttatgtacctcaggttgtggaaaataactcggtgaccacctgcggggtatgtgacagagatggcgttctatgcaca

SEQ ID NO: 601487 - DNA, 313 bp, Homo sapiens
  misc_feature (13)..(13): n is a, c, g, or t
  misc_feature (29)..(29): n is a, c, g, or t
  misc_feature (214)..(214): n is a, c, g, or t
gccccattatggnccatatccacagtgcnggcagagattttgtttaatgggcccagttttgggggcccagtttatggcccagattttggggggcttgctccccaacagtcaattagcccctaaaaaggtgctcaacattagggaaatacaaatcaaaaccactgtcagataccactccacacctatttaggatggctattattaaaaaaaaaantgttggtaaggatgtgaagacattggaactcttttgcattgctggtgggaatgtaaaatggtgcagctgctatgaaaacaacatgaagcacctcaaaaa

SEQ ID NO: 601488 - DNA, 107 bp, Homo sapiens
aaagatggaaacatatacaaactagaaacatgcaaccatcatcttccacagtcaagtcacaatgtttccatctttgtgataagatgatttaataaatctctttaaat

SEQ ID NO: 601489 - DNA, 324 bp, Homo sapiens
  misc_feature (37)..(37): n is a, c, g, or t
  misc_feature (58)..(58): n is a, c, g, or t
  misc_feature (279)..(279): n is a, c, g, or t
  misc_feature (314)..(314): n is a, c, g, or t
acaagctaaagtcccatgattggctgtctgcaaggtnaggtgcaaggaagccagtggnggatcagtccaagtcccaaaacctcaaaaatagggaagccgacagtgtagccttccatctgtgggcaaaggccaaggaggcctggcaaaccactggtgtaagtctaagagtccgaaagctgaagaactgggaggctgatgttcaagggcaggaagcatccagtacggcagaaagatgaaggccagaagactcagcaagtctgctttattctagccgctctngtatccgatttagattgggggccacccaagatttnatggtgggtc

SEQ ID NO: 601490 - DNA, 259 bp, Homo sapiens
ccggtaatcagacgcctgaacacactgcagtattacagggtgccagatggagcagctgtggccctctgccgctgcctcaccaagcaggtgctccgggacaaccaggattatgtgcctggagagcggaccccaatgctggaggatgtatgatgaaggaggctgtcccgccctggcacctgctgaagccaagtgaagagccggagccgaccatgcctgggaggggcaccctccgaggcggggagcgatagcgcgccaaggc

SEQ ID NO: 601491 - DNA, 1524 bp, Homo sapiens
ggtaatttcctgctgcgcgtgtgcgttcacccatcgtctcccgctctgatggctaccaggggcacgatggggtattagggcgcagcatctgcctgcgagaaccagttcggctcttctgcagacgcgccgggagacggcagcaaccgaggggtctggcaggcggaaactccgccgacgatggccttaacgactcatgtgctgctctctctagcgtgcattacaagcaagcgagacagtatgcatgttaagtccgacaccattaccgacactctctacgacaatgtcacactgcagcgatttcctacggacttgcgcaagacaggaggcgagccagtaagagaatagaccggggagacatgggaggccttgcggctcggaagccaagcggagggtcttgtccggttgcagggtgcgacctttgggaatagtgcccgctccgtgtacgagcgacctgcacgagattgtaagccgcgaggcctggacacggagacacgacacctaagcgtttcatgcatgtaccgcattcgagtttgacccgtagcgcaagggctggggcacaaagacgacaaacattctcaaaagagtggcttgccatttgcggggaatgtactcccctgggccacgacaacaccaagggcataaaaaggcgtccgcgaggcggtacccaagtgccacgaaaccacgttgaggcgtgttggtgcccagttgagttgcgcaattgggacgaaaatcttgtggggtcagaagaaaagggggaccgttgcccaacacggaacggcgggccacgaggggccacaaatgtccgtacggggccaaattggccacggttttttccctttcccccgggggaaggcagcccacagcggaacttctccggcggaatgttgacttctcgcagaatgtccacacattgaactgcgggcacctcttcgtcgcaaaacaccggtgacacgctttcgggggacaaggtgaaaggccaactaggcttcccccttttgttctttggggggatcaaccttctgggcagatccgaacgcctctgtggttggacacttacaccccagactttttgcccccaagatgcgaactgggggaacccacccattctgtacgtataggcaccctacaacactagcgctatacgggggcacttccgacacgcacaccgcgctctgggggatcgtaaacatcttcgctgtcgatatttttattgtggcccccaccccccgccagcgtctataacacgtcatctgccaccaaaagtagtggctaaaagcctacaccccatctagacaccttttacgacagcgacgcaacaaggcctatccacagccccacagcaacacgcaaacctgcggcgtttggcagacacacctccgacacaacaccgatcaggacgacgtgagtcacaaggttacgtttgcgccccagaagggcgaacacacacgcgccttcctcgtaatcgtcgcgacaaactacagctagacacgcaccgcagggacatcaccaatcgagggctgctag

SEQ ID NO: 601492 - DNA, 742 bp, Homo sapiens
agacagatgaggcgagaggaggaggaggaggaggagaaggctctgggctcctctgcaaaaataaaaataaaaaaataaataaaattttaaaaataataaaaattcactatatacacatataaagaaataaaaagaagtctcagtttgcagctattgtgtcaaaattaatatccatttcttttatatatacggtgaatattgcgcaattatagatctgggattttgaaccacttaatgaagcggcaacaccaggtggttgaggtgtggcattcttcgctgatttggctgtccccaatgtttacattatttaatcttgcaaaaaatggttctgtgcacttggatgtgaaatgctgtccagttttatttttttctatggtgtatcctgttggatgtacaaaaaatttcagaaaatgatctctgtagatatctggtaattgggtcatctttagaagttatcaggaactgtgtttaacaacaagaagagaacttttctaaggaatgatacatagaacaagatttcatttcacacatgagtggtaaagctgtgtgttccttggtgagctgcaaggttaatctgcccaagttaatgcaacatggaccacattttttatgtcagaaaaaacaccacacaaacacacacagaaaagagcaaacgcgaaaatcacacgcagcaacaaacaaaacctttgggggccccgccccgaaaaggttcaacacacttgtggggcgggccccatagata

SEQ ID NO: 601493 - DNA, 504 bp, Homo sapiens
  misc_feature (40)..(40): n is a, c, g, or t
  misc_feature (130)..(130): n is a, c, g, or t
  misc_feature (153)..(153): n is a, c, g, or t
  misc_feature (155)..(155): n is a, c, g, or t
  misc_feature (163)..(163): n is a, c, g, or t
  misc_feature (167)..(167): n is a, c, g, or t
  misc_feature (174)..(174): n is a, c, g, or t
  misc_feature (187)..(187): n is a, c, g, or t
  misc_feature (213)..(213): n is a, c, g, or t
  misc_feature (220)..(220): n is a, c, g, or t
  misc_feature (224)..(224): n is a, c, g, or t
  misc_feature (226)..(226): n is a, c, g, or t
  misc_feature (249)..(249): n is a, c, g, or t
  misc_feature (289)..(289): n is a, c, g, or t
  misc_feature (305)..(307): n is a, c, g, or t
  misc_feature (317)..(317): n is a, c, g, or t
  misc_feature (398)..(398): n is a, c, g, or t
  misc_feature (451)..(451): n is a, c, g, or t
ccaccccagggtgggctgtcacgggggcctcacgccaggnaccccgcccctcagggactgctcgtgtccagatcttggccagcatggaaaactccagatagtgggggcaggggtccaggtcatctttatnacgccccaggtcaagggttcttngnacaaaaanaggnctccgtntgccagcaggggnccgccagcagctctaagtgaatgtgnagaaaanggantncgcggggcccggtagaaaagccncgccccgccggaaaaagctccaaggggtggggccccccgncccacggcaggcgagnnncgggggggtngggtcggcgtgcggtaggtaagccgtccagcccggaggggtgccagccccaagcccggtgccaccgcggcaatgggcaggnggggccggacgaacgaggcggcggcggcggggcggtgggggggtggggggggncccggcgcgcgggggcggagcgcgggccggggccaccgggcggtggcgccctg

SEQ ID NO: 601494 - DNA, 1616 bp, Homo sapiens
  misc_feature (398)..(398): n is a, c, g, or t
  misc_feature (400)..(400): n is a, c, g, or t
  misc_feature (499)..(499): n is a, c, g, or t
  misc_feature (515)..(515): n is a, c, g, or t
  misc_feature (637)..(637): n is a, c, g, or t
  misc_feature (831)..(831): n is a, c, g, or t
  misc_feature (833)..(833): n is a, c, g, or t
  misc_feature (835)..(835): n is a, c, g, or t
  misc_feature (849)..(849): n is a, c, g, or t
catctgggcaagagatctacccgtagattgacgcgcgttgcaccaagatctcccgtggggacttccggtagcctcgcgcaatgatgcacgaactcgctgcagagcccaggacttcagcatagtgtccaggcgatgaagcccaagctgtctcggacacggtcggattgacatgctcggccatacgcacttcgtcgcggctgatcggtgatggctgcggcaggagtgagtcccttgatgccttgcccagagttggtcatacggcgcggcgcctcttgactggactcatgaatcgggccgttcgggtactggctcaccgtgcgatgggtggccggctgagggcatctgactgacgttggagtgggtgagttgcggcaatggatcaacgcccacctacaacnanatcttctacacgctgtcccctgtcaacggcaagatcacgggcgccaacgccaagaaggagatggtgaagtccaagctccccaacaccgtgctagggaanatctggaagctggccnacgtggacaaggacgggctgctggacgacgaggagttcgcgctggccaaccacctcatcaaggtcaagctggagggccacgagctgcccgccgacctgcccccgcacctggtgccgccctcncaagcgcagacatgagtgatggcgcccggccccgcacctgccatttgcacgcccggccgggaggcagagacggggggaggggaagcctcaccatttctcaaggtccataaagactgagcggatgtttcctcgcctctcgaaaaggaaaaccaccatctttcttttaaggctgttcctgggcctggcggggaggnangntgagggatggaatngtgtgcacaagaactgtggctattttaatatataacgttagaggctgcgttctttgtcgccgcctcccctgatgtgccaagccctgtgtgcacggactctgacccacctggactttgctgtggcttggagctggacatgtgcagcgactgcgacctgtgggggagccaggtacgacctttttggccagctgctaggctgaggctgcatggacaggaacaccaggcaccctcacgtgtgcttctgagctgagagtagcttcacgtggaccgtggcttccttcctcacctgggctctgccttccccacgtgcatctcaggagcgaagatggagtacttgtggccttacacactccacgaggacccagtagtcaccgtgacgcggagccttgacccattacatccacgcgacacaaccgggttccgagcgctgcaacaccgaactcaagcaaggatacatagaaaggcacgcggcccaggccagcatgggaccattagaaggggacgatccagggacaggacaccggagagaacagggtatacacataaaaaaacataccaacacgaactaaataaccgcgtcagtggaaacaagacgaaccttacacacaacttgtacccaaatgaacccacaccaaatatcccaacgcagcagggacacacacggacgggtgcatatgggccaccgactacaacaccgcccacagagggagacacccgcccggcggggcaacaatgagagcgaaccgtgagaccacgccgcgtccacg

SEQ ID NO: 601495 - DNA, 1334 bp, Homo sapiens
  misc_feature (49)..(49): n is a, c, g, or t
  misc_feature (64)..(64): n is a, c, g, or t
  misc_feature (78)..(78): n is a, c, g, or t
  misc_feature (84)..(84): n is a, c, g, or t
  misc_feature (89)..(89): n is a, c, g, or t
  misc_feature (116)..(116): n is a, c, g, or t
  misc_feature (118)..(118): n is a, c, g, or t
  misc_feature (217)..(217): n is a, c, g, or t
  misc_feature (233)..(233): n is a, c, g, or t
  misc_feature (355)..(355): n is a, c, g, or t
  misc_feature (549)..(549): n is a, c, g, or t
  misc_feature (551)..(551): n is a, c, g, or t
  misc_feature (553)..(553): n is a, c, g, or t
  misc_feature (567)..(567): n is a, c, g, or t
gcgcctttcaccccaccatcaacccccccttcaaacacaaactacaacnaaaaaaccaacaagngcatcgacgacgtngagtgngtcgntgaacaaaaacaaacccacctacaacnanatcttctacacgctgtcccctgtcaacggcaagatcacgggcgccaacgccaagaaggagatggtgaagtccaagctccccaacaccgtgctagggaanatctggaagctggccnacgtggacaaggacgggctgctggacgacgaggagttcgcgctggccaaccacctcatcaaggtcaagctggagggccacgagctgcccgccgacctgcccccgcacctggtgccgccctcncaagcgcagacatgagtgatggcgcccggccccgcacctgccatttgcacgcccggccgggaggcagagacggggggaggggaagcctcaccatttctcaaggtccataaagactgagcggatgtttcctcgcctctcgaaaaggaaaaccaccatctttcttttaaggctgttcctgggcctggcggggaggnangntgagggatggaatngtgtgcacaagaactgtggctattttaatatataacgttagaggctgcgttctttgtcgccgcctcccctgatgtgccaagccctgtgtgcacggactctgacccacctggactttgctgtggcttggagctggacatgtgcagcgactgcgacctgtgggggagccaggtacgacctttttggccagctgctaggctgaggctgcatggacaggaacaccaggcaccctcacgtgtgcttctgagctgagagtagcttcacgtggaccgtggcttccttcctcacctgggctctgccttccccacgtgcatctcaggagcgaagatggagtacttgtggccttacacactccacgaggacccagtagtcaccgtgacgcggagccttgacccattacatccacgcgacacaaccgggttccgagcgctgcaacaccgaactcaagcaaggatacatagaaaggcacgcggcccaggccagcatgggaccattagaaggggacgatccagggacaggacaccggagagaacagggtatacacataaaaaaacataccaacacgaactaaataaccgcgtcagtggaaacaagacgaaccttacacacaacttgtacccaaatgaacccacaccaaatatcccaacgcagcagggacacacacggacgggtgcatatgggccaccgactacaacaccgcccacagagggagacacccgcccggcggggcaacaatgagagcgaaccgtgagaccacgccgcgtccacg

SEQ ID NO: 601496 - DNA, 186 bp, Homo sapiens
gttccaaccaactatcccgtgagacacgactccctgagagagatattgtagacgaggcttcattaaggcacctggatcctaaagatcaaaataatacagctgggatacttctgccttagctttctatatggatgctccaagtcatcagtatgggtgacactcatgaatcacagtagctatggcagt

SEQ ID NO: 601497 - DNA, 388 bp, Homo sapiens
  misc_feature (10)..(10): n is a, c, g, or t
  misc_feature (73)..(73): n is a, c, g, or t
  misc_feature (99)..(99): n is a, c, g, or t
  misc_feature (135)..(135): n is a, c, g, or t
  misc_feature (238)..(238): n is a, c, g, or t
  misc_feature (328)..(328): n is a, c, g, or t
  misc_feature (365)..(365): n is a, c, g, or t
aagttttaanttccaacaggttttgggaaacaggtggtgtttggttacatgaataaggtctttagtggtgatntctgagactttggtgcaccccatcancccaagcagtgtacactgtactcaatgtgtagtctnttatacctcataccactttcaccctttccccaagtccccaaagtccattgtatcagtcttacacctttacatcctcacaaatttagctcccacttatgagtgnggatatatgacgtttggttttccattccagagttatttcagttagaataagtctccagttccatccaggttgctgcgaatgacattaagnaataatgactttaaacctctgttctctgtttagtagnaactataaacctttagatgatgg

SEQ ID NO: 601498 - DNA, 320 bp, Homo sapiens
tcccagtccatccctcccacaccccacccatccccaagagagacctttcctaagacagtctaaggcccaggcacggtggctcatgcctgtaatcccaacactttggaaggtggaggatcacttgaggccaagaattcaagatcagcctggacaacatagcgagaccctgtctctgtaaaaatttttaaaataatttaaaaattagccaggcatggtggcatgtgcctgtagtcctagctactcaggaggctgaggcaagagtttgaggctgcagtgagctgcagtcacactactgcactccagcctgggtgacagagcga

SEQ ID NO: 601499 - DNA, 245 bp, Homo sapiens
gcccacggcgtcggcaaacccttttccacggggatggataaagaaaatactcctgtaaagaattacacaggtattgcagccttataagtggagtctgtggctcagactcactgactgacataaagtcgagatctacagaaaagaacttaatatttgagcctgtggatgtaaagatgtgctgtcaaatcagtgaatgtgaataacaagaagtccagtcatgaccaagttgagatgaatcatgtttt

SEQ ID NO: 601500 - DNA, 2519 bp, Homo sapiens
  misc_feature (237)..(237): n is a, c, g, or t
gtcagcctcgggccgtcttgcggggctgcggcagccccgcaagaggcttccctcttctttcctcctccttccctcccttcctttcttccttccatctgtccttgttttcctcccttcccttcctccctgcctctttccttccctccttctcttccttccttccgtctgtccttgttttcctccctgcctctttccttccctccttctcttccttccttccttccgtctgtccttgtnttcctcccttcccttcctccctgcctccttccttgtttaagaatttgaaaataaagtttcccaggagtttgaattggagtcgagatttaagtggctgaagttttgcatttcactaggaaaccaacagctttaatcatgaaatgaaagcacagctgggcattgggccagtcacagagtgtcttttgctctgagcacttcacaaacccattgtggaggggaggaaagaaaaagaaagccatctttaattatcttagctgttcctaatgtctttggctgcaaagagctagctgtttccttcaaccttggtggttgcacgggtagtgtcctcagcagtgagagggcaggtctgccctgtggtcaggattgcccttgtgaggggcagagctctccaaccatgcagggctccgtgtcggcatggtgtggactcgggtgctctgatcatcccctgtgtttgcgtctgaccctgtgtggttgcattcccttgatggagtgggaagtatgtaatttgtagtgctgaggacattcgtctgtttgattttctggtgttttcaatgacatgcatgttcagcagagaaagatgaataaacactgtccaattcttctctccacatagaagcctcaagaagaggtgaggagatgccccgatttccttatttcagagcagtacatgcgttcgtctcacgaaagctcttacaactaaaacaacagcaccaacaaaccaggatcaaaataatcgtgcattttccaggattccatgttggacttctcagtgctttggagatcaggaaataatcatgctgttgcagcagtatggttttgtgtctggattttattcatacaggcatgtgtttacaggcatgagaattctgtattgaaaagaaagtccttgtttttttctaacgtatctttctgttccatcaactgttaaaaccaaattgttaagaacattgagcttcttaggagagattacatgcagctacttaggaccacctcagcaaaatggagttgcctgggtagatagcagcagcagctcaccagccccacgctgccaggctgctggctgctgtccaccaggcagctgtggaacctccatgttctgcctaggtgttgtggcaagaacagcagggaaacaggcggccgcctccaggccacaggtggacccagggaccttcagttacgccgcttcaattgaattcgtggtggtttctctgctacagcagaagtggaagaagctcttgtcttgtttggcatttgtcccattttttggctaataattggctttgaatttctctgtgccctgcttaccaattatagctttctggattggctgttcttagcagtgcaaatgtcaatgcaaagaagcaagcaggcggctactttctgggaagaagcatagtccgtgctcacactggatataaatctgcaagatttgggggtttggcaaaataggggtggagggaaagctgccatggctgtcagaaattggggctttttgaagaaaagcttgtgtaggcatcagccactggctggccagaattccatgaatggaagcaggtgcccgagtgatctggggctttacatgtggatataaatagaagccgggagcctgaggctttgctttaggaaaatcatgagccagaaaacagaggaggtgattgtcagtagtcacctcacgccgctagtgttttctaatactctctcgaattgtcaaagcaaaggaccttataacagcaacacgtgtgtgactcgaagcagcgagcttcccttgggaaaaggagcctcttctcagcagagggtcccagcctttctgtccttccccatcggaatgccaggctctgtgagtttggatgttggacattgccacctgaattccaggaggccggggagctccagtgatggacttgtccccaaaagagtggtgctgttctcagagccataaatgttccactgaaagtgtctgtcccctggctcacgctggctgcacttgcttgaaggaggctgatttaagggttctaataggaagacaaatgaaactgtcaaattttatctttaagcatgtgagtaagtttgctcattcgcttttactattgatgtatagttttaaaattcttaatttaaaaattattttaatagtaaatttttcacaagtgaacactttttatctttaaattaaaattctgaagctccctagttagttagatccaattgctggttacattttgggaagctctcattttagtgctatgtagtttcattgaataaacatgttttaatgaaaataa

SEQ ID NO: 601501 - DNA, 164 bp, Homo sapiens
agcggacctcagacagacacgtcgggggctgccgggatcggcatataggggggcctctggcctcttcggccggtctgtctaggcatggtaggcatcatgacgtccagcaggacccttcttctggcgtatttcattctgatgtttatagtatatgccttggaagt

SEQ ID NO: 601502 - DNA, 135 bp, Homo sapiens
ctatacggtcattcaagtatacctctagaataggactgatactgtgtctttgcactgtggagcacaggccaggtgctcgatggactctgctgtcatctctgttgggcgcagctgcactatcaggcacatccttca

SEQ ID NO: 601503 - DNA, 112 bp, Homo sapiens
cagaaagtcacaagggataagcggatgaggtattgtcatagatagctcttattattgtgagatacgcccctcatccgcttatctcaaaataataagagctatctatgacaaa

SEQ ID NO: 601504 - DNA, 815 bp, Homo sapiens
  misc_feature (766)..(767): n is a, c, g, or t
aactgtgatcctccacgcacgccagactatacctgtctactcagcgatatgaagattaactatactacgatcttcatacaccatgcctggcatgattcagtgagtggcaagaaatatcctgtctttaatcctgcacctgaggaggagctctgccaggtagaacaaggagataccgaggatgtcgaccaggcagtgaccgccgcaagacaggcttttcagactaggatccccgtggcgtactatggatgcttccgagagggggcgactattatacaagttggctgatttaatcgacagagatcgtctgctgctggcgacaatggagtcaatgaatggtggctctattccaatgcatatctgaatgatatagcaggctgcatcaacacatagcgctactgtgcaggttgggctgaccagatccagtgccgtacaaataccaatagatggaaatttttttacatatacaagacatgaacctattggtgtatgtggccaaatcataccttggaatttcccgttggttatgctcatatggaagatatggcctgaactgagctgtggaaacacagtggttgtcaaacagctgagtaactactctcactggtatcacgtggcatcttaatacaagaggcaggtatcctccggagtagtgatatgttctggttatggctaagaggggagcattctttccatggttgacagtacttccggaccgagtgcagtgtaaactcggtcctgacattgggtgttatcttaattgtgagcnntcaacagcaccccacgcactaccaattaacccggcaccacatcggcgc

SEQ ID NO: 601505 - DNA, 479 bp, Homo sapiens
tccgacaagtggaaattgtaaatcatatgccgagttccagaagatgattggcgatgcatataaatcacaggcatatatatctcataaccaaatacatgcctaaatatggaaatatatgcttttatatgcatgtccggagtcatcctcgtaaagttgaccgtatggtcatataagaagtgatgcagtatcgtatgcgtaataaccatgtcgaacgtggataaatatataatatgcatatatatcatatacagtagtccatcacctcacatagttaccagtttacttatagttctctctctcttacttccttcctttctttcccttcttttaaatatttcggtggttgagaacacttaagatccaccctcttagcaaatttcaagtatataatatagtgttgctaattgtagtcacatcgtagtagaatacatctccagaattcattcatttggataactgaatttctgtgcccatttcaa

SEQ ID NO: 601506 - DNA, 286 bp, Homo sapiens
accgtttattagatgtgtactattaaacattttattctatgagacaggactttgctctctcacctaggctggagtgctgtggtgtaaacacggacatcactgcaacctctgtctcccgggtttaagcgattctcctgcctcttactctgtcactcaggctggagtgcagtggcgcgatctcggcacgctgcaacctccacctcctgggttcaagtgatgatcctgcctcagtctcccttttagctgggattacaagtgcatgccaccacgcccggctaagtttagt

SEQ ID NO: 601507 - DNA, 435 bp, Homo sapiens
acattaccacatcaccattgaacagatcaactgcagaaaaccaacaaagacacatggacttaatccgcactacagaccacatggaactaatagatatttatagaacatgtcatccaatggctgtagattaaacattcttctcctcagcaaatgaatgattctcaaggacagaccatatgttaggccacaaaacaagtcttaaaacataccaaaaaactgaaaccatatcacatatcttttctgaccacaatgggataaaaccagaaatcaataacaagaggaatttcggaaactatgtaatacacgaaaataaaccaatacactcctgaatgaccagtgggtcaatggacagatgcagaacaaaatcgaccaattccttcacagaaattataacggaaacacaacataccaaaaaacttgggatacggggaaagc

SEQ ID NO: 601508 - DNA, 545 bp, Homo sapiens
ttttcacagaatcacaatgccaattgataggctcaagtgtctaaaaagagggcatgaacatgacttgacaaaataggtaaacttaatttcaggactataataggagggaccaattcaaactctcaccattggattcacacccacaagaaccactttaagggcattaacgagctctgaaaactgatcaggtttgcgcaagtaacccatgtatcttttaagaagacttgtgcacttgcccaggctcaaggatattaaaagctagcacatacagcccataactggaggtggaaatacaggcgatatactattacggtatcatccatcaattacagtttggaatgtctctgtatcaaccaaatggattatcacatgttggcacatcttatgtcttactgagcaaagtgcattgctacagtaatcagtgctgctattcagcctatgtacgtactacagcctatgattactgacagacagaaggttcttgcatagactgcctctcgttgagaacttatgatgtatacaatgactgccgctatgaactactt

SEQ ID NO: 601509 - DNA, 713 bp, Homo sapiens
tgtaccgcccggataaggatcgcgagctgtggccaggtgccgcacggtcagccctgcttcagcccgcgtaggcagcgcgcctcgcctcgggcgttctaccgcgccccgccaggccttgcgcacgccggggccagggccgagggccgcagcgccggggccggtcgatgagcgcgaggagccggcatgagcgcagacagcagcctctcgtgggggcagcccaccggttatgggaccctgacgatagggacatcaatagatcccctcagctcctcagtttctccgtgaggctcagcggctactgtggcagtccatggagggtcatcggctatcacgtcgtggtctggatgatggctgggatccctttgctgctcttccgttggaaggcccctgttgggggggtgccggctgcggctccggccctgcaaacctggcccaagccgaaaacactcgttcatcgaaataggagacacaagaggatagttcctggcagctcttcactgtccaggtgcagactgaggcccatcggcgagggcacgctggcagacgtccccaccagtcccaggcagaggatggccggagccaggcgcgggcgttggggcgggtaccagagggtgcctggaaggatacggccatctcaccaagcagcgaggacggcgaagcgggtgctgcggtaatacctcttccaaggccagcgctatactctggatcgagac

SEQ ID NO: 601510 - DNA, 883 bp, Homo sapiens
  misc_feature (43)..(43): n is a, c, g, or t
  misc_feature (186)..(186): n is a, c, g, or t
  misc_feature (188)..(188): n is a, c, g, or t
  misc_feature (202)..(202): n is a, c, g, or t
  misc_feature (204)..(204): n is a, c, g, or t
  misc_feature (209)..(209): n is a, c, g, or t
  misc_feature (211)..(211): n is a, c, g, or t
  misc_feature (213)..(213): n is a, c, g, or t
  misc_feature (217)..(221): n is a, c, g, or t
  misc_feature (224)..(224): n is a, c, g, or t
  misc_feature (227)..(227): n is a, c, g, or t
  misc_feature (243)..(243): n is a, c, g, or t
  misc_feature (260)..(260): n is a, c, g, or t
  misc_feature (267)..(267): n is a, c, g, or t
  misc_feature (284)..(284): n is a, c, g, or t
  misc_feature (301)..(301): n is a, c, g, or t
  misc_feature (303)..(304): n is a, c, g, or t
  misc_feature (312)..(312): n is a, c, g, or t
  misc_feature (331)..(331): n is a, c, g, or t
  misc_feature (339)..(339): n is a, c, g, or t
  misc_feature (392)..(392): n is a, c, g, or t
  misc_feature (400)..(400): n is a, c, g, or t
  misc_feature (410)..(410): n is a, c, g, or t
  misc_feature (425)..(425): n is a, c, g, or t
  misc_feature (437)..(437): n is a, c, g, or t
  misc_feature (439)..(443): n is a, c, g, or t
  misc_feature (445)..(447): n is a, c, g, or t
  misc_feature (463)..(464): n is a, c, g, or t
  misc_feature (471)..(471): n is a, c, g, or t
  misc_feature (475)..(477): n is a, c, g, or t
  misc_feature (532)..(532): n is a, c, g, or t
  misc_feature (534)..(535): n is a, c, g, or t
  misc_feature (537)..(537): n is a, c, g, or t
  misc_feature (540)..(540): n is a, c, g, or t
  misc_feature (542)..(542): n is a, c, g, or t
  misc_feature (545)..(548): n is a, c, g, or t
  misc_feature (552)..(552): n is a, c, g, or t
  misc_feature (556)..(557): n is a, c, g, or t
  misc_feature (560)..(560): n is a, c, g, or t
  misc_feature (570)..(570): n is a, c, g, or t
  misc_feature (593)..(593): n is a, c, g, or t
  misc_feature (610)..(610): n is a, c, g, or t
  misc_feature (619)..(619): n is a, c, g, or t
  misc_feature (659)..(660): n is a, c, g, or t
  misc_feature (666)..(666): n is a, c, g, or t
  misc_feature (679)..(680): n is a, c, g, or t
  misc_feature (719)..(719): n is a, c, g, or t
  misc_feature (728)..(728): n is a, c, g, or t
  misc_feature (735)..(736): n is a, c, g, or t
  misc_feature (746)..(747): n is a, c, g, or t
  misc_feature (749)..(749): n is a, c, g, or t
  misc_feature (751)..(751): n is a, c, g, or t
  misc_feature (765)..(765): n is a, c, g, or t
  misc_feature (770)..(770): n is a, c, g, or t
  misc_feature (780)..(780): n is a, c, g, or t
  misc_feature (784)..(784): n is a, c, g, or t
  misc_feature (788)..(788): n is a, c, g, or t
  misc_feature (807)..(807): n is a, c, g, or t
  misc_feature (817)..(817): n is a, c, g, or t
  misc_feature (822)..(822): n is a, c, g, or t
  misc_feature (859)..(859): n is a, c, g, or t
gaggtataaagcccgatacctgccccgcgcccggtccgcgganccgctgcagctcccgctcgctccggacgcggaatcgggcagcagcgggaggcggcccggagagccgagggacccactgaagctccagcaactccagaaccaaatccgactggagcaggaggccggcgctcggcagcctccgcnanccccgcgcagcgcngnccctntnancccnnnnngcngcngcccgccttccccganctcgcggcctgcacgcngcccgcntccccggagcccatgancgcgctggcctcccgcncnncccccgcnatgcagtcctccggctccntcaactangcgcgccccaagcagttcatcgccgcgcagaacctcgggcccgcgtcgggcanggcacgcnggcctccaanccagctcgtccagcntcccatcgcccntnnnnntnnngccgaggcagttcggnngaaaaancgtnnngcccttcgcgcccccttcggcgctgagccgaggccccgtgggctcctcctcgccntnncnccncnaannnnaaancggnnttnagcccagggnccttcccgtgcccacgtgttccnctgccgcgccaccaccncgctccgancccggacaggcgtccactgctcgtcgctgccaccgcttcnnccacgnccagacgcccgcnncctcctcagcgctctgctgccctcgcaccgccgccgggncgttcaacnccctggnnctgcccaatnntntnaccccgcagatttncaaanaaggcaatanaatnctanatagctccgatgaggaatnaaggcaaaangatgntgttatcaagactggacgaaactcgctcaagaggacntctgacatggcagcgagttacata

SEQ ID NO: 601511 - DNA, 296 bp, Homo sapiens
gtatatgcatctggagctatggcagcttcttgcacccatgagcaactctatgtgcaagagcaggtagctagaacgagcctgcagtcctgggcttatatcctgcttcccagggagcttaaagatagcaacaaccacagacatttgcatcaaatgccaggaaattcttaggctgggattgtcgggatcgtttgaatggttgcgcgtgaaagcattgttataatgggcttgtcgaatacggggaaagatgagctggcttttagctgactccactccccgtgtcccatgctcaatagatg

SEQ ID NO: 601512 - DNA, 733 bp, Homo sapiens
  misc_feature (249)..(249): n is a, c, g, or t
  misc_feature (269)..(269): n is a, c, g, or t
tggctagtatcccagctcaggccaccaacgaacatttttcccgggtcctcctcgttctgtgcgggcgtttgatctggtcgccctcggggccgttctgattcccgctcgggggcgccggggtcgcgccttccagcccccggccgggggtgcccgtgtgcacagcccgcggccggcagatttcgccctttcggggacggcctcatgtgtcgcgttctcgggtgggcgccgcgtgcgtcctcacatgtgggncgtgcttccttgcgcccgtntttccagaacatgtgccatatggcgccaggaagagggccgcgcggggggaggagatactcactctcgtgcgcggcgcgaatgtgatagcgcccgcggggggggccccgtctcttcggtttctcccacacccgccggacgagggggatagaagggcgtcccgaaagaggtctactcggggccggccaaactctccagaggcctcgcgcgccgtgtgctagaaaagggccttcgagcccccagagatgtcagagcccccagggagagacggtgtctctcccaagcgtggggtgtctctccctctcctctccctgtgggggccggcgcgtccgaaagcggggaaaaccccaaacgcgagaaccaaaaagaggccaagagaactctcgcgtgtcccccgcgcggggggaaacccccattttctcaaccttttatactataacgcgaggaaaaaactcttataaaccaa

SEQ ID NO: 601513 - DNA, 474 bp, Homo sapiens
cacgaatgtatagactggactgtaggaatggactgcactggaatggaatggaatgcatggaatgggatcaacccgagtgaagtggaatggaatcgaaaggaatggaatagaatggaatggtttcaacccgaatggaatggaaaggaatggaatcaacccgagtggaatggaatggaatggaatggaatggaatgggttcaacatcgaattgaatggaaaggcaatggaatcaacccgcagtggaatggcatgttaatagcaatggcaatggcacatgcaatggaatggcatggaatggaatgcaatggcatgcattcaacccgaatggaatggcaaggcagtggattaaacccagagtggaaatggcatgaaatggagtggacatggaattgactggaatggaaaggtacggaatagaatgggaatggaacgacatggaatggaatgtacatccggtgctcacgggtaccgagc

SEQ ID NO: 601514 - DNA, 237 bp, Homo sapiens
  misc_feature (23)..(23): n is a, c, g, or t
cattttagagtaactatctcggncttcggagagttcctgggtatgaaggtttggctttaattaaagtctcagcacagtgttaaatgccattttattttaggtcatcattggcgctaatgaaatgagtggattccttagtgctctcattttgagaaagtgaacagcaacatctgagcttggtggtttccattttcgcttttccccctcccatgctctgttcaattaaaagttttgaga

SEQ ID NO: 601515 - DNA, 83 bp, Homo sapiens
gaccctgctgcttcacaggctgctgcttccttccctttgctcaagaagacaacttgcaggagacaggtctttacttccgccat

SEQ ID NO: 601516 - DNA, 217 bp, Homo sapiens
agtaaaagaggctctgatgagttcattaaaaaataagcacccccacctcatgcactttgatacagcaggatctagtaatctaggcgcctcaggtaagcgtggatagctcttagcacataggacaggtcagcgttcacacatcaacactataactatgcggcggaactagctccccgctagccgtcaatgtactcaggagactacctgtgagatcctg

SEQ ID NO: 601517 - DNA, 688 bp, Homo sapiens
ctatatctggagcgagtgctgtgaggtgctactccgccgcgccttattcgacacggtgtcagggctgtgagactaggatgtcggacacgtgtagctctatccaggcccacaagacagcagctggactctctgctggacaggctgcagcggaggcgtgaatctggattcgtgggcacttgcgcatctacgagaatccagaggcggctcttgtctccaaccttccgtagtgacagcccatgtagcctacttgcacccacctctggtggccctatagcccagaatcaagcttcgagcagttcctgacattagttacatgatcctgagttaccagaagaatgttcgttacaggcacactctctgatctggccttaacattggcccactgatgctggtgtccatctgtcttgccgatctccatgccagatgctcgctgccactcaaggatggggtaagcaaagcctcctgcaggcaacttttgcagtctcatgcgagttgacttgaggtaaagcgatggtcatcctatcacattgtagtgatgcagcagtcctactcttgtaacctatgtctgtaccacttccaagctctctgtccatgatgggtgctgtggcatgaaaagaacgggctcctggggaggtaggcagggactgtcccagggcacaagcgggtgtgcactaacaggactcgatta

SEQ ID NO: 601518 - DNA, 180 bp, Homo sapiens
ccttggtgtatcctttgcatggttgcggctgagggattcggtgtcgaaatggctttcaccgaaggcgttgctgatcggctttgtcgcagtcatggctggttgtggcattgttgatcacccgtccaccgttcagtgcagaactccaagcggtgttgcgcccggtttcgactgggctaaaaa

SEQ ID NO: 601519 - DNA, 464 bp, Homo sapiens
gttgcgctactaccatagattatacatgaagttgcgagcaccttggacgcctcgtaacattttgatgtcattttcaggagaatcacgctagtagatcttatgcgtccaccgaagcctcatttttgaaccccctagctcatagttctggccaggatcagcttcttcttgcaatcctgtatcatccaggaaaagtaaagaatatgcatgtatgtgtacactgtatgtgcatatgagagtgtgtacatatgtgtattgtggatgtgaacatgagagcatgtgtgcatatgtgtgtgtatatgtgcaagagtagcacgtgtgcatgcgtgtgtgtgtagcaggagtgggtgggtggagtttggccatgctgagcatctcagcacaactgcacttacactgtgacctcctccacttttctgccatccctggttctggattctatcctcttccttccccatcttccattg

SEQ ID NO: 601520 - DNA, 1116 bp, Homo sapiens
ggcgcggacacgcttctggaaggaacgccgcgatggctgcgcagagaagatgccccgaggtccagttcaaacttgtatgggttggtgatggtcggtgactggtagtaaaccgagccttcgtgcaagaacgtcagttctgaccttgtgtgacatttctcgacgacatgaacgtacctgtagcctagccgttgaggtgttggacggttcactcccctaggtgttccatcatcaacagagtgacctacttcaaggttgcaactcgttatgggacacaagccggccagggagaaacttctggtaggactagagaggatgggctattattagtctcaaaggcccatgtgtgctcatcagtaaggtgttcgatgtaaactatcagaaggatgttacgttacgaaagaagtgtgcctaaactggctagtacgacgatctgggtacagagtcgtgttagatacatatccatttccggcattagtctgctagtagtaggctaatcggatagtaggcaatcattcaacgggcacgaggggaaacgttgcatatgggtccgtaaaattccctatggggcctttgccgacccggggactaggaacgaagtcgtctacaaagggactctacgttagcctttttcgtgtgcccgataacacgttccaagcattagcaagaccgttctcatgtagacacacggcgccgcctatgccctgctggggtcgtgtggactaaggaggaaataggggcgtccaagttgtggcaatgaagccccgggagaccatgtaggccacaattgtgaaggtatgccccactagatgcgttggtgttccttcgaggccccctaaaccaaggaaaaggtttggtcccatagaaggaggccgcatgccttttgtgggcaccagacgaccaagcttagttgaggtcaaccaggaaacgttttgagaatgaggattagcttccaggaactcaagtcgttgcgtcccttcccccggggaattggaaggggatttggattggagacctggtgggatcaatcttggaacggactcgcggagggccccccaggcaggtgccaggacaacgttcctaaggtattttagtacacgagcagctgtggttcccttg

SEQ ID NO: 601521 - DNA, 138 bp, Homo sapiens
  misc_feature (37)..(37): n is a, c, g, or t
gcgactaagcgggtaagtagagagcggaaaagggatnaggaggtagcatcattgagcttattcttgactcatctcagaccaaacatactctgtcaatcgttgctcttaaaatctgcatattaaaagctcagcatcaac

SEQ ID NO: 601522 - DNA, 346 bp, Homo sapiens
tagatagtgttaaagaaaaaaattattcagtgacacttattaaagaacaataaggtgagccaggtgcagtggctcatgcctgtaatcccagcactttgggaggctgaagcgggtggatcacctgaggtcaagagttcaagaccagcttggctaacatggcaaaaccctttctggactaaaagttcaaaaattagctgagcatggtggcacatgcctgtaatcccaactacttgggaggctgagacaggagaattgcttgaacctgggaaggcgaaggttgcagtgagccgagatggtgccactgcattccatcctgggtgacagagcaagactctgtctcaaaaaa

SEQ ID NO: 601523 - DNA, 441 bp, Homo sapiens
  misc_feature (416)..(416): n is a, c, g, or t
  misc_feature (424)..(424): n is a, c, g, or t
ttttgagacagattctcattctattgcccaggctggagtgcagtggcagtcccggagccctggaactccgggatcaaatgatccacctcaacctctcaaagtgttgagattacaggcgtacacccatgcccagcctcttctcttagtgttgactgtgttaacgttgagccccatgcttgtttaatgaggctcataagatgaatagtgttcagtcatttcctggcgtgtcatgtactagttatttacatctgcacgtcaacagtgtgtcaaggcacagtatgagtttctgtcgactaaatgtaggagaactgaggacctcaagagatgaacttatgtgaacagtagagtactgttgtgcagagtatttctgagtcagttcagtaaggcaagagtttataaagtgctcttatacaggngttctacnaggaagatcaacctggc

SEQ ID NO: 601524 - DNA, 449 bp, Homo sapiens
aagtagaacaaaaagtctagataataggtaggaattatacagtgacagaaaagctcaggtttatctagattaggttgaaaaagctagctcagaaattaaatcctactgtgtacataaaaaacaaggaacccagccctgaagcaaagaactacatacagggaagttgtcctctcttccaagtctaatgatttcaaatgaccttaaagtggtcatctttacagtcagagaagcatatgtgtagtaggggaggagaaaaaagaaggacctgaggcagactttagaattataacctaggaaagaactgtaatagtagggtaataaactagatccaatacataaataacatggtttccacgtaactactatggcaaaggtacaaaaagcctaattgtgagaaaaacaaattaaggttaaaatatcctcaagcatcccaaattgcactaatcagt

SEQ ID NO: 601525 - DNA, 210 bp, Homo sapiens
aaaaaaacaacagtttccccctttttccccgggggaacagtgggttttttaaaacaaaccccccgtgggttttttaaaccccaaataataaaaaaccttttaaaaactgtttttttttttggaaaaaaaccttttttttagttttttaatttgggccctttaaaaattttccccaaaaatttataattaaattttagggtttttttttta

SEQ ID NO: 601526 - DNA, 395 bp, Homo sapiens
cccatttgacacggataatatatagaaagcagattcagataccagagataatgacatcatactcaaatgcacagcatcatctccatcaactagagtcagacacctgaaagaccaatgcatcttcacctatcttctgcaaaaagtaggaagagggtaccctttcctttggctccaacatggacaatccttaaaaaatgttatagagattggataaaactaacctggcccaagattctttgtgtaagtaaccaaatcttccatagtctccaccacctctgccactgtaagatattccaaaattcctttgcaaactctaataattttacggacctgaaaaaatatttcagagtattcaatcacatgggtggacaactagcaaacacggtaacacagat

SEQ ID NO: 601527 - DNA, 113 bp, Homo sapiens
ttagaggatcctgtggagatgggtctcagcaggcttggtgttgcacgggttcatgggcctgaaggtgtgcattgtcagtggcttggactctccactgcttggatcagggtctc

SEQ ID NO: 601528 - DNA, 135 bp, Homo sapiens
agggctcttatgtgtctctcacagcttgaaaggcctgagacagctgtctctgtgagggactgacgatgcaggatttcttcactcctcccctttgtgacttcaagagcctctggcatctcttatctgcaaagggca

SEQ ID NO: 601529 - DNA, 1183 bp, Homo sapiens
gttggtaacccgtagagggctgttgcgtagaggatgagactgggtcacatgcgggatcgagataggccgtaacgctgcgtgggggcgcgggcgaggtgtgggatggcggaaggcgggacagggagtgccgccagtgattgacgcgcgagtggactatgagcgggcaggccgcagtgacttcggtcgcaattgatcgcccagagaaccctgctggagctaggagctcgggacgtaaacggcggcagcggtattgtgaccagttatgcatgctgctagggtgtcgctcgtgagacgtccgggcaaccatgcgaccatcgtccacattccacgagtgtagctcactcatccgtcatcgatgtagtattgtgctaactcgtcgtaggcatggtaatcgcccgtcagaaaccagagcagggtagcccttacaggtcgacgaagcagtgcacaagtccattcctatggctcaagttgtcgacacactccagtgggctatcgcgtcgtatgatcctgaatctctgatgcactgcatgacccgcgtcccacggatgtctgcgacacagagagacgcaaggcgccgatgcttgagtttcctcggcgatcctcggctcctctttgtcaattcggacccagaatgagtgacgactacacaggacgttgggccatctcactctcggtagttgaatctcactttgttacccagggcagatacaattcacgggcacgcgcctccattgcggccttgaacgccacactatggggcatgcctgcctaggccgaccctcttagcaatcttctgtggccccgactctacacaatggccggcacagataacacaaagtcgctccaaccagcaaccttcgagtagccctgcaccttaccaatacacctgtgtaacaccagcacacccttgtggaactgccggcttcatcttgcccacccacgaacggttggaactgtaaacaagtttcccaacgcaaacgcagctacagagctcagatagaacattcgttagccctaccgtgaggatgcccctagcggtaacacacggactacacaccgcggcggccactcccagtcgcgcaaaacaaccgcgttgcctttcgccacgccgtttacgcacgacgcacacccttaccatcgttgcaaaggaaattccatattgacatgcgtccgcgatgcgtcc

SEQ ID NO: 601530 - DNA, 106 bp, Homo sapiens
tgtagaggatccccgtcatgggagatgtatgttattatattggttgatcatggagaacaaactgataaagggggattggttattatctgaaagaaggggtactgag

SEQ ID NO: 601531 - DNA, 151 bp, Homo sapiens
atcacagactatactagttccacaaaaggaagatcaacaaagcttttcaaaaataacatcatctttttaataactaaagtgttcacactgaagggtgaatggaagaaaggagtaagtttttggataaataagaattgtgggtgagcaggcc

SEQ ID NO: 601532 - DNA, 273 bp, Homo sapiens
tgggcccccccctgggtttcatgggctccttggggcctgaccttccccaagggtcctggagcatcccaatggaaaggggcaattccctgggggggttgggcagcctgctttgggcgggcctcccccttttcccatgctccccgccccaaaaactatgggttcgttttcgtgggccccggggaaaaaaacatgggcctgcccttcctgctataaaatgggggcccgcctgggtgttttttaacagagttttaacatgattttttttagcttcca

SEQ ID NO: 601533 - DNA, 280 bp, Homo sapiens
accggggccaatggacagaggcgatgtaaacacgtggtattctctctggcaaaggaaaggtggcccaggggcccaaagggggggctgccttgattgataaccggaaggctagggggggggggaggaagggggggtcaacaaaccgcccgtgttaataacaagggggggggtggtgtgtgggtgagggccgcttcttcttggtcgccaccaggacaaggcaaaacccacggggccaaagcagggaaaacaacgtcgctggcttaacaaaaactaagatttc

SEQ ID NO: 601534 - DNA, 145 bp, Homo sapiens
  misc_feature (78)..(78): n is a, c, g, or t
  misc_feature (99)..(99): n is a, c, g, or t
ggaggtgatatagaaaccactggatatctctcctttccttagacaactctggcagctgagctagaagccaacctcggnctcattgaagaaatttcaggntatctaaaatccgccgatcctacgctctggtgtcactttccttctt

SEQ ID NO: 601535 - DNA, 607 bp, Homo sapiens
ggctgtattcgtcttccctaggctatttccgccgggacgctccgcagaagatgcatgctcaatgccgatggagatcaagcccgaagatgctgaacaaaagtggctggtaaccggggctggcggagggctcggaccgggggcccaaggtgtgggaccggctttccgggagtggagaaccgttggcatgtggggagcggcttgggcaaaacgaaagcgggaaggatcttctggggaggcattccgggttggcccaaagtctgcctctgtgcccatttggaccgacccgacctgtggacttctggcatatgtcggcactggtgtcagttattttacacccccccttttcacaaatcgggtggcaccccacccataagggccgacaagtttggcaagtaaacactcgtttctaccagaggggatcaaacaaagaatgtccagagcacacttggggacgctgtaagccctttggagacgcgggtggcacccaatacggtacgccgctgactaaacggctccctcttataacaggtgtggttacctttctcaagcttgcaaggtgctgaagaaaacccaaagtgggggggacgaaaaatctttcccccgttcg

SEQ ID NO: 601536 - DNA, 156 bp, Homo sapiens
cacttcgaaagtgctaggattacaggcgtgagccaccatgcccaacgaaaagatccttttaatcggaaaatacatacacggtactgcatttcgggggcaatttaataaattatatattagtttcttcctctccatgtatctccggggcatggaaca

SEQ ID NO: 601537 - DNA, 89 bp, Homo sapiens
gcgtatctcagcttcgtgagaggtcatagcatattcatgacagggttaggagtaccctgcataatttatacaaatgtaaagtgtatatt

SEQ ID NO: 601538 - DNA, 1885 bp, Homo sapiens
ctccctcttcacttgtacatgagcaagctggagaagatgcaggaggcctgtgggagcaaatctgtgtatgacggcccggagcaggaggagtattcgacgttcgtcattgacgacccccaggagacctacaagacgctaaagcaagtcatcgctggggttggggctttggagcaggagcacgcccagtataagagggacaagttcaagaagacgaaatatggaagccaggagcaccccatcggagacaagagcttccagaactacatccggcagcagtccgagacctccactcattccatttaaagtctgcgggacgcgcccagtggcgccagcaagctgcccatgcaaagccgcagcctttgggagggagaagagaaggaagagcgcagagccggcaaagtgagatgcacgccgtcccggcccatagacaagtggcgctggggtttccctctcccagaaccgctgccaccaccgccacgccctccgcagaaagcccacctggccctgtggaacgtgtcgtcatttgattctgtgctttttgctccttgtttgtggggatctggggatcagctgaaggatcaggaagtgtgggctgtgccctagccacaccacagccagcctcagggagccacggcccgtctagtcgactgtgacatgcacctccggccgtgtgtgcatcagtctcgtgcacgtctgtcttgcgtgcacggtgcgtgtgacgctgggctctgtggctctgtgcccgggaggcctgctggccccgcctcggctttcggcttcatcacattgggaggttcagagcattactctcccactgtgcctgccatccaggcagccatgggaggcggcctccctgttccactttcgaggttcgtttgattcctggctgaggggtcagttttatggctgggaggtgcagaactacacagaagtcccagtctgaggatgtccttggtgcttgggggatacgggttctgtccacagagtcccttggagggaaaggtgtgggctccagcttctccaggcgtctgcggagcccacagttgaagcccacatcgttttgctgttgaatggggtttaaaatcagaattaacatttgccaccccccgtggaagtttgaagattttaaaaatagaaatgtacatttttcaagctgtttttctttatgtttttgaaggaccatttttaattagctctttgatacaaagtaactcagaacgtcaaaacctatacccactaaagggaaggctgccgggaaggcaaatggaacaggaatggagcctgtctcaggaaggccagctgcaggtcctccagaaaatcaaagaagggaagaaactctgagtttgaggtacaggggcttcggggtgcagacgtccctccagggcccatggtcagtattgcacctgtgttatgaacccccagatgctgtgcagggcaggggcgggggctgctgttttattggggaggggagcatcctaaaaatggggtccaggcagacccctccagacctcacactgccgaggaggcctttcccaaagggcgtcctcccgggatgcagacggcaggtgtgtgggaagcgccgtttaaatacacagcacgacgtatccttgtaccgacttctcccggttcttgtttgaaaatactgtagttcaggctcttgatctagatggcagataggaactttcttgtcacaaaaatactggaggaaaatgttgtaaaaatagacttttggacacacagctgttggggctgcactgagctgcaatttttaacatggatttataacttaatgtttctgtttataaaatactaatgatttgcaatgtattttactggccaattaaaacagatgttttattctttctgaaaacaacacaatacaaaa

SEQ ID NO: 601539 - DNA, 922 bp, Homo sapiens
cagatccaagatatcggtgagcaactcttgataatccatatcgagtcaaatggtaggcgtacctatcgaccgtgtggccaattcagcaggtgaagcaccatcaacgatctccagtttaagcttagaagccggattccaataggagtaagaattgtgcaatggaccacagagttgaattggccgaaaaggtgctatgggagtccatcaatggatctaatatagacgagtctcaactttagtcgcccaggccgggtagtgccggggggtcgtagatcatccagaataaggtgtacccagttgtgcctcccggggttcaaagcagaattctcccattgcctcgaggattcccctaagttcagcgtggggcatttacaaagtgtccaactgtgcaccaaatgcaccggggtgtaaataactagggtgacatctgcaacgtaggcagcaccagtgtataccaccaagggtttgcccggaggctcggggttgcagaaatcttcgtgtggcaccatcagtcttgcagtccaaaccctggccagtacggaccatgcccccaaaacgtgttgcttgggagtagtccaccagggcatttgtagccgcccacggagccggaaggcacattcagaaagaatggctcatacatagtgttccctggacattagttgtttgggaaatcaccctctgtgtcacccaatttctaaggacacacgtcgcccgctggtgtgggacacagcgcaaaagcttgcggcgcaaactctccgagagatgtactgaccggcgcagacaaatggctaagggggagttcccacacacgtggtcaaactacacgcatatggcgcaacagtggcatgcacgtggccacgctaacttagcgcactttcacattcgaacagactctttagatacctccatgcggctatctacc

SEQ ID NO: 601540 - DNA, 325 bp, Homo sapiens
ctgggcaacaaagtgagactccatgtcaaaaaaagaaaagaggccaggagcagtggctcatgcctataattccatcactttgggaggccgaggtgggtagatcacctgaggtcaggagttctagaccagcctggccaacatggtgaaaccccgtctctgctagagatacagaaaattagccaggtgtggtgttgtgtgcctgtaatcccagctgcacaggaggctgaggcaggagaattgcttgaacccgggatgcagaggctgcagtgagccgagatcgtgccattgcacgcccgcctgggctacaagagcaaagctccgtctc

SEQ ID NO: 601541 - DNA, 810 bp, Homo sapiens
  misc_feature (32)..(32): n is a, c, g, or t
  misc_feature (144)..(144): n is a, c, g, or t
  misc_feature (173)..(173): n is a, c, g, or t
  misc_feature (306)..(306): n is a, c, g, or t
  misc_feature (327)..(327): n is a, c, g, or t
  misc_feature (367)..(367): n is a, c, g, or t
  misc_feature (448)..(448): n is a, c, g, or t
  misc_feature (574)..(574): n is a, c, g, or t
  misc_feature (641)..(641): n is a, c, g, or t
  misc_feature (643)..(643): n is a, c, g, or t
  misc_feature (645)..(645): n is a, c, g, or t
  misc_feature (648)..(648): n is a, c, g, or t
  misc_feature (652)..(652): n is a, c, g, or t
  misc_feature (657)..(657): n is a, c, g, or t
  misc_feature (663)..(663): n is a, c, g, or t
  misc_feature (666)..(666): n is a, c, g, or t
  misc_feature (668)..(670): n is a, c, g, or t
  misc_feature (675)..(675): n is a, c, g, or t
  misc_feature (681)..(681): n is a, c, g, or t
  misc_feature (691)..(691): n is a, c, g, or t
  misc_feature (705)..(705): n is a, c, g, or t
  misc_feature (707)..(707): n is a, c, g, or t
  misc_feature (721)..(721): n is a, c, g, or t
  misc_feature (724)..(724): n is a, c, g, or t
  misc_feature (735)..(735): n is a, c, g, or t
  misc_feature (738)..(738): n is a, c, g, or t
  misc_feature (744)..(744): n is a, c, g, or t
  misc_feature (751)..(751): n is a, c, g, or t
  misc_feature (754)..(754): n is a, c, g, or t
  misc_feature (783)..(783): n is a, c, g, or t
gtaggaagtttttcataggaggtgtatgagtnggcgtagcggaacgggggtatgctgtcgaatcataagaacagggaggttagaagtagggcttggtgacaaaatatgttgtgtagagtcaggggagagtcgtcatatgttgtncctaggaagattgtagtggtgagggtgtntattataataatgtttgtgtatgcggctatgaagaatagggcgaaggggcctgcggcgtattcgatgttgaagcctgaaactagttcggactccccttcggcaaggtcgaagggggttcggttggtctctgcnagtgtggagataaatcatatnatggccaagggtcatgatggcaggagtaatcagaggtgtncttgtgtggtgataagggtggagaggttaaaggagccacttattagtaatgttgaaagtagaatgatggctagggtgactncatatgagactgtctgggctactgctcgcagtccgccgatcagggcgtagtttgagtttgatgctcaccctgatcagaggattgagttaacggctaggctagaggtggctagaataaataggaggnctaggttgaggttgactagggggttgggtatggggaggggggttcatagtagaagagcgatggtganancnaangtcngggcngtgatntanannnttatngtagangttgcgggtnttaggggctctttngntgaagagttttatngcnttaccaatttnttnttgttngcccgtntgngccttacaacgtttggggcctttgcgtantttgtatatagcctagaatttttcgtt

SEQ ID NO: 601542 - DNA, 990 bp, Homo sapiens
cttggtctctccagcctacacttcggaagtcggcgcaccgattagtgactacgcgatgattttaaagagcaaaataataggttttcccgtgcctgtcccacaggccctccagctcgaataatggacgaactgtcaatgcactccgagagctggtggcccattgctacgcccgctgatggcgaggcaggcgtactgggaggatcagcctggggctccttgccctctgatcccatcattcccaacatacacacgctgcaacagacgcgcctcctcgttcttctgcgtcagcttaaatggtgtaaacggaacacgcattaatatagactcgaatagagcaacaacgcatagacgtaagaagagaaaacctttcctagtgtaccatgatttctacacatcgctaactcctccactacacgttcagagagtcagggcgcagggtcggaaggggccaagaacgtgcctagccagagtcggaagaagaggggaggactatgcgtgcgtatggggaccgtgtaggacaccgccggcgcaaaaacgaagggaccgcaaggggcgacgctcggcaagtatcccaccctgaatcaatgcagttaggcaggcgctaagtggtccaacctcggtgagggcgcccatcgacgtgagcattggcccccgaggtcttctctgcccccgggcttcacagccccgaacacccatctgggcgacaccccgttgatgaacccggttgcccgcgttcagtttgaggggcccaactccgtatgaaaacaacggcaaggaccttacggtggtccccaaaatttgtcccctgtgcgaccttacgattgccaaagctctatgggctgaggagatgggacacaccttactaagcctagaataaaagggctcggatgggaacttattaaattgcaacataacttagggcccctaataggagtgaaaaccttgaattttaacctacccgctgaaacccaaacaaatttattaaaccag

SEQ ID NO: 601543 - DNA, 192 bp, Homo sapiens
ataactgtcctgacttagacttccctcccaaattctatgagcatgcaaggctctgtgggaggatgatggagtgctgtgcctgctacgaactgctccaacgagtaccagctgattgacttgtgcccatgtacttacctggcacaatgatctgactagtgactcaatgcattgcttgactcatgttgcctgagc

SEQ ID NO: 601544 - DNA, 263 bp, Homo sapiens
  misc_feature (35)..(35): n is a, c, g, or t
ataaaacacctcatgaaagaaattgagggaagacncccaaaaaatggaaagatatttcacgttcatgaactaaaagaatcaatattgtgaaaatgttcatattgcccaaagcagtctgtagattcaacgtaatccctatcaaaataccaatgacatttttcacagagatagaaaaaacaggctgggcaaggtggctcatgcctataatcccagtactttaagaagccaaggtaggtggactgtctgagcccaagaggtttcaa

SEQ ID NO: 601545 - DNA, 462 bp, Homo sapiens
ggggtcgatctgtctggagcataacccaacaggcgatttttcgtgccactcccatccctgcatgcactgatccgcagttcctataccctacccctgacctattgagcagcctctgaagatccatatgggcccccacctttactcacaccctgagaattctgggagccagtctgccatgaccaggagtcacgtggacatgttcatcctagaatcctgtcacactacagtcatttcttttcctctctctggcccttgggtcctgggaatagctcgcttgccttcaaccccacgagcgctaatgaactggcagccgttctcctaacatgttgagagatagattcgtttcttgggcctggccatacatcgggcagcattgatggcaatcctaggaaaggggttaaatctccattctgtgagatgttggtggggaagggaagggtaaatagattgtactaaacaata

SEQ ID NO: 601546 - DNA, 550 bp, Homo sapiens
cggtacgacgaagcgtagaacacaatccactaggttacggggactcagatttaagagtagccagtttactacttgaggtggccctccaggacacccacagagctaaaagcccaacaggaaccacgactgaccctgatttatgacaggagtaacatatcctttctttagatagtcgacagagtctggggctctaccttcccattctgggatataaagggtgtcattactgcgggaatgagacaggggtactttgagtccagtcatcttctgaaccacctcttcactggtcatgtcccccaagtggttcatagccagttcatatgtatggacaccaagagaagcctcaaggttatggatggaaatatacttcaagttttttttcccaaattaaacgccgagagatttcatccaccttgttgttatatggcttcctgtgggtcttcttccatagctcccagtgggtgtccagtatctcctcagggtacagagcaaagctcaccacaggtagcagcagaaccttgagcccccaaatcctgctgatggaaatctg

SEQ ID NO: 601547 - DNA, 464 bp, Homo sapiens
caggcagaaagagattcatcggaccagtcgtcctcatcaaatacagaggagtcatcttctgagtcactgttctcaaccagcaatgcgactagacaagatggtggccacgtcatgtgctgggcgctgtgtgtgtggacccatgttgaccttgagcgttgtcggtggaggaatcgtgcctgttggcattgagtggatggaggcagaagtggccatctgtgcatgggtaggggtgatgactgtgtgagtacttggagtcaccaaagaggtggagaaaggtggaacgtgagtgggaagtgtggtctgagggtgtgatggggttggataggtagtggtggtctggaaggatgttgcagtcataggacctgtggaagagaagggactgctccctgtaggtgaggagtgtgtggtgaagggtgtggttagcctgctgctggtggctgaggtggtctgggccagtactgggt

SEQ ID NO: 601548 - DNA, 422 bp, Homo sapiens
  misc_feature (1)..(1): n is a, c, g, or t
  misc_feature (40)..(40): n is a, c, g, or t
  misc_feature (89)..(89): n is a, c, g, or t
  misc_feature (160)..(161): n is a, c, g, or t
  misc_feature (269)..(269): n is a, c, g, or t
  misc_feature (345)..(345): n is a, c, g, or t
  misc_feature (351)..(351): n is a, c, g, or t
  misc_feature (399)..(399): n is a, c, g, or t
  misc_feature (420)..(420): n is a, c, g, or t
ntggagagataccatttaagttgagatttcagtggggacncagccaaaccatatcattctacccctggcacctccaaatctcatgtccncacatttcaaaaccaatcatgccttcccaacagtcccccaaagtcttaactcatttcagcattaacccaanngtccgcagtccaaagtttcatctgagacaaggcaagtcccttccagttatgaacctgtaaaatcaaaagtaaactagttacttcctagatacaatgggggtacaggtnttgggtaaatacagccattccaaatgggagaaattggccaacacaaaagggtaacagggcccatgcaagtccaaanttcagnaggggagtcaatttttaacccccaaaatgatcacctgggatccacgtntcacaatcatctctctgagtnga

SEQ ID NO: 601549 - DNA, 242 bp, Homo sapiens
gggttacaagtcacagaggggaggtgatagcatgtctcgtgtaaattatgtaatgcaaaatttgtttactcttcgccttcatactttcggtatttcgtgggatggagaatgatgagccttcgtgccccgcccttccccctttttagtcccccaacttgagatgtatgaaggctttgggtctccctgggagtgggtggaggcagccagggcgttacctgtacactgacttgcgcacaggcgta

SEQ ID NO: 601550 - DNA, 204 bp, Homo sapiens
cggttccatgcgtcatgatgcagctcagtgttcgatgcgggtggagtgctcagacggacaacggctcgaactggctgcgcgtgacctgcgcctgtagtaactcgaaccaggggatcgtgctcgccctcgaggtagaactgcaaccgcgaccagagcgccttgatgttgtcggcatcgttgagcaccttcttcttgacatggtct

SEQ ID NO: 601551 - DNA, 242 bp, Homo sapiens
  misc_feature (139)..(139): n is a, c, g, or t
acttagaggatctggcacaccgctacggacgctgtagggtcagcaggaggcaagaggtagagctctggccaggaacgctctgcctagagagatgcctctgcagctggccctatgatcgggcgactcagtgtgagtatcntgcctaaggaccaaggagaaccaacagcctgcccaggtgtggcttgtgaggtcacacagtcctcatgagtctcctggacaggaaatgcggtagcgggttgttg

SEQ ID NO: 601552 - DNA, 268 bp, Homo sapiens
gaggaaacacaaccatctaccctctgattctatgagttaaattttacttgcaatatccacatataagtgagatcatgtagtatttctctttctgtgcctggcttctttcacttagcataattccttccaggttcatccatgttgtcacaaatgacaggatttccttctttcataaggctcaatagtattccacagtatatatcaatatattttctattttttctttttttatcatttcaactttcattttagattcaggggtacatgt

SEQ ID NO: 601553 - DNA, 186 bp, Homo sapiens
acgtgatacgcgagcatgcccttctaaaagggatgccgcctttgagctggtctccatagtcctgggtgagcactactaggtggtaggtcacatggaaatcccttctatgagtgtggacattcggcgtctacaacttcgtccatagtgatttgatttcaagaagtgtatggtcattcggcgtgtgca

SEQ ID NO: 601554 - DNA, 197 bp, Homo sapiens
tgtcttttgtggtttcctgcacatttttgggggggttatggcttctccgtttttccccccttaaactgccttgcctattcttttttcctgacatgatctcaggtatcagtgtgttgaatacatcctgcttgtgtctcagacttacgttactgtcttcaccattaaaaaaattgcagccttgtgccccatgaccttca

SEQ ID NO: 601555 - DNA, 351 bp, Homo sapiens
ggtcgacgaaaaacattgctatttctatcaattaacgtttaaatgtagaccaggcatgatggctcacgccaccatgtaatcccagcactttgggaggccatgacaggaggattgcttgaacccaggagttcaagaccagcctgggcaacatggtaaaattccatctctaccaaaaatacaaaaaaattagctgggtgccaggcacagtgcctcacacctataatcccagcactttgggaggccgaggcacgtggatcacctggggtcgggagttcaagaccagcctggccaacatggtgaaaccccatctctgctaaaaatacaaaaattagctaggtgtggtggtacatg

SEQ ID NO: 601556 - DNA, 245 bp, Homo sapiens
ctctgctgtgttgggttgccagtgcgggtactcctgacttgtcggttgctctgtcgactatggggctgttaattgtcagttcagtgttttactctgccgcaggcttctgcggaggagaatgttttcctgttccttatactaccattcagttcttctcatagggtgcatcagcatgggtcccaataggggtgtgcaggcagtccagttcatcatgtctcatcttatttcttttttaaggcaccacc

SEQ ID NO: 601557 - DNA, 714 bp, Homo sapiens
agaccgaacccctgtattcagacagcaaaaaccacgctgggctccatatgtggtcaacagtggtcacggacagatggctgagattgctgtgaatgccgtcctcactgggagcagatatggagcggagagacgttgactttgatgccttatcaggaagatagaaaggctgaaggtgggcaggctagggcctggtaggacacctaatacttgagttaagggcgtgacttgtggacaaggattttcagtcaccgcactatgagtgccaataaaaagtggacagatgctgagagagttgcaactgtctcagcatgtcctattgtgcaagccaccccacaacccatgaagacaacagcatcaagcgtggatggtgaccatctggtcgaagtattattaagcccatgttcgagaaatacgaaagaggagaggattatgaatgtagatgtattcgatacgagaattgaaagaggactggctgcgtaacctaggcagatttgtcagtggaggcggttttgatgaatgaagcaaatcacttacttcttcgagaacgaatcttgccgtgcgggttcgctggcgtagtgaggacctgtaatattgagctgtattgccatcgcaaccaggagggcggatcgtccccaggttctcagagctcacagccgagaagctgggctttgctggtcttgtccaggagatctccatttgggacacctaggatac

SEQ ID NO: 601558 - DNA, 173 bp, Homo sapiens
aggggactctgaggatcccaaagacgccaaaatcatcaaatccgctataaatatttacagagtatgataaaacattgaattcgatctattacttcacctcggtttcacagcacttatgcccgttttacacaagttaactatctcttgcatattagactacactcgtgagacat

SEQ ID NO: 601559 - DNA, 5360 bp, Homo sapiens
cttccagtctctgctgatgtgatttcagatgggcgcggctccagaccatcccctgcaatggccagttacgcagcctctccgagccactgcctctctgtggaaggagggcctgaggctgacggggagcagccgcctcgcttggccactctgggacctggggtgatggagggtgcagcggagactgaccaggaggctctgtgtgcaggggagactggggcccagaagccacctggagatcggatgctgtgtccagggaggatggatggtgcagctctgggggaacagccaactgggcagaagggagcctcggcaagggggttctggggaccaagagagaccaaggcgttgggtgtgtgcaaagagtctgggagcgagcctgcggaggacagcagcagggcccacagccgatcagaggaaggtgtctgggaggagaacacgccccccttgggccccctgggttttcccgagacttccagctctccggcggacagcaccaccagcagctgcctccagggcctcccggacaacccagacacccagggtggagtccaggggcctgaaggccccactcctgatgcctctggctccagtgccaaggatcctccaagcttgtttgatgatgaggtctctttctcccagctcttccctccaggcggtcgcttgactagaaagaggaacccgcgtgtctacgggaagcgctgtgagaagccggtgctcccgctgccaacccagcccagctttgaggagggcggtgaccccacgctgggcccagcccgcctgcccacggacctcagcgactccagctccctctgcctctgccatgaggacccgtgggaggacgaggatcccgcaggtctgcccgagtccttcctcctggatgggttcctcaatagcagggtgcctggcattgacccctgggcccccggcctcagcctgtgggccctggagcccagcagggaagctggtgcagagaagctgccctcccactgccccgaggacgatcggccggaggccattcctgagctgcacatggtcccagcggcttggcgaggcctggagatgccggcccctgccgatgactcctcctcttctctcggagatgtgagccccgagccccccagcctggagagagaacgctgtgacggtgggcttcccgggaacacccacctgctgccgctccgtgccacggactttgaggtgctcagcaccaagtttgagatgcaagacctgtgctttctgggaccctttgaagaccccgtgggtctccccggccccagcttcttagacttcgagggcacggcgagctcacaggggccacagagccgaaggacagaggaggctgcaggggcagggagggcccaaggcagaggccggccggccaagggcaggcgggcctcctacaagtgcaaagtgtgcttccagcgcttccgcagcctgggcgagctggacctgcacaagctggcccacacgcccgcgccgccgcccacctgctacatgtgcgtggagcgcaggtttggctcgcgggagctgctgcgggggcacctgcaggagaggcacgcgcagagcaaggccgggccctgggcgtgcggcatgtgcctgaaggaggtggccgacgtctggatgtacaacgagcacctgcgtgagcacgcggtccgcttcgcccgcaggggggcaggcgcggaggtccttgggggacctgcccggaggcctggagggcagcagcgctgtcgcccaccttctgaacagcatcacggaacccgcgcccaaacaccacaggggcaagcgctccgccggcaaggccgccgggagcccgggagacccgtgggggcaagagggagaagccaagaaagacagcccgggcgagagggcgaaaccccgggcacgcagcacccccagcaacccagacggggccgcgaccccagacagcgcctctgccaccgccctggctgacgccggcagcccgggcccccccaggacgacccccagcccgtcccccgacccctgggccggcggggagcccctcctgcaagccaccccggtgcacgaggcctgcaaggacccctcccgcgactgccaccactgcgggaagcgcttccccaagcccttcaagctgcagcgccacctggcggtgcacagcccgcagcgcgtctacctgtgcccccggtgcccccgggtctaccccgagcacggggagctgctggcacacctgggcggggcgcacgggctgctggagcggccggagctgcagcacacgccgctgtatgcctgcgagctctgcgccacggttatgcgcatcatcaagaagtccttcgcctgcagctcctgcaactacaccttcgccaagaaggagcagttcgaccgccacatgaacaagcacctcaggggggggcggcagcccttcgcgttccgcggcgtgcggaggccgggagcgccgggacagaaggcccgggccctcgagggcacactgcccagcaaacggcgcagggtggccatgcccggcagtgcccctgggcccggcgaggacaggcctcctccccggggaagcagccccatcctgagtgagggctctctcccggccctgctccacctgtgttcggaggtggctcccagcaccaccaagggatggcccgagaccctagagaggcctgtagaccccgtgacccacccgatcagaggttgtgagctgccatccaaccaccaggagtgtcccccgccgtctctgtctcccttcccagctgccttggctgatggcagaggagactgcgcgctggacggagccctggagaggccagagaacgaggcttccccaggcagccccgggcctcttctccagcaagctctccctctgggggcatctctgccgcggccgggagccagaggccaagatgcggagggaaagagggctcctctcgtgttctcagggaaacgcagggccccgggtgcccgtggcaggtgtgcccctgaccatttccaggaagaccacctacttcagaaagagaaggaggtgtcctcaagccacatggtgtctgagggggggccccgaggcgccttccacaagggcagcgccaccaagcctgcgggctgccagagctcatcaaaggacaggtcggcagcatccacccccagcaaagcactcaagttcccagtgcacccaaggaaggcggtggggagcctggcacccggggagctggcccgtggcacagagaatgggatgaagcccgccacccccaaagccaaacccggccccagctcccagggcagtggaagccctcgccccggcaccaagacaggaggtggcagccagccccagccagccagcgggcagctccagagcgagacagccaccaccccagccaagcccagcttccccagccggagccctgcaccagagaggctccccgctcgagcccaagccaagagctgcaccaaggggccaagggaagctggtgagcaggggccccacgggagcctaggtcccaaggagaagggagagagcagtacgaagaggaaaaagggccaggtcccagggccagccaggagtgaaagtgtggggagcttcgggagagccccctcagcccctgacaagcccccccggacccctcggaagcaggcaactcccagccgcgtgctcccgaccaagcccaagcccaacagccagaacaaacccaggccgccaccatcagagcagcggaaggcagagccgggccacacacagaggaaggacagactgggcaaggccttcccccaggggagacccctgctcaggccccccaagaggggcacagctgtccacggtgctgaacctgccgagccgcacacccaccggacggccgaggcccagagtgacctcctcagccagctcttcgggcagagactaactggcttcaaaatccctttaaagaaagatgcttctgagtaatttctagaagcaagagcctgggaccggagctgggcgttcctgtctcggcctgcctccttggccagctccggctccctgagatggtccactctgtggccacttgacttcttgtgcaactgctcaggccttgatgtcagagctgaggtggtgatgctttgaacagggcccaggtgggcagcattccctttcttgctggaaggctgggggtgaaagacggggccactgcagcccttttgagaccacacagctgttttcttggtaccaagtacttgaagagacagcagcccatcccctcagcccacacccctgcgccctgtgggcaccgacaccacagaagccaatgtttggagatttgcacaacctcccgttcccccacatggagaagggaagtaagttgaggcagccgtgggatggtggtaggttccctcttagtcttgctgctgttgctggaattccaaagtgaccttagaaaccacgtgggggaaggcagtgctcactacttagaagggttgcttctgagccgcctggtcccccaagagcacaacaggcctcctccctctgaccacagggtcatgcctcctccctctgaccacagggtcatgcctcctccctctgaccacagggtcatgccagcctccatttgcgctgcgggagaaaagcccatctctagcacaccttgaccccaggaaccgggttcccgtatggaactgggaagaaaccgcccctgtgccagctcccgcgggccctcctcgttccctcccagcctccatggccgccctctagagcctccctgctgtacggagctctgggctccacctatttgcaatgttactctgaagtttctggtgctatttttgtgttgtaatgtgaatacaggcttccttgattttttttttaatgggggtattgggtgggacagacggggtcagggaggccccaccatggcttgtcgagggcacgggcacctgcatggcggcgctctccctgcctcccctgccgggctgcaagcctgaggtctgtgctgccggacggggatgctcagggctggggctgcagagccgctgccctggccagggcaccctcatgcaccgacccaacccaggcctgggacgcacgtgtcctctcacagcgtcgtgcctgtgaaggtgggtcaaagggtgagagggcttccttctcacccttctctccataagtatcttgaagatccatggtttgttttgctctattgtttagtttttacttgggtgcaatgtgtacgtcaaaagtttttattttgatatttgaaagagaccaaatcaggcccagaccgcctctctggaaggtgttgtaggccattcaaaacgcctccggagtgtcgcaaaccaagtgcggaggggccctgaggttgtactgtaaacatcatagtgacttgtcttttcaaatatattcccactattttcgc

SEQ ID NO: 601560 - DNA, 187 bp, Homo sapiens
gaggggtctgagtcaggaagacaggcaggaacatgaaatatatgctcgatatctgggagagatgggataacactcggtcacccaggccgagagtgcagggtgccatcgataggtcactttagacccccaccgtccatggattcaatgcgatccattccggcctcagatctgccaaggtagctgggag

SEQ ID NO: 601561 - DNA, 721 bp, Homo sapiens
agcggcgcaagctggagtgtggtggcgcgaacatggctcactgcaaccttgagctcctgggctcaagagatccacctgcttcagattttcatttagctgggaccacaggcatgtgccaccatgaccggctaattttttttacttttcagagagaggagggggaatctcactttgttgccaggctggtctcgaactcctgggctcaagcaatccacctgcctcggtggccagagtgctgggattacaggtgtgagttttttttattgtttcaaagagacagtcttacctcattcggtgtcacccagaaagtggaatgactttctaaaatggcagaaagcagaacatattcctgtgcgtgtttataatattatagtcgtatcaaagggaaagagtatttctccttaaataaaattacaaataagaaagtgtagtgtttaacatcttactcataaaaggtatggtcagaatacaaaaggtttttcaaacgggtttggtacttggatgggcttttataagtccacacttcaaagaagaaatgctttcaacttttaataccttagtcaacaacagtataaggtggccttgcctggcataacctttaactatggcaaatgatcgttggtccttccccttggtccagtatctccaaagggtcaacagttgaaacattaaccttgcactgagaaaccttgccacatttcaggagttggtaagctaaggg

SEQ ID NO: 601562 - DNA, 1034 bp, Homo sapiens
gccagttactagaataaaatcatctactttaaaatctaaaaaaaaaaaaaaaaaaaaaaaaaaaaaaaaaaaaaaaaaaaaaaaaaaaaaaaaaaaaaaaaaaaaaaaaaaaaaaaaaaaaaaaaaaaaaaaaaaaaaaaaaaaaaaaaaaaaaaaggggggggggcgcgtacacgttatacttctgcccggggggggcccactactcgagtcagaacgacccaacttgtattgtgtggaaaaaaggagggtgccacctacaaaggggacatcactactaaaaaacaaacacggcgcgggcgcgcgcgacacaaaacaaacagcagcgcggcaggtcggaagcacgaagactgagggcagcgggctacttgtcgtgaggagaaccaccccccgtctcggggggggggaacagaaactagaggcgccaaaaacaaccacatcggagacagatagaagtgacgccaccgccgacgggggagcaactactaaactcgacctgggaggggcagaatagggaggagtgcaccaccaccaagcgcctagtaactcgtgtggaccggcggccgaagaaaaacagcgagctcccaaagaaggaccactcatgcccgatacagcttaccaccaccacaggcggcggcgtccaaggtaccaaccacacgcccgcacgagcaaccaccaacccccagacctgcaccagacacaccgaacggaacacacaaccaccaggaagaggaggaggcgcgaggccgacctaggaagcctcgagaagagacagacgggacgcagagtggtcgcgacggatcgagcacaggcgcaaggcgcaagacggagcggcacgcgaggggggagagggccgacaggaggaggcgcggccaggcgcagagccaacgcagagcagcgagcggggcagacgcacaccagcaacgaacaggcagagaaccaacggaaagccggacgcacggagagacacgacaagggcagcaggcggggcagcgagaagcgggcaaccggagcgagcgaggcaggcaaaggca

SEQ ID NO: 601563 - DNA, 307 bp, Homo sapiens
gcctcccaaagttctgggactacaggcgtgaaccaccgtccccggcttgcgttctttttcttaaagagtcccacctgcggatcacgagatcaggagatcgagaccatcctggcccgtctctactaaaaataaaataaaataaaataaataaattagccgggcgtggttcgtggcgcctgcagtcccaggtactcgggaggctgaggcaggagaatggcatgaacccgggagacggagtgagccgagatcgcgccacggcacccagcctgggcgacagagcaagactccatctcaaaaaataaaagtt

SEQ ID NO: 601564 - DNA, 610 bp, Homo sapiens
tcggcgcagcatttgggtggctctctctttcttgtaggtgtgaggtttgtgctacctgttttgacacgccgggtgcgtcggttcctaatcccgctggtgggtcgttacccgccccgcgcgcctcttgtcccccgtcctcggtatactggcggtgtgcccactcatttggtggccgcccccccctcttccgggggaggcaaacaagtgacgtcccggtgctggcacccctctcaggcgcccaccttggcttgtttttgatattcattccttactagtaattatatttttctaccccctgtgtactagttctaaataataaataaggaagacacccgtcccccccctcattaattgtcccgtagaaaatcttttctccctctcttcgctatttaccaatataaataagtctcacattcattaggttgaacatgtgctaaccttctgagtgtgcaagcacgagatgggattgccacgagtgcgggtgtactccactgttttcagagaataattcggaggttcattcgccgtttttccccgcgtgtttctggttgtatgttaaaggaggaagacagaaagaattggaccacaaggagaacaaataaggcaagaa

SEQ ID NO: 601565 - DNA, 337 bp, Homo sapiens
gcacgagtaaaaatctaacaaacagattttgctttttaaaggtcttttcttggccaggtacagtggctcacgcctgtaagcccagcacttaggagactgagattggaggatcactttagcccaggagttcaagaccagcctgggcaacagagtgagacccctgtctctatttaaaaaaaaattgtttttaattagccaggtgtggtggcgcttgcctatagtcccagctactcagggactgaagcaggagaatcacttgagcccaggagtccaagttgcattgagctacgattgtgccactgtatttagcctgggcaacaaagtaagaccttgtctc

SEQ ID NO: 601566 - DNA, 239 bp, Homo sapiens
tgaggtgactctacaggatcttggtcgaccggggattacaggccctgccacatgccggctaattttttgtatttttagtagaggcagggtttcacccatgttgggccagtgctggtctcaaactaccagacctcgggtgatccatcctcttcggcttcccaaagtgctgggattacaggcatgcgccaccacgcccagcctttcaggcagctttctaagcagcgctccatgacatttga

SEQ ID NO: 601567 - DNA, 100 bp, Homo sapiens
ccccccgacccttccgtaatgccaccaggaacaactcggcccttcagttgaacatatgtggagtttccaggaggcctctcagagcctgaagaagatttgg

SEQ ID NO: 601568 - DNA, 151 bp, Homo sapiens
cgcattgcagagtgcacaggaacagtatctacaaaagctcaaatgctcagagaggattgaaactagatagtctaggctggagagtcatgtacaaaggggatggaaggctagagagatgagtgctggcaaagttccagttgtcggcactgga

SEQ ID NO: 601569 - DNA, 346 bp, Homo sapiens
ctatatcccttgcaggtactatatctattgcagccaggtttcactttctatcgcctatactttatttgggtaaatggtttggcataaggttgtattctattagactatggtgagctcaggtgattgatactcctgatgcgagtaatacggactgtgtttacggacgtgggacttttacggggactttagcggggtgactgcctgtcgggggccagtgccctcctaattggggagtacggggacgggacaagattaggagaaatacttaatataggtgacgggttgacgggtgcagcagaacaccagggaatgtgtatacctatgtaacaaaactgcatgttctgca

SEQ ID NO: 601570 - DNA, 191 bp, Homo sapiens
tctcatcttctagaatccagatcagacctaccttcagttcaacaaagccaaattatgacttatatgaagaaatggggaaagtcaagaaaatagatgcttctacagtctgtcggatgaacgttgctggatgaagttgtggcagattttatgacaaggaaaggactaattctaagaccgtgaaaggcatcctg

SEQ ID NO: 601571 - DNA, 364 bp, Homo sapiens
cggggctggttgtggtgcatgcagaggtcggcaccacctccaaatactttgtgagcagcggttccatcgcagtgaacgccgactcttcggtgcagttgttggcccaaaaagcccgttaccgctggacatgttggacctgggggcagccaaggcaaacttggagaaggcccaggcggagctggtggggacagctgacgaggccacgcgggcagagatccagatccgaatcgaggccaacgaggccctggtgaaggccctggagtaggcgagccagccgccaaggttgacctcagtttgggagccacctttggatgaattgcccccagcccccgccccattaaagacccggaagcatgaaaaaaaa

SEQ ID NO: 601572 - DNA, 120 bp, Homo sapiens
ccaaactgctgggataacaggcatgagccagcatgcccagccaaataataaaacttgagagtcaaaatcactctctgatgcatgggttgcagagtaagtgttgtgtagcagttatgaaac

SEQ ID NO: 601573 - DNA, 1069 bp, Homo sapiens
  misc_feature (895)..(895): n is a, c, g, or t
ttgttttataaaatatttgcaacgcccacaaagatattctataacccccctgtggccacccttggtgttcaaaccccccataatttttcacagcggtccccttagggtgtgcccaccccctcgtgtgagtaaagaattccttccgtttaaacaacacttccccaaaaaatatataggggctgggaaatttctgtttctcaagcgtaatacgcgcgactccacaaacttttctgtcgcggaaagaatatatacacggttccccccccgcgtttataaattggtctggggtgtccacaattaatatagtgcacgcgccccagttgatttctccccaccccacttagggcacccacccccaaacccccccacggggacaacacgtgttggggtgtcgcacacatgtaaaagttgagggagctcccccacaatggtgcgcccctcaccacagcgttcatcaaaggtgttttacacacgcggccacagagaggccgctcagacttttgacacagtgtcgtgccacacgctctggttaaagagagcgttccacaatttccctgacaacacctctatgccacgcgtgtctcgcgaatggttctcttaatgtttaatcccacctccattatatatcgcgggtctccacagaaacacattctttatgttatcccacccccatatatatgaatgttctacgtcacccacaaaaaatcgttgccccactgaatatcactcccaaaagccgcattgtgacaaagagtaaacgctgtgagatgtgatgatgatgacgccagtgatgatgacatgatgaactatgagtataattctgcgtagtttatgccccctgcctgaaaagttaccacacgagataaacgctgggttttgaaattcccttggttcncgagtagttacaacacagcactcgctggagaggtttttccaacgtgggttttagagaaacctattataagaggggtcaccccggtcgccaacagtttccaatgaaatgaagagttttttatccccccttataagagtgttaaggaaaaaataaggttttctccctcattctgga

SEQ ID NO: 601574 - DNA, 407 bp, Homo sapiens
aaagtcaggagttcaagaacagcctgaccaccatggtgaaaccacatctctactaaaactaccaccagtagccgggcatggtggcacacaactgtagtcctcagctacttgaaaggctgaggcgggagaatcatatgaacctggaaggtagcggttgcaatgagccgagatcactccactgcaatccagcccgggcaatatagcaagactgtcagaaaaacaaaaacaaaacaaaaaaccacactagccattcaattgacagagagaaaactaattatttccttcagtttaactgtagaaccgtggctaccaaaagaaatcaccttggtcagattctgagttttttacttcaggaagacatctgaggaactaccagtgattactactatcaaccttgatcagataga

SEQ ID NO: 601575 - DNA, 319 bp, Homo sapiens
gtgcacagcacacgttccacgacagatgaggcgacggcttccatctgcctctcccagtggagccatataggcaccacctgattcttacagcaacatgtgacaacatgcaaggaggtcttccaatacttccaaccaggagcagctaacttggggttctttttgtccagagttttttgtttgcttgagacaagggcttgctcttttgcagcttggagtacaagtggtgagatcacagttaattcaagccttgaatctaacgccaagtatccttccacctcagcctcctgagtagctatgactacagtgtgctccaccacgc

SEQ ID NO: 601576 - DNA, 704 bp, Homo sapiens
agcggggaacccacagcccagcagggtccaccctcaccaggtcacttcggcccaagtcttcagagccctccatgctcccaacacggactctgtcagctccttcctgacccgcagccgccaacctaacaccactccctctgtaggtagctccagccccacacacctgctccttccctgggcccgctaaaggcatctcccagggcagtgctggtgcacgcgacgccacactggacgctttcccctcgtgacctccctccatcctcatcaactctttctgtcactgctccctaaatgcccgcccctgctccatctgtcctgttctctggggcatcccaggccaagcctagcgctgacacagaacagcggctgcctgggggcccacagcctccccgggaatcagccaggcaccctgtgtcctgcctgcccgctgcagcccaggggcgcagagagcgtgtgatggtcacacacaggcaccatccgggatgtggccacctgccaccagctgtcccttgggaagacagacctctcctgtgtgcttgcggggagaaggggggtgttatttttcttttgctcccagaacacaattcacccccacccgccctctcaggtgtgagcaaggtccctccagacaggctctctggccactgcctgttcctcctctacagagagcagcttggcaggtcaaaccctcaggacagacccca

SEQ ID NO: 601577 - DNA, 470 bp, Homo sapiens
cacatcccactgaggagcgggcgtcctgcctcatcttagagtcaaaggcagaggggctgccaggccctgatggggtatttttggtgtcacctgaagtccctctgacatcaccttgtttcatcatttgttatgacagaattagaaacccatccttcaagcacaataatcatcacagacttgagtttgcttcctaaagcaaaggctccgggtttgtttggaaaatttttttgatttctgaaatgaattgatttttatatttggggcatctctatagaaagtgaccaccaaggccagtaagtacgggaaaaaatgtttactaacttcctcagagattcgtgatacgcgtttctccactgacagacatttaaaaacaaccttcagctccgtttcaatcaatcacctcgacttgttttttagcatggacactgccagcaggacagacaggtgcagcgtagaaggggtaccgcgct

SEQ ID NO: 601578 - DNA, 870 bp, Homo sapiens
gctctttcccttcggtgtggtgagtaagcgcagtgtcgtctcttgcggtgccgttgctggttctcacacctttaggtctgttctcgtcttccgttccgactctctctttttcgtttgcagccactgaagatcctggtgtcgccatgggccgcgcccgccggttgttaccggtatggtaagaacaagccgtacccaaagtctcgcttctgccgaggtgtcccttgatgccaagattcgcattttgacctggggcggaaaaaggcaaaagtggatgagtttccgcttgtggccacatggtgtcagatgaatatgagcagtgtcctctgaagccctggaggtctgcccgaattgtgtgccaataaagtacatggtacaaaagtgggtggcaaagatggtttccatatcgggtgcgggctccaccccttccacgtcatccgcatcacaaagatgtgtgtcctgtgctgggtctgacaggctcaaacaggcatgcgaagggggcttgtggaaagccccaggcaatgtgccaggggttcacatggccaaagttatcatgtccatccgcaccaagctgcagaacaaggagccatgtgatgaggcctgagcagggccaagttcaagttcctggcgcagaagatcacatctaaagaagtggggttcacacgttcaatgcgatgattgacgcacggggtgaaagcggtcacccaaagtggggcagaatccaaggggcctggaagtggggctgacatggggtcaggggccctaaacgccaaaatattcgcgaaaaaacaagaaagacaaaaaaaaagggggcgaaaaaaagggcggaaaagagcacgagaggtaagcagggaagggagcgaaaccgcgaag

SEQ ID NO: 601579 - DNA, 273 bp, Homo sapiens
gatcggcagtatgaagatctgtctgtttttgctaggaacaggctactgggatataccccataatctccaaccaggatcatcacagggagccccattgtacaacttaggtgcttccagcgtgggtggctcctaaggggcccctagcaatcccgtcctggagttcatgcctgtctagcccccatctctttaagtgtgggcaggaaccagacaacccggtctacagagacaaatacattaagagtgaggggaaatgctcagatccacgttatgtgc

SEQ ID NO: 601580 - DNA, 115 bp, Homo sapiens
ggatttgctggtgcagtacaactaggcttaatagggacatgatgtatgcaagtgtgtggtgcacatattatgtttgtggttactttaacttgtagatcataaactgtgtgtcaaa

SEQ ID NO: 601581 - DNA, 897 bp, Homo sapiens
  misc_feature (8)..(8): n is a, c, g, or t
  misc_feature (247)..(247): n is a, c, g, or t
  misc_feature (254)..(254): n is a, c, g, or t
  misc_feature (256)..(256): n is a, c, g, or t
  misc_feature (272)..(273): n is a, c, g, or t
  misc_feature (275)..(275): n is a, c, g, or t
  misc_feature (278)..(278): n is a, c, g, or t
  misc_feature (287)..(287): n is a, c, g, or t
  misc_feature (291)..(291): n is a, c, g, or t
  misc_feature (305)..(305): n is a, c, g, or t
  misc_feature (316)..(316): n is a, c, g, or t
  misc_feature (324)..(324): n is a, c, g, or t
  misc_feature (353)..(353): n is a, c, g, or t
  misc_feature (357)..(357): n is a, c, g, or t
  misc_feature (360)..(360): n is a, c, g, or t
  misc_feature (362)..(362): n is a, c, g, or t
  misc_feature (377)..(378): n is a, c, g, or t
  misc_feature (394)..(397): n is a, c, g, or t
  misc_feature (403)..(403): n is a, c, g, or t
  misc_feature (416)..(416): n is a, c, g, or t
  misc_feature (433)..(433): n is a, c, g, or t
  misc_feature (441)..(441): n is a, c, g, or t
  misc_feature (453)..(454): n is a, c, g, or t
  misc_feature (456)..(456): n is a, c, g, or t
  misc_feature (459)..(460): n is a, c, g, or t
  misc_feature (468)..(471): n is a, c, g, or t
  misc_feature (481)..(481): n is a, c, g, or t
  misc_feature (503)..(503): n is a, c, g, or t
  misc_feature (505)..(505): n is a, c, g, or t
  misc_feature (508)..(508): n is a, c, g, or t
  misc_feature (511)..(512): n is a, c, g, or t
  misc_feature (514)..(514): n is a, c, g, or t
  misc_feature (516)..(516): n is a, c, g, or t
  misc_feature (524)..(524): n is a, c, g, or t
  misc_feature (532)..(532): n is a, c, g, or t
  misc_feature (536)..(536): n is a, c, g, or t
  misc_feature (540)..(540): n is a, c, g, or t
  misc_feature (557)..(557): n is a, c, g, or t
  misc_feature (581)..(581): n is a, c, g, or t
  misc_feature (586)..(586): n is a, c, g, or t
  misc_feature (600)..(600): n is a, c, g, or t
  misc_feature (606)..(606): n is a, c, g, or t
  misc_feature (612)..(612): n is a, c, g, or t
  misc_feature (634)..(634): n is a, c, g, or t
  misc_feature (636)..(636): n is a, c, g, or t
  misc_feature (641)..(642): n is a, c, g, or t
  misc_feature (651)..(651): n is a, c, g, or t
  misc_feature (661)..(661): n is a, c, g, or t
  misc_feature (668)..(668): n is a, c, g, or t
  misc_feature (670)..(670): n is a, c, g, or t
  misc_feature (680)..(680): n is a, c, g, or t
  misc_feature (682)..(682): n is a, c, g, or t
  misc_feature (685)..(685): n is a, c, g, or t
  misc_feature (715)..(716): n is a, c, g, or t
  misc_feature (718)..(718): n is a, c, g, or t
  misc_feature (721)..(721): n is a, c, g, or t
  misc_feature (735)..(735): n is a, c, g, or t
  misc_feature (749)..(749): n is a, c, g, or t
  misc_feature (758)..(758): n is a, c, g, or t
  misc_feature (761)..(761): n is a, c, g, or t
  misc_feature (781)..(781): n is a, c, g, or t
  misc_feature (792)..(792): n is a, c, g, or t
  misc_feature (797)..(798): n is a, c, g, or t
  misc_feature (802)..(802): n is a, c, g, or t
  misc_feature (807)..(807): n is a, c, g, or t
  misc_feature (822)..(822): n is a, c, g, or t
  misc_feature (826)..(826): n is a, c, g, or t
  misc_feature (828)..(828): n is a, c, g, or t
  misc_feature (834)..(834): n is a, c, g, or t
  misc_feature (879)..(879): n is a, c, g, or t
actgtganaaaaatagttcaaaagtagactgtacatactttgttacataatcaggaagttgacaaaagattaatagaaaaacagaacagtaacaatgaattgtacaagtgaattaaaagcagaaaccaactgaaaagacaggctgcctctgtctctggatctgctgcacaataaataccacgccatggtctgacacactttgctggcttgttaatatgccatttaaaaagtaaaagccacatctgcnacttacncnatccaaaatggctagnncntcnaagtctaanaatntcccactaggttcnttctttaaacntgtttacnaacaaatgtaaaaagatgatttacataanacanatnangcctttattaccccnnccctcccctcctttcnnnntctccncccttcatccacnctctccccccccttccnccatcacnccctcctccttnntnctnnccctaacnnnncccacatccntctctctccaccccctcccaancnccncanncncncaacaccntccccccnctanactngtccccacgttaccccntcccgcagtctctccagctgaganaactnctcccagctcacantctcanccactnaagacaagctccccaaatccananactannctaccaaanccttaaccantgctacncncttctcatantnttntcatactcttttcagtccacatcttattannanctnatatttaacaccanccattttaaatctnttcatgctncanaataaagcatctcttgctanaaaaactacanttaanntcantcatnaaaatacaacaattncttnanattacntatccttatttcaccatcattcctctacactaccctccctccctnaaccataatccacatccc

SEQ ID NO: 601582 - DNA, 921 bp, Homo sapiens
ggcggccaggcagatcagctgaggctggctggtttgtgaccagcctggccaatcatggtgaaacttcatcgtctacgtgaaaatacaaagaaaagaaaaagttagctggacatggtggtgcaagcttgtagtccccgctacttgggaggccgaggcaggagaatctcttgaacctggaaggcagaggttgcatgtgagcagaggtcgcgccactgcactccagcctgggtgacagagtgagacttctgtcgttagaaaaaacaaaagttaactagaaattgtctcatatgcttataaattagtaaaccctttcaaaagcctgggaaggtaggcgcagaacaatttctccgatatactggttcactgcagaacctggggagctccgttaaccaagataactgtagtgagtgtctgtcaacaaagtgcaagagacatataaaactaaacgaaaaacatccaataaaactactgttggttgcggaccgccgcttgtgcgtgctcagcttgagtgaagaggacttttcttaaggacaccacttgtgtgtgtggggggcgcgcgcgcggggggcccccccacatgtgtgtttttcacggtggcaccacaccgtgggggtcctcacacaaggcgggtggttcccccccggagagagaaaaaccccggcgggatcagtcagaacaatacgggcggccgcgggaaagattctcccctccacacgaagtagtaaaaaaaacaaaccgcgccgccggcggggggaccaccaccaggaggggcgtgtttcttggtgaaaacaaaatctctctccacagagtggaggacgttatggacggagacgcacaataaggcgggggagatctctctacactcccacgggagggatctccagagagcgaaacgccgcaaaattttttcaattttcgccc

SEQ ID NO: 601583 - DNA, 451 bp, Homo sapiens
ctaagacgacagctcgtcctgttgcgcagactgtagtgcagtggcggtgatctctgctcactgcaacctcagcctgccctggttcaagcgattctcatgcctcaggctcccgagcagttgggattacaggtgcccaccaccacacccagctaattattgtatttttacgtaaagacagggttccgccatgttggccagtgctgttttgacaccccctggcctccagcagtccgcccactctggccttcccaaagtgctggctttacaggcgtgagccactgcccccagcctgatttcctgtttttctcattagtgtttaattcccgtgtatagtgctggtacctgaactcagttctgctccagtctgcctttcaccgaatcacatgcaggtacggcctgcatgcaggaggctcgcgaaatttagatggctgagttgcatggggttcctgtc

SEQ ID NO: 601584 - DNA, 634 bp, Homo sapiens
cttgtcatatgagaaactcagacaaagaagttaactacaaaatggatagagctacatgcagagctacaactatgaaacagaagaaaatactgggggtaaatcttcataatcttcaattttgcaatggtctcttggatatgacaccaacaagcacacagcaacaacaatgaacatcagcataaacgtggcaccccgatcgacaaattcaaacattcattggtgcgtgccacgtgcatacccatctaatcaaagtgcaaacaaacaattcctggcaatgggcagcaaaatatttgtaattaatttattttatagtggcttcatgtctattatatatacagaactcctgaaactgtaatcaaatgagataacccatttcaaaatgggcaaagaactggaatagcataatttccaaagaaatacaagtggccaaggaagtacattaaaaaaatgctcaacatcattagtcagaatgtaaacacatcaaaatcacgagatacttcaaacccactaggatggctataaaaaaagacatacaataacaagtgtaagattgccatatacatgattcactcattatcagccactactgaactgccagcttaggaagttaggaagctctgagttgatgtctaat

SEQ ID NO: 601585 - DNA, 315 bp, Homo sapiens
gcaggtcaaaatgattttcctgcatcagcctcctgagtagctgggactacaggtgcgtgccaccatgcctggataatttttgtatttttagtagagatggggtttcatcgtgttaaccaggatggtctgaatctcctgacctggtgatctacccacctcagcctccctagttttttaacagataatttctatctctttatcattatcttctatatggtaagacattgttcttctactttcttttatttctttagacatgctttcttttagtattttgaacatatttaaaatagctgatttaaagtctctgtttag

SEQ ID NO: 601586 - DNA, 473 bp, Homo sapiens
  misc_feature (285)..(285): n is a, c, g, or t
  misc_feature (424)..(424): n is a, c, g, or t
aatgttggccccagattcttttaacgtcaaggaaatgaataacagcttgtcagagacttcctatggaagaaagaattttttagatactatcattaggttggatatggtaatagatatatttcagaatagcaagtggtggtatatcttatccatatctttaggctgctgcagaattttaaggttatagataaagctgtgatattttatgcaaagactggctctaggtatttgaggagcccaacacagagattttaaaaaagtgttttgtgtaaaattccaacaccncccggtctttgttttttccccaaaggaaaggtgtttggtgatttttgtttccctccatacctcgccagtgcagtaaaaaaagagaacaaggaaaccacacacacataaatatttaaaggtaccgttctcaatggttggngtgaattttgtttttagatgccaataaaacttatttgtttgaaaaaaaa

SEQ ID NO: 601587 - DNA, 150 bp, Homo sapiens
ccctctgctgcactcgactgcgcattcacaggctgactgcatgtcaccccatgccagaggtgtcatagtctgaatgtgcctcagccagcccctgggagaaggcattgtaacaacaggtgaagagggggctgactggagcgagacctctgt

SEQ ID NO: 601588 - DNA, 113 bp, Homo sapiens
  misc_feature (37)..(37): n is a, c, g, or t
tgtcttgaagaacgcagatgatgatcgtcgctcgcgnctgggagcgcggcagcagcggggcgagcgactgctggtactcgaccttctccagcgcgcggtcggctcgccgagga

SEQ ID NO: 601589 - DNA, 575 bp, Homo sapiens
tcgatcttatctatttatggaagaaaccaatccggggtaaagaaaaaggggaatgaggtttggggacagaggggcggggggtgcgagagaagccccagccccgtgagggggtggtgggtgggaggggaaggggaaggggtcactggtaaaactcatggctccggctcgtccttctggatgacagtctggtatggctttctcgaagtcctgggccaggacaatggtagcgggtttctcacgggacagccaacattccactctccggacagatgggaggttaatatcagctccgggaaatcttatctgggccggggccacatagtcttccaagtcaacctcctcagagaggttcatctggctagggataggggagaaaatcaatctactatctgggcgggaggggccaggaagggggaaatccaatttaacgggcgccagcacgtccagggcctgtagcaggggccgggatccaggggggtctggcacaggtagagggggccatgagataacctgggacatgggacatctctggatacaaatccatccatctgagataacagaaggctccaagcaag

SEQ ID NO: 601590 - DNA, 250 bp, Homo sapiens
gccccttttatttttcccccgtcttccatggcgagagccatatttaaaagaccctgccatccaattttttatcctttttaaataaaaattcccatgttccgtagcgggggtgatgccattgtttaaccctcccccccccattggataccttggcctggaatgttccccccctgcgggcggggccgcgggaaaccattcccctattttcccctgcccccgttttgtataaaaaaaattgggtaaaatttga

SEQ ID NO: 601591 - DNA, 163 bp, Homo sapiens
agacgaaccatcttaccatctttaggtaacttgaattcttcaacagggtattgcttacgtaccaactcaatttcatgagcaaatctcttgggcaattcactgaaaataaacacaaacaactcactcaacgtgtccaaaacttcgtggtaatgttcttcgaaag

SEQ ID NO: 601592 - DNA, 123 bp, Homo sapiens
gaggaatgctgagagaggaagagtatgtggctcctccacgggggcctctgcccaccaatacacaggatggtcccaggacattatcctgtgctgtggatgagaacctcagcattcctcgcaaca

SEQ ID NO: 601593 - DNA, 575 bp, Homo sapiens
  misc_feature (1)..(1): n is a, c, g, or t
  misc_feature (64)..(64): n is a, c, g, or t
  misc_feature (148)..(148): n is a, c, g, or t
  misc_feature (161)..(161): n is a, c, g, or t
  misc_feature (208)..(208): n is a, c, g, or t
  misc_feature (225)..(225): n is a, c, g, or t
  misc_feature (253)..(254): n is a, c, g, or t
  misc_feature (266)..(266): n is a, c, g, or t
  misc_feature (278)..(280): n is a, c, g, or t
  misc_feature (282)..(283): n is a, c, g, or t
  misc_feature (289)..(289): n is a, c, g, or t
  misc_feature (299)..(299): n is a, c, g, or t
  misc_feature (302)..(302): n is a, c, g, or t
  misc_feature (305)..(305): n is a, c, g, or t
  misc_feature (307)..(307): n is a, c, g, or t
  misc_feature (329)..(330): n is a, c, g, or t
  misc_feature (338)..(338): n is a, c, g, or t
  misc_feature (345)..(345): n is a, c, g, or t
  misc_feature (352)..(352): n is a, c, g, or t
  misc_feature (369)..(371): n is a, c, g, or t
  misc_feature (397)..(398): n is a, c, g, or t
  misc_feature (412)..(412): n is a, c, g, or t
  misc_feature (435)..(435): n is a, c, g, or t
  misc_feature (470)..(470): n is a, c, g, or t
  misc_feature (516)..(516): n is a, c, g, or t
  misc_feature (519)..(519): n is a, c, g, or t
  misc_feature (532)..(532): n is a, c, g, or t
  misc_feature (547)..(547): n is a, c, g, or t
  misc_feature (561)..(561): n is a, c, g, or t
naaaatttgtggtttttgtttcttttcatgtcataaaataacttagtagaatttataataaaantttgagaatttaatatctcatcaaaatacaataaaatatggttttcaaatatgattaaccctttcggcttttcttttacttganggcatataaaccnaaaatacccaaactatgggtgcacacttaaactttaacatatttggntttttttattgtaattnaaccattctaaattattacattgttttnnttcttgtttggntttttgtttttnnngnngttttngggttgtttnggngtntnggggggggttggttgttggttnnggggtctntgggtgnggggggnggtgtgtgtgggggggnnngggggatgtggttgagttgattgggnnccttgggatgagtntctgtgatcgttgcatcagtgtngggagtaactgcttgagtaagtacaaaggtatttnagaaacttcagtgcaatttggttcagttattttcattcagatgccntcnccgttcagggggnttaatcactgggacncattgattcatgtngggggtttgggggg

SEQ ID NO: 601594 - DNA, 1240 bp, Homo sapiens
tgctgcgcgcgagccccgtgtcccctacggtggacagcagcgggcgtgcggcggcggctgaacgctgagggggcggagggagccctgctggcggcgtgcaagcaagctacagcgaaatggcggagaccgtggcttgacacccggcggcttgatcaccaatgccgcagaaccttgaatgacgcctacgggaccccccagcaaatttcctcgagatcggattgtgagcaaaccccgcaacacggtgggggtcgggccggggccgtttcaccacttacgaaaatcagggtccagagacaaattcttcccttatttttcaagcttgaaggaatctagtgttagacacgaagataccagtgacctttgaattgcctgccgaaggttgacattacgcaaagagagaagcaaggtcgatagtttccccccggttcccctgggaaacgcgcgtataggcgtcaagttaccttttatagaaggagtattgacttggcacatacttgtgatgacaattcttcatggcgcgacaaggaacaaccaaggtgcttgagagccagttttattacacccaaggtgtcgctgggtcaatccatcttgggcaccaagcaacccgacacggttggtctcccaccattgtttctttaacaagggagtgaaacttcaccttaggaattaacagagctaaatactcccagttcgtacaagattagcggactcttttgcgtttgaccacacttgcgggccacaacgaacaggggggccaaacacaagcggttaaccctaatttaagttcgacctgggcagtaacggcccccccaggttgatcagacaagtagtttcctaacacctttttaaggcaagttgccgcaccaccaagaaaagcgttgcgatattaaaccactgttgaccatctccaggtaaattaccgtaaaacgcacgtcacaattatttttgccctcaagaggttgtaggggttggagggggcatactatggggccaggtttgtacaacacaaggaaagtgttttctgctgttgctggccttttcatcgtataagaacatactctcccctatcaatattcccagcggccttctactagttgttttaaccattacgcctcctctatacagtaggcagggtgctgaaagctggtggcgggtagcacacaccttatatagggccatcccaaacacacgcgtgtgttacttccaccgcggttgtaaaacttagtgaagcaggtctcga

SEQ ID NO: 601595 - DNA, 130 bp, Homo sapiens
cttataatgcaggtaaggttgtcctgaaatcactgtttttgggagcccacaaattcatgagggaaaagccttcaaatgctatggtacattagttgaaccataaaaacagaaatcaattataattgcttct

SEQ ID NO: 601596 - DNA, 145 bp, Homo sapiens
cgctagcggcatagtgaacgcatacccgagcccaacgatgccgactcacccaagttcaagacaacagtgggaagcgtcaagtgggtccccgagaacagtgagatcgtgtggtccaccaagtcccgttcacttaatgccgctagcg

SEQ ID NO: 601597 - DNA, 412 bp, Homo sapiens
gcattaaactgagaagaaccactgaggaaagcatgccacagtctttcccaaaatccctgtgtcttaaggaacaaccaagaaagttaactggtcagggaaaagatttcttttggaacacagaagccatcgctgtgtgcggaaatccatgacctggccatgacttctacaacccggaggacttgcctggcattaccgaaaagcacaggggaaagattctgtggcaggtgccgcatttcatccagctcactccgtgctagttcctaagacatcttaattcttacacatatgcataatcgtgatattttgccatgaataacaatatatttcacaattatcaaccattttaatttttagctttctaacctcggactactataataaaaagaaataataaatccaaaagtagtagtgg

SEQ ID NO: 601598 - DNA, 486 bp, Homo sapiens
gcattaaactgagaagaaccactgaggaaagcatgccacagtctttcccaaaatccctgtgtcttaaggaacaaccaagaaagttaactggtcagggaaaagatttcttttggaacacagaagccatcgctgtgtgcggaaatccatgacctggccatgacttctacaacccggaggacttgcctggcattaccgaaaagcacaggggaaagattctgtggcagagaatgatgggagttgtgatccatacctccgtgtgcataatggttgtacctgctccaggaaggcgctggatcctcccaactccatgggaagagattaggacacaaacaacagacagaaggtgaccacaggaggacacagtgagaagctggccatctgcaagccaaggagagagacctcaggagaaaccaaacctgccagcaccttaatcttagacttctagccctcagaacggtgaggaaataaatctctgttgttcatgcc

SEQ ID NO: 601599 - DNA, 916 bp, Homo sapiens
agctagtcttagcatttatattttaataggaagtggactcccaagcatgtaaaagtgatccacgcagccggagtgtatgccgggagctaagatggtcctatgggtgaacatatcccaccttgcttcctgagtccttggtcccaatcttctcattgtgttcctctctgttttaaatgtttattccccccaacgtcttttgatgtaagagttcagtttgtcttcgggagtgggtctctgcaagggctctgggatgagtcttgtgcttccacacgtaggacaggctattgtgttcttggacttttttctgtgctagcgctgctgcttggtggcattgtaacaggacgtggattctgcctcatcagttggcagtttcccttttctctctgacttgtcctacgtccgatttctctatggcttccctgagaaaggtgaggcccataggtagagaggccttcaacactgtcgccagcgtcctgactgcagctcagtgcgtatcttcttgcttccatgtgtcttttcccctgtctgcctcagtctaccaccccgattttgactcaggtgtttgagccatttctacaccaaagcaaagtacggctcaggagggagtaaacaagggtgccatctgttgtctggaggggcgagctgtgtttcattgcccctgtgcttacctggggcatttcagcaaatttctggcatccttgcgatgtggtgcagtcccacctcagtaaaggttactatctttgcaaggttttgggaaggccaacccaaggacagggggtggagggcctatgggctgggtgtcccttggcttgcccggggtggatccaatttttgcccccctggggccctgggtgccagtgcgtccccgcggggccctttctgcacgcccccgggtctcttgtgccgggtcaccagc

SEQ ID NO: 601600 - DNA, 261 bp, Homo sapiens
gacccccccgacctgttttccacctgaagagccacccattccatccaaacccttggcaaaagtttggttaacaaaaaaaaccggccagtatgctggccagttgcgatcatgcctgtttttaccctttaagctgaagctgctcatcaacggtgagatggcaaaaaggtgggtccaaaaaaggggaaaaaaagggagtttgtgaaaacaaaatgctgaagaatttgcatcaaataaacccttccttccttcctttttccttca

SEQ ID NO: 601601 - DNA, 646 bp, Homo sapiens
gcattaaactgagaagaaccactgaggaaagcatgccacagtctttcccaaaatccctgtgtcttaaggaacaaccaagaaagttaactggtcagggaaaagatttcttttggaacacagaagaatgatgggagttgtgatccatacctccgtgtgcataatggttgtacctgctccaggaaggcgctggatcctcccaactccatgggaagagattaggacacaaacaacagacagaaggtgaccacaggaggacacagtgagaagctggccatctgcaagccaaggagagagacctcaggagaaaccaaacctgccagcaccttaatcttagacttctagccctcagaacgaaatgttcctcaccccccaagaaggaaaccctgtacgcatcaagcagtcattcctcattctcctctcccccagcccctggagacctttcatctgctttctgtctctatagatttgcctgtactagacatttcatatgactggaagcatataatatgtggtcttttgtgtttgacttgttttacttagtctaatgttttcaaggttcgccatgttgtaacatgtacactttacacaattttaagcctaatattctttaagccatatattcaaaataaacagcttacaaaaatga

SEQ ID NO: 601602 - DNA, 208 bp, Homo sapiens
  misc_feature (2)..(2): n is a, c, g, or t
  misc_feature (53)..(53): n is a, c, g, or t
  misc_feature (126)..(126): n is a, c, g, or t
  misc_feature (153)..(153): n is a, c, g, or t
  misc_feature (201)..(201): n is a, c, g, or t
tngccaagggtcatgatatgatttatctccacactagcagagaccaaccgaanccccttcgaccttgccgaagggagtccgaactagtctcaggcttcaacatcgaatacggcgcagccccttcgncctattcttcatagccgaatacacaancattattataataaaccacctcaccactacatcttcctagggacacanatgccgc

SEQ ID NO: 601603 - DNA, 255 bp, Homo sapiens
  misc_feature (16)..(16): n is a, c, g, or t
  misc_feature (20)..(20): n is a, c, g, or t
  misc_feature (58)..(59): n is a, c, g, or t
  misc_feature (73)..(75): n is a, c, g, or t
  misc_feature (78)..(79): n is a, c, g, or t
  misc_feature (83)..(83): n is a, c, g, or t
  misc_feature (116)..(116): n is a, c, g, or t
  misc_feature (142)..(142): n is a, c, g, or t
  misc_feature (163)..(163): n is a, c, g, or t
  misc_feature (193)..(197): n is a, c, g, or t
  misc_feature (212)..(212): n is a, c, g, or t
  misc_feature (214)..(214): n is a, c, g, or t
tattactgtatggcanaganagaagtgacattgggtatgttagaaatgaataaggagnngaaatgcattacgnnntgnntaanaattatcttttcagaatgctagtttaatgactnttttaactgaattttttgaataaatnagaaatgtttgtattggtcanaggtctatcataattgcttttctgatgcannnnnaaataaatggaacantnaaatgtatattaccgatgcaaactgtggataaagttgaaag

SEQ ID NO: 601604 - DNA, 370 bp, Homo sapiens
ggccggcatgaggcagatcccagcttaccttagaattttcctaacgaagcagcaaaaagtattaattttattaagtcttgaatacatttctatttaatattctgtgtgattagatgggaagtacacacaaagcatttttgctgcatactgaagcacaacagttgtctcaaggaaaagcacttgtgcaattgagttgtgagctgaattggccatctttttttttctttttttttttttggagagggaggctggtcctggtcgcccagggctgggatgtgcaggggggtgatctccggttcactggcaagctccgtctcccggggttcacttcattctcctgcctcggcctcctgaggatctgggcctcgtg

SEQ ID NO: 601605 - DNA, 574 bp, Homo sapiens
gcattaaactgagaagaaccactgaggaaagcatgccacagtctttcccaaaatccctgtgtcttaaggaacaaccaagaaagttaactggtcagggaaaagatttcttttggaacacagaagccatcgctgtgtgcggaaatccatgacctggccatgacttctacaacccggaggacttgcctggcattaccgaaaagcacaggggaaagattctgtggcagagaatgatgggagttgtgatccatacctccgtgtgcataatggttgtacctgctccaggaaggcgctggatcctcccaactccatggcctgttccagccaccgtgtcaacatgccttggtccatagctctggaaggcacacaccaagcaggaccagtgaacagaagatgagaagggaagagattaggacacaaacaacagacagaaggtgaccacaggaggacacagtgagaagctggccatctgcaagccaaggagagagacctcaggagaaaccaaacctgccagcaccttaatcttagacttctagccctcagaacggtgaggaaataaatctctgttgttcatgcc

SEQ ID NO: 601606 - DNA, 536 bp, Homo sapiens
ccggtcactgaatggaggaactggtgccgcctgcaagggctggatggccagaacactcgggacacccgggagaatgagatctggcacctgcgggagcaggtgtcgcgcctggcgtccgagaatgcggtgagctggagtgctgcagctgtggcctgatctgcgcgatgtgaggctgctggcctgtggctgcgcggcactgccagtgaggccgatggcgctgctgcgggctggtgcgcgggctggagctggagctgcggcatggagctgcggcctcgggcacagggttggcctggctgtctgcgggcaggactgcctgccggtctggccaatggagctcggaggaggcgaatgggcatcggagcggagcctgcgccgcccaggcttgaagacgctgaccaggcgagctggcattggtacaagagggggacggcgggactcctgacgtgtgcaggcctgcccctgacgctggggagggacctggtgccttgatcggtcccggggagctgctccggcgtcgctgatgggccgttgtgccg

SEQ ID NO: 601607 - DNA, 815 bp, Homo sapiens
cagtggcatgagctcggcttcactgcaacctctgcctcctgggttcaggcgattctcctgcctcagctcttgagtagttagtagagacggggtttcaccatgtgggccaggctgtgtcgaactcctgacctcgggtgatctgctcgccttggctcccaaagtgctaattagaaaggagaaggcatcctattctgtttgagagcccattctgaagtgggtacacatcacttctgctcacattccatgtgttagaatttaacccgggcatggtgactcatgcctgtaatcccagcactttgggaggccaaggtgggaggatggccttgagctcgggagttccgcagaccagcctgggcagcatggtgacgactctgtctctaccaaaaaaacaaagtaaaaacaaagctggaacatgggtggcatgccattctgtagtccccagctccctcagggagggcttgggggtgggaaggatcactgtgagtcccaggaggtccatggctgcagtggcggtgatcggaggtaactggcaacccaagggtagggtgacaggagcaggaccccggtgttcattaacaaacacaagaccgtaacccacacacccacacacacagttggcgcgcgacccgcgacccgtgacgagaggtccaagccaccgcgtgggggcgcgggcacccggacgcgcgggagaacgggccacaccggccccaggagaccgggccaacaaggcgcgggtcccacaacaaacaccaggggcacgcgggtggagaacacaggagcacggctaggctcccgggccggcgtataccccgggg

SEQ ID NO: 601608 - DNA, 101 bp, Homo sapiens
tacctaaatggctgtatataaagacaggtatgcttttcaaaaagctgaactgcagattcttgtagatcattgcagctaatgtaatcactgatccaaatatg

SEQ ID NO: 601609 - DNA, 485 bp, Homo sapiens
taccccatcaaccctaaatttattatgcgatggatagtcggaatagagccgccccaactcagatcctacaacacgcaagttccttcttgaaccctggtgcctcctaccctatggccctgaatggtgcactggtttaattgtgttggtgtcggcccctcacaaatgcagccaagtcatgtaattagtcatctggaacaaagactaaaaacagcagagaattgcgggttctacccagtcagaagatcacaccatggagactttctactagaggacttgaaagagaactgaggggccacaaaataaacttcaccttccattaagtgttcaagcatgtctgcaaattaggagggagttagaaacagtctttttcatcctttgtgatgaagcctgaaattgtgccgtgttgccttatatgaatatgcagtatgggactttgaaataatgattcataataaaatactaaacgtgtgtcttcaaaaaaaaaa

SEQ ID NO: 601610 - DNA, 548 bp, Homo sapiens
gagtcggagtgtggggtgaggcgagatcacaccattgcagcgtccatgcctattgcaactgatgactgagagtctgtcgtcaataaataatagggtgagttgggttaagtaaacgattgttgcagtgtaaaaaactgttcatatgccttaaccccttggtcatcccttaagccagtcatctattaacccagtcattcctatgttactgaagcagggaaaggagggagacccaatgtcctttcaagttaaaatgttatgattgggctgggcatggtggttcaagcttgtaaactcagcattttgggaggttgaagtgggtggatcacctgaggtcaggagttcaggaccatgcctgaccaacatggtgaaaccccatttctactaaaaatacaaaattagctgggcatggttggcacatgcctgtaatcccagctactcgggaggctgaagggggagaatctcttgaagcccggaggcgaggttgcgttagcccagatcacaccattgtactccagcctaggggacaagagtgaactccgtccttaaaa

SEQ ID NO: 601611 - DNA, 283 bp, Homo sapiens
ccgtgatgggtggctcgcttgctggccggctgaggcgggtggctgcggatgccacctcgctcttcagagactcgcccgccggtgaccacgactacgctctgccgagtgggaaagcagaagcaggacctgctggaaaaaggacgactcgcagggaggagtctgtctccatgtggacaaaggatcaggtgtcgatggagttctgctcggcgtgcgcccggaaagcgtcgtcttctcttaaaatgtagagtcaagtaatctgctcttatccgcgtttggacactga

SEQ ID NO: 601612 - DNA, 1480 bp, Homo sapiens
  misc_feature (1363)..(1363): n is a, c, g, or t
  misc_feature (1410)..(1410): n is a, c, g, or t
  misc_feature (1468)..(1468): n is a, c, g, or t
ttttttttttgtgttcagaaaagtacagtgttgacattttattttttatgtaaagaagccatatttacataatacattcatatttttaagtatgttacagctcctgtagaaaaccattccattaagacagcaacaagtgatctggattcaatctttaaaatattaagtcaaattaaaatgttcttatcaagactccaatttaatttcacagcccatctgcacaggggaactgaggagaaacaggaatgaagagtgggcgacaaagagaaagcatcccttcccacacgccaagagtccagtgcaacgatccctgccacacggtcagccgaccccacttggtgccacagggtccagcctcggccactctgggctcaacctttccagcacgtctgggagcccaatgaggctatgggacagtgtgcatttccctcaaggcctccaataccatgtccccctgacgtgggaggtcaaaggagatttgcccaaccttttcattcatgccaaactgaacaatttgggcatatgcactctgagttacttttctcaagtcatcttgagcaccagttgtaattcttccaaagaagatttcttcagagactcgaccacctaaagtcatacacatcctatccaagagctgctctttggtatagaggtattgttcttttggtaaatactgagcataacctagtcctttgccacgtgggatgatggatacctttaaaagcgggtctgcgtgctccagataccagccggcaaccgcatggcctgcttcgtggtatgccacagtcttcttctcctcaggctgcagaacctgcgttttcttctctaagccaccaatcactcgctcaattgcctgttcaaagtgtttctgatttatggaatctgacagatgccttgcagcaatcaacgcagcttcattacagacattagcaacatcagcacctgaaaaccctggagttaaagatgccagttttcttgccaatttatccttctccagggtactgtccagttttagcggtcggagatgaactttgaaaatagaagctcttccttttatgtctggtggtccaataaagatctgcctgtcgaaacgccccggcctaagtagcgcggggtccaggatatctggtcgattggtgccggccaaaatgacgacatttgttgttgtattaaaaccatccatctccaccagcagctggttgagtgtgttctcctgctcactctgccctccaaagttgcctcttcctctcttccttcccaccgcatcgatttcatcgatgaagaggatgcaaggggcattcttccgagcaagggcaaataagtctcggactctagcagggcccacaccaacgaacatctccanaaactcagatccactaacggtgatgaaggggacattggcttctccgnctgtggccttagctagcagcgtcttcccagtgcctggaggaccagtgagaatggcacnctttggattttg

SEQ ID NO: 601613 - DNA, 1655 bp, Homo sapiens
  misc_feature (1538)..(1538): n is a, c, g, or t
  misc_feature (1585)..(1585): n is a, c, g, or t
  misc_feature (1643)..(1643): n is a, c, g, or t
cagccaattttgggtctaacattttcaaaaaagtatggacgccccaaaaggctatgggccagtgtgcatttccatcaagccctccggaaagtcacctgccacccactgtgacctctgaggctgaaaggactaaggactcctttccccatcatttcagctgggccagtggctggctaaaatcagcgcagcattcccattcttctgaaagccacagctgaaataatgcaccagctgaaaccacagtggacagactgagatggcctccctctgggcctctagttggcaactttctcacccgggggctcctctttctccttttcccgctccttgttccagtccttaaggccttctggaagtgaggtgtcctcatccaagctgccagtgccttccacaaattcttcataggtagatttttccgcaaatggtctggggcccaaaagttcaaccatatcattcttatctaatacttctttttctaacaacagaagagcaaccttctccacgtcagctttcttttctgtgagaagagctactgttcttttataagcatcattaataagtattcgtacttcatcatctatcaatcttgcagtggcttcactgtaaggtttctccaataccatgtccccctgacgtgggaggtcaaaggagatttgcccaaccttttcattcatgccaaactgaacaatttgggcatatgcactctgagttacttttctcaagtcatcttgagcaccagttgtaattcttccaaagaagatttcttcagagactcgaccacctaaagtcatacacatcctatccaagagctgctctttggtatagaggtattgttcttttggtaaatactgagcataacctagtcctttgccacgtgggatgatggatacctttaaaagcgggtctgcgtgctccagataccagccggcaaccgcatggcctgcttcgtggtatgccacagtcttcttctcctcaggctgcagaacctgcgttttcttctctaagccaccaatcactcgctcaattgcctgttcaaagtgtttctgatttatggaatctgacagatgccttgcagcaatcaacgcagcttcattacagacattagcaacatcagcacctgaaaaccctggagttaaagatgccagttttcttgccaatttatccttctccagggtactgtccagttttagcggtcggagatgaactttgaaaatagaagctcttccttttatgtctggtggtccaataaagatctgcctgtcgaaacgccccggcctaagtagcgcggggtccaggatatctggtcgattggtgccggccaaaatgacgacatttgttgttgtattaaaaccatccatctccaccagcagctggttgagtgtgttctcctgctcactctgccctccaaagttgcctcttcctctcttccttcccaccgcatcgatttcatcgatgaagaggatgcaaggggcattcttccgagcaagggcaaataagtctcggactctagcagggcccacaccaacgaacatctccanaaactcagatccactaacggtgatgaaggggacattggcttctccgnctgtggccttagctagcagcgtcttcccagtgcctggaggaccagtgagaatggcacnctttggattttg

SEQ ID NO: 601614 - DNA, 274 bp, Homo sapiens
cgacacaggctggcgcagcaggagcatgggggcggccacaatcactgctcagcttctccagagagacgtcgttctgttatgcgcttcatgttctcaaagtcaaaggccgatgccagccactgcgtttgtagcatgtctttgactgtcgttgcagagttgtctcaccagtgtgtggtaggcatcgataggcagcagcgaacagcaacacctaggctctccacaagcgatcatacaatggcgctcataacaagatcactgatcagccacaaaactt

SEQ ID NO: 601615 - DNA, 644 bp, Homo sapiens
tcaggacgcgcgcccggcccgcagtagtcgctgtcgtccgcagagccagttcctagcgcagagccgcgcccgccatgagggagatcgtgcacatccaggcgggccagtgcgggaaccagatcggcaccaagttttgggaagtgatcagcgatgagcacggcatcgacccggccggaggctacgtgggagactcggcgctgcagctggagagaatcaacgtctacctacaacacgcaagttccttcttgaaccctggtgcctcctaccctatggccctgaatggtgcactggtttaattgtgttggtgtcggcccctcacaaatgcagccaagtcatgtaattagtcatctggaacaaagactaaaaacagcagagaattgcgggttctacccagtcagaagatcacaccatggagactttctactagaggacttgaaagagaactgaggggccacaaaataaacttcaccttccattaagtgttcaagcatgtctgcaaattaggagggagttagaaacagtctttttcatcctttgtgatgaagcctgaaattgtgccgtgttgccttatatgaatatgcagtatgggactttgaaataatgattcataataaaatactaaacgtgtgtcttcaaaaaaaaaa

SEQ ID NO: 601616 - DNA, 620 bp, Homo sapiens
tgccggcggctcaggcgcgcctggaattcggccgccggggcgcctggggtgggcgcgggtggcggcgtcccgggctctgggttctgagcgtctgtccccccgccttgccctgcccaagttttgggaagtgatcagcgatgagcacggcatcgacccggccggaggctacgtgggagactcggcgctgcagctggagagaatcaacgtctactacaatgagtcatcgtctcagaaatatgtgcccagggccgccctggtggacttagagccaggcaccatggacagcgtgcggtctgggccttttgggcagcttttccggcctgacaacttcatctttggagtgtagcttgcttcttgagtgactgcagcgagcatctgctcacccatgcactggctgcctagtgcagctaccctgcttcacctttaaaagcgggtctgcgtgctccagataccagccggcaaccgcatggcctgcttcgtggtatgccacagtcttcttctcctcaggctgcagaacctgcgttttcttctctaagcctaacaaaataacaacaaaaaaacccaagccattgttacagtgacactgacattaaaagacagttatacagtgctaaaaaaaa

SEQ ID NO: 601617 - DNA, 367 bp, Homo sapiens
cattgggcctagaccgacggcttgagcagctcttcgttgtggtactgcgcgtatagcattaggtgtgcatataagcggtctgatcgcttggtggtgcaccaggttttgcgaaacaaccgattcacgttcgctcggagcatcgcgcaggtgtgattcaggctgaacagtggatcgaagcgaaccttcttgagctcactctggccggtcgtggatcctcgtttgcccttgtaatgaagatggagcgagtccggaaagtgcttctgtatgtccgcgggataataagggttgtcgtcggacttgatcacaacccgatccgtaacgacgtattggagccactcgaacaagcgcttccggcccagcctctttc

SEQ ID NO: 601618 - DNA, 181 bp, Homo sapiens
ctttaatgtggcagatggatggggccagtaggaattatctcagcattatggcatcagcccactttcaataatcttttggttcttgtactaattcattaaattgctgtgcagccaacttgacttacccagcacgtacacagcaaagagaatcagaagccaattcttctaacacgtatctctt

SEQ ID NO: 601619 - DNA, 1327 bp, Homo sapiens
  misc_feature (1210)..(1210): n is a, c, g, or t
  misc_feature (1257)..(1257): n is a, c, g, or t
  misc_feature (1315)..(1315): n is a, c, g, or t
ggtagatttctcgttggtctctgcttacccttttgccaggttctctgggattgccactgtgcatgtgtagtttagttgtcggcctgagatttgggcagttcctgctcagattcggcctcaccacttggtagttttcttgcttctgggattttcctgttaaatttccagtattcgttaagtcctggactatctcctctaccacctcaggataataaagactatgtctcataccactgtagtgtggagattatgaaaaaccctttggcaagaaagccacaggctcccagttcaaacccactgcagctgctgctttataggagcaaactctccagctctcgcctgcttttggacactctgtggtccctttaaataattttctgtccaaattttatatttatctatgggacggtttgtgcaactatggttaccagaagttaccagaagttttggctaaagccttgtttctttctcctttgcaggagtgtagcttgcttcttgagtgactgcagcgagcatctgctcacccatgcactggctgcctagtgcagctaccctgcttcacctttaaaagcgggtctgcgtgctccagataccagccggcaaccgcatggcctgcttcgtggtatgccacagtcttcttctcctcaggctgcagaacctgcgttttcttctctaagccaccaatcactcgctcaattgcctgttcaaagtgtttctgatttatggaatctgacagatgccttgcagcaatcaacgcagcttcattacagacattagcaacatcagcacctgaaaaccctggagttaaagatgccagttttcttgccaatttatccttctccagggtactgtccagttttagcggtcggagatgaactttgaaaatagaagctcttccttttatgtctggtggtccaataaagatctgcctgtcgaaacgccccggcctaagtagcgcggggtccaggatatctggtcgattggtgccggccaaaatgacgacatttgttgttgtattaaaaccatccatctccaccagcagctggttgagtgtgttctcctgctcactctgccctccaaagttgcctcttcctctcttccttcccaccgcatcgatttcatcgatgaagaggatgcaaggggcattcttccgagcaagggcaaataagtctcggactctagcagggcccacaccaacgaacatctccanaaactcagatccactaacggtgatgaaggggacattggcttctccgnctgtggccttagctagcagcgtcttcccagtgcctggaggaccagtgagaatggcacnctttggattttg

SEQ ID NO: 601620 - DNA, 223 bp, Homo sapiens
ccgacgcgactactacgactactactactcctactacgactacgacgactactactcccctactactacgactactactactactacgacgactccactcgtaacgacggagtacgattcctacgactccgcggctaatacgaccacttacgactactattaggcccccccaggacgaaggaggctactgcctattacgaggccgaactagactacgaccagg

SEQ ID NO: 601621 - DNA, 1285 bp, Homo sapiens
  misc_feature (1168)..(1168): n is a, c, g, or t
  misc_feature (1215)..(1215): n is a, c, g, or t
  misc_feature (1273)..(1273): n is a, c, g, or t
agagttcccagtcccttctctaaatttctcctgtctcagtctcctgagtagctgggattataggcgttcaccatcatgtctggctaatttttctatttttagtagagacaggtttcgccacgttagccaggctggtctcaaactcctaacctcaagtgatccgactgcctcggcgtcccaaagtgctgggattacaggcatgagccactgcgcctggccttgattaggaatttttggattgtgataggcagctcagtctccaaaccccattttaggtaaggcaatgtatagcactgtataactgtcttttaatgtcagtgtcactgtaacaatggcttgggtttttttgttgttatctatgggacggtttgtgcaactatggttaccagaagttaccagaagttttggctaaagccttgtttctttctcctttgcaggagtgtagcttgcttcttgagtgactgcagcgagcatctgctcacccatgcactggctgcctagtgcagctaccctgcttcacctttaaaagcgggtctgcgtgctccagataccagccggcaaccgcatggcctgcttcgtggtatgccacagtcttcttctcctcaggctgcagaacctgcgttttcttctctaagccaccaatcactcgctcaattgcctgttcaaagtgtttctgatttatggaatctgacagatgccttgcagcaatcaacgcagcttcattacagacattagcaacatcagcacctgaaaaccctggagttaaagatgccagttttcttgccaatttatccttctccagggtactgtccagttttagcggtcggagatgaactttgaaaatagaagctcttccttttatgtctggtggtccaataaagatctgcctgtcgaaacgccccggcctaagtagcgcggggtccaggatatctggtcgattggtgccggccaaaatgacgacatttgttgttgtattaaaaccatccatctccaccagcagctggttgagtgtgttctcctgctcactctgccctccaaagttgcctcttcctctcttccttcccaccgcatcgatttcatcgatgaagaggatgcaaggggcattcttccgagcaagggcaaataagtctcggactctagcagggcccacaccaacgaacatctccanaaactcagatccactaacggtgatgaaggggacattggcttctccgnctgtggccttagctagcagcgtcttcccagtgcctggaggaccagtgagaatggcacnctttggattttg

SEQ ID NO: 601622 - DNA, 248 bp, Homo sapiens
ggcctcgtcaaagtgctggaattacaggcgtgagccactgcgcctggccaagaatggacattttttacaaaaacatcagtacttcctaccagtgctgcatgagtataatggtccggaattatcagagagcataatgcagaaatacgtattagtggagcttaatcatgtgccatataagcttacctaactaacagttatatccctattcctcgactgaatgtctttcaataaataagaatttatcattt

SEQ ID NO: 601623 - DNA, 293 bp, Homo sapiens
cataatgagagcccaggtagcctccttacaaaaccagacacagagcttccttgccacctcacaggcccatggcgctcctttctaaggggtcccctctcatgaccggtgggctgaacttcacagaaatgaagtgcatattcttatctgtttgactcattttattgaaaataatgtttatcatagaatacgttataggagaaaaaaaagtttttgagattcaatcagtgttgaatatatcactctctcatttgtctgggtgagtaataccccattttatgaatatatcacaatgt

SEQ ID NO: 601624 - DNA, 139 bp, Homo sapiens
  misc_feature (61)..(61): n is a, c, g, or t
  misc_feature (63)..(63): n is a, c, g, or t
  misc_feature (110)..(110): n is a, c, g, or t
  misc_feature (126)..(126): n is a, c, g, or t
caaacccggcaagaaacagaggagagggccaggcagggtggctcaggcctataatcccagncngggcagctgaggcaggtggatcactgaagtcaggagcaagaccagcntgggcaactggcgaancctcctctctaat

SEQ ID NO: 601625 - DNA, 102 bp, Homo sapiens
atgcaccactgatggtggcaaatggcagatactcacgccgcgcgtctttttgagacagtccccgctggcccggagaaagtaaccattcagattatggatacc

SEQ ID NO: 601626 - DNA, 426 bp, Homo sapiens
  misc_feature (116)..(116): n is a, c, g, or t
  misc_feature (185)..(185): n is a, c, g, or t
cctccataaggcctattgtaaagatattaaaagtgaacggtgccctgtaaatgtgcccccatgacagtccccccggaaaatagtaggtagtaattgcctaaatgttaagcctgtanttttattaatgttagtacagttggctgggcatggtgccttatgccctgtaatcccagcactttgggagnccaaaggcaggcggatcacctgaggtcgggagttcgagaccagcctgacccaacatggagaaaccctgtctctactaaaaatacaaagttagcccaggtgtggtggcacatgcctgtaatcccagctactagggaggctgaggcaggagaattgcttgaacctgggaggcggaggttgcagtgagccgagattctgccattgcactccagcctgggcaacaagagcaaaactccaattaat

SEQ ID NO: 601627 - DNA, 668 bp, Homo sapiens
gactgccggtgcagctgttgggtggtgcccggggtgccctgtgtggccctgggatggggaacctgcggtggcttcctgcggagtgtttcgcgcagtggcatcctggggccggtggtctgctgggcgtggatggggcctggggcctgagtgcctgcggagctcgcggaggcaaggacgaggataagtgagtgtgattgcccgtcaccaagtttgggccgcttggtcaaggacatgaagatcaatgtccctgtggaggagatctatctcttctccctgcctattaacggaatcagagatcattgatttcttcctgaggggcctctctcacaggatgaggttttgaagattatgccatgtgcacgaagcataccctgtgcccggccagcgcaccagggttcacaggcaattttgttgctatcaggtggactacaacttgtgccacgtcaggtctggcgtgttaaagtgcgtccaacggaggagtggcccactgtctatcctgtggttgccaatacattccttgtgccaaggctctccatctgtcacccgtgcggcagagagcaacttgaggtggaaccaatgatcaggagaaggcacaacacttgtcccattgcacatgtgttgacatgctggcgttgtctgactcttgttacatgagatacgcctaattc

SEQ ID NO: 601628 - DNA, 1051 bp, Homo sapiens
agacagacactctggcaatattgtccaagaaacacctcgcagaccaaattctttgaagctgaatgtggaacaaagcacctttcctttgctgagagactgcactatcaaaagtcattcccacacctacgcacctgcctaacaagactggcgaaacaccacaagacttactgctctgcttgggctttacatgagccctagcgaaactacacgactgcacttcacacacacgaaagctcttagcacatggacggcctcggctctctctcctgcacccattcgttaactctaccacgctggaacacattctaactgggacgcccaccactttctcaagaccacccaaacacagcacaactcttcgcgcaaccacagacctcttccacacagacgccttgggactaacagacaacaccttactcactgacggccaacacgaccaactcatggattctccagagcctagcttggactgcgaatctgaatttgaccgcatcgccttcaaacgtcaaagtctgccttccgctggctaacaccaatcttggtgccctctgcacgcaactagaaaaaaaacttatggcttctcccacgcacatatcatgaaaacccttccgctaggtcacccacatgccaaaccacaagtttacccttaacctccaaaacccgcttccatcaagtaacaccaaatcgggggccttccacaccccgctaaaacacttaaccctcccaacttaacttatccctccggcaagcacttcccccccacctaaaccaagcgacctgcagaaacttccaaaaacatttcaacaaaaaaaaccgcttgggtacattgtagaccctatggatcccaaaaccatctggaccatgccagggaggccccaaatctcccaccttagttaccaacaaagccatctcaccaccgcgccacaccaaaccactccacaagagatatgcccctccaacacaaactccacaatcccactggggagcaaccagccgagactccctcgggcacactcccctcccctaacactagcgcatctcgggcccgcac

SEQ ID NO: 601629 - DNA, 570 bp, Homo sapiens
gaatagaatttgggataaagtggatgaatagctgactggccaaaaatcaaatgagtgtttcaccgggaagggattcttccgggaattcatggcatgttactcctccaggatgtatgctccagaccaccccgccggtttgtgctccaaatgttccaaagcgaaaagtttccgcctcaaagatttgaggcacctgcttgctggcgaccctacgtgtcgcaggtcttagtgtccaataagaccttgtggcctgtaacatgggtgtaaagagcctccatctttacctttgcagggataaaagtgagttttgtggatgggcgcagtggcccatgcctgaaatcccagaactttgggaggctgaggttcaggccagcagtttgagaccagcatggtgaaaccccgtctctactaaaaatacaaaaaattagctgggtgtggtggtgggcgcctgtaatcccagctacttgggggactgaggcagaagaatcgcttgaacctaggaggcggaggttgcagtgagctgagatcgctccattgcactccagcctgggtgaaggagtgagactccatctc

SEQ ID NO: 601630 - DNA, 142 bp, Homo sapiens
tacagtgaaagccatatatccacacatgcctgtgcgtgtgcactagagaattctccacatcttcctccctacatctatttggaatatgcttagtccaggaactgtgtgtgtttttgtctgtcgagcggtaggcatgaagatg

SEQ ID NO: 601631 - DNA, 671 bp, Homo sapiens
tgatcatatatttcggattcatattgattaggttagattagcagtcaataaagttacttttttgcctttaaaaaaaaaaaaaaaaaaaaaaaaaaaaaaaaaaaaaaaaaaaaaaaaaaaaaggggggggggggcaaacctattactccccctgggggggccccaattcgcttcaccccgtccctccccgttattgttgtagatgagaaaaaaaggggggcgcaccacattatggaggaggtagtagtatttattaacgccaagggacgcgcgcgcggcaagtattaaacaaaggactgctgaccagaaggggcaaaaccgctgggctagcgtgggctaaccacttggtgaagcgaggacaccctatcaccactctggaggagagggtgggacagaacctagcatgctgtgcggagccaaaatcacagctctcatccatgctcgtacgtagacaatttatattaacagacctcttgcttgggggagtacacaagtctaataaatacactttgttacgacggcgtgtgtaagatatagcgtgggtgataaaccaccgacaatggagcaaggcaatttgttgcctaggtgggaaggcgacatgtaagaaaatttttttgcgcaccaaccacgtgggatatttttcgatattactggaaagacaatctttctac

SEQ ID NO: 601632 - DNA, 114 bp, Homo sapiens
ctgtgtgtacggacaaaaacaggctaggtgacaagaccaaaacaaaacaaaacaaaacaaaacaaaaaacaacaacaacaaaaaactaaaaaccttctgcggtgtggtcctttt

SEQ ID NO: 601633 - DNA, 108 bp, Homo sapiens
  misc_feature (66)..(66): n is a, c, g, or t
  misc_feature (96)..(96): n is a, c, g, or t
gtaattattgtattttttagtagagacagggtttcaacatgtttggtcaaggctgggctcggaacntcctgaaccacaatactctgaaaatcccantaggtgaattta

SEQ ID NO: 601634 - DNA, 477 bp, Homo sapiens
aaccatcttattttccaactctgtctttggccccatataccaaaaatgtcttggcctttccaaagtcaccaaagccttttgctattccttccattctacttaatgatttctagatatttaggcagggcaatgtccatccaaaaacaataatacgaaaagtcattctatttagatatttgatttacacacacccagcatcacttagaataactaaagtaggtttggactgtgtatggatagaatcatatgtgacttttaattcttccacttgttcagggtcaaagaaaatcaggcataataataagagtgggggaaggagattattttcattccctatgtcaaaacaggtatttattttagatttgctgcctcatttccttttgaaaaagcaaagtaatattagtatttatttcttgaagaccctaaactcattggccataatttgccatggttatttacttagacatctgcatttcc

SEQ ID NO: 601635 - DNA, 906 bp, Homo sapiens
  misc_feature (283)..(283): n is a, c, g, or t
agcggagtcagatgctgtggtacttggcatttaacaactagaattcagaatccagattttcaagatggtgaattattttaagataactgagttgtaatagagaatgtaataatattgtgagaattattgtgtagggaaagtggaagataccgtgactagtcgcagagaatgctgaagaagtaacaattaagatagcgtagatatcctcatctgggacaaatagtcctggaggttcagatttggcttaaggaaacggttgcagaaagggcagacacatattgtngatctctggtggattacaagatggctgatagcactaaatgaagaacaagcaacttgcctactgcagctccggataagacggaggtcactcggtgacgcacgattgctccactccggtatagaccttcctcaagcggaagccgctcccttgttatgctagtcaagtctggtctggtctgagttaatgaggctgaagctgacatgtaatcttgtctaatatctccatttattttggcatccgttacagtagtggttagcttaatcgtacgtgtgtcttagtgttcctctctcagttcactatctcatttgaggactgcacagctttgctaggtaaggcatgtagtgtgtagctgctattggtgggaagtatagcgtcgttgtaagacgttgccgagttacgtttaagcaggtgcactggtgaaggaaggacattgtgtagaggcaagcactaaggtaagagtaagtgtgaagagatagttgtgatatattgaccttgagttctagttgtaagtggctggtttctaaaccaagttaaaaaggcccgttttaaaatgtcaatgtttagggttgcatgacgttcatcttaatgatagttggattttactcttattgatataatgttaa

SEQ ID NO: 601636 - DNA, 251 bp, Homo sapiens
tataatcaaatctttggagtttttgtctttggtttgagagagggttcgagtggttgtgtctatactgaacatgtatagacttttttccttgtcattattccctaaacaatatagctccatagcatttacactgtatgaggtattataagcaacatataatttaaagtatacaggaggatgtacatgggatatgtgaaatactacagcattatatataaggaacttcaggatctgcagattttgatattcat

SEQ ID NO: 601637 - DNA, 864 bp, Homo sapiens
gacttgaaatgttggagatgacatgatatgaaatgatgagatgcaatgacctgataaacatgatgaaatgataatgatgagaatcgatgtgagtgaaatgacaataatgataatgatgatagcagatatggctgagatggaacaactgcggaaatgaagatgaggactgagtgacaatgactggtgactgaagtgtccatggtgcatcttggaagtgatgaaacagagtcagatgccctgattgacttgaacacatgctatgatatgatgaaatgatgaattggaagaatgaattgactggttgagttgttgaaggtgatcccaatgatatgcatctgatggagaatgaaatgtatactgaagtcgatgatagtgaaatgatgaagatgagtgccagtacttgaatatgctattgctgaattgagtgtacctgatgatgttgtaaatgggcctgatcgacgtattaaatggtcgaaatgagacgttgttgcattaactgaaatgttggtatcgatccgttgatatgattgcgttcacctgaatcattatcatgaatgaatgactcatgatttggatgtgcccatgccttgatgataagcatgaaactgggcaagtgcgtgactggaagtactggcgacctgcgggtgaatgaaagtgagtaccacttgatttgatggtgtgccttgaacccgtaatgagctgtgtttgcctcgtgataaggcctgtctgcctgacaaggaagcgctgatcgccgggaaggtgcattttactgataacggtctactgttttaacgggcagagccaggtttaacacagaacctgtaggaaataacctgaaaggaaaaaaacaattggggcaccaaa

SEQ ID NO: 601638 - DNA, 180 bp, Homo sapiens
ggaaaggatgggaagtacatttattgtccagggagtacacacttggagacagagggacataatttagtgaattttacacctttgccaaggtaccatttttagcattttttacagtattagttacatgtggagatgtgtttatagatacaggcggtacatgtacaggcttttaacatgggt

SEQ ID NO: 601639 - DNA, 270 bp, Homo sapiens
tcggagcaaggcggggaaacacagtgtatcacggtcagggatgtgggatgttctaatggagagaccaaaagaaacacacaaataaatacagcaccttatcacggcccatgaagactggcaccatctggcccctatcagctccctggcctgggtctctagtctggtagtgggttttggtttgggtttgggtttaggggacgggagtctcggccctggtcatgccagggctgggaatggcagggggcacagaccttcagctgcactggcaac

SEQ ID NO: 601640 - DNA, 357 bp, Homo sapiens
catctaaaccaaaaggaaagacctcatttacacccgagtagcaaaggatcgaaggcgcctgtcgctacaaccctcccccttgtaccagttctctgatagaaaaggacagtgccttggagtggccgtgggccaagcacaggccatgccttcatctgcatagggtaccaattcgcctcaacctttgattagccaaggaccaaatccttcattcagatatgggtagctgataggaacctcaaaaggagtacttaaaacccagaaaacattgtaaccgggtccttgggcggcttgctggggctcacacccaccctgtagagtgctttctcactttaataaaatcttgcttttgctattcca

SEQ ID NO: 601641 - DNA, 1335 bp, Homo sapiens
  misc_feature (93)..(93): n is a, c, g, or t
cgtgatagtattggtcaccacagccgcccgcccgcaacaagcgtttgggggaagaaacgaaagttcgtgtgtgcatgaagaagtcttgtagcntgacgaacggtggtgggtgagtcagcccccacactataagattttggggataagattgccttccggcggttattaaaaatactctttgtacggacgtcgcccttctcttatacaaaatattctcttgggggggggcgtgattcggcttgtgtctaaaagataagattattataataagacgcttttttatatgtagtacgccgtttagaaatgaggaagactattggtaaacagcgtgaaaaaaccgctcgtggttgtggttgatctgatgtgcgttgtaaatatcctgcgggagaacacagcactggtgcttgagacgttgtttccccccttttgcgacaacgcgcgcctcttaaagttttaacaccgacaccatcattcttgctgaggagttgtcaactattgctccgccacaacgtggaggcttgatcctcttttaaaaggggggacaacacacatcgcacgggacgctcaacggagctttggtttttttcagagagtgccacagaggagtatataggggcccctcccttataccacggggtgatatatatctttttagaagagacctcttcgtctctcggtcacaaattgtctaaagatggggggtatacctcgcgcgtgggagtatatatagagctggagaagacctatatcttgagatctcctcgagagttatctctataggttctctatagccgctctggtctgtgtgctctttttgggcaacaatgtttccacgcgatattctgtacacatatgttctatagaacatataggggagaaaacacactcgtgagagatttcttgtgtgtatatagactctgtcggcgggaagaagagatatatatttgggtgatatagagatgagacttcttgagaatagagaatatagagactgcgtgttgctgtagaaagagagcgttatatatcacacaccttgttctcacaaaggtatatgtataaagagataacacatataggtgggaatagctcttcttattactgcacacgcacagtcacatgagaatatcacattgtttatagccactttatctctaaaggagaaaaagaccacgcttttttctaaggtgaaccactgaaaggaaagaattgagccccgttggtaatgcctcgtgggggtgggaatgtgagagtgggagactgaatataaactgatacttttggtttgtaagtacatactggaagaatcttttcataataaatgagactaccccacca

SEQ ID NO: 601642 - DNA, 601 bp, Homo sapiens
  misc_feature (61)..(61): n is a, c, g, or t
  misc_feature (68)..(69): n is a, c, g, or t
  misc_feature (72)..(73): n is a, c, g, or t
  misc_feature (76)..(76): n is a, c, g, or t
  misc_feature (84)..(84): n is a, c, g, or t
  misc_feature (97)..(97): n is a, c, g, or t
  misc_feature (99)..(99): n is a, c, g, or t
  misc_feature (114)..(114): n is a, c, g, or t
  misc_feature (136)..(138): n is a, c, g, or t
  misc_feature (140)..(140): n is a, c, g, or t
  misc_feature (145)..(145): n is a, c, g, or t
  misc_feature (158)..(158): n is a, c, g, or t
  misc_feature (243)..(243): n is a, c, g, or t
  misc_feature (265)..(265): n is a, c, g, or t
  misc_feature (307)..(307): n is a, c, g, or t
  misc_feature (324)..(324): n is a, c, g, or t
  misc_feature (340)..(340): n is a, c, g, or t
  misc_feature (377)..(377): n is a, c, g, or t
  misc_feature (380)..(380): n is a, c, g, or t
  misc_feature (386)..(386): n is a, c, g, or t
  misc_feature (396)..(396): n is a, c, g, or t
  misc_feature (399)..(399): n is a, c, g, or t
  misc_feature (403)..(403): n is a, c, g, or t
  misc_feature (409)..(409): n is a, c, g, or t
  misc_feature (411)..(411): n is a, c, g, or t
  misc_feature (416)..(416): n is a, c, g, or t
  misc_feature (418)..(418): n is a, c, g, or t
  misc_feature (428)..(428): n is a, c, g, or t
  misc_feature (433)..(433): n is a, c, g, or t
  misc_feature (438)..(438): n is a, c, g, or t
  misc_feature (441)..(441): n is a, c, g, or t
  misc_feature (451)..(451): n is a, c, g, or t
  misc_feature (458)..(458): n is a, c, g, or t
  misc_feature (463)..(463): n is a, c, g, or t
  misc_feature (465)..(465): n is a, c, g, or t
  misc_feature (478)..(478): n is a, c, g, or t
  misc_feature (484)..(484): n is a, c, g, or t
  misc_feature (491)..(491): n is a, c, g, or t
  misc_feature (494)..(494): n is a, c, g, or t
  misc_feature (500)..(500): n is a, c, g, or t
  misc_feature (502)..(502): n is a, c, g, or t
  misc_feature (507)..(507): n is a, c, g, or t
  misc_feature (510)..(510): n is a, c, g, or t
  misc_feature (517)..(517): n is a, c, g, or t
  misc_feature (527)..(527): n is a, c, g, or t
  misc_feature (538)..(539): n is a, c, g, or t
  misc_feature (549)..(549): n is a, c, g, or t
  misc_feature (557)..(557): n is a, c, g, or t
  misc_feature (560)..(560): n is a, c, g, or t
  misc_feature (562)..(562): n is a, c, g, or t
  misc_feature (572)..(572): n is a, c, g, or t
  misc_feature (576)..(576): n is a, c, g, or t
  misc_feature (579)..(579): n is a, c, g, or t
  misc_feature (590)..(590): n is a, c, g, or t
ctctctcggaagagccagaaccatccaccatgatgaggttggcctgctttgaacgtactgntgaagcnntgnncangtttgggntcctaagcccccngngaatgttaaagccanagcagctggttgtaacatttgnnncnggttncaaagctggagtnttttgggcaattgtttctcaccccgctgattctgtgggatctgtgttgaataaagaaaaagggagcagtgcttctttggtcctcnaaagacttggatttaaaggggnatggaagggactgtttgcccgtatcatcatgattgggacccngactgccctacagtggnttatttatgactccgngaaggtttattcagactcctcgccctcctccccccgngangccagngtttttgaanaanaagnttgggntnactcngnagttagatcnaagcnaatgnggnctgaatttgnttgttgntcagngntgaagaaagggcnaaaggnacttttntanatttgncnggggnggnaattgtntattcctganataattactgnnggacttttgnttaaggcnagngnttcagatttnctgntgnaataaaccccncttttcttgga

SEQ ID NO: 601643 - DNA, 879 bp, Homo sapiens
  misc_feature (694)..(694): n is a, c, g, or t
  misc_feature (712)..(712): n is a, c, g, or t
  misc_feature (716)..(716): n is a, c, g, or t
ccgggtgtgaatcggccgaggctggtgagaagacagcgaaatggcgcctccggcccccggcccggcctccggcggctccggggaggtagacgagctgttcgacgtaaagaacgccttctacatcggcagctaccagcagtgcataaacgaggcgcagcgggtgaagctgtcaagcccagagagagacgtggagagggacgtcttcctgtatagagcgtacctggcgcagaggaagttcggtgtggtcctggatgagatcaagccctcctcggcccctgagctccaggccgtgcgcatgtttgctgactacctcgcccacgagagtcggagggacagcatcgtggccgagctggaccgagaggatgagcaggagcgtggacgtgaccaacaccaccttcctgctcatgggccgcctccatctatctccacgaaccagaacccggatgccgccctgcgtgctgctgcaccagggggacagcctggagtgcacagccatgaccagtgcgagatccgtgtcgtgaagctggaccgcctggacctcgcccggaaggagctgaagagaatgcaggacctggacgaggatgccaccctcacccagctcgccactgcctgggtcagcctggccacgggtggtgagaagctgctggatgcctactacatcttccaggagatggctgacaagtgctcgccccancctgtgtgtcaatgggangggnctcgccacatggccagggccgtggagcgtgaggctgtgaggaggggtaagaaggataggggtacggaaagtggtacctcaatgctgtccagaagggaagcctgagtgaaaagatattgtcagtgagggtgcaagtccacctgaaaggagcggcaagagagatg

SEQ ID NO: 601644 - DNA, 918 bp, Homo sapiens
  misc_feature (733)..(733): n is a, c, g, or t
  misc_feature (751)..(751): n is a, c, g, or t
  misc_feature (755)..(755): n is a, c, g, or t
ccgggtgtgaatcggccgaggctggtgagaagacagcgaaatggcgcctccggcccccggcccggcctccggcggctccggggaggtagacgagctgttcgacgtaaagaacgccttctacatcggcagctaccagcagtgcataaacgaggcgcagcgggtgaagctgtcaagcccagagagagacgtggagagggacgtcttcctgtatagagcgtacctggcgcagaggaagttcggtgtggtcctggatgagatcaagccctcctcggcccctgagctccaggccgtgcgcatgtttgctgactacctcgcccacgagagtcggagggacagcatcgtggccgagctggaccgagaggatgagcaggagcgtggacgtgaccaacaccaccttcctgctcatgggccgcctccatctatctccacgaaccagaacccggatgccgccctgcgtgctgctgcaccagggggacagcctggagtgcacagccatgaccagtgcgagatccgtgtcgtgaagctggaccgcctggacctcgccccggggaaaagggggggaaaggccctttgggcaaacaacgggaaggagctgaagagaatgcaggacctggacgaggatgccaccctcacccagctcgccactgcctgggtcagcctggccacgggtggtgagaagctgctggatgcctactacatcttccaggagatggctgacaagtgctcgccccancctgtgtgtcaatgggangggnctcgccacatggccagggccgtggagcgtgaggctgtgaggaggggtaagaaggataggggtacggaaagtggtacctcaatgctgtccagaagggaagcctgagtgaaaagatattgtcagtgagggtgcaagtccacctgaaaggagcggcaagagagatg

SEQ ID NO: 601645 - DNA, 880 bp, Homo sapiens
agaggagggaggcagcgggtgagagttcagagttcagcagcagcagcccgagcccatgattcccatatgccctgtagtttctttcacctatgtgcccagccggctggggaagatgccaaaatggcgacggcaactactttggattcacccacagcgggcgggccggcgggtgggtgcggcccaatatagccagcagccagcttcgggtgtagcctattctcatccaactacagtggctagctacatgtccatcaggctcagtagctgctcaacacagttactgtgcttatgcaaccagaagcgcgccacagtggcagctgctggacagggaccacctttacctaaaaaagcaccattccaaaataaacaagtgaaaccaaaaaggctccaaaacaccagagattcactatgggtggatgtggtaagatcagtgtgctggaccacagacttataaaggaacatttagaagggccaggaaacttaaaaaaaagaggttgctgggaagcttcaaaaattaccagagcgagaaaagttctacttcgtgggactcaaaatcaagctacgttgtggagctctggatgtgtttgtgtacagggagcacaatggtatggtggccaattcggggtgtaagcatccgaacgtggttacggttacaacaaagttgtaaacccattcatcaaagaccaattgttgttagccagtactcttcacaagtggtttgtcaaagcagaggggttcttaaggtggagaacaggctggaatgtctaggtgaaggttaagagggttgacaaggaacggtctatgattaatatgtcggggtcaattggggaattcccacattgggaaggcacgaaaaaaaagcgggtatcttttgtgtaaa

SEQ ID NO: 601646 - DNA, 1118 bp, Homo sapiens
  misc_feature (678)..(678): n is a, c, g, or t
gtgtccgtagcgctgtaggtctccgttggtctgtctggttggtgtctgttgctctgttggtgttccgctgctcacttctgtttggttgttgtttgccgccttgtcacgactgtttagtctcctgtttgcgggtgtcgcttttcgcggccttttaacaaacgcttttggggcagttccgtgatatttgcagatatgtggggcgtgtgtggtgtgcccgctttctagcacggtgctgggttatctggtgggatgtgttgtggtccgcgccgttgggtatgtagcctctgcgtgcgctcttagggtcccaaatttggagatttgtgaaagttggtgacgctttaacccccatggggcaccaacatcgttggtaaccagagggaggatttataagggaggtaatgttgacacccctgggtatgtccacgatgagaaatgacccgggcgccccttccgtccagcattttggcggccgttttttatgaaggcctttctatgggagtcactgtcccaagcggcctcactgtgccactgtgtgcgctgaggcccggagttagaggctgcttattattccgggtctgcccccccttgagcctcgagtgattctggaattcccaccctctgtgatttccccccacgtgaaccacgtcccactgtctagttcacgagttcccgctggtnttctggagaggcacttgcggttcctttccagtcacagctgagccgtggcccagtgtcctcccgtttgtcccgggtgacttcccacggtgagcccctcgccaggctttgctgccctcgagaggcctgaatggcacttcacgaagtttcagagtccactcgagatgacacggtccaccacgagtcgcctgccttcacggtcacacacacacatgttttaatcacgctggagtttgcctgcctatgagaggctttgagaagctccgccacactgctactgttggctatccacggagtgcttctgaaggctttgggctggcctaataaggccctgccccaactccctggggttttttttaccacattgttggacctggggaaggggggagtttaaaaaagaacccgaaagaaattgtccaaaacccataaatggaatcccccca

SEQ ID NO: 601647 - DNA, 187 bp, Homo sapiens
  misc_feature (47)..(47): n is a, c, g, or t
  misc_feature (62)..(62): n is a, c, g, or t
  misc_feature (71)..(71): n is a, c, g, or t
  misc_feature (77)..(77): n is a, c, g, or t
  misc_feature (92)..(92): n is a, c, g, or t
tgctgaatgttgtccaccaggttgttcttgaaactcttcaggtccantgctgcaagggagtngtctggggnataggncccatcactcatggngccttttgtatttgatcgtcttagtgcatcagcaatgtgtaccccacaatggtggttgagctgcttgccacattggaagaagtttcggcttttga

SEQ ID NO: 601648 - DNA, 413 bp, Homo sapiens
tgaagtgactctgagaatccttatgttctcgcatcgtagagaagaactggtataacagtaagtattccaatccaaaaccagggtactctgcccatttattcaagtctttaattgctttcaaaattgtatagtgctctccataaaggttttacacatcttttattttattcccaggtattttttatttataattctactttttaacttcagtgtgtttgttggtggtacactgtgatttatttttgtatgaatattttttttttttgggagacggatttcacccttttgcctagcccaggcctgggattacaggcgtgagccaccatgcctggctaagttttggtatttttagatagagacgggtttcaccatgtaagtcaggctggtctcaaactcctgaccttgtgatccgc

SEQ ID NO: 601649 - DNA, 1345 bp, Homo sapiens
agcggaggtgcttctggggtcacggatgtgctaagcgagggattctgagtgtgtgagcttgagagccgcgcgctagattcgatccggacgatggactggcgggcaccgtggaccgacggccgccgacacttcacgggctaagtgctcctgacttactgctgactggatggtggtctcacaggcgccgtgactctgtggacgcttgggcctggacgttaatcactctgtgggggctgctttcccggccaggatggccaggagatctacggagtttatcgcttggattgcatggaagcgcttacaaatagtcctgcatagtggttaatggtcggccgaatgtttaacatattactgtcgcatgtttgaccatcgattccatggaacttggggcggaaagcattggggaataggccatggaactcaccaaggcaaggggctgaccagaaggaggactggtctttatggaaaagccaaataacacggagaatgggatagctgctttcgatttccaccgttgacctggtggctcactggaggcgatattgatatttcccgatagacggcggtaacgaaaggaattcaaccgacacaagttgttagacattgagacagggcacacaccattttcgaaaggcgagggagattgaatggtataccttgggaagctagaaacttagggcgttgcccgagggaggagaggggaatcggaatcacacgagggccaacattggcgccagacaagtacatctgtgcgactctggtggtgggatagtagagccgagccccctttgttttcaacaaggggttggatttgctaaccgaatcagggcgttgcgggaaaatctcaagattgacacgtttggacatggtttccccttgggttgttaagcttttacccctaaggaaataacacaggtggaactcgaggttttttgtaatacgctacaccactaaaggtacgccgggaggcacttggggggagaggtcaggtttggttggacagaaaattcccacctctatgggccaaactgtgggagcacacctacgcgggggttagggtttacaaaaaagggatgtggccatttggatccataggcatcgttcccaatgagaggcaacaatatggaactccgtcttcatgttattttatgagcgttaacagagtgcaacagttggcctttgtcctacccccacattggatagggagggggttaacagccaacccaacggtcttgcgccacttcgtgtggacaacccttgggacacattaattgggttgagcttgggccatatggacccccttccaaagtaaccagcaagagaggaagatttgactatggggagg

SEQ ID NO: 601650 - DNA, 978 bp, Homo sapiens
  misc_feature (306)..(306): n is a, c, g, or t
  misc_feature (864)..(864): n is a, c, g, or t
gaatgggtgagaatgagctgagccggatccagtatgtgagtttttgtccaatctgctatcatgacctcaaggagtgccatgaatactatgatgtgtagaacgatgccaacggtaaaagcactaggaggttcgacattggcccgtgtaccctaagcagatgtcaacatacatgtgcctgagtgtggtgacagtagtagctgacagtcctgtgactgacaggtcaagggagaacttctactgggcgagtcagttcaaagccactgtggggagcactcaaggatccactctacttgtctgcgagctgantggcatggagagaggctgtatgcatcatcaccagcagtctggggtgtggtgactgcccaactgtgctatcgttagtcgtctgctcagacactatccacaagagatccacccataatcacttcttcatttttgggttctcggtactttccagtgacacacacgaaggtggccgtgtaggagacgcccctaggcccaaggagttgcactccctactcgtgcatagatttctgtcagtgcattgtctatggaattcggtagtactctatcagtgttactcgccccatgggctaggactgccccaaaatggagatagctgtctttgggccacgcttcccgtgcaagaacttggtcgcctgtggagtcgcggctggcgaggcgcctctaccgagcacaaatacgataccacgttgacctccatagcgtggagagacggcccacaaacgcgtataggtcgggcgagagaggacaatgctgatgggagcgtcgcttgcgaacggtttgaatttgcgcccattgctcctttcccgtcgtcacatcacatgttccagcggatgtcanagaaaggggctagtaatgcacatgggactgggctgagttatggatttcattccctcctttcgcctcgaaatccttagagaaggtggagtcattggcctttgaatgggaccgaaa

SEQ ID NO: 601651 - DNA, 300 bp, Homo sapiens
  misc_feature (124)..(124): n is a, c, g, or t
gtctactccgtggaaaaggccctggccttgctagagacctagacatccaaatacaagaaactcaaagaacacctgggcatttcagcacaaaaagatcatcacctaagcatgttgtggtcaggtnatctaaactcaagacgaagaaaagaatcttacgagctgtgagacaaaaacaccaggtaacctctaaaggaaaacctatcaggttaacaggagttttctcagcagaaaccctagaatccatagatggaattcaggctctctcttcagcgctcctcaaacaaatcacttatcagccag

SEQ ID NO: 601652 - DNA, 1003 bp, Homo sapiens
  misc_feature (371)..(371): n is a, c, g, or t
  misc_feature (447)..(447): n is a, c, g, or t
  misc_feature (449)..(449): n is a, c, g, or t
ggatgtgctaccgcggaagtgagcgtgggcatctagtgcacactccgggctaaggagtctatgagtcctcggtagtacttgaataaattgaagcagacagttcgtgtccgatggttgatagttgcgttgtcttcagagtcttgcccgtagcatcacgactgaagtgttcgtgtcgctcggaacctgtcttggaataactaagagattagacgagatatcgcatctactcatggagagaatctagagtcacgacacaaaggcgaaggcttgtcaaacagatcaatgtctagcgtgccatctgtcacacgaaaagactttgtgacctggttccaatacgaatactccggcgtcccctggcaactcctgggtantcttaatcctattgctagttatcgtcgcatgatgctactctctagacagacgggacacgatgaattatacggtacncntctaagcaatccgatgtgtcggtcattgtcactcctcaataccagaatagaggtgtcgccattgtgcacattgagccatctctcctagtaaacagttatgaccacaattcttctggtgcacatgacaccaagatgcacgatcctggtcatgagagtccgtacgtcccatccatggtcctacgcgcgtcagttcgatgttgtgcgttgcagatcgctaagtatgttgttcccaattaatcctaggcttccattggctaccgtgcttccttcgtatctcggaaccttctcagcttcagtgctacctctgatgcattcatcttggactactacggaatcatttaaggcgcgcagtatcggaatcgtctttcttggtgtcgtgataatgctgaggcattagcagaaagcccggtggtatcgcagtcttttcctgtcatcgaaggatcctaaagtagcgcgtctcaaatagcgctcaaggatcacctataagcgaaaaatatgtcgttgttgcccaggctggaatgtccagggatgccctagggtctgtggcccctgtg

SEQ ID NO: 601653 - DNA, 185 bp, Homo sapiens
ccccaaaaaaaaaaaaaaaaaatccaaaaatttacccagtgtcgcggtgcatgccagtagtcccatttactttggggctggtgtgggagatcacttaagcccaggaggtcaaggctccagtaagctaaaattgtgcccctgcactgcagcctgagtgacaaaatgagatcctgtctcagaaacca

SEQ ID NO: 601654 - DNA, 194 bp, Homo sapiens
ggggcgtaaagaggcgctagagaaagctgatcataaaccacagaactgactctggcaagcagaagggatcaaggaaagacctgaagaaccagaccctggaaagggccgggtcctgggggatctggggagcaggagcttttgagttggactggaggtttcttcagcgaacgagatgagcaaaacacccaatccac

SEQ ID NO: 601655 - DNA, 807 bp, Homo sapiens
ggacgcgcggctcccggtcgggcactgcaggcggcgacacgacttgggaaggccctttctggggtaatagtccggttcctgatgttcttgtcttatgagttacgggcagcacgagctgggtgaagtcgcgggcgggaggtccgtcgtgggtgcgcggcgtcctatcccagacgagagaccgctgcctagccggcttccctgcttctgtccgtggcctcgggtccccagaccctgcgcccctacgtccccgggtacccagtgctgttcccgtcccctactctggggacgatgcctcccggcgccgggtgggcggtgcatgctttcctcctcacccgtaactgggagcgagtgcctgtgcgcgctctggtctgcagaccctgctgtggcaatggagctcgtcgcagttctcttcgtactactaatttgattgcgttggcaagtgatcttcggtgccggggttttgaaatgactgtacgcaggtagaaacgtgcgaaagaaagacgctccatgcgtcttcctaggccagttctttgttgctagtgctcgcacgggacccatactcctatttgtctggtgcctcgtttttgctgcctctcgcttggtgctggtcctgaccttctgggccgctggtagatcgctgaggtgaatctgcagaatgcattcccatgtccgttgcacggggcgttttagtgggtcacctcatgtgcgattgtcttggagaaagtgaggactggctttacataattgactattagactgttgtaaatccaaaacctaagtgatctttaaagataagtgtatcccctg

SEQ ID NO: 601656 - DNA, 134 bp, Homo sapiens
catatagtcagggccggcatatggcatacagattcataaagtggtgactcgtggaaatgtccacagtggacatttccacgattcagggccggcatatggcatacagattcataaagtggtgactcgtggaaatg

SEQ ID NO: 601657 - DNA, 212 bp, Homo sapiens
ttgttcccgggaccctgtatcagctgaccctcctgtatgtgcacggcacgagtatgatactagaattaagtgcagtgtatagaaatgaaaaataaaaaaagggctcaaaaaagttctttaattctttactggtgtggccaatattagctgctgacatacaaggttctcagggccatgtcccagaaacagacgcagcaagtacaacctggccg

SEQ ID NO: 601658 - DNA, 218 bp, Homo sapiens
gtagtgaccagaacagggcagagtaggtcccctccatggccctgaatcctcctctgctccagggctggcctctgcagagctgattaaacagtgttgtgactctcttcccctttggtgggacctcccctttctttgggcttcagttcactcaggaagaaatgttgccagaaaaagtatctcctccaaccaaaacatctcaataaaaccattttagttga

SEQ ID NO: 601659 - DNA, 304 bp, Homo sapiens
ccccgtgaggcaggggtctaggatgattaaagcaatcagggggacggtgacgtttggactccctgaacgcctcgagctccttgtgtgagcacgatgaccccggcggagcacgcagcgacggtatgcaggcccctgcgcaagcgctgggtggactgcttccaggtgtcatataggaaaaatttgcgcacatggtatctggcgaagttgtccggaagcacggtcggaggggtcgacacgtccctctcggacttgacggaggtagcacagtacgtctccaggaggaccgggttcctcttgcgtaaac

SEQ ID NO: 601660 - DNA, 970 bp, Homo sapiens
cggctgcccccccctgcctctcctgcgccgatacacttcgagtggattctggccatttgagcattctctccaactctccaatgcccagtctgcccccacgggggtctcccccactctaccccgtccacagctaaaccctcttcgcctgaactcccttcctcatgcggtgaatgggactggcccgctcagactcccaggagcaccagagctggcccattgagtcaagaccatgccaccagcaggacggtggggacaccgggtgactcagacgtgactcaggaaggtcaggtcctgcatggcactccgcggaggtgagacggcgatcagagctgggatgggagactacccccaggaagaggggcaacccgagaggaggcaccaaggcccagcctggcgggcctccgcagtatgaaatggagcaccagaaggacacccaccaggcatggggcaccctcggacagagagaagatctccagagatgacggaccaggaactcagcattcaccctggaaggtccagggcaccacccgtgccctaaacgagggaagctacacggagaacggtgctccctgtcgctggcaccacggacgacacttgcagaacacatggtcctccgcacacgggccagtacccaccttcctactcgtgcctggccagcctggaccacggcacgaagcagcaccaccggcgtggttcaacctgatgcgctcctcattaatacatcatccgcagacgcatcaccggacatctacgaagcagacctgctacagcagccgaacccctatggcggcccccatacaccccgcgaccccgcacacgtggccacaagggaggccaaagatcgaagccccaaccaaccgcacactcgagcgccacacacaccacacacggccgccacgggcgtcgacccgagaccccccaggcacggtgcccagcccacagcacgccagacccacctgggcgccagaac

SEQ ID NO: 601661 - DNA, 438 bp, Homo sapiens
ggttaatgtctatgggtagaaggcaacaagtatttacaaaacagtatttaccaagtattataacagacatatacaaaatgccacatgatcttgtttaatccacacaataatcttgtgaaatagtgtctttttaataacagctttattgagatataattgacataccataaaagccacccttttaaaatgtacaattcagtaggttttagtacattcatagtgccatgacatcaaattagttgttatcactaattccagaacattgggttttttaaaaattttgatagagatgaagtttcactgtgttgctcaggctggtctcaaactcctgagtaaagtgatgcaaagtgccttggcctcccaaagtgctgagattacaggtgtgagccatggtggccagcccagaacattgtcttgagcagttttaagttcatagca

SEQ ID NO: 601662 - DNA, 853 bp, Homo sapiens
  misc_feature (488)..(488): n is a, c, g, or t
  misc_feature (508)..(508): n is a, c, g, or t
  misc_feature (596)..(596): n is a, c, g, or t
  misc_feature (701)..(702): n is a, c, g, or t
  misc_feature (707)..(707): n is a, c, g, or t
  misc_feature (709)..(709): n is a, c, g, or t
  misc_feature (712)..(712): n is a, c, g, or t
  misc_feature (720)..(721): n is a, c, g, or t
  misc_feature (733)..(733): n is a, c, g, or t
acggtggcggctctcggagccggcgcgaatccggcccccgcagcgggacccgggcaggtcttgacgagccctgcccgggccgacgcatgcggaggatggaaacacttgcccggcaatgtctctgggccgcctccttcgcagggcctcctccaaagcctcggacctcctgaccctcacccccggtggcagcggcagcgggtccccctctgtcctggatggagagatcatctactccaagaacaatgtctgcgtgcacccgccggaggggctgcaggggctgggggagcaccacccaggttacctgtgcttgtacatggagaaggatgagatgctgggagccaccctcatcctggcatgggtccccaactctcgcatccagaggcaggacgaggaggccctgcgctacatcacacccgagagctcccccgttcgcaaggcaccccgccctcggggccggcgcacccggagctcaggagcctcccaccagncctccccgacggagctgcgngctaccctgaccccaaagatgaggacatcctggtggtggcccagagtgttccagaccgatgctcgccagccctgcgccagaggatganggagaagctggcgcagggcttgggggtggatggtgccagccagctcgcaagcctgcttgcagcccctccgggatcttgtcgacggcagccggggatgtcaccgannagggngnaancggggccnnagccgggcagangatggtcttagaagtgaacgatgggggtgaccgagacgtactatgagaagaccaaacattatctggcttgcttcgacatcaaagggggggcgaaaaccgcggtggagaggacagaccgta

SEQ ID NO: 601663 - DNA, 610 bp, Homo sapiens
  misc_feature (574)..(574): n is a, c, g, or t
acggtggcggctctcggagccggcgcgaatccggcccccgcagcgggacccgggcaggtcttgacgagccctgcccgggccgacgcatgcggaggatggaaacacttgcccggcaatgtctctgggccgcctccttcgcagggcctcctccaaagcctcggacctcctgaccctcacccccggtggcagcggcagcgggtccccctctgtcctggatggagagatcatctactccaagaacaatgtctgcgtgcacccgccggaggggctgcaggggctgggggagcaccacccaggtgagccagggcaggcgaggctccagggtcgcacagcccaggttattttccgagccagggctctaaaggccctgggccacagcacgtgagagtgcatttggttcctcttccagaacgtgtaacaacagcagctgtcctcccggaaggagggtctggggggtgttaagtctggctcatggcaggctgggtgagtccctcagccctgctgcttccaaagggagggacaaaagatgggttagtgatccctcaggcctgcctggccccttgtcattcgtgtnaatgacttgcaacaaataaatgcattgctttgttca

SEQ ID NO: 601664 - DNA, 284 bp, Homo sapiens
accagaagtaccataaaggggtgagacttgtcctctctatcgtggtgtgaggacctgtgacggacagcttctctgttttgcagacataatttgaggtgcaaggccccccaacagccagcctgttgtggtggtgtttgtgtgggttggtactagacccctgcatgtcttaaatgctgtcccttacgggggtggagaaggctgtaagcaaagggggaatcaccaccccagcccccacccccacccttcttagttttgtgaattaaaatatttgcaaatccaaaaaa

SEQ ID NO: 601665 - DNA, 284 bp, Homo sapiens
  misc_feature (1)..(1): n is a, c, g, or t
  misc_feature (193)..(193): n is a, c, g, or t
nagaaaaggatgatttttattacttgtctcaagaagacaaagagagacgaagcggacatgaagaatccagaggtgcccagaataaaatctgtgctgggatttaaagcttcagaggcagaaaggcgaatggagcactcattagtgacatgccgtgtgaatcttgttcctgtagacccagtggacccataagtanattcaagaaaaccatcaatgaattcagatatgggaaaagtcagtaaaaatgatactgaagaggaaagtaataaatccgccacaacagacaa

SEQ ID NO: 601666 - DNA, 899 bp, Homo sapiens
acagtgtgtgtgtgtgcacgtacatactgtatagtcttaaaaatagcattatactggccagggtggtggctaacgcctgtaatcccagcacttgggaggccgaggcgggtggatcaactgtggtcaggagttgagatcagccaggccaacctggtgaaaccccgtctctactaaaaatacaaaaattagctgggcgtgatggtgggcgcctgtaatcccagctacttgggaggctgaggcaggagaatcacttgaacccgggaggcggaggttgcagtgagccgagatcgcaccattgcactccagtctggcaacagagtgagattccgtctcaaaaaaacgaacagaggaacgggaaaacaacaatagctttatacctcttccttgtgtttccaaccgcaaggaaatttctggaacactccaaatccagtggaataactccaaaaacaaacatttctacggtatacacctactttcaccttcttatagtaactagtctacttttaaaaagcctcagggtatataatgcttgttaaaagagtaacaattcaggtgcggttaaaattaaccaaaatatgttctctagtttgagaacaacttaggctattttcagtgcgtgtgtaagcctcaggtgcttaccgtgggtgccaactaattttcggacaattcccgctgactgtgtaaaaacccatcgtttggtgacaatggcagaaatttaagaggctggattaggtagctggaacacataatgaatggaatccagcaatgagggcggggggactaacacaagacaatttaaaccaatatggtgtttacagactcctgttagatattaacaacgggtccaacgcatttgtgtgacagcgcattggttcgatctcgtgtactccataacagtg

SEQ ID NO: 601667 - DNA, 198 bp, Homo sapiens
caggatttcttactccctcccctgctttatttttctccacagcaattattcactacagtataccttgctttacatttattcctatttacttggctttctctttctaccctgtaagaatgttatgctccatgcagcaacaaggcgaactttccctggttattactgtgaatgtatctcttggtctctaagaatgaggtc

SEQ ID NO: 601668 - DNA, 273 bp, Homo sapiens
  misc_feature (262)..(262): n is a, c, g, or t
  misc_feature (268)..(268): n is a, c, g, or t
tacacttagcttaaaacccacattatacagctacacaaaaatattttctttatatctttactctacaagctttttttggttaaaaatatttgttttcccttaaaacttttttttttttaaatggagcctaggcctacacagggtcaggatcattaatatcactgtctttcattttcacatcgtcccactagaaggccttcaggggcagtaacatgcatggagctgtcatcatttatgataacaatgcctccttcttggggcnttcccnggggg

SEQ ID NO: 601669 - DNA, 219 bp, Homo sapiens
cgagctcggcaccctgttttatacatttcctataaaacacttaccaattaactgtatttttaattactcataaaattaaaaaaattttagattctgtctctcacactagattgcacaacctatttgggaaaggactgcctttgtcttgtttatcgttattccctggaatcctgccttctgacctgccatttggggacattcagcaatatctgatgagtg

SEQ ID NO: 601670 - DNA, 423 bp, Homo sapiens
ccctgctatatcccacgtacatcatagcatgaatcttatagccggctaccaagttctgaatgaactgtcccctcagggcatagctccacgtgcccatgacatgagactaccactcgctctgacaaaggacgctctacgcctccttgcaactgtgcatatggaagcaagcctttgcaagcacgtcagggcttactaaacacttcgtgtatcgatgatcctcctagtacaggacatgctgctatgtgtaataaggaccagctttcagtagtggagataccactgtgaggaagtcagcgcatgtggagatttcactcactagaagctgaataccttcagctaacagactgactgcgggcctatgagagcttgtgcggctggaggtcagactctggctgaagctaatgagtagcaccttggatctcg

SEQ ID NO: 601671 - DNA, 852 bp, Homo sapiens
cagcccctccgtcccggcggctctggggcgtatgacgcagcagccaaagcagcggcagcgtgcaggacgtgccctctccgcgcgggggactcgcctagtgtctcctacgtctgcccctgcccaggctccctggcggccccatgctgtcacctggctcccctccatgtgattgcacatggctgcatgcccccccggctgatgccgctctggtgcctcctcactttggtgacccagcttctcctgctcccacctcgtggccccaggcctcgtgctttgcggagcggtcacacgatgttgcttgtgccacgactgcgactgacttggtgctgcctatactatgcggtaccatcaacacaacacggtgcgacatgttgctacgcggacgcgttgtgtcttggtccacgctttcgcgggcactgacttctgcacgtttcttggttctattgcgaaagcgacacttacgccctagctagccctaccctggagatggaactcctctgttgtgtctgtccgctcttgatgacttgtggtccctgggaacctggcatggtcaggcttgtgaagaacgtgtccgccattggctgcagagcggcaggtcacctgcaattggtccagccttgctcattccctccacggactggtcctctagtattcaccctgtcctggccttaggttccccaagcccatctggcttctggcccaatggcttgcttagcctttctcttaagttccatccatccgggtttcagccccagggtatcaagccacgcccatgctacccgggcgttggcaattaacctcatgcagcgcagaacgatggcttaacattgcatcctatgctaccccaactca

SEQ ID NO: 601672 - DNA, 738 bp, Homo sapiens
ggctccgttcggctcggctcgcccatttcagttcagttcgggtcagttatgctccgtcagttcagcatgctgcgcgccagatcaccactgtccgccgcggaccggcctgagccgcgctgttgtccgccgtcgcaccagcgcggtgccagcccccaagccagtcagacctgaggtcttctgcaagccagatcttcattaagcaatgagtggcacgacgccgtcagcaggaaaacatttcccaccgtcaacccttccacaggggaaggtcatctgccaggtggcccgaagggaacaaggaggactgtagacagatgcagtgaaggctgctcgtgcagccttccagcgtgggctcgccctggcgccgcgatggatgcgatctgaccggggccggctgttgtcccgagttgcggatctcattgaacgggaccggaccttacctagcggcctttggctgaccctggacacctggcacagccttattgtcaatctcgtacctggtggatttggacatggtcctgaaatgtctccgctattacgctgagctgggctggacaagtaccatggggaagaaccattcccatcgacgtgtgactatctgtcagactatacccgccatgagccttgtgggcgtgtgtggcccagatcattccgtggaacttcccgctcctgatgcgagcatgaaactgggccaagcttgcaaccgggaaccgtgggtcgcatgcaggtggccgacaaaac

SEQ ID NO: 601673 - DNA, 379 bp, Homo sapiens
cctatcacttcctgtacaaaaccaactccaaatggatgaaagacctaaatgtaagacctaaacaataaaactaccataagagaaaacaagaagcactatcaggacattggtctcgggaaaagattttatgactgagcactcaaacagccactaggctaacaacaaaccatgggcatcgatatccaaatataacaaagcttcttgtgccagcaccaggcacaacccatccaacgagatgcaaacagactagacttcacagcaatcgggcagcaacaatcattgtgtcaacactcactccatgccaacaagcaggcattcaatcattccagcaatcatagcacaacatattcaaaacaatcttataatcagccaaaaacaa

SEQ ID NO: 601674 - DNA, 827 bp, Homo sapiens
cgaaccaaggtcaaggatttgaggcgatggcatgtaccccgtccgccctgccgagtgctgttccgtgcaccataggggccgctcctgttaggcgtcgagacgaggcccatcatattttgacggtaaagggggcttataaagcccgctctggggtcccccctgctcctcgtgcatgattccaccgtcaccccccctctggtgccactgtactggggatccccgcgctggtaatttgttactttctgtcggccatgcaggaatgatcacgtggtcgtcacgggagttccttggcgcgtacccagggctgttttgcttctcgggtggccccccccgtggagcaactgcttcggctcgctctctcccgggccctcctggagtaatgaagtttctcttgcatctcgcgccaaaccacagatgtcggcgcagattgggcgctccgtacacgaagacagatgggggtcctccttcgccggtcttcattggccgtgctcggcttagctggccccgattctagcccatcctctccaattatctgcctcactccccaccgcatttataatgttctccccccctttgacccgccatcctcgctttttttgtgccataacctcagcgaatcacctcccctctggttgactcctggatctcggcgaggccaaacccccaaaggagcaccccttttacccttcattcgaggccagagatgcaatgccttggtataactgtctcgcctcacgcactgtctcttggagttgctttaaaacacacaaaacttaattccccgctaattaggaaacccaaaatccctcaggggccccaacaaaaca

SEQ ID NO: 601675 - DNA, 818 bp, Homo sapiens
ttcggaggggcccccccctagtgttccgtccggaccggggcgcccgtgtgtgtttgcccccgccctcgccaaggtgtttgtgggccgcgccccccttgtttttgccgcgagcgtgcgttctatatggggagccccccttactgggtgatcgcgagtggtgcggccccctctttttggtacgctaccgtgtgtcctctgtccccgatggtcacgctgcgcactgtgactttcccgcccttggttgggcgaacaccctctttcgcgcggcccctcccgcagagattgcggggcaggttgttccctgggacccccccctggggagtaacgctccccgccgttctttggcggcgcgcaaccccctgggccgctctcctgtctctccccccacggcggtggcacccactcatgggaccgcctgttctcacgcccctactatgtgctgggagtgtatgctgcgctgcgctcccactctctttctcctcttctggtgccagcacccgccgctgttggttctcgcccggatggctttcttgccgcccccctccgaaggggcttggtagggcctcctcaccggggccgacccgcgcacggggggccacctctccatcccacacatcaatctgtgggcatcttcgccctcttatcgtgcgcacggttttccccgaggggcctcgctgcatactatatcctgcggggtgtgtgggggagatagtctggcatgcccccccctcctctctgtctcagcgagtattccttcttgtcgcgctgtatccccggtgcgggactcccctttgacgctatctgtcccccacataaca

SEQ ID NO: 601676 - DNA, 330 bp, Homo sapiens
gcacgagctgggatttgctttaaaatgttccaggctgggcccagtggctcatgcctgtaatcctaacacgttgggaggcccaggtgggaggatcgcttgagcccaggagtttgaaaccagcctggcaacatagcaagaccctatttttccaaaaaaaaaaaaaaaaaaaaaacccctaaaaagttacccaggcagttagcttcgtacctgaggtcccagcttcttgggaagctgagctgggaggatcagttgggcatgggagttcgaggctgcagtgagccatgatcatgcctgcactccagcctgggtgacagagtgagaccctatcta

SEQ ID NO: 601677 - DNA, 174 bp, Homo sapiens
acgagcatcttacaggtacttcggaggctgacttggctcatcaggatgttcttcatgtaaaagtccagtagggcgctctggtgctggacgggaccacgtccatctcctgtgtgactcgtgcagaacggcaccagcagccccagcatgccagcatagttctggtggggctctagg

SEQ ID NO: 601678 - DNA, 105 bp, Homo sapiens
cagagtggctaacatggagctctgagatcaccccacttccatcatttcctccctcccccaacccaacgctttttgggatcagctcagacatatttcagtataaaa

SEQ ID NO: 601679 - DNA, 194 bp, Homo sapiens
  misc_feature (6)..(6): n is a, c, g, or t
  misc_feature (20)..(20): n is a, c, g, or t
  misc_feature (115)..(115): n is a, c, g, or t
  misc_feature (121)..(121): n is a, c, g, or t
  misc_feature (152)..(153): n is a, c, g, or t
actttnaacctctgtactgnttcctgtgggaagtactcgccactttccatgtggcatctcttgtatgcaaactagattgtgcgctcctagagggcagagtccactctgatcacgnttgtgntgtcttccttacccttctggcgcctaatacnntgccttgcacacagacacaataaatggcagttgaataacaa

SEQ ID NO: 601680 - DNA, 81 bp, Homo sapiens
tttgctagattgatattaaaaactcatgtggaggaactcaaggaatgtttagaagaccaaaagtcccccaatgacaggacc

SEQ ID NO: 601681 - DNA, 762 bp, Homo sapiens
  misc_feature (623)..(623): n is a, c, g, or t
tcccagcccccggttaccggaccctgcagccgcaaaaattttgatgcctaaaaaaaaccggattgccttttatgaactcctttttaaggagggattcatggtggccaaaaaggttgtccacatgtgccttaagcacccggagcgtggcagacaaaattgtgtgcccaacctttcagtgtcatgaaggccagtgcagtctctcaagtctcccgaggctacgttgaaggaacagttgtgccgtggagacattttctacgtggtaccttaccaagtgagggtactccagtatctccgtgatttacctttcattctttgcccccggagaatttgtgcctgccacccttacgccgttagccgctccagagaccgtggcaggccttcggcctaaaggctctggagggttgagcgacctgcgagatctcacaagaggggaagcttgacagagataccttacagacggagttgctgtgcccccgggtgccgacaagaaagccgaggctggggctgggtcagcaaccgatttccagtttagaggcggattgggtcgtggacgtggtcagccacctcagttaaattgggagaggatactttggctttgaataaatttacagccaaaaaccttnaaaaaaacaaataaaatataaaaaaacccccggggtttttttgggggggaccaagtgtaaaaggcacggtctagcttttcctgccccctttttccaaggggaatgcggcccaagaggggataatcaacgttctctcacg

SEQ ID NO: 601682 - DNA, 970 bp, Homo sapiens
tgtaaagcgctgatcctgttaatttgggaaggaaaacgagacaactccagcagcccaggagggacagggggatttaatcctcctcctcgtcgtctccagccccagccccacacctggcccattcattggaatataacttcctctttcactgcggcccggagcttggcacacccccgtaagggaagaagcgcagagaagaaagatcacatgattgctatctaggagaatccaggcggcacatgaaagagcacggtgatgttccaccaaccatgcttgacggcaccctgaataatggcgctggcggcatcagcaacgacgaagcgtgtgggggggacgtggaatgtatggcacaaagccccagactattgaaagacacgtgggactctgacaaggacgataattactcaataaaaaactccttagatactctctatcaggcccaagagattgttaaacctccaagcttcaactcatgtgaccactcaatacaggacaccccacatgcggaaccacccagcccgccatgcaagggcctgttcagccatttcacgaaacatgaccggccgggtgtgtgaccactcctccatacaagcgtacagccatgctcaccgggagcagcgccttgacgggatcatctcgcccccaggataaaaattatggacccctaccagaacgctcacacgtagaggtagccggagccgccatacactccgaccgaaacaagacatgaccagatcaatgagggcagaagacacgaacatcaccacggaaaggggtacaacacgagcgggcaccaacatacagcttgtgggagacaaacacccaagcacccgggccacacgggacagatgggacccgcaatcccaagagagcgctaagcaaaacaccatattggacgcgcgtagaaggccgaaaaaccccgggccgacaccgaacacagtgcatcacggcacagccccacgagcccgaa

SEQ ID NO: 601683 - DNA, 225 bp, Homo sapiens
ctatttcaggatgcaatccaggatcccacctggcattcgttgtcatgtctccattagcatcctccagaatgtgacagtacctcagtcttttcttggtttttcatgaccttgacaatttttgaagggaattggtcactttattttttaggacaaagttgggcccacttttctaacttggggccaatggtaagggttttcgttttcaggcacatatctcgtgtgcac

SEQ ID NO: 601684 - DNA, 458 bp, Homo sapiens
gaggaaaacacaagcaggatcctccgcatgcggtgggaggaagaaggtgtggagatgagtagggccgcctacacgggtgttacctgcttcgggctgagaacgtcattgcgttacgccatccagctcatcacagttgccagcttggtgtgccggaaacgcaagggtacagaagtgcaggtggatgacatcaagcgggtttactcactcttcctggacgagtcccgctccacgcagtacatgaaggagtaccaggacgccttcctcttcaacgaactcaaaggcgagaccatggacacctcctgagttggatgtcatcccccgacccccccctgttttcccccagagttctgaccctgtgactctgtataaaatggttgggaagctgccccccccctgggtatgggtggttgccctgagcccccagaaagaccccgccagagtgcggattgagaagccca

SEQ ID NO: 601685 - DNA, 484 bp, Homo sapiens
gtctaggtggttgtgtgtgctgctgtgtgtgtgatgtgtgttgtgttgctagtgtgtgttgtgttgctgtagtgtgctgtgctgctggtgaggatgacgatgctgtaaatggagttgctgtaatctccaatctccctgctgtagttgctggagtactctatgctgctgtggcggctgctgaggaggtcactgacccaataaaatttcaggaccatttccaggtcttagtgccccttttgttctatggttaccgaattcaacaggagcaaggactttaacaggtgttgctgaactttgaatggtcagcacactgggagtggcagtagtagcagagttaggctttggtctttgtcttggtgcagttgaggtctctgttggtccaatggtatctgttattctggcttttatttggcttttcctagcagctgcttcactagcagtcatcggttcaggaagagattcgcttcaatgcacgtcgctttcc

SEQ ID NO: 601686 - DNA, 859 bp, Homo sapiens
  misc_feature (748)..(748): n is a, c, g, or t
cttgttcctgcgaatgaagctgctttattgatgaacataatactactgccttgctgtacagaacaggaacagtcacctttttttgtatctccaattataaatgcactacatactgtaaaaagaaaagaaaacatcgtaaatatctttataaagtaacaacaagaaagaggatgaataaatataataactgattccaattgatataaaataaacaaaaaattgtgtaggacatgaaatttttaccacgagggataaaactccaaggtgaagccaattgggccccgaagccctaaaagggggagcttggcctcccttcccttttagggggggcaactgctggcccttccctaagtgacgcgttagcccacgaccctcgggcggggactagcggtactcgctcattcaagggcggaagaccggtattacccaaatcacggggatgcccccggaatcacacagtgtccaaagaggcccccaaaaggcaacatatccgcaaaaggccggcgcggggggcataatcccaaagacgccccccccctgaaaaattttccataaccccccgcctcttgaaaaggcgggcacaccctccacgggacaataaaaatccggcgcggtttcgccctggaaaatttccgtgtgcgggctatcttgtcccggaacttgcccgttaacggaaacctgtccccccttatccccttagagaagaggggggtctttttcttaataatacggcgaaaggtttctcatnctcggtggacagacctccaccccgaacgagggccggtgaggccaaccccgcttatatcccaccgcgcgcccaatccggagaaaaacggtatgagatcaacacggaaaaaaa

SEQ ID NO: 601687 - DNA, 126 bp, Homo sapiens
gccccccccccccccgggcccccgggggggggggtttcccccttcccttttggtcccggcccgggggggggggttttttggggggggggggttttttccttttaaaaaccccccgccccgggggga

SEQ ID NO: 601688 - DNA, 1745 bp, Homo sapiens
  misc_feature (1744)..(1744): n is a, c, g, or t
ggcagcagcaagccagtcagtcactcaaagcagcagtgccgtcatttcgccagcattggcagctgcagcttgtggactgcccagacagcatcagcgaacgcacatggcacacactgcaacagtggcacacatccaggcacacaaggtaatgagcacagcacagaaaagccactgcacaacagcacacaaacagcaagtttgcaacaaacacagcaacaggggtcacggcagtttcaacaccagtgtgcattgccaggcatattggctaacagccacagttggccccttctggggtataaggggcatgcacaatctatccacaacaggcaatcaggcatttctttcggcagacacaccagacaatcagcaacacacaatcctcaaacagcattgggcatcattgtttggcattcatcattccaactcacgtttggtggtcatattataacacccaaaacattggcacaacacaatttgcaattcacttgcattgggcgcaacagattcacattgggcccaacgtcacgaccaattaggcaagacaaagacttccaacgcacgtgactgtggttcacgaacaggctgcggaactcatgtgtgacaacggagggacacccaagtcaatttcccgggaatgagacaacacaacacacccctatactatgaggggagaaacgacgtcaaccccacacaggggcaattgcaggggcaattagaacacgtgacacacacaggagtgctccattggtccgacaccggttctaacgatttcgcgccacacacaacgtagtttcacaacttcaaccacaggccttggggcctttctacgacacaccgcgaacgatcaattatacgtggagcacaacaacctcggtatcgagcgccacacatctgggatttcggatacgcaagactactttacacagaggtatattaatacgccaacagagtaattatacacgtaaaaagagaatccataacacactggggggtaagacaactccgccatacaagtggtcagaacatattatcggcaacgtagtcagcgtacggaacaattctcgagacaaccagcacgaagaaggacacacaaacgagcaggagacaacaacaagcaacaaattgggcagatagacactaacaagaaaaaccgcaaaccgcagacacaaaaaggccacccagagaggaaaagaccctgaggcaaatatagtccaaaaacaaaccggtgaaaaaaacataagacacccagtattccgagccatataacacagatgatggtgacagcagcaaaaagagacacacgcgacacacagaagaacagcaagcgccagaagagtacaacggagcacgcacacaactttcccaggacaagatagaaacctagtgagacaagcgaccacaagagaacatagacgaaagaaaggacacacagcacacatatggggagcagacaagggaccaatgaacacacaaaaagagagtaaacaggcaaaaacaggacgatacaacagacaaagtaacgaagacaataccagacgaagcgaagacaccagtagatacgacagcgcgcgatcaaagaaaaactagagtagcgagagagaccaagcgagactaatataggacagaagagcaatactagtacaaaaacggcgacagtagacagtgccgagatcgtccactcagaagcagaacaaagcagcacgagaccgataagatgacgtcgatcctagtatgagtgaaacgna

SEQ ID NO: 601689 - DNA, 267 bp, Homo sapiens
  misc_feature (241)..(241): n is a, c, g, or t
  misc_feature (248)..(248): n is a, c, g, or t
cttcctagtattcatgtctaccaaatgctttctttggcttcctctgaaagaagccagtttcagcaagtgagtttgtgattctttctcctttcaggtacctgtttcccaggggtttgagatcagcctggcaaacatggtgaaaccatcaacccaaagtgccgagactacaggtgtgagctaccgcacccagcatatttatttatttttcagtctcactattttaaccaagctggtcttgaantcctggnctcaagcaatcctcccatc

SEQ ID NO: 601690 - DNA, 266 bp, Homo sapiens
  misc_feature (80)..(80): n is a, c, g, or t
taggtaagtgggggcggggaagggtccatagctgttttaaatgagggacgtggtccggacgtcccctaaccaagttaggntaagtcaagatcaccattccagggttggtaatgttggatgatgaaccattcatttttcccttgtggatgctagtgctgtagagttccctgttgtaccccgtttgttttctatttgtcaagaaaaaggacagcatcctggcatcatttttgagggtaataaatttgaaaaatcagatttcttcccca

SEQ ID NO: 601691 - DNA, 841 bp, Homo sapiens
  misc_feature (526)..(526): n is a, c, g, or t
gctatatcgtggcaccagatgatggtgtcccagtcagacgatgatttgggcaccgtcccgtgactataaccagctgaagaagcaggagctgcaggcaggcgacagcctataagtttcgtgttgtccggaatcaatgccggtggccgggggcccttcagcgaaatctcagcttgaagacgtgcctgcctgtgtttcccagggtccccttgtgccattaccacatcagcggaaagtccggagtggtgctcacctcaccatgggagccagcctctgtgacctccggcgaagattatcgagtactccgtgtacctggcatcgcagagctcacatggctgggggcgagctcaagagctcacaacccggtccaggctggccttcagtgctgggtgtactgtgggcccaggcccctcctgactggtgcagtccgtccagcctttccaagtgcccacgatctgaatacgagcactcaatgcccgcacatcagtcttcctgcatcagcgtccgcaaatgaggaaggggctatggnccggccacacaagtgaggtggtgcgaggaaaccagtgaaagacagctctggccaccaagcgcagccaaaaagctggcctctgcgcctcgtggccaggtctgggggcatggcatggatggggcatggaaacggggtcctccttgggcctcaccaagagttgtgcttttcttggcgaccctgggcgtgggttgtgtggccgtggacctttgtcttccccctggtggtttccaggcacctaagttcctttctcagggtccccgggcccccctgttttgggacccgcggagtttcctttctcaaaggccttgggttccc

SEQ ID NO: 601692 - DNA, 858 bp, Homo sapiens
tgtggttgggatatagtgtccgtggcaggacgctgtgtccccgagcggggcttgggggcatgtgtggtgaaacggggccccacgggggaccccttctgggacgtgtgtatccggggtgacgcggctttgtcgccgcaggccccttccggggtggcccctggtctccccgcagggtgggggtccccaatgggtttagtcggccagcgagcttcgtccagggttcacctgcgccacaatggttcgtcccggcggccgatcgagaccccgccagatgcgcgcggccggccttacaagccgccgcgctcctcctggcagatgtcgagcagcggggtctcgggatggttccggcacactgcggtgttccccgcgccgccccgctcccctggagtgctccagccagcttgtgccccggacgagctctgatctgggtctatgctccccggactggcgtggtggatgagtcaccggcagagcgcggaggagcgggcaaggaccgagccctcggcgacaatccgacaccggtgcttcacgcgggaaatgagcggcgctgccccccggtgtggaccccttccacagtttcctgctgcctgtcaccctgagggcactctgttccgtggaggcccccatgcccgcagctagccgcgcagtgcgacgagatcaccatcccagtggccttcgagtccgggtctctgcttgggggcccagaagctgccttaatccgatgagactgccgccaaattattccttctgcccggatcccactcctgccccctccactggctgtcctcccccccaccgtgtttcttttgatacctttatcttcttttttatcaaataaagttcaaagcaaccacctga

SEQ ID NO: 601693 - DNA, 426 bp, Homo sapiens
gaatgtcgaggctgcaatgagccatggtcatgccattgcactccaacctgggcaagagaacgagaccctgtctcaaaaaaagagagaaaaaaaaaaaaagaaaaaatactccatttgaaatgactgcaatttcagtatgtgtagcatggatcaggtgtgatagctaatagaaagctaatagggtcttgagtgctgaagggggaagtagcctgtatgccaagagatgtgctgatccctgctatgcattggtaaacactaagttaggggcatatgtattctgttctttaactcaaggacattaacaagctgaagtatgtacagaaggattaccaaggtattgagtcgtatgaggaattccaaggaggagaaggccagaaaagagaaatcttggtgtaagcccgttttaaatgtttgaaaggactatgc

SEQ ID NO: 601694 - DNA, 101 bp, Homo sapiens
ctagattctgcttcttgaaaagtctaatccaatcagatcactatatattaccagaaaagctttgaaatactgattgcagattcatttcaagagtatgattt

SEQ ID NO: 601695 - DNA, 108 bp, Homo sapiens
gcaacactctactgtatatttcgaactatcttggcagatagtaacaattcaaatttttctagcataaagacaatagttaaggtgatagatatacgaacacaaggtacg

SEQ ID NO: 601696 - DNA, 183 bp, Homo sapiens
aaaatgcgcatgagaacctgaagaagagtaagaggaaagataactcaaagatctaggagtgacaacgatgcctctaggccgagacacgaaagcttatcggaacgggccttaatcaaccatccagatcgcaatagtgaccagtcctaggtcaagaaggaggagaagaagttcaaggaagttgga

SEQ ID NO: 601697 - DNA, 525 bp, Homo sapiens
aggagggctaacaaaccttccaaaatccaaccatgtctaagaagacgaccagggactcccccagggactccaggtcccaagcgataacactgtcgtgaagcacccccaagccactatccactgagaatccagctccatacatggggtgtatatttattctgaacgggagaagttatatggttaaaagtgtaaaagaataattgtgtatgaagctgccttattttttttctatttgtaagttactatttgcatgtgaatatttatgtagataagatttgcctcctggtaagcctgtaatggatggggcccagaagtgaaatatttgagaaaaacaagtgaaagggtcaagatacaaatgtgtattaaaaaaaaagcctattaatagggtttctgcgcggggcagggtggtaaaccggctttatcttttaggattatccctaaatgcatcttctttataaacttgactggctatctcagcaagataaattatattaaaaaaataagaaccctgaagatcgtcggtgg

SEQ ID NO: 601698 - DNA, 146 bp, Homo sapiens
acatgatacaattcgagctggtacctactgggttaggtctacctgggttaggtacctgggttaggtctacctgggttaggtctacctgggttaggtctacgttaggtctacctgggttaggtctacctgtggttaggtctacctgg

SEQ ID NO: 601699 - DNA, 329 bp, Homo sapiens
  misc_feature (197)..(197): n is a, c, g, or t
  misc_feature (232)..(232): n is a, c, g, or t
  misc_feature (273)..(273): n is a, c, g, or t
  misc_feature (307)..(307): n is a, c, g, or t
acaactcggaagccaatacaagttttccaaaattctaactttttcttagaacttgaattttattattggtataattttccttgaagtgacatactcaattcattaatttttaaaaaatgtctgccaagtacccttgtctgaattaccataatttatgtcagttgttcttacatgtgaaaatgtgtttcatgaaaaangtggctagtttagcttgcactgcaaacaattgctntttccttaagacaaacattttaagttctttcttgagacttnttaaatttgtcacacagatattaaaaagatgtgntgctcaaaagtcaagatttcat

SEQ ID NO: 601700 - DNA, 278 bp, Homo sapiens
  misc_feature (160)..(160): n is a, c, g, or t
  misc_feature (247)..(247): n is a, c, g, or t
  misc_feature (256)..(256): n is a, c, g, or t
  misc_feature (260)..(260): n is a, c, g, or t
  misc_feature (262)..(262): n is a, c, g, or t
  misc_feature (264)..(264): n is a, c, g, or t
tgaggttgaacgtgagacggtctggtttagagtagtccatcctatttatcgaatatcttgttccttgttaaggttgttggatatggacccggtagcacatgaattgtatggctttgaacaaggcgtgggtaccgatttgccggaatgctacgtgtggttngttgatgccgattgtaactattatgagtcctagttgacttgaagtggagaaggctacgattttttgatgtcattttgtgtaagggcncacgcgccngagngntnctctagaacagcta

SEQ ID NO: 601701 - DNA, 816 bp, Homo sapiens
  misc_feature (25)..(25): n is a, c, g, or t
  misc_feature (71)..(71): n is a, c, g, or t
  misc_feature (144)..(144): n is a, c, g, or t
  misc_feature (163)..(163): n is a, c, g, or t
  misc_feature (177)..(177): n is a, c, g, or t
  misc_feature (190)..(190): n is a, c, g, or t
  misc_feature (192)..(192): n is a, c, g, or t
  misc_feature (194)..(194): n is a, c, g, or t
  misc_feature (201)..(201): n is a, c, g, or t
  misc_feature (209)..(209): n is a, c, g, or t
  misc_feature (213)..(213): n is a, c, g, or t
  misc_feature (218)..(218): n is a, c, g, or t
  misc_feature (241)..(241): n is a, c, g, or t
  misc_feature (243)..(243): n is a, c, g, or t
  misc_feature (282)..(282): n is a, c, g, or t
  misc_feature (286)..(286): n is a, c, g, or t
  misc_feature (288)..(288): n is a, c, g, or t
  misc_feature (294)..(294): n is a, c, g, or t
  misc_feature (297)..(297): n is a, c, g, or t
  misc_feature (301)..(301): n is a, c, g, or t
  misc_feature (308)..(308): n is a, c, g, or t
  misc_feature (319)..(319): n is a, c, g, or t
  misc_feature (324)..(324): n is a, c, g, or t
  misc_feature (333)..(333): n is a, c, g, or t
  misc_feature (340)..(340): n is a, c, g, or t
  misc_feature (349)..(349): n is a, c, g, or t
  misc_feature (353)..(353): n is a, c, g, or t
  misc_feature (357)..(357): n is a, c, g, or t
  misc_feature (388)..(388): n is a, c, g, or t
  misc_feature (409)..(409): n is a, c, g, or t
  misc_feature (414)..(414): n is a, c, g, or t
  misc_feature (418)..(418): n is a, c, g, or t
  misc_feature (501)..(501): n is a, c, g, or t
  misc_feature (510)..(510): n is a, c, g, or t
  misc_feature (514)..(514): n is a, c, g, or t
  misc_feature (552)..(552): n is a, c, g, or t
  misc_feature (556)..(556): n is a, c, g, or t
  misc_feature (601)..(601): n is a, c, g, or t
tactcagagctgcgcttgtactacngcgtgtgccaacctgcacctggaggagacgctggccgagttctggncccgcctgctcgagcgcctcttcaagcagctgcaccccacagctgctgctgcctgatgactacctggactgcntgggcaagcaggccgaggngctgcggcccttcngggaggccccganananctgcgcntgcgggcnaccngtgcnttcgtggctgtctcttttctttntncaaggcctgggcgtggccagcgacgtggtccggaaagtngctnangttccnctnggcncggagtnctctatagctntcatnaagctggtntactgtnctcactgcntggnagtncccggcgccaggccctgccctgactattgcngaaatgtgctcaagggctganttgcnaacnaggccgacctggacgccgagtggaggaacctcctggactccatggtgctcatcaccgacaagttctggggtacatcgggtgtngagagtgtnatcngcagcgtgcacacgtggctggcggaggccatcaacgcnctcnaggacaacagggacacgctcacggccaaggtcatccagggctgcnggaactccaaagttaactcccagggccctgggcctgaggagaagcggcgccggggcaagctggccccgcgggagaggccaccttcaggcacgctggagaagctggtctctgaagccaaggcccagctccgcgacgtccaggacttctggatcagcctcccagggacactgtgcagtgagaagatggccctgagcactgccagtgatgaccgctgc

SEQ ID NO: 601702 - DNA, 363 bp, Homo sapiens
tgcttggcagtgggccagggtgtaggtatccgttcaagagtacttcgtagggctgcccttgaattgattgggtccgcttgaattgacgggtccgcttgaattgacgggtccgcttgaatcgacgggtccgtcagtccccagaacttcagcagatcctctaggttcccatatcatctcatacggtcaactttgaacacgacagttataaagcatcattctccttgtacagctccagcggcggtacctcccgggcacgcgccccggacccgtcaagtcattgccgttaacagctgtatacctactctcaggaggccgtacgtgctagctacatgtgggcccttaacgcccatatgagtgacgttt

SEQ ID NO: 601703 - DNA, 630 bp, Homo sapiens
ggaattctgctggaggcaggcgccatatcctggaggtgaaggtaccacctcatggagtaccccgcgggcgtcgccccgctgggagcttattcccctccttcctgctcctggcctgcgggacgctggtggcgccttgctgggcgccgtcaccgctggggctcttctatcagtctgcatgcacaaggtggacaaggccaagcgtccggcatggcggagagaacgtggtcgctgtgctgagggcccatggtgtgcggttcatcttcacgctggatcggtgggcacatttccccgctgctggtggcctgtgagaaactgggcatccgtgtggtggacacacgccatgaggtcacgggcgtcttatgcgtgcgtgagtgcttatgtggcacgccttgtcctgtggaccggtgtggctgtgtgctggcagttgaacaagcatggcaccctggaccgtcagcccaagcaacggttgatcttgctgtgtgaagaattgctcagatggctcagtccccaatccgtgcttctgggtggggctgcagcactctgctgcagaaccggggtgcgctccaggctgttgatcagcttgtcccttttccggccactctgtaagttttgtgtgtctgtgcggaaggg

SEQ ID NO: 601704 - DNA, 169 bp, Homo sapiens
atgaggaggaatgccaacgcagccgctactgcagcaccaccggccgccaggagataggtggaacgccatccgctgctgttgaccatggccacgaggccaacagctgagatcacttgtccgaactggcccagcaaaccggtgagctgggttaccagaggggtctgcttgg

SEQ ID NO: 601705 - DNA, 517 bp, Homo sapiens
  misc_feature (327)..(327): n is a, c, g, or t
  misc_feature (359)..(359): n is a, c, g, or t
  misc_feature (381)..(381): n is a, c, g, or t
  misc_feature (413)..(413): n is a, c, g, or t
  misc_feature (436)..(436): n is a, c, g, or t
  misc_feature (458)..(458): n is a, c, g, or t
  misc_feature (465)..(465): n is a, c, g, or t
gaagatgcaaaaatagtagactccctgtgtacccttcactcagcttcccacaggagaacatcttatgcaaccctcagacatgatcaaagccaggaaactgacactggtacaatagcattaactgagctgcagaccttatttttcttattaaacctagggatctacagcattttagaagcattttagaatttcataagctttagcattgttgtttgtcttttagaggatgtttcaatcccttccaattgacaatcagttaaaattcgtttccgtaagttcaacaaatactggaggatgaatttcacaggttccacgggtccacatggncgctctatgggtgcatcgtctctgatggggtngcacagaggtgaccttctaccncaggttctgaggagattctggaggacattaanggaccttaggacagttagttttngttttatagggtcagaccgggngagcctnggagttctgataatgggttccgggctgtcatttagtattttagtatggtttt

SEQ ID NO: 601706 - DNA, 514 bp, Homo sapiens
atctccaggaagagatgagcaattctaccaaaacctcatgggatagacatttttgttaagatacaattcacataacataacattcaccgtcttaaccatttgaaagtgtacaagtcagtgttctcacatatatccacaatgttctacaaccatcaccatcaatttcggaacattttcatcaccccagaaacaattaagcattaaacagtcactccccattccctgtcccactaatctattttctgtctctatgtgtttgcccattctgaacatttccccagaaatccaatcatatgcagctgacccttgaacaacacggggttagggaagccaacctttcgcacagttgaaaatcttcatataactttggactctccaaagacttaactactaatagcctactgttgactggaagccttacggataacataaacagttgattaacatgtatttggaatgttgtatatattagatactgtattataaaataaaccagagaaaagaaaatgctaaa

SEQ ID NO: 601707 - DNA, 258 bp, Homo sapiens
ataatttgggagaagcacactgagtagaaacatggcctgaaagggtggtggtctggtggacctggcttcctgtggccagaggtcagcggactgctagacatggtctgatctggccacagcaaagactgggcaagaggggccccgtggaaggacacatgcatgggcacacgagcacgagtgcctggaggcgtggctcactagaatgagcagctccatgaacctagcaaggtccacgcagctacacgccagctaggtgct

SEQ ID NO: 601708 - DNA, 328 bp, Homo sapiens
agtctcgctctgtcgctcaggctggagtgcagtggcgccatctcagctcactgcaagctccgcctcccgggttcacgccattctcctgcctcagcctccagagtactcccgagtagctgggactacaggcacccgccaccatgcctggctaattttttgcatttttagtggagacggggtttcaccgtgttagccaggatggtctcgatctgctgaccgcgtgatccgcctgtcacgcggcttcccaaagtgctgggattacaggcatgagccaccgcgcccggccagaataaagctatatttctagtgacccttctgtcgtaatatc

SEQ ID NO: 601709 - DNA, 666 bp, Homo sapiens
tccaatctcctatgttatagtaaacccagccatgacccctaacaggagacctctcagccctcctaatgacctccgcgcctacccactgtgatttcacttccactccactaacgctcctcctactacgcctactaaacaacacactaaccatataccaatgatggcgcgatgtaacacgagaaagcacataccaaggaccaccacacaccacctgtccaaaaaggccttcgatacagggataatcctatttattacctcagaagtactttttcttcgcaggattttatcctgagaccttttaccacatccagacctagcacccgtatcaccccaattaggagggcactgggcacccaacaggcatcaccccgcgtaaatcccctagaagtcccactcctaaacacatccgtattactcgcatcaggagtatcaatcacctgagctcaacatagtctaatagacaaacaaccgagaaccaacataagttcaacgcacctgcctctcattacacacttttactgggtctctatcttaccctcctacaagcctcagagtaacttcgagtctcccttcaccctttccgacgggctctacggctcaacactctcttgtcgcccccggtttcccggacttcccgtccccattggctcactttactcactatcg

SEQ ID NO: 601710 - DNA, 469 bp, Homo sapiens
tcctttccttctaatgcatatatttatcaaagacttggaaccaaccgaaaacatccatcaatgatagactgaataaagaaaatgtggcacatatacaccacggaatactttgcagccaaaaaaaaggacgagtttatgtcctttgcagggacattaatgaagttggaaaccatcattctcatcaaactaacagaagaacagaaaactaaacaccgcatgttctcattcataagtggaagttcaaccatgagaacacacggacacaaggaggggaatatcacacaccggggcctatcggggggtggcaggcttggggagggagagcattaggggaaatacctaatatagatgacgggttgatgggagcagcaaaccaccatggcacgtgtatacctatgtaacaaacctgtatgttctgcacatgtattccaaaactttaaatgtaataaaacaatttaaaaatgtgaaa

SEQ ID NO: 601711 - DNA, 289 bp, Homo sapiens
agattttataaaacaaatttatattcgggttcttaactttattagggaagtaagaagttgcagctcatcgcacggatgacctggaggcatgcatggttgcatccggcccacttttttggaacaggaaagatgatcggggagggaacacaggtcagtgataggaagggggtcatgtgtcacacagagggggactgtttctctacctcctaacatgggggctaggccgggacccagaccgattcagaggcccttgcaaaaagagaaaacagacgtcccttaaacacatagg

SEQ ID NO: 601712 - DNA, 280 bp, Homo sapiens
aaaattgaatatccacatgagctactcacccggacaaattattacttttacaatgagcaaacctatattcagattaaaagataaggggggccccggggcatggtgagtcatctgtaatcccagacactttagagaggccatggcaaggaggatcgtatagcgcccagcgaattagttcaaggccagctataggcaacacaagtgagacctcgtgtcatatttataaaaaaagtaaaaacaaaataaagggggatgtagatcctgccctcaggtagcttgt

SEQ ID NO: 601713 - DNA, 211 bp, Homo sapiens
ttcggtaccgcgatggaactcactacttaaatccaaaccactgggatttaagtgcggagtgcaccgtgcccggtcatctgtgtttaacttttttagaagaatcgtcatacattttccacatgcggctgtactattatatacatcctcaccaactagtgcacacggagttccagctttcttcacacttctcacacactactttcgctctctc

SEQ ID NO: 601714 - DNA, 262 bp, Homo sapiens
tctcagcggacatcgggggtgctgttcgaattcattagaacaggtaggttagaagcaggctcttggtgaggaaatatgttgtgtacgagttcagcgtgagagtgcgtcatatgttgttcctagtgtagaattgtagtggtgagggtgtttattataataatgtttgtgtattcggctatgaagaatagggcgaaggggccttactggtttgcagtggaatcgggggtatgctgttcgaattcataagaacaggcaggttaga

SEQ ID NO: 601715 - DNA, 223 bp, Homo sapiens
ccccttttatttttttggggcccccccccccccccccccccccggggggggaaaggggcccaaaggggggaccccccatttttttgtgggggggggggggggtttttttttttttggggggccccgggggggccccccattttggggttttttgggtttttttttccccccccccccccctttttgggggggccccttttttaaaaaaaaaaaatttttttta

SEQ ID NO: 601716 - DNA, 356 bp, Homo sapiens
ttaaaaaaaaggggaccccccgggccccagaaattgggcccaagaaaaattttactttaaaaatttgccctttaacctttaatttttaagggaaaaaaaagccctaaacccacccccggttttcccagggtttttgaatttaccccaaattgtttggttatggtttcaatttcccaaccaaaaaaaattttttttttggggggggaaaaaaaaattttttatttttggtattggacagggtttttcccagccccccaatttacggtgggggttaaaaaattgggggctcaaaaaattaaaagtggtaatttgcccccgtgggggttaaaaaataaaagggggggggcccttagcca

SEQ ID NO: 601717 - DNA, 234 bp, Homo sapiens
cgtgatggctgaggtgatctagaggatcccgggtgagtacagctgtgtgtgcaggtgtgtgtttgcagatgtgtgtgcagatgtgcatgtgtccttgtgtatatgcacatgtgcactgtgtgcaggtgtgtgtgtgtacagatatgtgtgcaggtgtgtgtgcagatgtgcgtgcaggtgtgtgcgcagatgtgtgtgtgtagctgtgtgtacacacatgtgccctgtgtgcag

SEQ ID NO: 601718 - DNA, 659 bp, Homo sapiens
aggaccccagagatattgaccactatactgtgtccgctgtttttggggggggggcggggggatcctttgtgtccatcctaactgatgctggggctgccactttgttaaaacaggaagtgcgctgatgtttttttacactgataaactccttgaccgaatagagttttacacatatcttcttgtgaacgggactcaacgctttgaggggggttctcccttatacgcccaaaagcatatatctcctacgacagttggtccagggttaagggatcttactgttcatcagggggaaaagagtaagggcttaaaacgcatatctactgttgaggtctttctatgtgcgccacctcccgatatttgtgtaaaatatcaatttctctcattgaacgtatttccgccggtatccgagccaataggcatttcccaaatagagccgttttacctaattagcctttttaattaaacctctattctcaatctataactaaggcgctttataaaagtcattattttcctttaaatgaaattgctgaaatccgactaaaacctttaaaacaagaggcttttctcccttttctcattattcaccactgttctctaatctttttatctatgctttaagagatcttctaaccttctctattggtttacctcccggg

SEQ ID NO: 601719 - DNA, 364 bp, Homo sapiens
tgggctaggatgagccgttccatatagactgtccacccgaaggtgctggtcgcaatgcagaacggtgaatacgcaagtctatgggagagggttaccttttcaaccttgatatctaagatccttttcatgacctggcagaggttctaaaactgtgccttgctctgtcccatcttgttcttgtcatactcatgcttaggcatatccagaccctacttggtaactgagaccaggctctgcccatcaaattccttgagctgttgaacacactactttacaatgggctcggtcatatttaccacctcaaagcctcgttaccgcactctgtccacaaaagctgagtaggccacctgctctttgctctcac

SEQ ID NO: 601720 - DNA, 597 bp, Homo sapiens
cgtgaaaagaaaaaaaaaataaaattagaaaataaacagaaaaaaagaaaaaaatttaggcacaatacacaacgaacatcaagtatagcctagcaaaaacaaaaatcacaaacaaaacaaaccgcactgaggcgaagcaacacaaaaacaaatggaaacataaacgacagtaaatcaaatgaacaatacacgacggaccagcagccagttacacagctgcattgagccaaaacccggaaacagagagctcataacagaacaaccaccaacagaccttagcaaagctacagaagatacaaacccagccattgcacacacaacaacgccaccactcttcttaacaaaaaaaattatacacacataaactccatcattacacgtcataaaaaaataaaaccacaaatataacacaacaacctctaacataaccctacatcactaacacatcccttcaactaccatatttaacctcaacttctaccacatctaaactttcttacaccctatcaataacactcctcataacaacatatcacacaaaccaaatatcacacaccaccacaccacacctactgatcacacacactaacactacca

SEQ ID NO: 601721 - DNA, 811 bp, Homo sapiens
cgaattgtctcgtgcatgtggtgctgcatgctggcctgctgccctgtcgccctgggactccccgccctccctcgctgacccctgctgcctggtggctgtgtctgtgctgcttgctgtgctgtggcatgtggtgtgctggtgcatgtggtgatgatgtggttgtgctctgtcctgtgggtgtatgcctgcctcctcttgcatgccttgcctggctgcctctgaatgccctgtgacctgcctcctgccttcttcctccatgctgtgcttccatccctgcctccctgtgcctctgtccttccctgcctgccttcctgcctgcctgctgccccctggttgtgctttgccatctgtgcttgtgacctggtggatgtgtgttgcccagcttgctgtctgagcctgccctgctctgtgctctgtgctctgtgccctggccctggtgatgtgctgttgcattgccccttgcttgccctgctggctgctcagccattgcatgcattgctcatagtttccaggagttggttgatcagttgtgcatgtggagctgtgttgatagcttgtgctgtacttaagctttctgagtagtattactgtgagcactgttcagcctgttgagagctgttgcaggggtgctatcttcttgccagcgaacatgctgcctaaccctgcaaagcccttaccctgtggccctggatggagcagctgcgcctgtgcccccctgtgctcctctattctgctggccggcggtggttccctgtgcttcgtggcaaaaaacagtatggtgacactgtctgcttcataagacagtaaatgt

SEQ ID NO: 601722 - DNA, 279 bp, Homo sapiens
tcatgggttcctgaggctttttattttgagcacaaaaccaccggggatttagcctgtggcaccccggagatgacacgaggctcacatgactctagacacttgggtggaaagtgaggcgagaaaaccaatgatttgggcaatttccccgattgaaagcctaaacctccaaaaaggcctcaaggaatcttggcttcctagaaagtttctaagaaaccgtatagatctccaggggttgggggccctattatccggggcccccccaaatgtttggttcggggg

SEQ ID NO: 601723 - DNA, 224 bp, Homo sapiens
tataactattctgttttagtggcagatggggtttggccttgcttgtccagactgtgtcttgaactgccagactcaagcagtgccccgcgctcggccacccaacttgctgggattacaggcgtaagccaccgatgtcagccactgatttttagaaactaacgccaggcggagctgcgctgtgccatttcatctctacactactcagcgcactgtcggaaacggga

SEQ ID NO: 601724 - DNA, 262 bp, Homo sapiens
ggggggtcccccccccccccggggggaaaggggggccccaagggttaactttttcttttttaaacccccttggggggctaaaggggcccccaagggggcccctggggggggtttttaaaatttttttttcccccagggggccggggccctttttaatttttgggggtttttggggggaccccccaaattccccccggggggttgttaatccccctttttacccggggggggggggtttaatttttttttgccctttggccca

SEQ ID NO: 601725 - DNA, 159 bp, Homo sapiens
ataaagttccaattcatcgggattgggaggacggggaagataccggggggacactcatgaggggtggtgcaacgtcgttacgagtcacttcaggccgagcgtccaggcccctgtgcagctggctcaagtcaaagtcctggtcctcttgccgccgttcct

SEQ ID NO: 601726 - DNA, 878 bp, Homo sapiens
ctcggctcactgcaacctccctgcctgattctcctgcctcagcctgccgagtgcctgggattgcaggcgcgcaccgccacgcctgactggtttttgtattttttggtggagactgggtttcgccgtgttggcgcggctggtctccagctcctgaccgcgagtgatgtgcccgcctgggcctcctgaggtgccgggattgcagacggagtgtcgctcacccaggtctcaatcttgcccaggctggagtgcagtggcgtgatctcggctcgctacaacctccacctcgcagccacctgccttggcctcccaaagtgctgagattgcagcctctgccccgccgccaccccgtctgggaagtgaggagcatctctgcctggccgcccatcgtctgggatgtgaggagcccctctgcccggccgcccagtctgggaagtgaggagcgcctcttcccggccgccatcccgtctaggaagtgaggagcgtctctgcccgagcgccatcgtctgagatgtggggagcgcctctgccgggccggaccccttctgtgatctgaggagtgtctctgaccgaacgacaccccgtcttgagaagtgaggagcaacctccgacacggcaggccgccatggtctgggaagtgaggagcgtataccgcccgaagtcagacccatcacaggaagagttggaaagggaaagaccacacagaccaggcacaagccagacccaaatacagggaagtgaagatggagaggaaacacgagtccaacacaggtaacgagagagtagagaggacgccatactgaccagaacagcctgagctagagaaagtaaggaagacacatcatagccaggcggcaaccatgaatgagaggtggacccaa

SEQ ID NO: 601727 - DNA, 651 bp, Homo sapiens
accgctaatatgtaaccaagaacagatattcagaaaaggacagtctcttcaataagtgtgctgggagaactggatatccatgtgcagaaaaataaaactggaaccctatctctcactacatacgtaaagcaaatcaaaatggattacagacttatatctaagacctcaaattatgaaactactaaaagaaaacattgagaaactctccaggatgttgggctgggcaaatatttcttgagtagtaccccattagcacaggcaaccagggcaaaaatggacaaatgtgatcacatcaaattgaaaagctttggcacagggcaggaaacaatcagcagagtgaagagacagcccacagagggggagaaaatatttgcaaggtatccagggacaaaggattaataaccagaatatataatatcaatggtcatcagaaaaaatgcaaattgaactacagtgggctattaccttaccccagttaaaatggcttttatccaagacaggcaatagcgaatgctggcgaggatgtgcagaaaggggagcccttgcacactgttggtgggaataagtacaaccactatacagaacggtttggaggttcctcaggaaactataattagagctatcatacgattccgcgaacccactgatagg

SEQ ID NO: 601728 - DNA, 127 bp, Homo sapiens
tcgagctcggtaccttttccaccttcagcattttacagtataagaaagcactacctccatgagaattcacgtgtggtatagggtcggtatatgggtggtatataggtggtatggtggtatagtctgc

SEQ ID NO: 601729 - DNA, 743 bp, Homo sapiens
  misc_feature (93)..(93): n is a, c, g, or t
  misc_feature (98)..(98): n is a, c, g, or t
  misc_feature (117)..(117): n is a, c, g, or t
  misc_feature (119)..(119): n is a, c, g, or t
  misc_feature (148)..(148): n is a, c, g, or t
  misc_feature (151)..(151): n is a, c, g, or t
  misc_feature (185)..(185): n is a, c, g, or t
  misc_feature (282)..(282): n is a, c, g, or t
  misc_feature (296)..(296): n is a, c, g, or t
  misc_feature (300)..(300): n is a, c, g, or t
  misc_feature (309)..(309): n is a, c, g, or t
  misc_feature (318)..(318): n is a, c, g, or t
  misc_feature (357)..(357): n is a, c, g, or t
  misc_feature (359)..(359): n is a, c, g, or t
  misc_feature (439)..(439): n is a, c, g, or t
  misc_feature (474)..(474): n is a, c, g, or t
  misc_feature (478)..(478): n is a, c, g, or t
  misc_feature (481)..(481): n is a, c, g, or t
  misc_feature (523)..(523): n is a, c, g, or t
  misc_feature (561)..(561): n is a, c, g, or t
  misc_feature (610)..(610): n is a, c, g, or t
  misc_feature (655)..(655): n is a, c, g, or t
  misc_feature (678)..(678): n is a, c, g, or t
  misc_feature (711)..(711): n is a, c, g, or t
ctccctttatctcctccttcccctctggcagcgaggaggctatttccagacacttccacccctctctggccacgtcaaccccgcctttaattnataanggtgcccggcgccgggttnanggaaacgtcggcgggggagaggggcccanggnggcaggcccggccagagactcggcgcccggagcnagcgccccgcacccgcgccccagcgggcagaccccaacccagcatgagcgccgtaacccactcgcccatgatgcaggtggcgtccggcaaaggtganagggaacctttgcncccnggatggganatcaagatngacccgcagaccggctggcccttcttcgtggaaaaaaanancagcaccaatacgtggaacgacccgcgcgtgccctctgagggccccaaggagactccatcctctgccaatggcccttcangggaggtatctaggctgccgcttgctagggaaggncacnctntgtacccccagatccgaccaggctacattcccattcctgtgntccatgaaggcgctgagaaacggcaggtgaactctttncatgtatatatacagcctgggatgcagcgattccgaactgaggcggcanaggcggctcctcagaggtcccagtcacctctgcggggcatgccanaaaccactcagccagataaacantgtggacaggtggcagcggcggcggcagccagncccccagcctcccacggacctgagcggtccca

SEQ ID NO: 601730 - DNA, 623 bp, Homo sapiens
ggcacgactcatcaacagcgctaagctcgcactgattgtttacctgagtatgcctcgaaatacagcatgctacgcttttattccacgttctaatccaaaaaaataagatccctcgttccacagaagctgccatcaagatatttcctcaacgcaagcaaccgcatccataatccttctaatagctatcctcttacctaaaaatatactctcaggacaatgaaccataacacaatactatccaagtcacactactcatcattaactaatcataatggctatagccaataaaactatgggaatatgaacccctttcacttctgacttcccagagtgttacccgaagtgcacccctctgcactatccaggccatgtcttcttctcacatgacgtacataatctatgcccccatctcgaatcagtataaccgaaatgctctccctcagctacaacatatagccttctcctcgatgtctctcaatctttattccatcatagcatgctagttgaggtgccattaaatccaaatcttcagctacagcaaaatcttagcatactccttcaatgtacccacatgatgatgacctaaataccagttctaccgtaccaattccctaacattaaca

SEQ ID NO: 601731 - DNA, 488 bp, Homo sapiens
gcatgattggtgttcctggtcgtgcgcttgccagggtctcatcgtcgtgagaggcctgacgcttttgatatcattccaggctttcagtttcttgcggagcatagcagtttcgttggtcttcttgtacccttccactttatcttcgactaccagaggcagtgcacgaactcctctatatcgataccttatatcgtaccagtgctgtgtgggctgaggcagccagggcagaacatgatggtgtattcgtttttgggttgtgttcactctatcgactgcccacggcgcccgggttttggcttggtgcaaacattcggcctccactgacacatgtttcctcataagcaccctggtcagagcggtgagtcccaccatctcgaactctgggaattcgagccacagctctgccagtaccccaagactcagcgctagtctgataacctgctatttcattgacagcgatagggctgtctgttgtttttgcgcaggtt

SEQ ID NO: 601732 - DNA, 335 bp, Homo sapiens
  misc_feature (181)..(181): n is a, c, g, or t
acatgttgtccagtctgggctcgaactcttgtgctcacgtgatctgtgcacacttgggctctcttctcatagtgttggcttccagagatgaatttctcgatggtactggtgggtcacgggcaggttttactttggtgggttctttagctaaatttgagtagtaggaatgcctgagggcggnggccgaagggggtaggggaatggtggggaatggatttttttcttggtaatgtgtcttcatgccttttccttgaatgtcctgcctctatgggctctatatgctttccaactccattgtctgttcccgttatgtttacctttttctcctgcattct

SEQ ID NO: 601733 - DNA, 926 bp, Homo sapiens
gagactgactgttctagggcgtgatttgtttgtcgagtgcccctctctactgaataatgatctgcctgtccccgactgtgtgtaaagaggtccctggagctgccttcaagataaggggtcctagagggtgcaagatcatcaagaaccagtttaccccatgcaataggactgctaaagccagagaaatgtgacaaagcccagttgaactgaattttgaatctcataaagctacaggtgcatctgagagcaggctcagtggtgaagatcaagatagcccggtaaagccctgttggggttttttagcctcagccacatggtataacctctcagttcctgccataaacaatattcagtggaaaatacagcactgttgtctttacacatgctccactctggaagggttaatgctctgagctacaggataggttggggaacaccatttttaaatctgtggttttaaacaaaaagagaaattattaccgtggagatataattgtgctggtacatatattctgaaaagtatgtataaatcacttatgttaaagcgccagaagttacttttataagtgaactattacgaataatttcataaagcaaataaccaccttctaagcttatcttgtcagggttatatcagaattctcaattatattcatagtcctcatagactttgttacaagcagatctatcctaggtacggacacaaacttggtaatccgttataccttagctgcctaatctggaggggggcgccttattaactctatgttaataaggtctcctgagaaatccaattggggtcaataggaaacacatttcgacttcggcctaaaaccaattgccgtttacacaatagcgggaccccacacagggttctggtttcccccaggccacggtttccgggacccgagcgcacgttttaaagt

SEQ ID NO: 601734 - DNA, 792 bp, Homo sapiens
  misc_feature (117)..(117): n is a, c, g, or t
  misc_feature (128)..(128): n is a, c, g, or t
tgtggcagttccgcgcatcttttcagcggtggccattatattatggccccacccgcggcttacccgattccattgggagaaaaccaacgtggggttaaacagccccccgtgcgagtntcccacaaacntttcagagggggccccccaatattgatgctcctcaatggggcacttatcgcctcccctacttctccctgcgcgtaaacgaaattcttttgcccacacagcgtgtagtatcgtgtcgaaggcaacttaagaggtccccgcatagttgcatgtctcccaacgtcgctcgcgcgctacaatactgtttaagtatcacctgtttagagtaggtcttggaccaccccctcctcagaattgctctagaccagtcttcccgcgcaaatagtgccctccgcctgcgcaccacaattaaacattctttccctcttcatagtcgaggtcgattatgtttacgaccctactcttccaactttctaggcacccactcctccgccgtccactaatgtggccccctccgaacatcgccacccccgccgagaggtgtgtctcttctattgagagaagggaatagaaatagttttctcttgggaggcgtaattacgccagtgtccctcgactcgtttctggacataataattgccgcccaatacgtcgctccactgtatttgtgccccaactttgagaagacagtcttcagtactattccccctgcttagaattacgtgatgctccacccggtgtggtgggagccgcaacaaagattcgtctgcaaacgcccacaataac

SEQ ID NO: 601735 - DNA, 767 bp, Homo sapiens
cccgggaacctcctggctttagagacttcctgagtttcctgacccccatcagtagatgggaaggtggggcaagttggcatcatgactcagtgtgttaagtgtcaagcaagtcggtgggtaatggagcagctgatcagtaggtagcttgtgagccacatcagacttgcactgcatgcatgacggctgtctaaacctattcctcagtagagtggctcatagactcagttagcatcacgatcacgcacataggtccccagctggggactagtcaatgacctctggttctgtcttcagtcacttctgcaggctcctgcaggttctggtctgagtagtcagtgctgcgctctcggtagaggattcacaagtacagagcagtgatagatagtggggcagagccgatgtcaatcagcaggtctgcttaacaccgtcttgtcagaatctctgaacacgattgttcacaaggtgcttatgatgctggcgttctgcagagttactagaccaatgcttgtaagatcgtgctaggtgatcgcgagggttcaaatagcctagatcggtgctcttagaggtgaagcgtgattgctttatgttacagttctgtgctgctgtagcacggtcattgttctctttagtccacaagcagagcagtgcacctgcatgaagatgtcttgtagagtatatgcctaacagcttccatttcatcaggtcagcgctgcttgtagatctgatggatggatacacactgccagagagatagcgcacgaatgtac

SEQ ID NO: 601736 - DNA, 226 bp, Homo sapiens
ctgcattgttcaacagctgcgggttgaccagccaaaggagaagggggagatattgagcatgttcagcagcgtggcttcgctggctcccacttagtctccagctcttgatcagctgcacatcactcaggatttcaatggtgcccctgaagatagttgggtggaagaagattatgacaaatgcatgggctgtgacgataacgttgtagatgtggtcgttaccctgaag

SEQ ID NO: 601737 - DNA, 152 bp, Homo sapiens
  misc_feature (31)..(31): n is a, c, g, or t
  misc_feature (51)..(51): n is a, c, g, or t
gagtgacacactgttcctctccaacccggcnccagccatctggggaacccnctgttgttgcagccatccaccagctgcggcagatccaagcactcctgtggctataccgcgcgcacgatcgtcggtgacgcacaatcatcgttcagcacacc

SEQ ID NO: 601738 - DNA, 300 bp, Homo sapiens
  misc_feature (70)..(71): n is a, c, g, or t
  misc_feature (104)..(104): n is a, c, g, or t
  misc_feature (139)..(139): n is a, c, g, or t
  misc_feature (242)..(242): n is a, c, g, or t
  misc_feature (268)..(268): n is a, c, g, or t
  misc_feature (277)..(277): n is a, c, g, or t
tagtccatgctgatgtcgactccagaggatacctgaggagctttgaagtcgcctaccagcgcgtgtacgnnccactttcgcccgcgagggcccgtgctcggagnccacggacggtattggaaggtggaccacttgtgtnccgtcgtccggtccgccttcagggggctgtccctcgatcgggacccgtctctggcgcgggtgcttcgggtccatgagcaggcttggtgggctgtgcgtgagcncctgcgctgtcttctcggcgtgtatnagatgccgngcgaagtcttgtggaaccaccag

SEQ ID NO: 601739 - DNA, 382 bp, Homo sapiens
ctcctttttcctctcttcagcgcgagtcgcccacaatttgcgcgctctctttatgctgttccccagctctcggatacagccgacaccatgggttacgtagacctgatggaggtttatgagccatcacaagctgacgtggcagaattagatgccgagtccagcccactgcctgacgactggagacatgccctacgttgatatactcacattaagtgttacgactaggataaggccagcctgccagtagtgaagaaagctttaggcaaataaggacctgcccgatgaaaggacactacaggaagtggagctccagatagtatacatgatgatgacatagacccattcgtatccgaggatgatgaacacagctaccaagcaaact

SEQ ID NO: 601740 - DNA, 152 bp, Homo sapiens
acggcctcgctattcagtgatcatccacctcagcctccgttgtagctgaactgcaggagtgcaccaccctgcctggctaattctttaaattttgtagagatgagagtctccctgttatagcctagtgctggccttgaatccctgggtctcaa

SEQ ID NO: 601741 - DNA, 467 bp, Homo sapiens
gctgtgtgtttgtggaggggagtaaggttatcagataaaagaagaaaaatgggccaggcgcggtggcttacgcctgtaatcccagcactttgggaggcagaggccggcggatcaggtcaagagatttagatcatcctggccaacatggtgaaaccccttctctactaaaaatacaaaaaaattgccgggcgcggtggctcacgcctgtaatcccagcactctgggaggccgaggcgggtggatcacctgaggtcgggagttcgataccagcctgaccaacaatggagaaacccgtctctactaaaaatacaaataaaattagccgggcatggtggtgcctgcctgtaaccccggctactcgggaggctgaggcaggagaagcgcttgaacccgggaggcggaggttgcggtgagccgagattgcgccaccgcactccagcctgggtgacagagcgagactccgtctc

SEQ ID NO: 601742 - DNA, 198 bp, Homo sapiens
aggtggaggagaaggcaagccgcaaagagcgaaagaaagaagtggtggaggaggaggagaacggggctgaggaggaagaagaagaaactcctcgaggatggagaggaggaagatgaaggggaagaagaagatgaggaagaagaagaagaggatgatgaaggcccgccgtgaagagagctccgcagaggaggatgaatg

SEQ ID NO: 601743 - DNA, 246 bp, Homo sapiens
cctgggggcattaagagctgttagaacactccattagggtttctagagacaatgactttatgtggcttatatagttagattagaagaatgggccgggcacggtggctcacgcctgtaatcccagcacgttggggggcagaggtgggaggattgcctgagcccaggaagtcatggctgcagtgacctgaagtcacgccgccacgctccagcacaggctggagtagctcttattgcccaggctggagt

SEQ ID NO: 601744 - DNA, 873 bp, Homo sapiens
  misc_feature (873)..(873): n is a, c, g, or t
gatgcgaaaacttccccacgggtactgcgtccacgtggggatggcgtggggactccctgaaagcagagcggcgagccgcccggaagtcaagacacatctggcttctgtaagaggtcttcatggaaagagtggtacatggggggatgagcagtctttctgaagaaaatgtgccattcattaagacagtgtggtgtgctctgatgagagataagagccgcaattaggcaagtgaaagtgtgtgctctgaaagatgaagcatgggctatacatccctgtgggaggccaggttcctgttagaagtggtcattatgggccctttgaagctgggtcatgatgcttttagtggaccaaggatggtcaaaaagccatgtggtgtcattgttagttcaggtacattgactgtcagtgtgttaaagatatacgtcaaagggaaaactgtggtggaaaaatggtaacgcctgtctgtgaggaggaagaaagtgaatcgcgtgacgtaggagctaatccatatggggaattttaccgggaacttggatggcgcgaaatcagacagttagaatcttttagtataggcagattagtgctgaattaaagcaggcactcctctgtgatgctgctcactttccgtccagcgagagtatgtggatgtcacaggcaagactaaggaaagggtgcccagggggcatgaaaggtgggatttaaggcagctggaacggggggcaacgaaagcaaggagactggggcgtcgcactggggcatgggaggctggcggactaaacgcggaatgggaaataagggacaaaggcggaaggcggaacgacacccaacattgtggggccgagaaaagggaggcaagaaaggagaacaggcacn

SEQ ID NO: 601745 - DNA, 456 bp, Homo sapiens
gcgcagcctgtaatcccagctatttgggaggctgaggcaggagaatcgcttgaacccaggaggcagaagttgcagtgagctgagaccgcccctcagcctgggcaatagagcgagacttcacagaccctcggagtacagtcagaaattattacatttttgaatttccattttgatctaaaaataaattgatatatacctattggagatcatctgggtggcttataaaaatgaatcagtaccaatccttttatctgtctctgcttatgatggcaatgtatctgtaccaggtgatctctggaagtgataacttttcatgtattgtttctcaaactgcaatgcaaggacatagcactgggatataggagttctcaaattaaagaccttggccacactatgttatgctgtctttcagttcatcttgagtaaatgaatgagagtaaccaagaaaaaaaaaaa

SEQ ID NO: 601746 - DNA, 911 bp, Homo sapiens
  misc_feature (3)..(4): n is a, c, g, or t
atnncataaaagcagaagaagagacaaaagaagcgaacatacaacattagaaatatttggccctgttctgcggtcttaaaatacccccaattgccaggcagtgtcccagcaccctgaaccaaaagaccgctcccctaagcggtgaaggttcagcccctcggtaggaacctcttccctttgcagaaaatttgtcggctccgccgaatggtttcaaaagcttctttctttaggcccccccctcagttccccgcccgtcggattttttggaaccagacctccccccgcatcaatcctatcacttattatgccctcggggaaatttttcctacacacacagggcagaaaaatcagccccaaaacaaccgagggtctcaaacaaaagcgcgctatgaaacccccttcccgaccacctcctccttatgtcaccaccatcctccaaccatcattctggtttttttccaaaccaccgttagtcgatgcaccccttttcccgacatatttgccgccggcccatctttccactccccccctatcatagaaccaaaaagtgtagcgcacttttttataaaacggcggctcagctacaaaatggccctttataaagcccggtgttaacaatacgcttttttaaccccgtgcgagagcctcaaacccaatgaacatagcacccctctatcagaacacctcttatattgctaccctcagggtctgcacaataaccctcttccccgcaccaccccctgtgaaatgtcttttgcaaacaaaaaaagacgataatctgtcctcattgagcgcccacaacttcactttctttgtgaaattttttccacaaccacagcgttatcagatgaaactggctgtctttcccccctgcggggaaaaaaaataaacgggggcctttcaacataaca

SEQ ID NO: 601747 - DNA, 138 bp, Homo sapiens
tatcatatagtaaaccagccatgaccctgcaggccctttagcctctaatgacctcggcctagccatgtattcattccacttccttaacgtcctacatactaggcctactacacaacattaccatatccatgatggcgc

SEQ ID NO: 601748 - DNA, 872 bp, Homo sapiens
agcggagttacttaaccaacggcagatgcgggaagtgagaggagtctggggctggggctgccttccaggcccacggggcggccccgctcttcttcggattgggttacctttgggcagagatggagactgctgcacgggactctggaaccatgaagcagtattatgatcgaagagatcaacttggatgcgcttgtaaaattttctcatataaccccgtcgacgcagctagcacctgatagactggtctatgctagtttctcgccctttagtatgttatgtaggcggctgtcagggtggcctatggtccatatggtgcactcatttgcattcaggctggccttgtctgctctgcctttgggtcttcccttgagtatctgatgacttatggcgtgagtggcaacaccgtcatagccattgacaatctgaaccagaacacagacgtggagacttctctcgctggactttgccattccgtctacagtgagcttggccctgggtcccatgctcctggaaggtcttcgtattagctgtctaaccctcagctgtcctttcccactgtctttcatgggtcactggcagatgatctttgacctgcgttctaccctctagtgctagctctatgccacggcgccgtcagctagcctctttctgggaggtactcttgactgtctgccctggagcttgcttgcttttgtcgttccctggggaactgtcttcttcggatccagtttgggcttatgccaggcgaagcctgatatgtgggactgggtgcgtcatgtgtggccttccgtcctatttacgatactcaaactcattattcgaacaaggccgaacctggaagatcacggatccatatctggcactgctttgaa

SEQ ID NO: 601749 - DNA, 1034 bp, Homo sapiens
cgacccacgcgtcgccacgcgtcgggaagtcagcacttacattacgaatttcctcatatctcttctggctgtagggagaaaacagaagaggacccaaacaagaagagaaaacaggaaaagaaaaaagaacaagaaaaaaaaacacaaaaaaagggaaaaaaaagaacaaaagaagagaagagggaaatttcaaaagataaccagaatgccgacggcccatgcacgggaagtgcacacacaacagtaacgccagatggacataggacaaaagacacacaggtaacaacacaattgcagggatcccactggcgctaaccacagaccagacatagcagagctatacgtggcacagtaaccacacaacaaacgtgacaaatcacgaacaacaacaagcacaagaacaaaaaagaagcaaccacacaaacacatccaaacaaacactcaagcacgtagacaaaccacaagactgtgaacaacaataaaccacaacaagaacgatcacaaaaaagacagaggcgaccaacaacagaacaccacaggagggaaaccagtaaactagccagaaagacgcacaaccaaaacacagacagtggcacagtaaacagagataaaaaacatgcaagcaagactaaaacgaatggcaacacatagaacaaacagacgacaaatagaaacaaattaaacagacaacagatcatacaacataaccaaccaaacaagagagagccaaaaacagctaccaacacaacaccacagatgagacaataaactaaaaaaccacaaaacagaaaacaaccacggcactcataacaacgtgcgcgcatacaccaacacagcaaaacaggtgcccaccacagccacgcgagtcagacccatctccgaagacaacagaaacagaccgaatcacaaaggcagcagagacaaagagagaacagccagcaccaacagacacagaacacggacaacgacaaccacacaccaaaaacccgacacacacagaaacacaccaacacacacacacccacacccgcaaa

SEQ ID NO: 601750 - DNA, 484 bp, Homo sapiens
tcctgaaaggtaaggtccttctgggggggaaggctttcagcaatatttagggctttccggccttttagttcctgggcccaggccctaggtcacttaggcattttttgcatttccacttggcattaatggaaccttccatgtcaaggttcagctagtggcccagaaatcagtgccaggaaccctttaacagttggcagcgatttcaggtcctttttaatggcccctgggtttggatacatttttcaagatcccctttggattttttaggggctaaacccttgggccttttagaggggatatatttatattttgcctgtttaaaaaaaagtgagcagggttagcttagttttttttttatggagggtattatgattagctttggccctggttccctactcagcatgggaacaagatgaaattccctttgtaggtagtgagacaaaattgatgatccctttaggtaacaattaaagggtccctttga

SEQ ID NO: 601751 - DNA, 495 bp, Homo sapiens
  misc_feature (242)..(242): n is a, c, g, or t
  misc_feature (245)..(245): n is a, c, g, or t
  misc_feature (451)..(451): n is a, c, g, or t
ttcgagacagtgattcccagacaaattatcaagagtataaaagaagtcttctttgagtgtgaaatatctcatggaatttagcacatggcctcttcatgaagaaactactgggagagaagaagacaagctggaagaggccagggaaagggggttagtacaaaacttttctccatctctcatcccacccaactagaaatacccacaggtgtggaagggcaggccaccccttcatctggcgcccnacntgggggggcctttctctagggtaaaggtacgctaagaacatgagcattgaggacagctgacgagagattcccgaagtacggtccacagtcagcccttgcgggtaagctttgtgcactcgggaaagaatccagggtaacaatgggggcaaactgaaagtaaatatgcctctttatctcagcttcattaaaatcctcttaaagaagangggggagttaaagcttctaccggaaaatttaggtatgctaaaaa

SEQ ID NO: 601752 - DNA, 286 bp, Homo sapiens
  misc_feature (282)..(282): n is a, c, g, or t
ggtgtccggcccggaatagaaggggaaaggaccccagagaagtggctgtgacccgcccaagggcccctggccagtgaagggcagagcctctggccctgaccagctgccgggcctcgggcaagtcacttcccttctcgggtccccagtttcctcatctgtcaaagggggttaaaaacagaacccacctcgaaaagttgtgaggctaaaaagggttcaaatgtgccaagtggttaggccaaatcctggcccaaagtaggtgttcaaaaaaggctagcctttgtnacca

SEQ ID NO: 601753 - DNA, 456 bp, Homo sapiens
ccttgcttttttctcctgtgaagtgaccaaactttcctgtttctttgcctgttctgtaatttttccatttcgaagaagacatcttagatgatatactgtagcaagcccaggcactgattcctgccttttgctggccccaacctgttttgttgtttgtttggtcttttgtttgtttagtgacttgggtgagataattatgtgaagccattttccctctcaattttcatgcatcacttatttgttggtggttgtaggtaagctcctttagtcagttttacttccactatttaccactggatgtgtgtgtggctgggagactgcttcacagtttagagaatttactatttccccccatgttcagccagagaggcagaggctgcagtgagctaagattgcaccactgcactccaacctgggcaacagatggagaccctgtcttaaaaaagtaaaaaaaaa

SEQ ID NO: 601754 - DNA, 124 bp, Homo sapiens
tgctcttgaggtccccgagtgcagagtcctgacagcagtagcagttctggcaatattctaggaacaggaagaagacaatgtgactagtagcagagtgaggcaggagtgagagaaaatgtgatca

SEQ ID NO: 601755 - DNA, 948 bp, Homo sapiens
gccgccgccgccctctgccagcagctccggcgccacctcgtggccggctgtctccgtgcgggcgggatgccctggcgctgacgggcgctggcgggggcggccgagctgctcctgctgggttgcgactcacgtgctccggcgtctgcgcttccccatggggctggcctgcggcgctcttgggcgctctgagattgtcactgctgttccaagggcacaccgcagagggatttggaattcctggagagttgcctttgtgagaagctggcaaatatttctttcaattccatctcttagtttcccataggaacatcaaggaaatcatgaaccacactttggtaatgaagagttagactgccacttcctcgatgacaaggtcttactgccaaaggacattctggaccagcaaacttacatgaagatttcttcttctgatgataaggatgccttctatgtggcagacctgggagacattctaaagaaacatctgaggtggttaaaaagctctccctcgtgtcagcccctttaatgcagtcaaatgtaatgatagcacaacgcatcgtgaagaccccttgctgctaccgggacaggattagaactgtgctagcaagactgaaactacaggtaggtgcaaagtctggggtgcctccagagaggatatctatgcaaatcctttgtaaacaagttttcaaaataagtatgctgctaattctggcgttccggatgactcatttgatagtgagttgagttgacagaagtcgccgagacatccaaagcaaagtgtttggattgcaccgatattccagagctgggacacagtacattgggccagcagaacacggtcttggacggggaggcaaatcatgggggacccccgtagacggcacaacggacggcggataacgcaaaacaggccaacaaattaagaggcaaagaaaaggcagcaccgaa

SEQ ID NO: 601756 - DNA, 245 bp, Homo sapiens
ccacgtgatatgaaaagggaagcgcttgcaaccagactgtcgacggtgttcagccggtcttctgaccggttcactcgtcgtcggcaggccagcatcgtctgaggccgccggataaaggcttggggaatgtggctcctccgggagtgttatagcccctcgcacaatacggcgcgcctcgggcgaggtccgcacttcggtaaggatgctggcgtaatggtcgtaagcggcccgtcttgtaacacgga

SEQ ID NO: 601757 - DNA, 248 bp, Homo sapiens
tgtctgggcgcgcgtagcgtatgatgggcagtggagggggctgcatatgcatcctagtgctattactattctggagtatacgtagccgtgtaacgtaaagaaccgtgtacctctagaactatagctagcatgcgcaaatttaaggcgctgatatcgatcgcgcgcagatcggtcatgatgatcatggcaattggatccatatatagggcccgggttatacttacctcaggtcgacgtcccatggccat

SEQ ID NO: 601758 - DNA, 189 bp, Homo sapiens
cgctggtcctatattcaatcagtgttgcgtgccatggtactgagatacggatgacgagaaataggtcgacagtctctgcgactccgctgtcttctgggatgacgtcccatgttaatatcagtactcccacgttaagtaacatagtttccacgattaaataacagttgtcgcctgtggaataagtagaga

SEQ ID NO: 601759 - DNA, 249 bp, Homo sapiens
tctagaggtatccgctcggcaccttcaatattcagtggcatcatcaaagattcataagatcagtacacaaagagttataatcccctaacacgacatcctttaatgttcttgtggcgagcccaacctgtgccatcaattgaaggttctctcactcaactgaaacagatcaacacacatgtggtatagtgcaggagcagtctcagagtcccatgaacgcatcctctataatcctagtgggcggtatgggat

SEQ ID NO: 601760 - DNA, 296 bp, Homo sapiens
gcagagtgtcagtgcccaaaggaggtcggttgatagtgcttaccaaacatgaagtatggtgtcataggaataatctatatccaaaagatttttccaaatagggctgtgtttaaaacaacacacaaaccaaaaaacgcagcagtgattatagcgaggatcacactctaagtggagtcacggagtgacacaagcttcaaggtcacgctcgtccgtccatgcagtgaaagtgtaaacttggtcacacgtgtgtagtatcaccagatgggtcaaattgcttgtcatatcctccctgtggc

SEQ ID NO: 601761 - DNA, 350 bp, Homo sapiens
cgcgcggtctccctttccccggggagttagagaagactctgttcctccacctcttgtggaggcctgacatcagtcagtctgcccgtagttatccgagcctaactgcccgtagttatccgtgcttcagtgtcacgctctagtctgccttcattttccatcctgtacacctggctctgcttctagatagcagtagtaaattagtgaaaatactaatagtcctgatatcagaaataatggctaagctgtctttctctgtctcctctccctctctgcctcggctgccaggacggaaggccctgtcagtgaacactaccatgtgactactatactgagtactcacatcttactcc

SEQ ID NO: 601762 - DNA, 149 bp, Homo sapiens
agcggagtggagtcgcgggcacttccgctccaggaagagggggcgattgtcacggcaccatcccctttacgagagcaaggcactgtctggctcgaagcagtcccgtccggccgtctgctctctaaggctactcagatctgaattcccgc

SEQ ID NO: 601763 - DNA, 139 bp, Homo sapiens
atcatcaaagtgttggtgttgtttcagcaaagtccctttggagggctccagatgacctgtaagaagtggatcatcagatcacacaggagtaaaactggtaaagtaattaaagggtagttattttttctctgctgacagg

SEQ ID NO: 601764 - DNA, 675 bp, Homo sapiens
gcggggatgaacaaaacgaacaagggggtcaaagcggtatcttccggcaaattcccttaatgccaactcgtgttgtgcactttcttcaaccaacatattttaatacacaccatccttgtgtaggatcgaaagccccatgagacaaataagaaaactggacttttattgacaatatgagaggcaaggttccttcttactaagcaggttgttcaaacgattctcgacaaccagccgtggaactccaggagcacatactctttcatttcttacgatgagtgactgctttgttcagcagtaggtccctgatcacacttgtcattccatcagccaggtagtaacctcacttctcccctgcgtggagggttttggatcctcatatcgcatatggttggccaagcttcccagagcagggtcagtacatcttggcccattaggactgacagttggatcccagctctttggtcggccaagtcgagcagtgctcttgagatcaagagttagagacctgtctgaccaacatggtagatccctgtgtctacaaaacatacagcgattagccacgcaaggtggagcacacctgtaattccagccactcaataggctgaggcatgagaaaactttgactacagaaatcagaggttgcagtgatccaagattggacaaccgtgctccagc

SEQ ID NO: 601765 - DNA, 182 bp, Homo sapiens
gcggccgcctactactactactactgctcgaattcaagcttctaacgatgtacggggacatgtatattttctatatacaaaaacaagaaaggcgttttgagcccctgtgctcaggcccactcccacactgtggagtgtactttcatcttcaataaatccccttattccttccttacaaaaaa

SEQ ID NO: 601766 - DNA, 1402 bp, Homo sapiens
tcagtcatccatcttctctggaggctgcagaacagccagatccactatcagctacaacgcaggagaaagatgaggaccactgcagctcccgagggggcacgacctgccagctaacatcacctactgctcccgaccatgcatgggtccctgtaggctgatcagttctcgcaggcattttctgtcaagctctattcgctagagacatcaatcatatccaggcatctactacacggtgaacgggactctttctggttgtacaagcatatgacaatggtacataggtacaggccagttgcgcattttctggacacacagctcggaatcgagtgtatatcaccacatctgctgtagtgcaatctcagcgcagtttgggaacacgcactggtgtacagggaggcactagcatttcgactcaggcctgtcaccttgcttaagccgtatcgtcttacacattatcactttgaacacaggacctatataaaagctgatacattgcgtagtcaccacctaaccaatgcgttaacaagcatgctccacttggccagcggtggctttgcccaccactactagcgaaacatacactttcggaacggcccaattcagttctccaaacatgtgcctcatccccatcgtcatacacccggttcatctgtcgccctttaaactatgcgttaccgcacacgttccggcagactaggcgcgccattacggctactgcgtcgtggtgccaacgcgcagaaccgctactgctgggcttccgtagaaaactggccaaaagaatggtgccctatatcgtgacaacatggagcgattactacccccaggcccgctgcacaacaattctactacaaacactggtaaagccattacccaaatctggcgcaccacggcagacaacactatatggcgacgcagacgccacaggttgaattgccccagtagattacagccccaacatgcggcggaacagcgcgcgctcaccctcagaggcaccagagcactttaccgcccgtgaggggtatacctcatattaccctgtccacaacaccgtgcgttaccctcgcgcaacctggccatcactttatagccccgtatcaccgtattacggctatcacaacggttgggcacacaacacgcttcgtcgacaagcgaccaacactcccattgaggccagctttttgaactaaccatctggcatctgccaaacaccatatctgcaaacgtcaggccctagacgtaatcgtagtaaagataatgccacacgcacatcagggacattacgtagacgccggcatacaacacaggacggaaaacaaatagtcgcccacgacaaagtagtcaacaagtcgctcagtatacacaccagtgtgttgagaccattatgtgacaatatacagaaaac

SEQ ID NO: 601767 - DNA, 165 bp, Homo sapiens
  misc_feature (97)..(97): n is a, c, g, or t
  misc_feature (104)..(104): n is a, c, g, or t
  misc_feature (125)..(125): n is a, c, g, or t
attcaagcttctaacgatgtacggggacatggcagccatccgcagggccagcgccatcctgcgcagccaggagcctgtgatggtgaagaggaagcgngacccgnccccaccaagagctcctgagnccccctgcccccagagcaataaagtcagctggctttctca

SEQ ID NO: 601768 - DNA, 134 bp, Homo sapiens
caaagtaacatcagatgttgtgcctcctgtccttgatgcagccaggtggtggtggctgtagtgcggggtcctcttagctatctgtagatccctccgcaggagctccgcgtgatcatgctctcggtgcttgctgg

SEQ ID NO: 601769 - DNA, 158 bp, Homo sapiens
gaggacaccccgttgccaggctgagggcagtggcggggtcttgtctcactgcacctccacctccccagttcaagcgattctcctgcatcagcctcctgagtagctggaggcaggattacaggcccctgccaccaagccccggtgccgatgaatagcga

SEQ ID NO: 601770 - DNA, 198 bp, Homo sapiens
  misc_feature (157)..(157): n is a, c, g, or t
ctggggtgatctagaggatcccgccacggtagatttacgacagcctttctatttataagctgaaaacagaacaaaagaaaaaaaaaatgcaacgcaaagaaaatgagttacttgcctaagggtacgtagtacagggctctgtccatgaccgccctgnggcctctatgggcactggctcctattcctctttcagaagat

SEQ ID NO: 601771 - DNA, 383 bp, Homo sapiens
ggggatttggccccccgggcccaaaatttgggcccggggtttcttgggcccggggttggcccccccggggttaaagaacccggggtgcccttttttttgggggccccccccccttgcccaaggtggaaaaatccggggggggttttggaccttccccttttttttgccccttttccaaaggggggggggtttttccgggggggggacccccccaatgggcccaaaccccccttttagggggggggctttttttttttttttatttccggggaaaaaaaaaccccttttaagccccggggttttctttaaaattgggatggggggaagggcctttttggtttttgccgggtttttccccttttggtttttggggttaaaccgga

SEQ ID NO: 601772 - DNA, 188 bp, Homo sapiens
tctgggtcttcagccttcagggctggaaccggcagcagcatttctcgggttctggggccttcagactcagactgggaccgaaaccatcagctctccggggcctccagctggccaacgacaggtctcgggactggccccttccataagtgctggagccaggtcttcaggataaatctctttccacctag

SEQ ID NO: 601773 - DNA, 165 bp, Homo sapiens
gcaccttaaccaccagacaaccttaggcaaaccattttacccaaataaagtatagcatagaaatgagactgcgcaatagatatagtaccgcaagggagagcatgagaaagtataagcccgcatatatatagcagggactgaacccctatatccctctgcataatg

SEQ ID NO: 601774 - DNA, 474 bp, Homo sapiens
  misc_feature (93)..(93): n is a, c, g, or t
caaatgggaaggggctgggccctggggggggtcttcttgtgtttttatcgcccctaaaaaatatgtctctttgccggagccgatatgcccccnagggcttttggggtgcacgcctctttttttccccccccaaaaacaaatatacactccaagcctttttggccttttcccttggggaggggccccctgtagtatttccctttatttggtgggggccagtggatgtgaaacctgtaaatagcttgtgctcaacctcctttgggtggaaagggtgggtgcaggaggcagcccccccccccaaagccccctggggagtttttcctttttttttttaactgtaactgagggggatcccaggtttggggatgggggcccccttgggccccaggattttggttgtttcaggggtacccatgccccctgccctcgcctggaatcagggtttttgcttttttttaaatgtttcccgaaata

SEQ ID NO: 601775 - DNA, 876 bp, Homo sapiens
agaatgtagttgacaggttttcctgcccattagtactttgaagatgtcatcccattgtcttctgacctctataattgcactgagagatctgctgtcagtctgttatccttccacggctcaagtcacatgtgtttcctccttctcgctctttcacgcactttcctcttcgtctctggtgttctgaagtttcaacctatactgtcactcaagtcaccagcatttcatttttcatctcattctcttccaggcactccaagttccttccaatctgcaagcatcacatgtctttctccaggggcacatgtgggcaaaccacaaccagatgttctcacacacccatcccacgcggccacacaaataaacacacaacatcacgtctcggccacagatgtcggggcacacctcctcatacagctacctgctgcagcacttcatccctctattatcgccaaccctggggtgcccctcctggcggcatctggccacacgccgcccaccttgtacaaccctgtgactccagcactcacccactcctcaggcacccattcctacgcgacaccattgcccttccctagaacacagttcggttcacgtaccactctggtcaaccggactccactggtcggcctcgcaccattgggcgcgcagatcatgctgtacattccgcaactggtccaccactagccatgcgtcatcccctgggcctttcatccactaccgtctgctgaaggtcacacactagccccccctgctacctcttgcgcgcaacagaactgacgactcaccggaagttccatctcgtctctcggcgacactcttgctgccaccacaccagtccactcagtgcacagcgcctcgccctatcggcaaacactc

SEQ ID NO: 601776 - DNA, 1344 bp, Homo sapiens
gtgagacggagtctctgatcgacctaggcatggagtggagtggacccagatcttgagctcactgcaacctcacgactccacgggttgacagaccacttctcctgacctcagacctcccggagtggctgtgcgactgcacggacatgctgaccacctatacacatggcctcaatctcctcgctgatgactctctctatgcgctaggacgatggcggctactcccaccgagcttgcagccacggacaacgagacacatcagacacctccactgccacctccacgacgactgaaacatggacacccagtccgtccgcgcacgtcccccacaagcctgcccgcggaactcaacaagagaaggtgaaggccaagcgaagacaccaagccaagaacgccaccaacagcaatgacaacacaaaactcaacgacacagaaccccactgaccctacggacacccagcacacaccactccaccacagaacacgtcacacacacaagcaccacaaagcgaaccaggaggaacacaccgcacagccccaccgccccacaccagccccacacaccacgagaaccaggcaccacgccaccgcgagagcgagcgcaccccgcccgccaacgagcaaaggaacccgccccatgccccagcacaccaccaccttcccatccctcttacaataccctcactcacaacctatctaacgaatcaacaatacctatctataacaacacaatcatacaaacacaaaaaataaaatactccactatcacagcataacttcacaccaacgaatacacacaaccatcaaaaaaacacagggacacacaccgggtgggagagaaacacagagcgcggaccaagcgcaacgcacgaacaggcgagagcaacagacggcaacgacagcaagacgaccacgggggggcaggcggcagacgccgccacaggcgcaccgcgcacacagcacggacagcacgcacggagcgcccgacgcccacgcggcgagggggagcaggcggcgcggaagggaccacccacgcccccgcacaggcgcggcgagaaaagagaacacgacgcggagcagcacgaacagagaggcgaccagagcggagaccgacgagcgccgacgacgggacaggagcacaagaaagcggccaaacaggcgccgtacggagaggagggcgggcgagagaacgagcagcgcagacaggcggagaaagcggcgcaggagcgaggcggggcgccagcggcagcgaagcgagcgagcagcgcagcgggcgcggacgaggacgggcgccagcggagcgcgtgcaggacgccgccgacgcgaccgagcggcggacacgcaaaa

SEQ ID NO: 601777 - DNA, 101 bp, Homo sapiens
actagtgttttcctgcgcccactccggttgtcctgcgcccactcaggttttcctgcgcccactcaggttttcctgtgcccactgtggttttcctgcgccct

SEQ ID NO: 601778 - DNA, 442 bp, Homo sapiens
  misc_feature (329)..(329): n is a, c, g, or t
  misc_feature (350)..(350): n is a, c, g, or t
  misc_feature (399)..(399): n is a, c, g, or t
  misc_feature (430)..(430): n is a, c, g, or t
tcctaatttataaaatggggatattaaaaaaccctgacactagtccttcaatgtaaataaggctaagagagaaaaataaacttaataaaaaccctgacaactgtaggtctatagcatgctcagcatataatagacactctatgaattgtagcaattattttattactgagtcagggattttaattgattgtctcagcatagatggcttgttattaagtagtaagacataaagcagctttctcatccttacttatgaaaagcttcttgaaacaataatgatttttggggatttacataaaattaatttgggtggaaatagtcagccttgnggtataggataagggtacgcngggtgtggggggagtcgcgggctcatggttcggtggactcaaatgtgtnccccaaaacattgtggagggggagtccgtgncccttctacaat

SEQ ID NO: 601779 - DNA, 115 bp, Homo sapiens
ccaacgataaggtatcagtagtgacgcccatctacactggcagatgtgatcctcagaaactcatctcgaatgaagtacttatgccctaggtcacgcgtggtcctctccgggctcg

SEQ ID NO: 601780 - DNA, 712 bp, Homo sapiens
ttcccacgtacccccgaggtgctccgtctgctctgagcccatcatgcctggcctgccgagatggagactgtgcgagtggtctccctgggacacaggacttcccacatgaagtgttacaaagtgtgaggacttcgggaagccccttgtcgattgagccagatgaccatggcttgcttccccctggacggtcacgttgctctgtcggaagtgcccacactggttagagccccagacctgagtgaggacaggccctcttccaggccgcgagtccatagccgcccttgtggacctacacgcacactgtgacacattcctgcgccgcccacctcagttatctgctttgtgatgtctacgcccctcccactttccgacccctccctagcatcccaacggtgccctgaccccggagcccagcagtggtctatgggaatgcccggatccccgccctgggcgctcttggtcctctgctccacgtcctcgccacgggattgcccccccgtctttcccgacacccccaccctgagcgggggcaccccagtgtttagggcttctgctttccctgctgcacccgcgccctcgggcggccccccgagcagacctttgtactttgctttcggagggcctgggagaccctcccggacatttccaccctcccccctgctgcccagtctgtagctatagctaccaataaaacaaaaccttgttttccaga

SEQ ID NO: 601781 - DNA, 737 bp, Homo sapiens
  misc_feature (15)..(15): n is a, c, g, or t
  misc_feature (134)..(134): n is a, c, g, or t
  misc_feature (138)..(138): n is a, c, g, or t
  misc_feature (175)..(175): n is a, c, g, or t
  misc_feature (188)..(188): n is a, c, g, or t
  misc_feature (300)..(300): n is a, c, g, or t
  misc_feature (359)..(359): n is a, c, g, or t
  misc_feature (362)..(362): n is a, c, g, or t
  misc_feature (370)..(370): n is a, c, g, or t
  misc_feature (374)..(374): n is a, c, g, or t
  misc_feature (384)..(384): n is a, c, g, or t
  misc_feature (392)..(392): n is a, c, g, or t
  misc_feature (394)..(394): n is a, c, g, or t
  misc_feature (398)..(398): n is a, c, g, or t
  misc_feature (412)..(412): n is a, c, g, or t
  misc_feature (418)..(418): n is a, c, g, or t
  misc_feature (420)..(420): n is a, c, g, or t
  misc_feature (427)..(427): n is a, c, g, or t
  misc_feature (447)..(447): n is a, c, g, or t
  misc_feature (453)..(454): n is a, c, g, or t
gtccaagaactatanactcatttataccaggaaacagacaagagaacaagaggctgccgaagacaaaacttctctgcaagcacctgtgcacagcaatgtgcgtgggcatctgtgagaagaagagaatctgtgangttngagcaagcggcttcccaagatgtaccgaatatctcanctgatgtcaacancagtagcaagttcttccaggtgtgcaaacgacgaatatgctggagagctgtctcccagcgtgcaatatttcccaagtttcacctgtgattccctggatggtaccattctttngaatgcggtccatagatcccctgacaggctccactatacctgtcgccgaagtcccagantcntcaccaangggntactaatatntggcctgnangacnagcttcctgtgcgncaaaananggcaacntaactctgaaccaatcccanaccagnntatgtataaggagaccttagtagagagatatcgagacagagaacagacgagaactcgtggccatttccttttcttactctcttcaacctcagtacctccaaatctgtggctgcatggaagtatcttgtggtgacatcaactcttctccaagtgaagacaactggttgaacggggaccaggaggttggacaacagaccatttgcaattggaaatgatgatttagactgttcttctctgactggatgactgggagtcaggaacagatgactgcagagtctgtgac

SEQ ID NO: 601782 - DNA, 154 bp, Homo sapiens
cgcatatgttattttcaatagcaacaacaacaacaacaacaaaagattccgagaataattctaacaaagatatgtaggaccttatgagaaacgggtaaactttatgaaattttaagaggtccacatgaggctgagccggtggctagctatatcc

SEQ ID NO: 601783 - DNA, 239 bp, Homo sapiens
ctgagaggatcccggcttacgcgctgctgggccttaccgcgtcactgactacggtgccgtgtgtgcggtgtcttggtgtgtgtgctgtgtgctacgtgtgtgtgctgtgtgtgcatgtgtgtgcgtgtgctgtgcgtttgtgtgctgtgtgctcgtgtgtgtgctgtgtgcgcgtaacgggccacgcagacgcgtcacgggccagcagggtcacgcagctcgcactcgtcaatcatggt

SEQ ID NO: 601784 - DNA, 180 bp, Homo sapiens
aaacagactataatcttcgtactgagaggacacagacacaggagcccttctcttaataggcaagattctggaacccaggggcccctaaaatcccagtataatataccaataccctagaagaaaacccgagggacaacagattccacaggacacgcaaggctgccctgtaaggtttcaatg

SEQ ID NO: 601785 - DNA, 682 bp, Homo sapiens
aagcactgggggggactttacactgtgagcctaaccctggctacagtcgttccccgcggtggcgatcgggccctttaccgtgcctatgtcctgctagtcgtcctcgccatgctgtctctagactgttcggactatgcgcggtgcatgaactggcaccagatctcttatcaagtcctcacttttgcagtgaacgtgacatctgagctaactatcatggaaggggttcatgatgaacagctggaactgaaagaacgattgtagagctgctcactggctgcaaggaacctgcattacatccaggagatcttgtctatctagctcgagttgaagattccataccagtgtcagagatcgttgctagcacgtatgctggatgagagatagctatagttcacccgtgcttgatgatccatgaagtgcatagtgggcctatcaagttgttgaccacaggagataataatgcgaatgatgacccgggcctctataatcatggacgacattcgatacatatgtaggacgatgcaggagagccacgagatctggtcattatgacgtactgggacgaccctatgactgagtatctacaatatgcatgcagtctcctgttgctgggtcactgagcctgacatctcgggagtgctgcttgatgttctggcagatccagactttcttactggtggtg

SEQ ID NO: 601786 - DNA, 645 bp, Homo sapiens
  misc_feature (15)..(15): n is a, c, g, or t
  misc_feature (109)..(109): n is a, c, g, or t
  misc_feature (113)..(113): n is a, c, g, or t
  misc_feature (150)..(150): n is a, c, g, or t
  misc_feature (163)..(163): n is a, c, g, or t
  misc_feature (208)..(208): n is a, c, g, or t
  misc_feature (267)..(267): n is a, c, g, or t
  misc_feature (270)..(270): n is a, c, g, or t
  misc_feature (278)..(278): n is a, c, g, or t
  misc_feature (282)..(282): n is a, c, g, or t
  misc_feature (292)..(292): n is a, c, g, or t
  misc_feature (300)..(300): n is a, c, g, or t
  misc_feature (302)..(302): n is a, c, g, or t
  misc_feature (306)..(306): n is a, c, g, or t
  misc_feature (320)..(320): n is a, c, g, or t
  misc_feature (326)..(326): n is a, c, g, or t
  misc_feature (328)..(328): n is a, c, g, or t
  misc_feature (335)..(335): n is a, c, g, or t
  misc_feature (355)..(355): n is a, c, g, or t
  misc_feature (361)..(362): n is a, c, g, or t
gtccaagaactatanactcatttataccaggaaacagacaagagaacaagaggctgccgaagacaaaacttctctgcaagcacctgtgcacagcaatagaatctgtgangttngagcaagcggcttcccaagatgtaccgaatatctcanctgatgtcaacancagtagcaatttcacctgtgattccctggatggtaccattctttngaatgcggtccatagatcccctgacaggctccactatacctgtcgccgaagtcccagantcntcaccaangggntactaatatntggcctgnangacnagcttcctgtgcgncaaaananggcaacntaactctgaaccaatcccanaccagnntatgtataaggagaccttagtagagagatatcgagacagagaacagacgagaactcgtggccatttccttttcttactctcttcaacctcagtacctccaaatctgtggctgcatggaagtatcttgtggtgacatcaactcttctccaagtgaagacaactggttgaacggggaccaggaggttggacaacagaccatttgcaattggaaatgatgatttagactgttcttctctgactggatgactgggagtcaggaacagatgactgcagagtctgtgac

SEQ ID NO: 601787 - DNA, 950 bp, Homo sapiens
gcacagggtcgaggtcggtagtgtggtgtgactcctccgttccttgggtccgtcgtctgtgatactgcagtgcagccattgcagaaacgcaggccccgtccggcggctcactggacgaggcgcctcagttactgctccgacgcggaacccagtaccaaggattttctattgcagcagacatgctacgagtgaaggatcctaagaagtcactggattgttatactagagttcttggaatgacgctaaatccacaaatgtgattttcccattatgaagtttacatctacttcttggcttatgaggataaaaatgacatccctaaagaacagcgatgcaccaaatagcctgggcgctctccagaaaatgctacacttgagctgacacacaattggggcactgaagatgatgcgacccagagttaccacaatggcaattcagaccctcgacggattccggtcatatgagacattgctgttcctgcatgtatacagtcgcttgtcaaagggttgaagaactgggagtcaaatttgtgaagaaccctgatgatggtaacactgaaaggcctggcattcatcacggatcctgatgctactcgcattgcacattctgaatctaaacaaaattggacccttaatgtaagagctgagcacattctcctacgcgatccagccgacagggcgaccactgtattccagatattttctgttccagcagcatcttgggctgatttgatcactgcccggatccacataatcttagccattccctatctaatcagtgcccctacaactacgtgcagtcatctggtgaagcgcagtaaaaaggctgaacataggagaataagaagaacataactgcactacagcgcccaccatcaaaagacctcaacagacctaacaaacatagaaaggcatccaacgaactcctacaggaaatatcacacgacgcag

SEQ ID NO: 601788 - DNA, 151 bp, Homo sapiens
tgttatgcactgctccgatctcagtctagactgcaacctctgcctcctgggttctagccaattctcatgtctcagcctccagagtagatctaggattacaggcacctgccacatacatccagctaatttttagtgtttattagtattgatg

SEQ ID NO: 601789 - DNA, 259 bp, Homo sapiens
cttcttcactggtggaggtttaaaacaacagctgtgtacacacgcatgatactgtcagcataaaaaggatgatcactgatagaattacactagatgaatctcagaggtgtacactaagtgaaaagcagaccgaagactactattaaatgattccatctatatgacattttgggaaagggcaaatcacagaagcagaaaacagatctggggacttggtggtaggatgggttcactgcagagagggcaggggaatcttagt

SEQ ID NO: 601790 - DNA, 1036 bp, Homo sapiens
  misc_feature (46)..(46): n is a, c, g, or t
  misc_feature (117)..(117): n is a, c, g, or t
  misc_feature (121)..(121): n is a, c, g, or t
  misc_feature (124)..(124): n is a, c, g, or t
  misc_feature (141)..(141): n is a, c, g, or t
  misc_feature (143)..(143): n is a, c, g, or t
  misc_feature (381)..(381): n is a, c, g, or t
  misc_feature (414)..(414): n is a, c, g, or t
  misc_feature (425)..(425): n is a, c, g, or t
  misc_feature (434)..(434): n is a, c, g, or t
  misc_feature (444)..(444): n is a, c, g, or t
  misc_feature (449)..(449): n is a, c, g, or t
  misc_feature (452)..(452): n is a, c, g, or t
  misc_feature (456)..(456): n is a, c, g, or t
  misc_feature (468)..(468): n is a, c, g, or t
  misc_feature (476)..(477): n is a, c, g, or t
  misc_feature (496)..(497): n is a, c, g, or t
  misc_feature (503)..(503): n is a, c, g, or t
  misc_feature (508)..(509): n is a, c, g, or t
  misc_feature (511)..(511): n is a, c, g, or t
  misc_feature (513)..(514): n is a, c, g, or t
  misc_feature (521)..(521): n is a, c, g, or t
  misc_feature (526)..(527): n is a, c, g, or t
  misc_feature (531)..(531): n is a, c, g, or t
  misc_feature (538)..(538): n is a, c, g, or t
  misc_feature (540)..(540): n is a, c, g, or t
  misc_feature (544)..(544): n is a, c, g, or t
  misc_feature (556)..(558): n is a, c, g, or t
  misc_feature (563)..(564): n is a, c, g, or t
  misc_feature (566)..(566): n is a, c, g, or t
  misc_feature (569)..(569): n is a, c, g, or t
  misc_feature (573)..(574): n is a, c, g, or t
  misc_feature (582)..(584): n is a, c, g, or t
  misc_feature (588)..(588): n is a, c, g, or t
  misc_feature (594)..(594): n is a, c, g, or t
  misc_feature (600)..(600): n is a, c, g, or t
  misc_feature (602)..(602): n is a, c, g, or t
  misc_feature (608)..(608): n is a, c, g, or t
  misc_feature (610)..(610): n is a, c, g, or t
  misc_feature (612)..(612): n is a, c, g, or t
  misc_feature (618)..(618): n is a, c, g, or t
  misc_feature (631)..(631): n is a, c, g, or t
  misc_feature (634)..(634): n is a, c, g, or t
  misc_feature (639)..(639): n is a, c, g, or t
  misc_feature (655)..(655): n is a, c, g, or t
  misc_feature (662)..(662): n is a, c, g, or t
  misc_feature (664)..(664): n is a, c, g, or t
  misc_feature (668)..(668): n is a, c, g, or t
  misc_feature (682)..(682): n is a, c, g, or t
  misc_feature (686)..(686): n is a, c, g, or t
  misc_feature (690)..(690): n is a, c, g, or t
  misc_feature (713)..(713): n is a, c, g, or t
  misc_feature (724)..(725): n is a, c, g, or t
  misc_feature (738)..(738): n is a, c, g, or t
  misc_feature (751)..(751): n is a, c, g, or t
  misc_feature (756)..(756): n is a, c, g, or t
  misc_feature (761)..(761): n is a, c, g, or t
  misc_feature (765)..(765): n is a, c, g, or t
  misc_feature (767)..(767): n is a, c, g, or t
  misc_feature (773)..(774): n is a, c, g, or t
  misc_feature (786)..(786): n is a, c, g, or t
  misc_feature (795)..(795): n is a, c, g, or t
  misc_feature (797)..(797): n is a, c, g, or t
  misc_feature (800)..(800): n is a, c, g, or t
  misc_feature (817)..(818): n is a, c, g, or t
  misc_feature (823)..(823): n is a, c, g, or t
  misc_feature (831)..(831): n is a, c, g, or t
  misc_feature (834)..(834): n is a, c, g, or t
  misc_feature (838)..(838): n is a, c, g, or t
  misc_feature (842)..(843): n is a, c, g, or t
  misc_feature (851)..(851): n is a, c, g, or t
  misc_feature (860)..(860): n is a, c, g, or t
  misc_feature (870)..(870): n is a, c, g, or t
  misc_feature (882)..(882): n is a, c, g, or t
  misc_feature (890)..(890): n is a, c, g, or t
  misc_feature (903)..(903): n is a, c, g, or t
  misc_feature (906)..(906): n is a, c, g, or t
  misc_feature (913)..(913): n is a, c, g, or t
  misc_feature (922)..(922): n is a, c, g, or t
  misc_feature (927)..(927): n is a, c, g, or t
  misc_feature (930)..(930): n is a, c, g, or t
  misc_feature (938)..(938): n is a, c, g, or t
  misc_feature (949)..(949): n is a, c, g, or t
  misc_feature (953)..(953): n is a, c, g, or t
  misc_feature (955)..(955): n is a, c, g, or t
  misc_feature (960)..(960): n is a, c, g, or t
  misc_feature (969)..(969): n is a, c, g, or t
  misc_feature (976)..(976): n is a, c, g, or t
  misc_feature (993)..(993): n is a, c, g, or t
gccacccggcgcgggtggcggaaagatcaaaagcctcttccccaanccgaaccaacctcagcggggacccgggctcagggacgcggcggcggcggcggcgacttcagtggctgaacnattncancctccgccgaagccggnanccgtaattgcagccccaaacagccggcgctggctgtggtcggtgctggcggcggcgcttgggctcttgacagctggagtatcagccttggaagtatatacgccaaaagaaatcttcgtggcaaatggtacacaagggaaagctgacctgcaaattcaagtctactaatacgaactggcgggttgacctcaagtctcctggaacttccaaccaaagggggccgacactaactgtgtcgngcccaatcatatatgcacaattaaaaccaactncctcttacatnacaattaanaatattaaanaaatnaanaatnttttttttaaanaaaaaatnnaaaaaaattaaaaaaatanntaaaanatatnntnannaataaanaaaannaaantttagtntntttnaaaaaatataannnattannanatntaannttttaaannnaatnaaatanaaatanangtatantnanaaaaanaaaaaaaaatgtntanaaaanatatatataaatattntatttantnatcnttatataaaaaacnaatntttnattataaaaaaattttataattntagatatatanngattgtgttcgtntttttctagtttnttttnaaatnattnanaatttnnaaattcgaaaanattcgttcncnatnatttataaatcatttcnntaatntaaagaanacnaatngttnntatttcgnataacgatncgttttaatntaaatcgtaaantaattatngtaacatttactntantttaagnattaaatcnatcantanaacatacngaattttcgtntacncnatacnatacgattnatttatntccgcgtttaaaaatancgatttctatcgagttaaaaaattttaaaatatttttaatttt

SEQ ID NO: 601791 - DNA, 106 bp, Homo sapiens
  misc_feature (41)..(42): n is a, c, g, or t
  misc_feature (52)..(52): n is a, c, g, or t
gggtcaagcgcacgggctcatggtcactgaagtgtccagcnncgcttttaangaagtaaagtgcgtttatttcatccacaaaagaaagaaaagaaaaagaaaaagt

SEQ ID NO: 601792 - DNA, 541 bp, Homo sapiens
aagcttagtatacctagtaacttaaaaacagacataatgggctgggggcaggtggctcacacctgtaatcccagtactttgggaggccgaggtaggtggatcacctgaggtagggagttcaagaccagcctggccaacatggtgaaaccctgtctctactaaaaatacaaaaattagctgggcattgtggcgggtgcctgtactcccagctactcaggaggctgaggcaggagaatcgcttgaacccaggaggtggaggttgcagtgagccaacatcataccactgtactccagcctgggcaacaagagtgaaagtccatctcaaaaaaaaaaaaaattggggggagagatttttacggaattgtgagtggttaaagaggtgatgaagatgtatgtggttttatatacggagggttgggatattgggtggtattttgggtggtggtttacctggctatgagcatgtaggggcctgggaccaggaggacaggccaacctttaaaaaaattttgtttttaggggagatgtaccagggtataac

SEQ ID NO: 601793 - DNA, 789 bp, Homo sapiens
aaccgatttagagatgagaagtggattgttgggtcagatgaacaatccttccaccagtggtgtgaatggtcacctcccgggagatgcccttgcagcaggtagactgccagatgtccttgctccgcagtacccatggcagtcaaatgacatgtctgtgaacatgctgccaccaaatcacagcagtgactttctgttggagcctcctgggcacaacaaagaaaatgaagatgatgttgaggttatgtcaacagactcttcgagcagcagtagcgactctgactgagaaaggtgtggcatgcacagactccagtgcggcagagttctgtcaagggggaaagaaaagcacagacctaaggagcccatgaaaatcagcgggttttcttcctagagcccgagcccctggttttctatctgttacacaatgtttgaggattagtcagaattactgtagtgtttggttgtacatagcagccctggcatgagactgaagaggaactcacacaactcatggagcatacttagaaagagcactgagccagacgtggtggctcacacctatagtcccagcacctgggaggctgagggattgctgtgagtgtcgggccgccttgagctacagaatgagctgagccacccagggtaacagagataagaacaggcattcggagcgctgtgtgatacttcagaaagtgctcacttgaacaactcaatatatatattgttggtaaataccgttactttggggtaaactaacctggcttttgtttgtcacacaacccaaaaaaaggg

SEQ ID NO: 601794 - DNA, 298 bp, Homo sapiens
  misc_feature (83)..(83): n is a, c, g, or t
acaggatctccgggagcctaaccctatcttcgcctagttaacaactcagctgcaggtggccaacacaagcatcctttgctcanggaagccttcccggaaccacacatccaactctaggacaggctcttcagtggatatgatctcagggaacggcattcctttcttccagagcattggtctcggggccgcatttagaatggcaccctcatgtctaatatggtagggtaaatctgtctccccactccaggcttcaggaatggggccgggcttggctctccatgctattcctggctcccgg

SEQ ID NO: 601795 - DNA, 397 bp, Homo sapiens
ggccaccccaagtacacactcagcatcagccgggaacgtttctcctccggtccccgggttcaggcctcctcagcctccagcggtgggttcaaatgttcctattcggccatctgggctccccccccctacacggaatcatttattttggagccagggcttgaagcagacaatccaagcatccttctaaactatcctcagactggtcaccagcggttatctccagcttatacacggtatcacggagattaatccatgtggctccccgagggtgaggaaccggcggggttgaggcgaaggtctctggtgcaggctggtgcggctctgtgtcctccctctacctcggactctataaattaattttttacgagacagtgtcctatgtaacccaggcgggtca

SEQ ID NO: 601796 - DNA, 126 bp, Homo sapiens
ggaagggaagcccaatggaaaaacccctgaaccgttttattgcaggaatttttttcaaatctgaaactattatttaaaattttgaataagattttaaaaaataaatggcaaagatattaatttatg

SEQ ID NO: 601797 - DNA, 101 bp, Homo sapiens
aactgtgctaggccctgacaggcagacatgctttgatgaaaatgaatgtgagcaaaacaacggtggctgcagtgagatctgtgtgaacctcaaaaactcct

SEQ ID NO: 601798 - DNA, 1683 bp, Homo sapiens
ggagagagagaactagtctcgatttatttttgattttttgggttctagaagggggtaacaggggggtgctatcagggctaaatcagggccctatttaaaagcatttacaggggcaatcaattctaggcacgcatgggcatgcaacacgggggtatggcatcccacaagcatttccagaagcatggcaccggatagaaaaaccccgcgggagcggtgatagagcggagaacacaggtggttgggatatatagaacagctcgcgggacaataggcaactacgaggtaataaaaagaccaataagaggtggaggaacgaggcatcgagagagaggccaaagaagcgaactagaggtgaaaagagttcacaataaaatataatacgcgccacagtgaggagggacataaccaaacccgagcgacaaaaaaccaaacacgacacaaagagcatcacacgcgaataaaaagagacacaacacgaacaaggagtacagaccgctgagaatacatagagacaaaaataaacgagcgggagagaacaaaagctacctgaatcaagaaacacaatgcagccaaacaccacaaaataacaaacacaccgcagacgggcgaaccactccaagaagagacacaaacaccacataaaacgaatacacaaaataaacaaacaaacacgacagagggagcccccacacccagcagccacaacatagaggcacagtgagacataaaaaaagagaaaacagagacaacatctaacaaaagaaaaacaacaaccaaaaaaacaagaaacaaacagaaagatacacaagaggaaagaaacaggcgagcaaatacatgaaaacaacagaggacgaaaaaagagaggacaaacaatgagaaacacacaaaacacaaacaaccacacacagcacaagagagcccaagaacaacaagaacaaacaaacaaacaaaacgaacaaaaacagggaggcaacagtacaacaaacacaagaaccaagaagacaaaacacaggaaccacaacatgcagtagacataggacacgaccaagaaccaacaacgcagacacctcacacggcaacaccccaggcacagacgatcacacaacagacaatatcacaaccaagcacaaaaacagaaaggcacgacaacaaacacacaacaagaagacacactcaaaaaggcaccaacagagatcacaaccacaaccaaaggcacacacaaaccgcagagacaaaacacaccaacagacggagacctacgcgaaccaacaacacgcacaaaagaagaagagacacaacaactaacacgcgaccagccgccagactaacacgccatcacgcgagaaggcgatgcgcacaaacaccagcaacaagcgcatagacgtgcacacggagtcaaaagagagtaccgaccgatccaacaagagcagacactcacggagccacgcgacgatgcggaacaaacgagagctctgtgacactgaacaacggcgatctagcaaccgccacggcagagcccaaaccacacagcgcagcagcagcccggacgcgcggcgcgcacacagctcggcgagcggcagaggcctcgcagccgacctcaccgccaccggtcagcggagcagacgaccagaaactagacacaaacacaacagcacacacaccgaacgcacaccacaacgtaag

SEQ ID NO: 601799 - DNA, 415 bp, Homo sapiens
atgatgttgtttggggcaatgtgatttaatcctctgccttgttaaaaatagactaggccaggctgggcgctgtggctcacgcctgtaatcctagcactttgggatgccgaggtaggtggatcacctgaggtcaggagtttgagaccagcctggccaacatggtgaaaacccatttatgctaaaaatagaaaaattagctggacgtgggggcaggtgcctgaagtctcaagctattcgggaagttgagacaggtgaatcgcttgagcccaggaggtggaggttgccgtgagccgagatcatgccactgcactccagcctggacgacagagcaagatcctgtttcaaaaaaagaaaaaataaaagagtatcctgtttcaaaaaaagaaaagacaacagagcaagatcctgttttaga

SEQ ID NO: 601800 - DNA, 1804 bp, Homo sapiens
  misc_feature (704)..(704): n is a, c, g, or t
  misc_feature (708)..(708): n is a, c, g, or t
  misc_feature (1611)..(1611): n is a, c, g, or t
tgtcggtgctctcgcgatttggtcctattcatagtgacggagagtacttggtccctctcggggaatggatctgaataattaagacgaattctttctctggagaaacacgagaagagccccgtgttcagaagttagagtttagaaaaccaacaccattagtactgtgcaagtcgcagcgtccacaggatgcatcacttacataacagcgtcagtatactcaccgcggtgaacttcatcagaagaggggtcgttctatcgtgcgtgccctcaacgagcgtatgccactgcgtataccttccaattctttcttcacccaagtcagacgtcggtagcgatgcgtgctgtgccctctttgaggggccgacaaagccatagagaataggttcattaccgctccgtggggctcgaatgaagtggtcggtgccgcgatagcgagcatcaaatctatatggccgagcggagacagacatctcgttggtctctatgatataacgcgttgcgagtagaggggagtgtaagcgcgtaaacatcatcccgccgcctagacctcgaggttgtcgcgcccaatgagcgggctgggtgtgccgaagacttgggttcgttttccacctgaggggcagtcctcccacagagcgcgaagaagtgtattataggcccaacgaaaactagttgccgcctctcaacaagacgaggaccacctagtngggngtgcgcccacttcgtggaagtactgtccttttagctagaatcaggccaggccccagaccaaaaggcgcccccaaaagataagacgacaaggttaacaccccatattatccctgtgggcggggtgctttgtccggacgtcgtcaacctcgtaagaacgccaccgacatattatcaaccgtggtcggcgtctaccgctttgggccacccatgtaggtgaacccccaaccgttggctccaaatactccagtagggggcccctcgcacacaacagggcggccgcgacgcgcgccgaatggtcgtgggtaccccccctaattggtatggccggagggggaggagcgcacaatccaaccactaatgaagggggcaatccgtattaaccaatatatagaaaaacctcatattccccactagagttcttagtacaacacaaaccacagccgatgtgtacaccgcatccatttgtctcacccaacactttttgggaggatgacaaacctcttctgtttgtacgacacctgcgtgggggaccgtccttgttcgtttccgcccacggaagaaaaaaattggcccccccccaagaaatatggtgccgtttaactacactggactccccgggggggccgaaggaagcccccacgcgcgttcagtgacaaccaggtggccgaccacagggggggcggcaaccaagaggcggcgtagggtgacgcccctataggtgtctttgtcgcgtccacccccgttgtgctgtagggcacgaacggatctttttcttcgacccctcagcggagcagatatcatttgatgcgcccaacatagtcattcggccgtatcgacagaccaccaatctattactagtggtcggttaggaagtaaatcaccccattataagagagaacagcnggagaggagacgttaacacaatccatgttgggggagccactcacagaagttgtttattcatcataacagcgccccaacgatcgagggaggtaacaatctgacactctcaccaccaagactttgttgttgccaagcaccatacttgtgcgtgggcggcgaaccagatgagcattcttgtggaaaacacctattg

SEQ ID NO: 601801 - DNA, 229 bp, Homo sapiens
  misc_feature (71)..(71): n is a, c, g, or t
ctctagaggtccccgacggtctgacaacagggcattttttcctatcttactctgtgtacaggtgtggaatntctgtctcccaagaggaaatgtgacttcactttggtgcccatggacagaaaattctacctggtgctacataggagaagtttggaattgcacttatataggttggtttttaacatccttgaatttccgagcgtaggaaagaaatttgatcatttgaatc

SEQ ID NO: 601802 - DNA, 413 bp, Homo sapiens
cttgtgctatgctggtgatctctcccgccttcatgtgctttctttgcactgagtctcattctcataatttgcaattatattttgttgcttcttacctactattggccttagatagcagaaagaagagaagtgaccgagagaacctcagattcttcattgaggattggtatagccatgatttcagtcatagcaagcttttgctcaacagcatatgggtgggattttgcaaaaatcctattctgatgaatctcaaagtaaggctggtagcagaagtgagtggtgtgacccttactccttaggtgcgcagaatttaccatcatctctgaaggaggttacagggaagtggtctccccaattctccccatcctccagtattggcccctctcactttagcatatattaattagcagggc

SEQ ID NO: 601803 - DNA, 367 bp, Homo sapiens
tattgaggacctcaaagaacttttgtttatgtgggttatatctgtcaacatttactatgttagaaattaacattgaggtctgggtgcggtgctcacacctgtgatcccggcactttgggaggctaaggcaggtggatcacctgtggttgggagttcgagaccagcctggtgaagccctgtcgtctccactaatattacaaaaatgagctgggcgtggggcgcatgcctgtggtcccagctacttgggaggctgtggcaggagaatcacttgaacgcgggaggtggaggttgcattgagccaggtttcacaactgtgctctaggctaggtgaaagagcgagatgccttctcaaacaaacaaaaaaaaa

SEQ ID NO: 601804 - DNA, 393 bp, Homo sapiens
ggctagttatctgcagcaggagcatgtccttaaggcacagatcgctcatggtattgtttgtggtttaagaatggctttaagcggttttccaccctgggtgggccaggtgttccttgccctcattccagtaaacccacaaccttccagcgtggacgttatgaccatcatgaacatgtcacagtgctgcagagattttgtttatggccagttttagggccagtttatggccagatgtcggggggcctgttcccaacaggaaacttacaatcatggtggaaggcaaagaggaagtcaggcaccttctcaaggcagcaggatgaagagacgagcgaagcaggggagagccccttataaaaccatcagatctcgtgagaattcactcactatcatgag

SEQ ID NO: 601805 - DNA, 365 bp, Homo sapiens
  misc_feature (39)..(39): n is a, c, g, or t
  misc_feature (79)..(79): n is a, c, g, or t
  misc_feature (87)..(87): n is a, c, g, or t
  misc_feature (140)..(140): n is a, c, g, or t
  misc_feature (151)..(151): n is a, c, g, or t
  misc_feature (157)..(157): n is a, c, g, or t
  misc_feature (200)..(200): n is a, c, g, or t
  misc_feature (210)..(210): n is a, c, g, or t
  misc_feature (212)..(214): n is a, c, g, or t
  misc_feature (248)..(248): n is a, c, g, or t
  misc_feature (256)..(256): n is a, c, g, or t
  misc_feature (302)..(302): n is a, c, g, or t
  misc_feature (305)..(305): n is a, c, g, or t
  misc_feature (307)..(307): n is a, c, g, or t
  misc_feature (348)..(348): n is a, c, g, or t
tactatactaaaacattttcaatcattctctcttctctncacatggctgtcctctttcatgtccacatcatcggaaaanagaatganaaatgcaaaccctgtgtgagaggcacatggcactcatattgctcaaacctgcnaaacctccttnggagcnaagggaagcgttttctgctatctccccattttgatagacactnatcacacatntnnntatagcaaaatatttaaaggtctatttccctgcncttcactnatctactaggaaggtatagaattaaaaagctttttttcccccagcngtnancaagaagtattaaaagaatataaaaaatcatatgggtaatnctagaagtactgtaaac

SEQ ID NO: 601806 - DNA, 159 bp, Homo sapiens
accagtttcagaagcgtgtaggacgctttattacagtggcagcagcgccctgggcgaggtctaaccagggggtgggccctgaagccagcccgtgtgtccaatgggtcctcctggtctgcgagaaatcaaacttttgggcacaagtcatgaaagccgaca

SEQ ID NO: 601807 - DNA, 945 bp, Homo sapiens
  misc_feature (666)..(666): n is a, c, g, or t
gctggtgtcggtgaaaacgacccctaaaagccagtatgggaatggaaaagactcgagtatccaactactatgtctgctctagttggacaccgatacgattcggggcgaaccggtccaccactgacgtggcccatctgatctataaactgcggtggacgatcgtaccctaagagaaccattgcaaacaatttgaaggaagagagggctgctggagatgggaaacgggcgccttcaagtatgcctgggtctatggtataaactgatgacgcgtggatgacctgttcgacacagtggggtatctaacatctgggatgatctccttgatgcgcacaactcttggacgatccgatgtcgatagctactcatggtagactatcatgtgtacttgctcgctccagggaagcaacaagaaggaagcatatttaatgccacataagatagctatttgactttgatctaggggggatcagttcgtgcagggggctagtaacgttgttagccttggttcgctggattctcgtttgggcttcgtcctggttcggtgtggggtggtacaatttgtagaagtctcgggtaacttcggtccccaacggtaaatttggagacaggaacacacggaagaagcaatgccgcatttctcggcttgtgaccagcaacgtggagcgntggctagaagacgaacggatacttctgtcgggtggtttaagcacatacacctgggatatcgcaactggaatcccaacacccttatcggagggccatgcaaaggatgaactaagtgatgcggagacctttgctttgagaacgtggatacggtccaaggcgagcctttcacgcattctaatatgtaactggccttcggagtttacgaaacccacccgcaccgagccaggggtaacgctacttctctggtggcccaaatgtatcctggggctctgggtacat

SEQ ID NO: 601808 - DNA, 405 bp, Homo sapiens
agcgtggacatatactcatgtggatcagtcttccctcgtagcgaactcgtattacggaatcgataaacattgctcgtgaccagtgcactaccccaagctgtgtcatatacttgtataacaaaaataccttctatacaaaccttttatttctacttttagctagaaatgtctactatttacagcagttctgtgcattcacgagcagagtgactgtcggtctaggaatacctggtgtacttcgggatgtactctcaggattttacacgcaatgctgggaaatgaccgggacactgaccggaatgaatctcaccagatatataatgtactcagcagagccttgaagtaacggagttaattttccaatcaagtgaagatatctacctacttctctgctggataccttga

SEQ ID NO: 601809 - DNA, 316 bp, Homo sapiens
taggacgttaacagcccgtgaaacactgccatacctctatccgctacaaaatacttacaaaaattagtctggagcttggctggtgcatacctgctagtcccagacactaggtaggctgaggcgggaggatctctccagcccaggagttcaaggctgcagtagactttgattatgccaccgcactccagcctggtgcaacagagcgagaccctgtcctcagaacaaaacaaaacaaaactcagtggtacttagcactggattacatgtcgggtatgggaaagtgaggcgtctaagaagattcccacatctgttgcat

SEQ ID NO: 601810 - DNA, 481 bp, Homo sapiens
  misc_feature (20)..(20): n is a, c, g, or t
  misc_feature (25)..(25): n is a, c, g, or t
  misc_feature (53)..(53): n is a, c, g, or t
  misc_feature (61)..(61): n is a, c, g, or t
  misc_feature (76)..(76): n is a, c, g, or t
  misc_feature (87)..(87): n is a, c, g, or t
  misc_feature (121)..(121): n is a, c, g, or t
  misc_feature (253)..(253): n is a, c, g, or t
  misc_feature (255)..(255): n is a, c, g, or t
  misc_feature (260)..(260): n is a, c, g, or t
  misc_feature (267)..(267): n is a, c, g, or t
  misc_feature (277)..(277): n is a, c, g, or t
  misc_feature (322)..(322): n is a, c, g, or t
  misc_feature (364)..(364): n is a, c, g, or t
  misc_feature (391)..(391): n is a, c, g, or t
  misc_feature (394)..(394): n is a, c, g, or t
  misc_feature (397)..(397): n is a, c, g, or t
  misc_feature (413)..(413): n is a, c, g, or t
  misc_feature (416)..(416): n is a, c, g, or t
  misc_feature (425)..(425): n is a, c, g, or t
  misc_feature (429)..(429): n is a, c, g, or t
  misc_feature (436)..(436): n is a, c, g, or t
tgcacacccattcgaatggntggcntgcaaatagcatccgtcaatctggtgtnaactggcntagggaggctctgcntagcacctgcnatagcggtgtcatgtgggatcgctttggtgactnttcatctgtccttgacagtggctgtcatcttgactacttggttgattggtgggtatgggggacattttaaagggctggagtaattttggaatgtcatgtttatgtcatagaggtagttttcgcatccttgantnaaacngccttanctcctttggnggtataagcaaaactccagggactcggtccgggtatccttttccngtgtggttgcccggtgtcctcgggcctagggttaagtgtgcnagataactactcgtgagtatccagaangtngtncctaataaatgcactngtngtcggtctncttnaatcaantcacatcttacatacagcagtcagagatgagtatactagaatcag

SEQ ID NO: 601811 - DNA, 1147 bp, Homo sapiens
  misc_feature (324)..(324): n is a, c, g, or t
  misc_feature (354)..(354): n is a, c, g, or t
  misc_feature (381)..(381): n is a, c, g, or t
  misc_feature (384)..(384): n is a, c, g, or t
  misc_feature (393)..(393): n is a, c, g, or t
  misc_feature (443)..(443): n is a, c, g, or t
  misc_feature (456)..(456): n is a, c, g, or t
  misc_feature (495)..(495): n is a, c, g, or t
  misc_feature (536)..(536): n is a, c, g, or t
  misc_feature (578)..(578): n is a, c, g, or t
  misc_feature (585)..(585): n is a, c, g, or t
  misc_feature (591)..(591): n is a, c, g, or t
  misc_feature (596)..(596): n is a, c, g, or t
  misc_feature (606)..(606): n is a, c, g, or t
  misc_feature (677)..(677): n is a, c, g, or t
  misc_feature (707)..(707): n is a, c, g, or t
  misc_feature (798)..(798): n is a, c, g, or t
  misc_feature (996)..(996): n is a, c, g, or t
  misc_feature (1000)..(1000): n is a, c, g, or t
gatccacatagggaatgcatggtgtgactacagcaaattatctgcggcctggactgatcacgtcgatgccggtggcggccacttggcgggggcggcgcagactgcattgctactagctgtgcaaatactgcacaaactagcttgagcaacatgggttcggtcggcgagaccgtgccagctacggaagccttcacgcccactggtgccaccagctctcaccgaggcccctgcaccgcctccgtctgcgtagacgctcggtggagaacctcggcacgcaacgtcccggtggacacccaaaattgacaatcgctaggggtgggacantgttggtgtccagtccctgcgcgcacaganatccattctatctccccattctctgcntgnctgccgtgngtctttgtccgatgcgcggagtctctcccattgggatcgcctggtgcacnctggacaatgagnagtattccctgcaggttgttcctgaagttcctaccaccnccaaccagtgaaaagagactttgtatgactagggacaatcntgggccaagactaagtcgctggacggttctaaggtttggccnggcgcgncaacgnattgnatgtgtaaancaccattggtggcaagaacaaccataatggtaatggtaggaggcgaggcaccgtaatccaatagacatggntctcacataaccacatatatgaaaaaccanggagcgggaactcgggaagtcggtgatataaaccgctggtgtttggtggtggctggagagagaaggcatatgggaagggctcacgcggagncttggacggcgtggggaagctgtaaattttcccccatgggtgggggtgtggggaaccatacatgctgaaaacggtcatgagccattctccttaaattgggcatgggtacccgtgttggcgagggctacacttaggttagttagctccaccactaagtggaccatggtgctgcacagtaagggaaacgtaaagttagcnttgncaggtgcggttccgtggcgtgggtcgaccaattgcgagccttgaattcaattctatttgagccctctgccttccaacgtgtacccctagggttaggcctaagtagaaattatcataataagggctcggtaacacagagtggggcccc

SEQ ID NO: 601812 - DNA, 402 bp, Homo sapiens
ttagcggcaagtactgcttttctgggggcaagaaccccctgacccccttctctccatgtgtctacccttctccgcttttctgggggtcaagaacccctgaacccttctctccatatctctagcccttctccacttttctggggtgcaagaaccccccggtcccttctctctgtgtctctaccccttctctgcttttctggaggacaagaagcccccaccccttctctccatgtctctactctctcttttttctgggcttgcctccttcactatgggcaagcttctgccctccattcccccttctcccttagcctgtgatcttaaagacctaaaaccttcctccttatatcaactctactccccccatatttagacctctcacaacacaaactactattcctg

SEQ ID NO: 601813 - DNA, 1153 bp, Homo sapiens
cggggagagctgggccgtgagagcagaacatgtgaggctagtagcgcagtcgtggaaccgtgcccggagtccggtaggcctggagccccacaggcacctactaaaccgcccagccgatctgtgtccccgacatgagtgggccctgctgtggcctccggcctgggcccagtcccctccctgtgtgccctccatggccctgtgtgcctgctgccctcctgcctgtcgagatcgccgcctgatgccgctgctgtggccgctgctgctgctgcttgctcctggaaaccggagcccaggatgtgcgagttcaagtgctacccgaggtgcgaggccagctcggtggcaccgtggagctgcctgtgccacctgctgccaccatgttcctggactgtacatctccctggtgacctggaagcgcccagatgcacctgcgaaccaccagaatgtggccgcttccaccctaagatgggtcccagctttccccagaccgaagccttggcagcgagcgggtgtcattcgtcatctgccaaggcatgagcactgggcaagacacagaggcagagctccaggacgccacgctggcccttccatgggctcacggtggaggacgagggcaactacacttgcgagtgtgccagcttccccaaggggtccgtccgagggatgagctggctcagagtcatagccaagccccaagaagcaagcttgaggccaaggaaggtcacgtacagccgagtgaccctacggacggtggccctctgcattctcgaagagggcgaccacctgcccggatctcgtggatctcaattccttgacctggggcaggcccaacaaactcaggtactcaggggacctagcccggaactggtaatgtaagcaggagggattaaacgtttggtgtccccttcgttagcagaccgacaaaattgcggtcaccgggggagaccattgacacgttgtgagcaatagaagcgtatagagggaaaccgcacggggagtacgggtggacagctattgagacagaacaccaagaacaacaggttacattcccgagattaatgtagcatggtacacatcgtggcaaggtggacccagtgaagagaggatacagagacaccacagggccagcgtaataacggacagacgcagagagccc

SEQ ID NO: 601814 - DNA, 320 bp, Homo sapiens
gcttgctgcttcctcctcctcggctcaccatgccagaccaataagggacgaagagactggtctggacatggtgaggccgaggaggaggaagcagcaagccacggtgaatggatgatgaagtatccatggacttttcgcatcctagtggccaccaagtatatcctgttgcaaaaaatgcatgcctttatgcagtacctgacaagctgccagtgctatagaaatgtgaccgcgcacaagcgtctgctcggcccaactcccagacagcactgctgtacacaattctggacaaaagggagaaacatgcccaccgcacagtcatc

SEQ ID NO: 601815 - DNA, 487 bp, Homo sapiens
caggtgtacgcactgtgctggcctattctgtataatactacaagtagagacacagtagactgaacaaacaagccgtgctgaactgtaggtgtgagtagttgactggccatagttgcagagaaccatatgtgtgttagcaaatttgggtccacagaattgcaaaatgctctcactccaaggatggctcataaacagatggcaaggacaaatggttaaatctgtcaaatccaaggcatttactatcatatgacagagtacaccgtttaccacaattcaaggaaacgcagaaacatttggatgtatttacctgtccaaaaagagatttgtccctcaggaagcatattatatctgtcatataaagggattattaatcaaacttatacataggaatcactagggaagtaacaaaattcaaatcactatacctcacttcagactgattcagctaactcagagatgacaccttatcctgccctaaaaaacaatt

SEQ ID NO: 601816 - DNA, 180 bp, Homo sapiens
tcccagttggaagatgtgcagagacagcatatggactcagtgtgctagtccattctcgtgcggctaataaagacatacccaaaactgcctaatttattaaggaaagagtttcatggactcacagttccacatggctagggaggcctcatgatcatggcagaaggcaaaggaggagcaaag

SEQ ID NO: 601817 - DNA, 940 bp, Homo sapiens
  misc_feature (29)..(29): n is a, c, g, or t
  misc_feature (33)..(33): n is a, c, g, or t
  misc_feature (134)..(134): n is a, c, g, or t
  misc_feature (361)..(361): n is a, c, g, or t
  misc_feature (889)..(889): n is a, c, g, or t
gggggatagggagaagagttaaaaaaaangggnagagcttgcgcgcctaccgggctttgttggaagtgtcatgtactaagcatacatttcatgcacttaaaatgattaaaaatcaattattttgggggtggggncgaagttacaaccatcaccactactgaaatttagaaagttttcatcacgacacaaagaaacgttctatcaattagtggtcatctcctatttcaacctccctgagacattggcaaccactattctactttctgtctctatggggtttgagggggggggggccttcctataggctaactcacataacatacaacttttaaaaaagcttaaaaccaccaattccattttnggcaaattgagcccgaccaaatgctagggtggctgggctttagaattgtggtgcgtcctattgaaatagttggcttagaatttttgtgtggaaggcaataacttggtgaatgttgagagttatgggatgctagtttttgcttttaaagaatgtaaagtggttgttaatcccctccaaacgcagatgcttttccttttaaatcgtgtggcgagcagtgatgtagtgatgaaaaaatccccgctggggtggatttagggggattactttgaggggcgtggcacgtggaaagctcaggtacatctagggttggttttttatttgtgggggggaccccgttggtggtgcgcgcatgggggggaggtgtgtggtaaaaaaggcgcggtagttaggggggagggggagtggggaaaaagtgtagtggtttgtgttttattggcgaacggcggcgtgtttgttggggatgtggagacataatatctgttagcgaggtgtgggtgtgtgccaacgggctgaggtggtgagatgggntgcgacccagaaaagggggatcagtggtggcctgtggtgggtcggcggaca

SEQ ID NO: 601818 - DNA, 1015 bp, Homo sapiens
ggctccgcgtcggtacgcactgtcaggagttgcccttcccagaggcagtggtgatcgtgatcagatgcccgttggtgctgaacactgaagaaacttgtgaatgaagataagtggcgaggcaacggtcaatgtttactcatggactacagatattagaaatttcggatgccttcaggagagtagaaagaggaatattaatagaagccgcagaaattgcgcatcgctcggggaaaggaagtggcaatcgagtcatcgagctattcgaccccgtggagatcacgcgtccgcagaggatgtcccgggatctagagttctaatagaccttcctgcgcataaccgcgaagtggctggtgtggcaactcacgcacttggtgacattgggtatacagatcaagacactcatcagagaatgtacttctccaagatggcaggagactacatctagcctggtggtggtccccagtaatgtggacattgcgcaccacagaggctctcagggatgggccaggaggtggaccccgatgggagacaggaccatcgggaatcttgatcgaatgcctgattgtggtggatcaaatggaacatgaagacgaaggttgtggacggtggttgcggaacctctgtgttgcacctgaagtatgggttcctgattgtctgagtgccggggtcagcaggggatccaggatcagctgagcctgtgcgaagccctgcagagagagaagatcttcctttgagaagcacccataattcagggatctgctggaggaaggaaggccacggttccctggcctggcagaaaactaccaggaagtcatcacgcttttggtatctctgccctgtgaaatcattcagggatcaccgaaatacgagggctacaaagttgggtgactaccgggcgaatgaaatgtctctggaataataagcctaaagagaacgacatgcggagaaggggagaaatggcccactcccctccggggaagagcatgagcctgggagactagactgaggggagcaa

SEQ ID NO: 601819 - DNA, 495 bp, Homo sapiens
  misc_feature (16)..(16): n is a, c, g, or t
  misc_feature (105)..(105): n is a, c, g, or t
  misc_feature (107)..(107): n is a, c, g, or t
  misc_feature (127)..(127): n is a, c, g, or t
  misc_feature (135)..(135): n is a, c, g, or t
  misc_feature (148)..(148): n is a, c, g, or t
  misc_feature (205)..(205): n is a, c, g, or t
  misc_feature (311)..(311): n is a, c, g, or t
  misc_feature (313)..(313): n is a, c, g, or t
  misc_feature (356)..(356): n is a, c, g, or t
  misc_feature (483)..(483): n is a, c, g, or t
ggaggagggcggggtnctgagagaaaaggagaacatcagcggcagtaacaaagtccgggaaatttacttcattggggacacagggggcaatagccactgtgtgcnanaacttttcaatggcaatggnggggtcangggcggcggaggngggggcacattctgcaaattccatagggacgatgcctgcctgcggccaacatggcancacgggggatggctggacggaccaccacgcggcagcaatcatgtcgatggcctgcttgatgtccacctcttcttgatcctcactgctgttgagcttgaggaggatntnttttagaaggtggctccggtacagtactttcatggtgtgaatnatgccaagattcagtggctgcaggacagcagttcagttggagggcagataccaacctgaatcctttccaagtgtggaagcatgttatgagcagagcagttgtctatgagcaagaggatccggcgttncgccctcttcat

SEQ ID NO: 601820 - DNA, 1175 bp, Homo sapiens
  misc_feature (5)..(5): n is a, c, g, or t
  misc_feature (7)..(7): n is a, c, g, or t
  misc_feature (53)..(53): n is a, c, g, or t
  misc_feature (159)..(159): n is a, c, g, or t
  misc_feature (380)..(380): n is a, c, g, or t
  misc_feature (407)..(407): n is a, c, g, or t
  misc_feature (558)..(558): n is a, c, g, or t
  misc_feature (823)..(823): n is a, c, g, or t
  misc_feature (1004)..(1004): n is a, c, g, or t
  misc_feature (1006)..(1006): n is a, c, g, or t
  misc_feature (1151)..(1151): n is a, c, g, or t
tctgnanagacgcgcccatttccggggggctgacgccaggggaaagtgcgggncatatatataaggtcacaaataaataaaatagaccttctgctcagagtgcgccggcgagctatcgggcgtggctgtgccgctgcgagatgcctgccgcccgtgcanagctacacaacacgtcgaccgccgccaccaagagcgtatactgtgagatgagtcaatataaatgaaagcttatatccaaccgagtaagcgagtttcatagtgtattgagaatctgattggtgaggatggtcaatcgcaacacatcgatcttggattctatttcgtctttcgaacatacgatctttggctatcgcgcacgccgtgcaggatagaaattatantaaaggggaagaccagcggtggagcgngaggagacagtattgtctactaatacacacaaacaaaccaatacaaaaaacaaattataaaaatacgcaggcaaagataaagtaagacgatagggatgagcccccatgtcgccatcatacaccgacactccctccccctcctccgaccccnttgctatgatggtatggaagtttccggatagatcgtgtagtgccgtgggcttcaccgtacgtgctacaattacagacacggacttcattgaagcgtttcaactatggacaagatatctgtgctggagctatacacgtacagacaatccgagagaggaccagtactaagtcgctacacgtgtaagagtgatgagcgcacgatatcggagacaagtgagaaactagaagtacgtttgatgtacagatagacaagcggaagagaggangacagacaaccagagtcagactacccgcggattttgtagttagagctcacacagtactccactcgacgtaccaagccactcagcagcagtagcattacacacgcatatacagtacagagaacacaacaacacattcacccatataagtactgcgatcgagttatcgctcacactgatctantncacatacatacggcgcatgtatgtgtgtagatgctctctcgacgctgaatcacagtcgaatatagcatggatgactcggactgtcatatgtatgttagtgatagtgacgtgcgtccgcgctcatggtggagcgcatgagatgcantgacatattacatacacgacacta

SEQ ID NO: 601821 - DNA, 248 bp, Homo sapiens
caatgaaaaaaaggagccagaatattgggatttgaatccaatgatgtcagatgtgactcctttctgagtgatgtggactcagctggggatgctgctatgcggtagtgcaggcaaatctgtcgatactgggtaatggtattttaaaaatccttgctccatatacaatcagtttgataaacaaaagcacttttctttctttaattgaaaaaaaagtagtaaatgagcactgtaaacatttcacagtagag

SEQ ID NO: 601822 - DNA, 122 bp, Homo sapiens
gctaatgcatttatgcaagagaaggaaacaaaaagtataagggtggggaaactgtcttgggggacagatgacctctcttgactgggaaccaagcaaggaggtcactcgtggagatttcctga

SEQ ID NO: 601823 - DNA, 157 bp, Homo sapiens
aatctgaagctggaggattgcatgagcctgggaattaaaggctgcagtgagccgtgttcatgcccctgcactccagccttggtgacagagcacgaccctgtcttgtaacaattaaagaagggcattatgccgcaacgtatagcttagaaatagatac

SEQ ID NO: 601824 - DNA, 335 bp, Homo sapiens
aaccccctggggtcccgacccagaggacagggaatcaaattgttgtcccgtctgtttaaagcttggaacagggagcttttatttctgactccggttcccccccctgtaagatcaaaaaaccctttccccttcctcccctgggcaaagtccttttcagggggtagccctactgatttgccctgatttgtttgttccctgagcttttttaaaaccccgtgaaaattttttttccccccctggtcctcatgcctctaattgtgggggaatgtttgtccaaccccccccccaaacagcctggggttgtttaaaaaaattaaccaaaaaggctgggtgga

SEQ ID NO: 601825 - DNA, 1017 bp, Homo sapiens
  misc_feature (53)..(53): n is a, c, g, or t
  misc_feature (91)..(91): n is a, c, g, or t
  misc_feature (105)..(105): n is a, c, g, or t
  misc_feature (116)..(116): n is a, c, g, or t
  misc_feature (119)..(119): n is a, c, g, or t
  misc_feature (122)..(122): n is a, c, g, or t
  misc_feature (140)..(140): n is a, c, g, or t
  misc_feature (142)..(142): n is a, c, g, or t
  misc_feature (156)..(156): n is a, c, g, or t
  misc_feature (160)..(160): n is a, c, g, or t
  misc_feature (163)..(164): n is a, c, g, or t
  misc_feature (172)..(172): n is a, c, g, or t
  misc_feature (174)..(179): n is a, c, g, or t
  misc_feature (181)..(181): n is a, c, g, or t
  misc_feature (194)..(194): n is a, c, g, or t
  misc_feature (197)..(199): n is a, c, g, or t
  misc_feature (202)..(202): n is a, c, g, or t
  misc_feature (206)..(207): n is a, c, g, or t
  misc_feature (211)..(215): n is a, c, g, or t
  misc_feature (220)..(221): n is a, c, g, or t
  misc_feature (223)..(223): n is a, c, g, or t
  misc_feature (225)..(225): n is a, c, g, or t
  misc_feature (229)..(229): n is a, c, g, or t
  misc_feature (231)..(231): n is a, c, g, or t
  misc_feature (233)..(234): n is a, c, g, or t
  misc_feature (237)..(237): n is a, c, g, or t
  misc_feature (240)..(240): n is a, c, g, or t
  misc_feature (247)..(249): n is a, c, g, or t
  misc_feature (253)..(253): n is a, c, g, or t
  misc_feature (258)..(261): n is a, c, g, or t
  misc_feature (263)..(264): n is a, c, g, or t
  misc_feature (268)..(268): n is a, c, g, or t
  misc_feature (272)..(272): n is a, c, g, or t
  misc_feature (275)..(279): n is a, c, g, or t
  misc_feature (281)..(283): n is a, c, g, or t
  misc_feature (287)..(287): n is a, c, g, or t
  misc_feature (293)..(293): n is a, c, g, or t
  misc_feature (303)..(303): n is a, c, g, or t
  misc_feature (307)..(307): n is a, c, g, or t
  misc_feature (311)..(312): n is a, c, g, or t
  misc_feature (316)..(316): n is a, c, g, or t
  misc_feature (324)..(324): n is a, c, g, or t
  misc_feature (328)..(328): n is a, c, g, or t
  misc_feature (330)..(330): n is a, c, g, or t
  misc_feature (337)..(337): n is a, c, g, or t
  misc_feature (340)..(342): n is a, c, g, or t
  misc_feature (344)..(345): n is a, c, g, or t
  misc_feature (356)..(357): n is a, c, g, or t
  misc_feature (361)..(361): n is a, c, g, or t
  misc_feature (364)..(364): n is a, c, g, or t
  misc_feature (368)..(368): n is a, c, g, or t
  misc_feature (370)..(371): n is a, c, g, or t
  misc_feature (380)..(380): n is a, c, g, or t
  misc_feature (423)..(423): n is a, c, g, or t
  misc_feature (432)..(432): n is a, c, g, or t
  misc_feature (536)..(536): n is a, c, g, or t
  misc_feature (599)..(599): n is a, c, g, or t
  misc_feature (603)..(603): n is a, c, g, or t
  misc_feature (857)..(857): n is a, c, g, or t
  misc_feature (908)..(908): n is a, c, g, or t
  misc_feature (944)..(944): n is a, c, g, or t
  misc_feature (1015)..(1015): n is a, c, g, or t
tttatggggtggacaaataattagtcttacaatttgctagaagcatgacagancttactaacattttgaagaaaaaacagcaaagaaagangtcatcaaccaagntggtatcttgncanccncacagcgctccacaactncntcatactctgtgcncaanccnncctctccngnnnnnngnggggggtgatgcnaannnggntttnntttnnnnngtggnnantnccantngnnttnttnattcttnnnaggntctannnntnncctntggnggnnnnntnnnacanaaaatntgtgttacanaggntggnnaaanttgctttntggntncgggggnttnnntnntgtgctaattnngttntgntaantnngttaaaggngtttttgtttggtgtttgagctttcaagttgaagatatatttnacaggattnttcacccaaagcttgggagctagggcggggggggggttgcagtgggtaactgagttgatggtatgcatattttttctcttggtgttagttccctttgggagggngtgctttttcttttttttttcctctttttgttatatggttcatgcttttttactgcgtttgtntcangcttgcttgcttttgagttgtgtgcgtcaggtgatggctagttgtcaaaagataaccccagtggatatttgaagctgcttttacgagaagcatggtgctgagctgccttacacagtctttttacagtaaccataaaaaactgagtttatttgatcatgtattatcccttctcacataaagtcatattagaggaattctttttaaaagaagctttcaaactagtcctttgggcatttaaaaaatcattatataanagtacacttcttcaatacataagaacaaatattttttctttaccaaaaaanctcatttttaggccaaaataagttaccacttgctgnaaaccttttatggctcagtgctcatccagatatatgagctatatttttttgtacatctccgaaacagaganac

SEQ ID NO: 601826 - DNA, 188 bp, Homo sapiens
cgcactgttggtgttggccgggctggatcttgaactacctgaactcaagtgaaccacccgactcggacctcccaaagtgctgggattgcaggcgtgcgccaacgtgcccagcctgagcatacttttttgatggagcccactcacgaggatgtcggagcgggggagatcctcatcgtaatcgacctgca

SEQ ID NO: 601827 - DNA, 968 bp, Homo sapiens
gcgccaataaattacggctaggtacgaggcttggtgtctggctttcgctcctgccatgattctgaggtctccccagccatgtggaactggtaagaacttggaaggcaacgcctccgaattaaattttgggacccccagtaaaatttcaggaaagcccagaattgatctgagaatgcacaaactcggcatgtctttgacagagaaggctctgtgatttcagcgcgttcattgccctccactaaggagctgctcagcaaagtgggcttcccctctgcgtctgctctctgggttcgtgatactccgtgagtcgacgtttccagatgagtcggcgcccgactgagcgagtgtggaagagctagtctggcgcgtgcctttccccgcgcgcgtctgcgtgatcagcgcaccgcgaggatactgcagatgctgatggctggacgcgctgtatatgccatctcgcaagtcatgcagcacctagagcaaggcagaggcttggccagtggctttgtctcgagctgatttaacagtcgcatgaagctgcctatattgaatcctgggatctgccggatcctctgcacctcttctttggtatcatgggggagccataaagctcttcttggttgatggcactgtgtccatgactttctactactctgccgccgatgtgcaatcttggattgcattttgcccctttatcctaacgtttggcgtttagctgtctcctcacaacttgctggtttcgtgcctccagccgacgagacatatgagatctcccttttgggccaccagctacctccctcacgtgtgaatgtctttgccccccaacgcacgtattttgcaggtggccaggggagacgtgctagatctccccaaatgctctcccagcctggccagttttgttgtggcgctcttagcccaagtgttgatctcctgggggaagaccttttaccttgggaaagagggaaaatcgg

SEQ ID NO: 601828 - DNA, 144 bp, Homo sapiens
tgtgaggaatggggggaacaagtggtcgcaggtatccccatttgcaaggccaccctccctctccaggtccccccacagcaataaaagcgtccccgtgatatccatccgggtgtagtttgaacaaatatattgatgtgctatgta

SEQ ID NO: 601829 - DNA, 1708 bp, Homo sapiens
  misc_feature (620)..(620): n is a, c, g, or t
ttttttcattttttcttttttaaaaatttcaaacggggttacacacgggaaaaggcgtgggtttaggggccgaaattttaattaaactcgtgtacgtgataacttaagggctacagagaatttcatatattttttttataacttttaagaaaactcagaggtgctttataaaagtggcgtggcctcagtgggcctcgtgttccacccgagaaccttctgtggacgcgcgccctcctatagcccttctgcgttgggtgtgagaaataaccgagggaaattagtgtgattctccgagtggcgttaacacaacaagaaattacttaacaccaattaaacactagcctatactcgatgtgccaaatattttctaaagccccatctccatagaaaagagtctcgagttataaccacattcatattgtgcgtcaaatagagagacacgagcaaaactatctctatatttctccccgagggcggacacttctccagtgtgtacaccaagagcggtatcacgtttggccgagggggggcgtgagcgaatctctataacccatctcgaggtgcacaaaatatatcttcatttgcgaaccccctttcttacatgtgtcttccatctttanccgaggtctctcaacccccttttagacgcgggcaaaccttgagcgggaacgtggggcgtacagtgtggccgtgcacaaaagtggggcgggaggactccataaataaaacttctttctccttttttctccacgaggttcttcttattccctctttttctcgggggcccttttggggtcgctgtgggttgcgggtcccccaagatttcttttccccttccttttattcccctttttttttataatctctcaatttttttcacaccaccacacacacacacacttttgttctctttcaaaaccctcttcattgcgggtgcgggggggtttcccccccttgttgtttcccccccttcacggagcttcaggcgctgtgtgcgctccgtggggccttttggcacatggagcacacgaccgggtttctctcccccaactttgtttttgtgtttcccaacacccgccgggaaacactttcgtggtgggaccattgtgggggcgccggggtaaaccacactgcggggcgtcgtggccccattcattttctcgccacccctttcgtggcacacaggggacaccccatacgtctacgccccagggggtgtcacccacaggagcatctgggcgctggttttaggcgggaccgccgcgagcgggcggcgccaacacaaacaagcggcgccacagagcttcccccacaaaagaaccccgcgcgaagagcacaccacgaggaggcgaggcagagaaccacccacaagtgaggtggagggagagaaatctgcggcgcctagataatctattgagagacgccgagccacccccattatcacacagaggagggacaccaacaagctcccgatgcatacccgacatcagatagtaatcaatcaaaaccaatcagcacctcgactgtacaacaaaaccaagccggccgcgaggccaacacacagacaaagaagatatagggggagctccaccactctctatcagaagataggcggacgtccacaacaataaaacaaccaccgcagctgacaaagaagtaaagcagatcatccaacgaccacagacccaccacagtagcaatcacacaa

SEQ ID NO: 601830 - DNA, 1019 bp, Homo sapiens
gcctcgtgccgatggattccaaacaccagtgtgtaaagctaaatgatggccacttcatgcctgtattggattggcacctatgcacctccagaggttccaagaagtaaagctttggaggtcacaaaattagcatagaagctgggttccgccatatagattctgctcatttatacaataatgaggagcaggttggactggggcatcccgaagcaaggattggagatgggcagtgtgaagagagaaagacatattctacacttcaaagctttgggtccacttttcatcgaacagagttgggtcccgaccagccttggaaaaatcactgaaaaaaggtcaaatggaattatggttgacctctaatcttattcatttctccaaatgtctctaaaagccaggtgaggaactttcaccaacagatgaaaatggaaaagtaatattttgacataagtggatctctgtaccacctggggagggcatggagaaagtgtaaggatgcaggatttgggcaaagtccattggggtgtcaaaactttcaacggaggcaggtggagatgatcctcaacaaagccaggatcaagtacaagctgttgaacaggtagaatgtcatccgtatttcaacggagtaaattgtagatttctgaagtcgaaagatattgttctggttgctatagtgtctgggatctcaagagagaaacgatgggtgggaaccgaactccccggtgctcttggaggacccagtcctttgtgccctgggcaaaaaaagaacaagcgaaccccaggcctgatggcctgggtaaacagctgcagagtggggtagggctgggcaagaacacaatgagcaggcacagacggaagcgacgttgagtccagaacgcgagattgaagcaatggctaagaatccattcaggatggggcccccttcacaactaaaagagggcgcgtgcacaacgcggggggggaagccgagagaaacaacaggcagcccacgcacaactaaacacaggggaggtgcgccagaa

SEQ ID NO: 601831 - DNA, 735 bp, Homo sapiens
  misc_feature (33)..(33): n is a, c, g, or t
  misc_feature (40)..(40): n is a, c, g, or t
  misc_feature (485)..(485): n is a, c, g, or t
  misc_feature (494)..(494): n is a, c, g, or t
gggcagtcaaggcgtgggcaaacgcctaacgtncgctgcngaaacacagtggcattgaacgctgttgtcaagacagagaaaacagaaggaacacactacctcaagctgctacctccctgaccccttctggactctttgacccctatgcacttccatttgggattttccacaacatattttatttctctgtctctttttctttctagaggtctctctgtaactaactaactctctctctcgcacaccaccttcagccccaacactcacccacttctactggagcccgcttcctctcttgctctgtctctatgtgattgggcttctttgactctccgggaattcccatcaatgtgggcctttaaaacgataagagatgcaactgaacgtgtgagacatcgtgcacataggctgagaggcggcaagagaaatgcccaagaaatcaagaccccagctaccccctctgcttctaccaccaccagcaacancacccaggnatgtgctttctgtttcccccaagccaaggtgaggcaagtcccagttgaatgtcattgtgctgacattaaacgtgctttgaggtggaaggtgaatgtctgtttggatggcagtgtttctgcacgtgggcgaggaggggcacatgtatccacctggctcactctctagctggattcaggtggaacggaggaccatgaaccttctcgaccttttctgctttggtcctgtgcttccaacgtttca

SEQ ID NO: 601832 - DNA, 274 bp, Homo sapiens
ttttttttttgggggcccccccgggggggggggggggaaaaaaagggttttttttctttaaccccccgggggttttcccccccccccccgggggggttttattggggtttttttttttttttccaccccccccctttttaaaaatttgggggcccgggggggggccccccttttttttttccgggggggggcctttttttttttgggccccccccttttttaaagggggttttttttggggcccccccccccctttttttgggcccttttttta

SEQ ID NO: 601833 - DNA, 485 bp, Homo sapiens
  misc_feature (463)..(463): n is a, c, g, or t
accgatgcctggcatttattgatctaggtgctagctttctgcctgtgcggagcagctctaagccggcaacatggcccgggtgccgtggcgatcaaagagaagaggcctgggcgctccatgatttagcctgaggctcttcaaacatccattctgcttccacgcatggcttctgccattggttctcttcccccagcaccctgaaacgacagaaacaagcaatccgattccagaaaactcggaggcaaatggaggcgcctggtgccccgcccaggaccctgacgtgtgaagccatggcgcagatacggtatttacatgaggaatttccagagtcctggtcagttcccaggttggctgaaggctttgatgtcagcactgatgtgatccgaagagttttaaaaagcaagtttttacccacattggagcagaagctgaagcaggatcaaaaagtccttaagaaagctgngcttgcccactcgctgcagcac

SEQ ID NO: 601834 - DNA, 185 bp, Homo sapiens
aaattgccaggggcttatttggaacaacttccacttcctttccactggctctcaactctctaacttataaagtgttgtgaacccccacccaggcagtatccatgaaaggagaagtgactaggcctatgatgtaaaaagcctgtatctctgtgatgatttctgtgctcttgctgtttgcaattgct

SEQ ID NO: 601835 - DNA, 116 bp, Homo sapiens
agcagttatacagactcaccaatgcacagacttgtcttccacacgcacgttcttaccttatgccacgaaggtcccaagccaaacgtactaaagggtggcaactcagaagatatgta

SEQ ID NO: 601836 - DNA, 142 bp, Homo sapiens
aggtcgctctagaggaccccggcaccatagtgctggctacacggacactggtgcgacgtgtggcaggtgaccagtggcacacgctagaagtttatggcagagctttacaaataaagaaagaaaaacgggcttttcggacttt

SEQ ID NO: 601837 - DNA, 171 bp, Homo sapiens
tagcgtagtacccaatcttcacttcctttcgggtttgaccacgttaaactgagtgggctttaaaggcctggccattttgactgagcattgggacaactccatttcagttccgaagcttcctctttgatggaccctaggtcatctcaggatattgggtactacgctttggca

SEQ ID NO: 601838 - DNA, 340 bp, Homo sapiens
  misc_feature (17)..(17): n is a, c, g, or t
  misc_feature (252)..(252): n is a, c, g, or t
cggggttgacctagagnacccaatcgccacgacaaggagcagcttgggcaggttactttctctgcgccttctgcttttcctaaggctggaatgagatgatccttattttccccttgtgaatgcaacctaaaagccatgcatgagaggctgaatctcattcagccaggacttgatatatccatcactggctctggaccttggtttcgtgattcaaccatgttgctattttctgcctgtactgaaggcactaantttgaatgactgaaatgtgggaatgacatgtttggcagattgtacctcccaaagatgactgcattaaaacctcccgtcctatgcgctc

SEQ ID NO: 601839 - DNA, 1150 bp, Homo sapiens
  misc_feature (465)..(465): n is a, c, g, or t
  misc_feature (576)..(576): n is a, c, g, or t
agcggatctctctcgatgtgtgatgtcttctgacatctggtgcgccgtgacccgggtaacatcctcctgtgaactacaactcaatggacgtatgataggtcatggtcagccaagcgaaaccttgcaatctcgaagagccatgtgagaaggttgcctttcagaatgtgccgatggcagaggtggcatcctgacgcttagatctaccgtgcttgacaccttgggctagaggacagtcgatacatactcttgtgcctgctacattcataacccttctgtcttcaagattgcgcccacggtctgactgcccaaactagcaatacgtgttgttgcggaacctagacatagggcactggctgggtggcactcgggggagaacctgcatcggagctgaggcaggcctagtcctatttgctcctttctcgagggcttgggtaagtggcttgcaatgcaagtgttgttgctatncaaaccgtttcagtaccgagggccataagcacatgggacactggttcatacacggctttgcccgaggatcgtggattactggaaaattttcggaaaagtttcgcgccaaanaccttggactacataaaccttgggtaagtgcctatacaaactttaccatttgggtaaagctttgacccgtgtaggaacttttctccagattccagacacttgcttggttgggtcccgtttttgtaacccttgaaaagaattgcaatggctcaaagtctcccacgttggggctccccccaccaaatttaggaaaggtccaagggatagatccctaccttgacgttccccctgcttgcatacacactacttttctttttaaaaaaaactttgtcgtacctaaaggcgcacagtggctaccctccccggggccatctaccccggggcaccttgtgaatttccttttaccggagagggaggggcgggggccctccccggtgccatgggcccccttcatttgtagagcgtccaccgccgttgtgtgtccgaacaggggcgtctttcccaccttcgtcagcgagcctcctgtgagggagttttaaagcccggtggctcccacttaggcctggtacccttgtggtgtttgcccctctttcgttgttatccccggctctcaatcattttccccaaccgcgct

SEQ ID NO: 601840 - DNA, 722 bp, Homo sapiens
gggcaccatgggacagtgtcggtcagccaacgcagaggtgggctcattcactcctggcctttttgctcccacactcctctccttcaccctgagggtctatgtccccccactgacttctgcccttcaccttggctttgccctgcaccccagaccctgtgagtgagatgtgaaccctcttctgaggcccacacagggtgatgcagatggagtcctcctgggaagaggatgcctgggtgcatgctgggacctgctctgcctgcggtggggggtgtggggagggaagccttccccaacctgtagctgctgtggcctggaggccgagcagggggtgggggagaggggctagattctgggctctggagtgggtgggagctgtgtgccttccagctgccttctgccctgggggctttgctaggctcctggagaagcagggttttggggtgcatggagcttcactgatgtttgtgatgtcccctgccctcaggatgctcaggaattcagtgatgtggagagggccattgagaccctcatcaagaactttcaccagtactccgtggagggtgggaaggagacgctgaccccttctgagctacgggacctggtcacccagcagctgccccatctcatgccggtatggacggagcacaccccacctcagccagtaccctgacttcccaagcaagtgctccgggaccccaaccacactggcacttgcaaacccc

SEQ ID NO: 601841 - DNA, 424 bp, Homo sapiens
aatgcgatgtgcgctctcattttaccaaagtggaagcatccccaaggcgctggaagtgacagagagcccccgtggttgaaggccatcttccatgacctgcagagccagtgcatgcctcactcctctgtggaaagcagatgggcagcatggagttccttactgtcattgtcgagagggccagtggtcaccatatggagcagtctcaacgtcagtggggccacctctgaccctgtcctcagccacgtggtccagctgctcagcctgtgacctgctactgtcgctacggacagcgctctggcaaaatctggccagtgccagccaggctgtgggggagacctaccacgcgtcctgcgctgaactggcgggcttccaacgggacctgggcagcctgcgcaggctgtgccacagcttccgcccatcatac

SEQ ID NO: 601842 - DNA, 202 bp, Homo sapiens
cagctctagcaggatccccaaagctacccgctgtgaacgctaccgcgggcttgcctttacatgcatagcctcactcttacatattctacagtcgcaaagttgaaatagcctaccaaatttagcaaagtagatcgatgtgcattctacaaaaatattagcttagagtacattacactgaataatattaatctgtacattttat

SEQ ID NO: 601843 - DNA, 790 bp, Homo sapiens
cctatcatagaagagcttatcgacctattcataagatcacgcccgtcataatcattctccttatctgctacctattcctgtatagcccttgtcctaacactcacaacaaaactaactaatactaacatactcagcatcagctcaggaaagtagacataccgtcatgaacgtatcctgcccggcgatcattccatagatcctcagtcgccctcctcatccctacgcatccttaacactaaagagacgaggtctaaggactacccgtactcctatgatgcatcaaatcgaattggccattcaatggtactgaactacgagtacaccgagaacggtggcattaatctggcaagctcctagatagttccctgcattaattccgtagaatcaggcgacctgatgactcgcttgaccgttgacaatccgaggtacgtacatcccgattgagagcccccattcagtgattaacttacattacatcacgaagagtgtctttgcagttcatgagctgttccccactattagggctaaaagtaaacaagatgcaaatttccgcggacgtgtaaacacaagaggcatctattcaacagtctaacacggacgcgggtggctatactgactggtcaatagctactagaaacttctagtcgagaacgcaaaaccacgatgttttgcagtaggcccaatacgtcctaaggaattgaatttcccccctaggacacttcttgcgaaactgacgggcccgtgattgtaaccactaataaggaaccgctgtaacccactctaaaagccc

SEQ ID NO: 601844 - DNA, 830 bp, Homo sapiens
attattattattattattattattattattattattattattttgagagagagagcctcactctgtcacccaggctggagtgcggtagcacgatcctggctgactgcgacctctgcctcctggtgcaagcaattctcatgcctcggcctccccagtagctgggattgcaggcgaacgtgaatgctaccacacccagctattttttgtattttagtggagatggggtttcaccatgttgcccaggctggtcccaaactcctgatctcagatgatgatctgcctgcctcggcctcccaaagtgttgggattacaggcatgagccacaacacccagcctgaataatgcttttaaccagttgaatgttgccttctctaatactacctatgagctgcccctccccaatactgagcccataaaagccctggactcagccacattgaggggactttcctgcctttaagtagggggaccacccccaaatcgcctctctgttgaaaactgttttatcactcaataaaccccccactattgtatcactcaataaaatctccacctcactcttcgatgccagtgtatccccattctttgtgggtgcaggacaagaacttgggaaccagtgcacaagcccagactcggcccaggtggggtgagtgggcgagctgtcctctgcagcaggtattgtggccagcgaggccaggtggggcatcatcggtggaggtcctggttgcaagtgactgagaattaaaatgtcctccatttcacacacacaaaaaaaaaaagggggcggtaaaattacctcgagggccacacttaagcgtcaccagtttttg

SEQ ID NO: 601845 - DNA, 398 bp, Homo sapiens
ctgcaggattcaatagatcgcagcaagggagttgttatgctacgtacaaaaccttgtaccagaggcatgacgtgtactaatggtttatggccaggacttgaacgtactaacgtggcatgacgaacgaggtagtgcacaaactatcgaccagggttttgcaacactgatgccatgaattctgcatggattttatctgccagtactcacagataccagtgctagctgttacatacaggatgcgtgtttaaacctccttctcaaggtaaaattctaaaaatcttttcagatgctgaagaaggaagaagcaattccatggcctggaactttagcaattgttcattcctatattggctacaaagcagcgaagaagagatacaggttactttggagttcagttt

SEQ ID NO: 601846 - DNA, 611 bp, Homo sapiens
  misc_feature (73)..(73): n is a, c, g, or t
  misc_feature (77)..(79): n is a, c, g, or t
  misc_feature (84)..(86): n is a, c, g, or t
  misc_feature (88)..(89): n is a, c, g, or t
tgtcactttaaccttgcagtatccaccccgaatggtgttctctggtcctttagctcaccagcccaccccttcngtannnctttnnnanntataacagtgaggttcccttactgtaggtattccatttgggattcccccccaaaacagttattcattgaatttggcagcatctgaagcattaatgtggttctaagtctgttacacaaaaagctgcactccttccaccctcttccgttttccatctccacctctttccaccccggggtaaccaatctcatttaattctgccttattcaccctaatttttttgcacaaatgagcagttatgtgtttttcttagcttttttcacataaagtataccatatatatatttaaataatcctgtattttgtcctcccatttgcagtttggacggggctcagcaggttcaagttcatctgtgctccagactgtcagcgagggcatctctcctggcactggaggatccacagagggggccacatggctggcagggtgctagctgctggatcctatctggaccaggcctctctactgagcaatgtggcttctcccagcacggagctgggcgccaagaagcaatgcacccgca

SEQ ID NO: 601847 - DNA, 417 bp, Homo sapiens
ataaaaaacacaccgtccaaactaccttccttttatcatcaggtgggccgcgtaaataaaaataaggtatactatacaaaagcgttcccacttggttgtacctaaggcataaaaacgacgctctataatcccttttagtgatcactactcgctgaggtaatagattaatagttgaaatgaactcaagattataatggcgaagcactttggttttaggcaaagttcagatacagcaagtgctttagctttttttcctttaaatagacctaagccaataatgattgtatcagtaggaaaaaaaaaaccctattgcattttcagtatagttttatttaaagttttatacaattaagctattttctctcactgtcaacaccaagaaataggctgagagtgataaaaagagactgcacttgg

SEQ ID NO: 601848 - DNA, 696 bp, Homo sapiens
tcacaggatctcacgacacctcctcttactgtcatctgatagtgcatgctgtagcaccctacttaaaaacttcccccatgccactaaaagataatatactaactgacctctagaggatcagaatctctgggcctaatctctctctctaggctctgtatctaaatgcctgtgatattcccaattcagtgtgtcgggacatctgggacttcacaaactcatccaatttccccgagagtctttttctctcttaaatgttttttgttttttttgaaatggagtttggctctttcacccaggctgaaatgcagtggtgcaattacagcttacggccacctctgcctactggtttaaagtgattctcctgccacagactcccgagtagctgggattacaggcgcccgcaaccaagcctgactattttgggtattttaagtagaaatgaggtatcactatgtaggccaggatggactcgaactcctgacctcaggtgatccactcacctcggcttcccaaagtgctgggataacaagtgtgggccaccatacctggcctcaatgaaccattgtaaggtcctccaaaggaggtgaatccacagtaaaacaacaggtaaagtctagccttcataaggctgaatccagtaggagacagaaatgaccctagaaatttataatgcagtctataagcttggaaagctag

SEQ ID NO: 601849 - DNA, 149 bp, Homo sapiens
caagagtttgccacagttcgctcttgggagcctctcgacaaatccaccgggtggggcccatggcagccaccatgcgggcctcggtgctactgcatgcccctggccctgggcaggcatggcccactactgtcagcagtaacctgtgggtc

SEQ ID NO: 601850 - DNA, 630 bp, Homo sapiens
  misc_feature (252)..(252): n is a, c, g, or t
  misc_feature (338)..(338): n is a, c, g, or t
taggttacccgtcgtgccagtctccttccccggcttgttggcccctggtaggatattctccaaggtctgtaagcggcttgcccggtgccccttccttcggtttatagggggaaatcattgcccatgaattgtcgggcaggctatatcaaagtagggggtggagtcaaagggtaagaattgggctggcatgaccttcacccggctgcaagtttgttattttgcagccctgggaggaatttttaagctttaagncacttttgtttgtgcatgaagactccgccctgctattggggcatttgggtgcctctccattcgtcccattagagttggggggctgnacgttgacttgcactgaatacgagctccgtcctggcaagcaagtcatgatccacgcaagtctaacatcctccctattaacacaatggtggaccatgaagaacgcactgaagcttaaacttgtggctccaaaaccgaagctaaaaaccaagtccaaagggtaatacaaagaaacagccaacgccccatacatccacagtgcaacatataagagcaaagtaaggctggcccccaagacctgagaatgaaaagtgtgctcattttccagggttgatgtaaaaacaaaatcctcgg

SEQ ID NO: 601851 - DNA, 383 bp, Homo sapiens
gccaagaggaaaagaacatctagtccaacaaaggattggcacaactgagccagtgcacaagaaagcaatggcatgtccaattcaaaagaacccatgtggtagcagtcagtgctagattccctaagtgaatgatgctttattttcagaaaaatgttaggtatcaagtaaactcaatattattattaaatgtattggagtattgtttgaatgcaaataaatgattgaatatatcacttttcattgaaatattttagcataatttaggaactgtcacttagtgttagcaggcttatcataatcttatcaagttagcctccctggattaaacttggaggcgagccttccatggaaaaaagctagctcttaaactccctaattatttt

SEQ ID NO: 601852 - DNA, 112 bp, Homo sapiens
gggcctccagtttcgcaatatatactgtgtagcatcaactctaagatagcattgggccgggcacggtggctcacgcctgtaatgccagcacttcgggaggccgaggctggcg

SEQ ID NO: 601853 - DNA, 661 bp, Homo sapiens
agacacgaaagactacgcctatatgtcttttgcaacactcgtatatacacaagacagtctgcacaattcgagggagagccccacattgaaagatccaatgccgcctagacgcatcgatgacctttatcaacacctatgtgaccatgaattacccccaagctcttcctgacactgggtactcatcccataaatgtctgacaatcagcataggtgatatgctgtgcctggcagagaggctgctagaacagggttggacatgcgcaaacttatttatgtacgtgtttatatatatacagagaactgttcaagaaccttgcgacatgcgcataagagtatataactcgtggagattgctgaccgttatatccaggagcactgaggtcacccgttcggggactgaatcacgtcctaaaacacagatgaacatttttctttaacctggctgaaaacttgccacctagtaactgaggatcccttacaagacaatccggacggctaccaactggcggcgcaaggccggcatccccgctttagaaactcccaaattccttgtggtttatcccgaaggcccggcctctttaaggagccgatcttttaaccaagcttattctagccccataatggagtaaccaggcctttcctgtctttggccctgtgggcg

SEQ ID NO: 601854 - DNA, 145 bp, Homo sapiens
actcatgtggtaatcatttcacaagtgtatgtgtatatcaacaacatcacatcatacaccttatacatatgtacaatttaatttgtcaagctatacctcaataaagactgaaacacatatacatggcatagtattacatagtgtg

SEQ ID NO: 601855 - DNA, 132 bp, Homo sapiens
ttggacctctcagaggcctcttgggctcggacgggctcattgtacacgggctcagaagctgagcaggctgctgttgtccagatgtgtgggcacgagtgtaagagctaggccttcacgctccgggtacgagct

SEQ ID NO: 601856 - DNA, 1540 bp, Homo sapiens
  misc_feature (823)..(823): n is a, c, g, or t
tccagaaaaaggatttttttttttatccaagtaactggcaattaggaacccaaaaagggacgccccaggcgtgggacaaattctgggctaccccttccccaaactaaaacagggcggtagagaggtggccccttacacccttttattggctcagattcggtgccccctttgctcactcttagttgcagcattccatagggcgcagggccccgaccttctcccgtggaactgggggttagctccggctcaccacatcgcctgtgccatgtgcccccacagacccccttttttccccaccacacaagagaggtttactcctgtgcgtggagaagggcgagatctctgtgtcggcgtccaagatcacagtgagacggccaaatatagaagagatttagaaaccattttgttggccggctgtgggtataccccgagacaggtccaatgtgcaacgcggcgaatcttgtctcgcgaacagacaacatgtgtgcacaccccatttgtggacactccatacaatacaacctactcacacacacaatcgccgtggtctccccagagaagtgtcttacggtctgtcgtcttagaaacccagagcagggagcaaacacacaatggtggtggcaactcctctagaacataacccctttggtgcgggcggggcgacccaacgggcgacacgcgaaacccatagaagaatgttgtgcgcgtcgtattgtggagaagacgcttggtgctcaccatgccgagtggtttaccagcatctccctgtttgctcgtactaagttgtgggtgcttgccccccccaaactattcttgttttganagtaggagacgctgctgccgtcggacacagactgctggcgtctatttgaccgtctgtttggcgcgagctgagtaccaactgacaaccataacagctatactggagtggtttacaattcggggagaggtatcgtccatctgcttcccccacctgaatgaccgcccaccaacatcttttaacagatagttggttgttgcatgtctagtcgtgaccacacaaactgaatgcggtggcacctctctacctgatgtatgcggacggctctcctctttacaaccgctgctggttgataggaacaacaatagaataaatacactgcctgcgtgttagagcatagttgttagtcctatactttcttcttccacactaaatgattcacaaccacaccactaaacaaaacagaattgaatactacgtgtagcgtagttacccatctcattcgactagaagaagacatagcttatccccccactgacagtgtgcagtactggtatgatatacagctcgtgttcagtcccatatcatagatgtagtttggtatagcgcattcatattgtgtgtcatgatgcgtcacgcaccacacgacggtggtgtggtagactaacacaatagtcacacgggcggtagccataacatacattaatacgagctggctcgagcatcatgaatccactccttaacacaacaccgccgccgtcactacactcccgtactatt

SEQ ID NO: 601857 - DNA, 124 bp, Homo sapiens
gccatctggagtggaacatatttctgttagctctaccacttttggctttgttctatgcagtctaactctcattacgctctgcaccgatgattgctctagtatgtccaggacgaagcatcgagat

SEQ ID NO: 601858 - DNA, 355 bp, Homo sapiens
caagttcttgcgcaatcgtatatatggcacgcacagtgagctatggggcgagttacatggcgacacagtcactctctccagcggctgtcattggcaccatggactctctatatctgatagccttgtaccacacaactgacaggctaccggcaatcctgggtgttccttggaaggctgaacagggcctgctagtggcccagggcagggcagatagtcaggcccagttgatgctgtgcacagaggtggacgtagtcacagtcccagacctgtacctgaagcaaacgattgtgcgacagtctgtctatacccctgtggtactatcacgcactatggacttgacagctgctgttgctgt

SEQ ID NO: 601859 - DNA, 1208 bp, Homo sapiens
  misc_feature (609)..(609): n is a, c, g, or t
  misc_feature (739)..(739): n is a, c, g, or t
  misc_feature (799)..(799): n is a, c, g, or t
ccatgggggaatattttaggataaaccaaagggcgaaacacaggccttttggaatccattcgagtggacgaactgaatgccccaaaacaagggcaagtttggccttcaccgttccaagatagctccttcatggatttgtttttcagggccccgaaacccccccctggtgtttcctgtgagggccgttatttcccctggggtgaaagcctgttttcctaaccctaccacttcccacgggttcgtctggaggcagtagccaagcccccaaaatgggaaccgaatggcctttctaaggctgagtgggcatccctttggaacctggcttttggtcccaggttccattacgtataaacaacaagggtctgcgtgaactcgtggtactggcttgagcatttccgctacccaaatgttccattttcacatccactcgaacgggtaccaggatccttcatgtggaaaaacgagaaatttggtcttctaaccatacagcggttagtcccggaccctcgcaaactcttattcgtttggggtccttgttcatgatattccttcgatgtttcgagaattcacgctggccgccaaaataccacgggggactaatagatagcncatgagttagcacacggctacaccacatggaagtgcatgagaaattctggcctcaaggtaattcgatgatggcttagcttagcatctgttgccgccacgattacaggcttacgtgagcacgtcgtaatgncatgtcgcactcatcataccaaacgttatgtgagatacgtgtgacgatgacgctctgaanactgatgcttgctcgacacgacatagagaccagtgaattcctccacataggtctactgtgaaagacacacaaagtggcctggttactactaatgcggagtgtgagacggggagtattccattgactaaagctggaggcccaggcatgagttacaagagatttgagaatgcttgttcgttgtctcatggtccgtcaagccgagcactcaagccttgattgggcgagctattcacgggcctgatggaaagatctctagaacaatacagatgcaaatgctggaagagagattgtgaacaaatcttctatggctggatttgaagcattaaactcctgtggaatcacatcaaataccaggtcagttagtgtcaattgttctagtaaattagttccaaatatgcaaacagggtac

SEQ ID NO: 601860 - DNA, 836 bp, Homo sapiens
gaaagctctcctaggctaggcatggtggctcacacctgtaatcctagcactttgggaggctgagatgggaggatcacttgaggttgggccagcctagccaacatgataaaaccccgtctcgactaaaaatacaaaaattagccaggtgtggtggtacacgcctgtaatcccagctactcgggaggctggggcaggagaatcgcttgaacccaggaggcagaggttgcagtgagctaggatcacgccactgcactccagcctgagcgacagagtgagactctgtctcaaaaaaaaaaaagggctctccaaagtgtcttgttcagcaccaaaggggaataggcacaggggtgaccccagaagttcattggtgacacttaaatctccagatatttatcccacgtggggtctggatggcgggctcagcactaaattacctggttatgtgggaaggtggtcaatggcagagccttctggtatcgatgaggcttccgccactggtccatggcttagccccctggcctcttcctggggagcatggctttctattcctatgtgaaacagcctggacataagtgaaggattgggcgctcaagcaaacttgagatgggggttcatatctgtggcaccactcctgatagctggtgtgatcatggcaaacctcgtttcatccgtcgtgtcaggtggcggatgaagacgactgctggctgtaacagtgtcagcatctgtgttaagcagggcaataggtctccctggctctttttcttgagtaagcctttgaactttctgattcttcttagagagggggagaacgattttttggggggccttggatctgg

SEQ ID NO: 601861 - DNA, 361 bp, Homo sapiens
catgtcagaaatattacagcaagaatcagaaaatccattctgggctgggcgcagtggctcacgcctgtaatctcagtactttgggaggccaaggcgggtggatcacttgagagcaggagttcgagaccagcctgaccaacatggtgaaaccccgtctctactaaaaatacaaaaatcagccaggcatggtggcatgtgcctgtaatcccaactacttgggaggctgaggcaggagaatcgcttgaacctgggagacagaggtcgtagtgaactgagattgcaccattgcactccagcctgggcaacaagagtgaaactctgcctcaaaaaaaaataaaataaataataattcgatatctca

SEQ ID NO: 601862 - DNA, 190 bp, Homo sapiens
ataaaaatatatatatgggtagatgggggtttccctgtgttgcccaggctagtcccaaactccgggcctcaagtgatcctcctgtctgggcccctcaaagtgctgggattataggcatgagccactgcaccaggtctttttttttttttttttttttttttgggaaaaagagttgggctttggtccccag

SEQ ID NO: 601863 - DNA, 154 bp, Homo sapiens
agtcacgccatcgaacacgttacctagggataacagcgcatcctattctagagtccatatcaacaatagggtttacgaactcgatgttggctcaggacatcccaatggatgcagccgctattaaagcttcgttagttcaacgattaaagtccta

SEQ ID NO: 601864 - DNA, 269 bp, Homo sapiens
  misc_feature (9)..(9): n is a, c, g, or t
aaataatgnaccccagtgaatttgtaaagtgggggtatttgacatattttacagggtggagtgtcctataaactattccctttgaatgggtttgcaaagctagggtatgtgtttgtctccaagtatgattgctgttacataaccccccaaattaactcccaaattaaaacccagttgtgctgtcaatacctcaaactgctttccctttttttcctggaaatctgggtattttcaaatgtttctatatattaaagcagaaatatacccca

SEQ ID NO: 601865 - DNA, 693 bp, Homo sapiens
  misc_feature (558)..(558): n is a, c, g, or t
catggcaaaaccccatctctagtaaaaatacaaaaattagttgggcattggggtgggtgcctgtagccccagctacttgagaggctgagacaggaaaatcacttgaacctgggaggtggaggttgcagttagctgagatcatgccactacaatgcagccggggcgacagagtgaaactctgtctcaaaaaaaaaaaaagtaaagtatttcttggctgggcatggtgtctcatgcctgtagtatcagcactttgggaggccaaggcaggaggatggcttgagcccagaagttggagaccaacctgggcaacaaagtgagaccccgtctctacaaaaaattaaaaagttagccaggtgtggtgacacgcatctgtagtcccagctactggggaggctgaggtgggaggatcacttgagcctgtgaagttaagactgcagtgagccatgattgcaccacggcattccaggctgagggacatagaaagacctgtcttaaaaaaaaaaaaggcctggcatggtggctcacgccttgaatcctagcactttgggagaccgaggncggtggatcacatggtcaagagttcaagaccagccttgccaagatggtgaaaccccatctttactattcaaagattgcttgaacttgaagttgcagtgagctgtatgcccaattgaacttcagccttggggacgt

SEQ ID NO: 601866 - DNA, 225 bp, Homo sapiens
gcaaaagactaaggtcaacaagctttatggcgaatgaagagtagaacagcccatggattcattctgtggctgtctgtgtctctctgtactttcgagtaccttgaggccattcttgattgttctgtattatacagctatgtatgcatatatatatgtcacacaggctcaggccatatgatcacacactcacacagctagagcacacatagacagagatacagatct

SEQ ID NO: 601867 - DNA, 323 bp, Homo sapiens
gagactgtttcaagaccctggttaggcaggccagcctagtgctgaagcctgcaatctcaacactttgggaggctgaggcagcagaatcacttgaacccgggaggcagaggttgcagtgagctgagattgtgccactgcgctccagtctggatgacagcgcaaaactccatctcaaaaagcccccccccacagagatgatatacagatcgcaaacagtatctgacacaattgcacaacatcatcttagtcaatgggaaaatgcaaattaaaactgcaaagagatactttgacaaacccactaaaatggccagaacttttcaatg

SEQ ID NO: 601868 - DNA, 355 bp, Homo sapiens
aggctccatgcttaacgatatttggagtgtcagcactggtgctcactgtgtcgacggaacttgtacagggatggcatgcaccgacagtggtgaatacacgttgaccaggctccatgttaacgatatttggaggtcagcacggtgctcacgtgttgaaggaactatgtcagggaggcatgcaccgcagtggtgaatacacgttgacgctggaggcatgcatagcatgattgggaacttggaggatgctctaaagtcgaccaggatccatgcttaacgatatttggaggtcagcacggtgctcacgtttcgacggaacttgtacaaggggaaggcatgcacccggcaggggtgaata

SEQ ID NO: 601869 - DNA, 2708 bp, Homo sapiens
gctcttttctcgggacgggagaggccgtgtagcgtcgccgttactccgaggagataccagtcggtagaggagaagtcgaggttagagggaactgggaggcactttgctgtctgcaatcgaagttgagggtgcaaaaatgcagagtaataaaacttttaacttggagaagcaaaaccatactccaagaaagcatcatcaacatcaccaccagcagcagcaccaccagcagcaacagcagcagccgccaccaccgccaatacctgcaaatgggcaacaggccagcagccaaaatgaaggcttgactattgacctgaagaattttagaaaaccaggagagaagaccttcacccaacgaagccgtctttttgtgggaaatcttcctcccgacatcactgaggaagaaatgaggaaactatttgagaaatatggaaaggcaggcgaagtcttcattcataaggataaaggatttggctttatccgcttggaaacccgaaccctagcggagattgccaaagtggagctggacaatatgccactccgtggaaagcagctgcgtgtgcgctttgcctgccatagtgcatcccttacagttcgaaaccttcctcagtatgtgtccaacgaactgctggaagaagccttttctgtgtttggccaggtagagagggctgtagtcattgtggatgatcgaggaaggccctcaggaaaaggcattgttgagttctcagggaagccagctgctcggaaagctctggacagatgcagtgaaggctccttcctgctaaccacatttcctcgtcctgtgactgtggagcccatggaccagttagatgatgaagagggacttccagagaagctggttataaaaaaccagcaatttcacaaggaacgagagcagacacccagatttgcacagcctggctcctttgagtatgaatatgccatgcgctggaaggcactcattgagatggagaagcagcagcaggaccaagtggaccgcaaccatcaaaggaggctcgtgagaagctggagatggagatggaagctgcacgccatgagcaccaggtcatgctaatgagacaggatttgatgaggcgccaagaagaacttcggaggatggaagagctgcacaaccaagaggtgcaaaaacgaaagcaactggagctcaggcaggaggaagagcgcaggcgccgtgaagaagagatgcggcggcagcaagaagaaatgatgcggcgacacgcaggaaggattcaagggaaccttccctgatgcgagagagcaggagattcggatgggtcagatggctatgggaggtgctatgggcataaacaacagaggtgccatgccccctgctcctgtgccagctggtaccccagctcctccaggacctgccactatgatgccggatggaactttgggattgaccccaccaacaactgaacgctttggtcaggctgctacaatggaaggaattggggcaattggtggaactcctcctgcattcaaccgtgcagctcctggagctgaatttgccccaaacaaacgtcgccgatactaataagttgcagtgtctagtttctcaaaacccttaaaagaaggaccctttttggactagccagaattctaccctggaaaagtgttagggattccttccaatagttagatctaccctgcctgtactactctaagggattccttccaatagttagatctaccctgcctgtactactctagggagtatgctggaggcagagggcaagggaggggtggtattaaacaagtcaattctgtgtggtatattgtttaatcagttctgtgtggtgcattcctgaagtctctaatgtgactgttgagggcctggggaaaccatggcaaagtggatccagttagagcccattaatcttgatcattccggttttttttttttttggtccatctggtttcattggcttggccccgcccccgagacgggagtcttactctgtcgcccaggctggaggtgtagtgggcatgatctcggctcactggcaatctctgcctccggggtttcaagcttgtccaggtgtgatcttgaactccttgacctcggtgatctacccaccttcggcctcccaaaatgctggggattacacggggtgagccaccgtgcccaacctcacttggcttcttatccttacactcccccagccccagagaaactgccacatacaccacaaaaaccaaaaatcccccaatgaccttagccccattggctccattcattcccaggtgagaattcaggcaaacgtccacaaaggtcacaggcagcgtacatacggttctgttataccccatatattaccccttcatgtcctaaagaagacattttctcttagagattttcattttagtgtatctttaaaaaaaaatcttgtgttaacttgcctccatctttttcttgggggaggacacccaggaatgacccttttgtgtctatgatgttgctgttcacagcttttcttgataggcctagtacaatcttgggaacagggttactgtatactgaaggtctgacagtagcttttagactcgcctatcttaggtagtcatgctgtgcattttttttttcattggtggactgtgtttgatttgtctcaaatatttggagtttttttgaaaaatggagcagtaatgcagcatcaacctattaaaatacattttaagccttttaa

SEQ ID NO: 601870 - DNA, 561 bp, Homo sapiens
  misc_feature (249)..(249): n is a, c, g, or t
  misc_feature (257)..(257): n is a, c, g, or t
  misc_feature (259)..(259): n is a, c, g, or t
  misc_feature (271)..(271): n is a, c, g, or t
  misc_feature (309)..(309): n is a, c, g, or t
  misc_feature (326)..(326): n is a, c, g, or t
  misc_feature (485)..(485): n is a, c, g, or t
gctcttttctcgggacgggagaggccgtgtagcgtcgccgttactccgaggagataccagtcggtagaggtcaagcttgtccaggtgtgatcttgaactccttgacctcggtgatctacccaccttcggcctcccaaaatgctggggattacacggggtgagccaccgtgcccaacctcacttggcttcttatccttacactcccccagccccagagaaactgccacatacaccacaaaaaaaccaaancaattccncnccccaaaaaaantttgtgggaaaaacccccccttttttttttaaaaggcncccccccccccccaaanttttgtgggctccattcattcccaggtgagaattcaggcaaacgtccacaaaggtcacaggcagcgtacatacggttctgttataccccatatattaccccttcatgtcctaaagaagacattttctcttagagattttcattttaaggtggtatcttnttaacacacaacaacatctgtggtggctttaaaacccttttgtggggggccccccccccccccttttttttccccc

SEQ ID NO: 601871 - DNA, 108 bp, Homo sapiens
tcagcgcgtacctcagcctctctctatgttgcaggttgacaatgtgtgtgtctgagagctggttcctgcctcagacacccaccatttagggggatcgtcatagagtcg

SEQ ID NO: 601872 - DNA, 351 bp, Homo sapiens
acctccgcctcccaggtcctggttgaagcaattctgcctcagcctcccaagtagctgggattacaggtgtgtaccatgcccagctaattttttgtatttttttagtagagacggggtcttaccctgatagccaggctggtcttgaactcctgacctcttgatccgcccacctcggcttcccaaagtgcagggattacaggtatgagccaccgcaccctagatcgcgagcggccgcccttttttttttcattggtggactgtgtttgatttgtctcaaatatttggagtttttttgaaaaatggagcagtaatgcagcatcaacctattaaaatacattttaagccttttaa

SEQ ID NO: 601873 - DNA, 184 bp, Homo sapiens
ttgaagctgattttttgtctctggttttggaagaaagttgctagcaaagtattttttgtgttgaagctttggggtgtgatccagtaggtggcacttatgcatactggtcagctggtagactcttgtccagctatgtggctcccctgtttcctctcatttgtaactgtgttctttctcaatgctc

SEQ ID NO: 601874 - DNA, 2662 bp, Homo sapiens
gctcttttctcgggacgggagaggccgtgtagcgtcgccgttactccgaggagataccagtcggtagaggagaagtcgaggttagagggaactgggaggcactttgctgtctgcaatcgaagttgagggtgcaaaaatgcagagtaataaaacttttaacttggagaagcaaaaccatactccaagaaagcatcatcaacatcaccaccagcagcagcaccaccagcagcaacagcagcagccgccaccaccgccaatacctgcaaatgggcaacaggccagcagccaaaatgaaggcttgactattgacctgaagaattttagaaaaccaggagagaagaccttcacccaacgaagccgtctttttgtgggaaatcttcctcccgacatcactgaggaagaaatgaggaaactatttgagaaatatggaaaggcaggcgaagtcttcattcataaggataaaggatttggctttatccgcttggaaacccgaaccctagcggagattgccaaagtggagctggacaatatgccactccgtggaaagcagctgcgtgtgcgctttgcctgccatagtgcatcccttacagttcgaaaccttcctcagtatgtgtccaacgaactgctggaagaagccttttctgtgtttggccaggtagagagggctgtagtcattgtggatgatcgaggaaggccctcaggaaaaggcattgttgagttctcagggaagccagctgctcggaaagctctggacagatgcagtgaaggctccttcctgctaaccacatttcctcgtcctgtgactgtggagcccatggaccagttagatgatgaagagggacttccagagaagctggttataaaaaaccagcaatttcacaaggaacgagagcagacacccagatttgcacagcctggctcctttgagtatgaatatgccatgcgctggaaggcactcattgagatggagaagcagcagcaggaccaagtggaccgcaaccatcaaaggaggctcgtgagaagctggagatggagatggaagctgcacgccatgagcaccaggtcatgctaatgagacaggatttgatgaggcgccaagaagaacttcggaggatggaagagctgcacaaccaagaggtgcaaaaacgaaagcaactggagctcaggcaggaggaagagcgcaggcgccgtgaagaagagatgcggcggcagcaagaagaaatgatgcggcgacacgcaggaaggattcaagggaaccttccctgatgcgagagagcaggagattcggatgggtcagatggctatgggaggtgctatgggcataaacaacagaggtgccatgccccctgctcctgtgccagctggtaccccagctcctccaggacctgccactatgatgccggatggaactttgggattgaccccaccaacaactgaacgctttggtcaggctgctacaatggaaggaattggggcaattggtggaactcctcctgcattcaaccgtgcagctcctggagctgaatttgccccaaacaaacgtcgccgatactaataagttgcagtgtctagtttctcaaaacccttaaaagaaggaccctttttggactagccagaattctaccctggaaaagtgttagggattccttccaatagttagatctaccctgcctgtactactctagggagtatgctggaggcagagggcaagggaggggtggtattaaacaagtcaattctgtgtggtatattgtttaatcagttctgtgtggtgcattcctgaagtctctaatgtgactgttgagggcctggggaaaccatggcaaagtggatccagttagagcccattaatcttgatcattccggttttttttttttttggtccatctggtttcattggcttggccccgcccccgagacgggagtcttactctgtcgcccaggctggaggtgtagtgggcatgatctcggctcactggcaatctctgcctccggggtttcaagcttgtccaggtgtgatcttgaactccttgacctcggtgatctacccaccttcggcctcccaaaatgctggggattacacggggtgagccaccgtgcccaacctcacttggcttcttatccttacactcccccagccccagagaaactgccacatacaccacaaaaaccaaaaatcccccaatgaccttagccccattggctccattcattcccaggtgagaattcaggcaaacgtccacaaaggtcacaggcagcgtacatacggttctgttataccccatatattaccccttcatgtcctaaagaagacattttctcttagagattttcattttagtgtatctttaaaaaaaaatcttgtgttaacttgcctccatctttttcttgggggaggacacccaggaatgacccttttgtgtctatgatgttgctgttcacagcttttcttgataggcctagtacaatcttgggaacagggttactgtatactgaaggtctgacagtagcttttagactcgcctatcttaggtagtcatgctgtgcattttttttttcattggtggactgtgtttgatttgtctcaaatatttggagtttttttgaaaaatggagcagtaatgcagcatcaacctattaaaatacattttaagccttttaa

SEQ ID NO: 601875 - DNA, 624 bp, Homo sapiens
agcggaggggattaatgaagagccaccagactatctttatggagaatctagattgggaagttaagctaagaatgtgcatttttgaaaacagtttttatggtagaagagaatgtatatcagaggaaagaatgtagagaagaaagcaacattgtccactgggaattgataagttctgcgtagaatttagagttataaggactatctcattggctcctaatgaatgctaaataacaaatggaaattgctatttccatgaggacaacttaacaaggacctgtatggcctcattttagctgcttcagtgtgttggagctgttacttgctccttcatttcctgggccctggtgtgacagttggctactgagcgccatgaaggttgtcccagaaaaagaatgctgtccggatactctggggggcgagaacggggtgctcgggccatgggagctcaggcggcttctgcaggagctcggtagaggataaaacccggtggactgaaatgggaggggcagagagtagaactgccggatacgtccacgctctaccttcttattggccttcagcccagacaggactctcttagcctccaccatgtgaacataatatctatattacggaaggtgaaga

SEQ ID NO: 601876 - DNA, 224 bp, Homo sapiens
aaagataaaaaaaaaaagggacacgcaggggggctcaggccggtaatcccagcacttgggtatatacaactataaattaccaatttacaatcatatttttaaaaagaaaggctttggaaggtaaaattccaaggacaaattagggtagcattaaggtcggttatttccactgggtatagacacaacttgcacatcacctactttcaccagggatgcccaacagg

SEQ ID NO: 601877 - DNA, 2605 bp, Homo sapiens
gctcttttctcgggacgggagaggccgtgtagcgtcgccgttactccgaggagataccagtcggtagaggggtgcaaaaatgcagagtaataaaacttttaacttggagaagcaaaaccatactccaagaaagcatcatcaacatcaccaccagcagcagcaccaccagcagcaacagcagcagccgccaccaccgccaatacctgcaaatgggcaacaggccagcagccaaaatgaaggcttgactattgacctgaagaattttagaaaaccaggagagaagaccttcacccaacgaagccgtctttttgtgggaaatcttcctcccgacatcactgaggaagaaatgaggaaactatttgagaaatatggaaaggcaggcgaagtcttcattcataaggataaaggatttggctttatccgcttggaaacccgaaccctagcggagattgccaaagtggagctggacaatatgccactccgtggaaagcagctgcgtgtgcgctttgcctgccatagtgcatcccttacagttcgaaaccttcctcagtatgtgtccaacgaactgctggaagaagccttttctgtgtttggccaggtagagagggctgtagtcattgtggatgatcgaggaaggccctcaggaaaaggcattgttgagttctcagggaagccagctgctcggaaagctctggacagatgcagtgaaggctccttcctgctaaccacatttcctcgtcctgtgactgtggagcccatggaccagttagatgatgaagagggacttccagagaagctggttataaaaaaccagcaatttcacaaggaacgagagcagacacccagatttgcacagcctggctcctttgagtatgaatatgccatgcgctggaaggcactcattgagatggagaagcagcagcaggaccaagtggaccgcaaccatcaaaggaggctcgtgagaagctggagatggagatggaagctgcacgccatgagcaccaggtcatgctaatgagacaggatttgatgaggcgccaagaagaacttcggaggatggaagagctgcacaaccaagaggtgcaaaaacgaaagcaactggagctcaggcaggaggaagagcgcaggcgccgtgaagaagagatgcggcggcagcaagaagaaatgatgcggcgacacgcaggaaggattcaagggaaccttccctgatgcgagagagcaggagattcggatgggtcagatggctatgggaggtgctatgggcataaacaacagaggtgccatgccccctgctcctgtgccagctggtaccccagctcctccaggacctgccactatgatgccggatggaactttgggattgaccccaccaacaactgaacgctttggtcaggctgctacaatggaaggaattggggcaattggtggaactcctcctgcattcaaccgtgcagctcctggagctgaatttgccccaaacaaacgtcgccgatactaataagttgcagtgtctagtttctcaaaacccttaaaagaaggaccctttttggactagccagaattctaccctggaaaagtgttagggattccttccaatagttagatctaccctgcctgtactactctagggagtatgctggaggcagagggcaagggaggggtggtattaaacaagtcaattctgtgtggtatattgtttaatcagttctgtgtggtgcattcctgaagtctctaatgtgactgttgagggcctggggaaaccatggcaaagtggatccagttagagcccattaatcttgatcattccggttttttttttttttggtccatctggtttcattggcttggccccgcccccgagacgggagtcttactctgtcgcccaggctggaggtgtagtgggcatgatctcggctcactggcaatctctgcctccggggtttcaagcttgtccaggtgtgatcttgaactccttgacctcggtgatctacccaccttcggcctcccaaaatgctggggattacacggggtgagccaccgtgcccaacctcacttggcttcttatccttacactcccccagccccagagaaactgccacatacaccacaaaaaccaaaaatcccccaatgaccttagccccattggctccattcattcccaggtgagaattcaggcaaacgtccacaaaggtcacaggcagcgtacatacggttctgttataccccatatattaccccttcatgtcctaaagaagacattttctcttagagattttcattttagtgtatctttaaaaaaaaatcttgtgttaacttgcctccatctttttcttgggggaggacacccaggaatgacccttttgtgtctatgatgttgctgttcacagcttttcttgataggcctagtacaatcttgggaacagggttactgtatactgaaggtctgacagtagcttttagactcgcctatcttaggtagtcatgctgtgcattttttttttcattggtggactgtgtttgatttgtctcaaatatttggagtttttttgaaaaatggagcagtaatgcagcatcaacctattaaaatacattttaagccttttaa

SEQ ID NO: 601878 - DNA, 470 bp, Homo sapiens
  misc_feature (8)..(8): n is a, c, g, or t
  misc_feature (73)..(73): n is a, c, g, or t
  misc_feature (145)..(145): n is a, c, g, or t
  misc_feature (154)..(154): n is a, c, g, or t
  misc_feature (199)..(199): n is a, c, g, or t
  misc_feature (206)..(206): n is a, c, g, or t
  misc_feature (235)..(235): n is a, c, g, or t
  misc_feature (237)..(237): n is a, c, g, or t
  misc_feature (249)..(249): n is a, c, g, or t
  misc_feature (268)..(268): n is a, c, g, or t
  misc_feature (271)..(272): n is a, c, g, or t
  misc_feature (278)..(278): n is a, c, g, or t
  misc_feature (286)..(286): n is a, c, g, or t
  misc_feature (289)..(289): n is a, c, g, or t
  misc_feature (298)..(298): n is a, c, g, or t
  misc_feature (307)..(307): n is a, c, g, or t
  misc_feature (315)..(315): n is a, c, g, or t
  misc_feature (321)..(322): n is a, c, g, or t
  misc_feature (329)..(329): n is a, c, g, or t
  misc_feature (332)..(332): n is a, c, g, or t
  misc_feature (334)..(335): n is a, c, g, or t
  misc_feature (338)..(339): n is a, c, g, or t
  misc_feature (341)..(341): n is a, c, g, or t
  misc_feature (353)..(353): n is a, c, g, or t
  misc_feature (468)..(468): n is a, c, g, or t
ctgctgcntccaggccagggggatcttggcgaaccagtcctcctcccagctgctggcggtcctgttccggtanctcggggggaagcggagctgccggtccacctggagtagctgcagcagctgcgcggcgtcctcgtccagagtntccagcttncccacgaagtcgtagtcgatctggcacgggtggcagaggcggtanacctgcngccagtgctcgttgaagggcgccagcttntncgtgtgcgggtncagcaggtaatggatcaanttnnccaagnacaccttnagnccacccccnaacgcctcncgcccccnaggccnncaccctnctntnnttnncntacagcccgcancatggcgcacggcgaacttgcggtagaactcctcgttctccagctcgaacttgctgcggaaggcggagatcaggcgcacgaaggggtcgcgcacgaagaggaacttggtgtactnct

SEQ ID NO: 601879 - DNA, 192 bp, Homo sapiens
  misc_feature (80)..(80): n is a, c, g, or t
  misc_feature (135)..(135): n is a, c, g, or t
ggtggcccaagtcttggtctggaagcactggggccctggaccagggcactgagtttgaggaggcccagagttcagggctntttggagcgagaccacaagcggctggtgagggagccaaggaagaggttctgcttnttggacttggagagctcggccaggcgctgctgcttcctcctgctctagccggctttg

SEQ ID NO: 601880 - DNA, 114 bp, Homo sapiens
actcttgacaggcaacccttcgtgctgtattttcatatccttgttgtgttgttataaaccaagtctcgatctgtgtcaaaataaataaataaataaacaaaaagttggcggccg

SEQ ID NO: 601881 - DNA, 1935 bp, Homo sapiens
gaattcttttgttaattgttcctttggttgggcaaagatatctaacagtgagccacgttcaatgatttcaccattttgcatgaccgcgactttattggcgatttctttgacggcctgcatttcgtgggtgatgagcacaattgtcaaaccaaattcttggttgagctttttgagcaaggccaaaatttgattcgttgtcttgggatccagtgccgaagtggcttcatcggaaattaaaatttcaggatcattggccaaagcgcgggcgatggcacacgttgcttttgaccaccagacaattgtgatggatattgttgtgcgcgatcagataagtcaaccaattcaaggagctcagccactttttagctttttctttttcagatagtgggctgtgttggagggcaaacgccacgttttctgttaccgtgcgttcgtttagcaagttaaaatgttggaaaatcatgccaattttgcgtcgcccatcacggagcttttggctagaaatacgggtaattttaccggtcttatcatcactttgaaagaaaacttcgccgttgacgaccacagaaccactggttggttcttgtaggaggttaatgacacgtactaatgttgatttaccagcacctgaataaccaacaatgccgtaaacatccccccgttcaacatggacagagacgttgtttaccgcagtaatcgtccgtttttttcgatggaaagcgacagtaatattgtctaatgcaataatgggttgactcattcatttactcctttagttgagatgcttgataactcttaattaaagctttgacggcatcaatatgttggtcataatcaaccaaacgaatatgctcgtttggtgcatgatcgaggttattggcataaccaacgccaaggctggcaattggggcctgcaaagccgcataaatcgttgccattggacccgtgccaggtgatgtcggcatgaccacgggtgcgacttgataataagctttggccacagagatgacccgttgaatttctgggtcagacatatcgctgcgataaccagctagccccagtgttttggtaacggtgatatccgtaaaaccttgtgcagtcaaatggtaagcaatgcgttgtaacgtgatgtcaggtgacatattggggactaagcgcttctaatttagccgtggcggtcgcgggtaagacagttttaacacctttatcattataccctgagatgatgccttggacattaagggttggttggaaatacaaggtttcttttaaatcttggccgttacgatctgtataaagtggcacttttaggccgtgttgtgccactaaatcttctcgtgttagcggtaactggccaattaaagctttttcacgtgcatttggtgcgatgacttcatcataaaaatacggtacggcaatattgccttgttggtcaaataatgcggcaatggcttgtgataagcggataggagccgagtcaacaacagccgacaatgatgaatgtaggtcactatctgctgtgttagcggttaattcaaaggtcacaatccctttattcccgccataaatttcgacaatgtcgtccgcatttttaccaccagattcccaaagcactaaatcagccgcgatggtgttagtatgttttgccaaatattctggtaagtatggtgaagcagtttcttcggcaccttcgacgataaagatgatattaaccggtaaggtttggtcattttcttttaaatactcggcaactgcgctagacgcgcagttaaattgcctttatcgtcgtcaacaccgcggccatatagcttaccatcccgtgctgacaatgtccaaggcgccgtcgtccacaggtcaaggggttcggcgggttggacatcatagtggttataaatcacaagggtcttggcatcgggttggtcactggtgaattcc

SEQ ID NO: 601882 - DNA, 281 bp, Homo sapiens
taccggttcgcatgttcctgagtaggctccttccaccccacctcgcccttccccttcactgcagaggtctggggctcctggggcctggattatttcctggacatcctcctcacaggcagcatgggatcaaacattggcacttggagcctggcgttctagcccaggttctgcaaccaattcctgcataacctcaggaaagtctcttctgtaatatgaaactactagtctattctacatttcaacttttgtcaccaaacaaaaagcggaacccctttttcggg

SEQ ID NO: 601883 - DNA, 954 bp, Homo sapiens
agcgagcaggagctggtggatcgccgagcgcgagtgagggagccgagccgccgccgcgcgctccgctcccctccggaacaggagcccgggcggggccccgaaggcgcccagccgtccctcggcgtcaggccggagtgttagcgcgcgcagaggaaacaaggggaaggaagacccgagcgagcgcgggagaaggggccgaaccgagggggcgccggcgcggttgtgccgttgaagggacaagaccgtgttggcgcgggacatcgagacagtcgaatgtcacaccaccaccggacaaagggtggcgggggaacaaaaacacattcagtaacagagacggcccaaacacaaaaacggcgagccgaagcacgaccacacgccgcatgagcgggtgcaccggacacagaaaacgccaaacacagaagcaagagagcaacccacacacaaacaagtagagacaacatcaacagacaccaaaagaaacgcgaacaacacaaaagaagaagcgaaggagaaaggaaccaagagaaaccaaaacaacgaaaagacacaagcacacgaagagcagcacagcaagacgaacgacaaaagagcaccacagagcgcaaaaggcagggcaaaccaaaacaggcacccaaacaagcgacggggctcccgagtctagcgacaaagaagcagacagcacgcaggacatactagacaagacgcacagacacgatagcagaagtcaaacgaggcaagcgacaaagtagtagagtggagaacaagtagaaaatacaccacgcaggcgcaacgaggacggcgagagaaacaaggaacagcagataagaagaagaaaagagagaagggaacagagcgaaggaaagaaccgcataagtagacggggaagacaacgaaagggacaacagcatgaggccagcacaacgacaagaccccacaccggagcctcgccagcta

SEQ ID NO: 601884 - DNA, 174 bp, Homo sapiens
tgctgatctagaggatcctggtgttccctttgtctggtggtaaattcgatacaaaatgattctttttggaatcctgaatccataaattacactcttttttttcaagcttcacaaaattcacagtggtgctgactgtagtaataaccactaattgggaaacatcccgctaaacct

SEQ ID NO: 601885 - DNA, 122 bp, Homo sapiens
  misc_feature (110)..(111): n is a, c, g, or t
cacatgctattcttgattgctgcagtagcctacgcccaaagcaccatgacatgtgtcatgtgctcaataaatacgggatgatgggtggttggaatcacaacgcgatgaannttattcactgt

SEQ ID NO: 601886 - DNA, 241 bp, Homo sapiens
ttcccccatttttggggcccccccttaattttttggggaaaaaaagcccggggctcccccacccttttaccctttaaagagggaagggaaagggggccctttttcctttttttgggggccaagttttgcccccccttttgggggttttagggggggggggttttcctttggggaaaaaaaagggtttttttccccccccccccccggggtttggggaaaaaaaatcccccccccgggggga

SEQ ID NO: 601887 - DNA, 799 bp, Homo sapiens
tggtcaaatgatcctttattgaaatgtttcccttggtgcttaacgggctgggcttcccaaagccccacggttgatgtcatcgatgatgtcatgaggatggcggccatcaacattacagcccattgacggggcagtccccaggatctctttaatgggttccagagagttctcgggctaaggatcggtgccgcatctgtcgagcaatgttgacaatctcatcaaaagtgatatccccacggtgtcaaatggtttctctggtttctttctgtctctggggggtccccttgagggcttggatagatcagggcagaggcagaaggcaccacctcaatctgggggcctgtctgtctgaagggtcagtttcactggtaatcctcaggcccttccagtcacccgttgcctgggagatgtcatcaccaacttttttgggagacagacccagggggccgatctgggcgggccaggcagaagtggcaccgatttcacctcgggtgcacctcaggtatacgacttggatctcgtgggggtcgaactccggcggacatgggggaggcggcgggggtcggatagaacccggattcgggacgaccgaacgtaagttgccacttgggcttcctccgagccaaggttaacttagacaagtggccacaccccagggttccgtctcatccctcaggggttctcttctgaccggaggtcaacatccgtcatcgggggctcccacaaacccaatctctgcaccagggacacccaaccctgtgcggctcacagcggcgaggaaacaaaacacaaaaaaact

SEQ ID NO: 601888 - DNA, 863 bp, Homo sapiens
cgagcttggtctgcttgcggcgtcctgcggatgtcgtcggcgcgccccgccccgtgttgtgcgccgcccccgcgcttgtggtggttcgcgcgacgcgcccgtggtgtctgtctgtcccctccagcacccccccctctcgtgtagggacgttctctcttccgtgcgcgcgccgggctggagtgttgttttatgtgtgtgtgtgtggctcgcacccgcgggaggaggtgggttcgacactgcgctctcttctctgtgattttgtgtttgttgctcgctcttgcggccggcgtaccctctcgtctcgactgtttctctggatgatcgccactctctctcacacacttcgcgtcgctttgcatgaaaataactctctctcttctcacagagggacgtttcccccacaactgtttgtttcgccctcgacagctaagagcagagacgtcgttgtgtaaaggagcaatgtttttttgacacaaacccacctcgcttggatagaatcgatgcgcgcattaatccccccccccccctcctcttttaacaactcactgtcgcggggggtgaatatctcttctctgtgtgtgtgacacaacgtcgtgtcgtcgtgctcgaggatagcaccccttgtcccttctctcacggggagtcaccaaccaatgttgttgttcacagcccgaattacgcccccgctggacaaatgtgtgctcccacgcaccaacaggggggtgcactcaccccacgccacccctttccaccaagtagaccccccttctcaccgggggggaaccccccccttttttaaacccctccccccttttttcctttttccccccccccccccatctttcccggtgttttttttttta

SEQ ID NO: 601889 - DNA, 429 bp, Homo sapiens
  misc_feature (114)..(114): n is a, c, g, or t
aggatataatttgatagcagctggaacctttaaatggtgtgatcattcttaggaattttgtgacgtccactgtcaaaaaagtgtaagttgtgtattatccttaaacaatgtaanagctttactgcagaagggctcagtagcatgcaacactcagggaagggctgggcgcggtggctcaggtctgtaaacccagaactttgggaggaggatcacttaaggccaggagttcgagatcagccttaccaacatggtgaaaccctgtctctactaaaaatacaaaaagtagcagggcgcagtggcgcctgcctgtaatcctatctaatggagagggtgaggcatgagaattgcttgaacctgggaggtggaggtagcagtgagctgagatcacaccaccgcactacatcctggggacagagtgagtgtcgacgc

SEQ ID NO: 601890 - DNA, 503 bp, Homo sapiens
gtctcaaaaaataataaataaataaaagctatggctgaggggcccagctgggcttgctccaggacaggaactagcagcaggggatgtggaatcgcctgccagtcattgcagacagtctgcaggctcctaggggcgtccaagcccactcttactctgcagggtgctcctgacaccagtttcaaggtggaaaggttgacggccctaaggattggagggcgcagatgggaaagggggatgctcgtgatgtctggggtgctgagatgaggaggtcaccagcagaacagcagctccggcaggcacaaggcagactcgaccaccaagctgggtttctgtaggtctggaatctggccagaaggctgcagccgcatgcagcctgggggtaggcacctctgccctcagccctaatgggcagcaactccccctcctgccacaagctccccacatgagggagggcagtttttagttcaacctattcagtctaaccccagggaagaggctgctcc

SEQ ID NO: 601891 - DNA, 316 bp, Homo sapiens
  misc_feature (155)..(155): n is a, c, g, or t
gaaagagaaaaaggaaaggtggggctcctttctaagggtgtgtgaggtaatgctaagagatttctgagataaagcagagatacgaaacctctttcctggctggcgtttctctatcaaggagtacagtcagcttgtttgaaagggtagaacaaccnctgctagaagaagctgaagccccggaagagatccccgggttcttttggtatgaatttaaactttaaggcataatttcttaagaacttagccatattgcaaggtaattaaaaatcccctttaaaaattttttgaaaatcatgaagatagggactaagtgctt

SEQ ID NO: 601892 - DNA, 330 bp, Homo sapiens
gcatttgttaactgctgtttcttcaacttatgatacatcatccttccatcgaggccactaactttgattcttggggtccatcaaaactcaggtcaataagatgtcctggctcacacctgtaatcccactactttgggaagccaaggtgggaggatcacttaaggctaggagttggaaatcagcctggccaacacagtgatatcctgtccctataaaaaatgcaaataaaaaataaaaaatcagtttgatttctttatcttctgctgagtcatctctgctcctctgaggtcactgtactctctttttactgtgacttcatgaccctctgca

SEQ ID NO: 601893 - DNA, 175 bp, Homo sapiens
aacgggtggttgtcatgtgatgagacccctccaggttactaaagggtgcatgtcccctgcttgaacactgaagggcaggtggtgggccatggccatggtccccagctgaggagcaggtgtccctgagaacccaaacttcccagagagtatgtgagaaccaaccgcatcacccgtt

SEQ ID NO: 601894 - DNA, 228 bp, Homo sapiens
cgtgacccgaggtatccctctcttccggcttacttccatcaaacttttctttaaagcctgggactagggaacagatgacttctttaacagtgacaataacagagtcagctatgctccagatgctgcactcacctatccctgctcttaactctcgtaatttactctatcgccttatgcttaaccatttttatctgaattacagttagtgtagtagaacctacggaaaca

SEQ ID NO: 601895 - DNA, 228 bp, Homo sapiens
  misc_feature (35)..(35): n is a, c, g, or t
  misc_feature (99)..(99): n is a, c, g, or t
gacgctgttcactgtgcacgactgttatatatttntgctgtggtgaaaacatagtgtgagtaaaattatttgcagtggtgagacatttttgagtacacngtacatgtcgctggggggtgtgcgagaacagaagaggtcctgtttcaaccctacgtgtgggtgactagttattgctaggtgatacagtaggtgctgtaagggaacattacgaggtattcgtatgtcgtg

SEQ ID NO: 601896 - DNA, 563 bp, Homo sapiens
  misc_feature (1)..(1): n is a, c, g, or t
ntgggaaaatatggggaaaatccatgtctgaggttaattgattaaaaaggaggagctttgagtgacttctgtgcttggtgtgatggtgatattcaccaaggtaagttatactagaataataagttagggagataatagtgagttgagacatttatgaaatatgcaggtgtctagtagagttggataaataggcctggagcttgagaaattcagaacaaagatagtgatttggacatcatgagaggcagtatacagtaataataataataaatagactggacgtggtggctcacgcctgtaatcccagcactttgagaggccgaggcaggtggattgcctgagctcaggagttcaagacaagcctgggaaacattgcaaaacccattctctacaaaaaatacaaaaaattagccaggcatggtggcatgcgcctgtggtcccagctacttgggaggctgaagtgggagaatcgcttgagcctgggaggttgaggctgcagtgagctcacgtcatgccactgcactccagcctgggtgacagagggagatcctatctcaaaaaaa

SEQ ID NO: 601897 - DNA, 104 bp, Homo sapiens
tacttcaggaaattgaggcaaatgtatcatcatgattaatgttaagagagataacctaaaaccacaatcagtatcttacgttacttataagtcacgaaaaatag

SEQ ID NO: 601898 - DNA, 436 bp, Homo sapiens
ataggaaacagtacataccttattacctgggaaaacccgcttgagttcttctgaaaccagaaagtgtttcttttttcatatgcagagaacacctgttctcctctctatcgctcactacacaattctcctctgtttatattttaaaccataggattcttatccttctagccccactgctaacaatctattttcttatggcccttccgtctgtctgtgaaagggtcaggcttatctagctaaaccctataaatacaaatattttgtgatgaccacagtcaagacagtacttataatatgtaataggggggacggagttttgctactagtagcccaggctggagggcaatggcgcagtctcagttcactgcaacctctgcctccagggttcaagtgattctcttacctcagcctcccaagtagctaggattaacaggtg

SEQ ID NO: 601899 - DNA, 464 bp, Homo sapiens
gccccccacgccgctgggcacctcagcatgactggcactgggccggcgctatgggctgcttacgtggtgcgtgtggaccttcgtcgcctggccccaggccaccagtaccgagcctgctgacccggtcatcaagatcccgaagcacgctgctccccgtctcatctgcctacgtttatcccgtccagtcgagcgtggactgatcggcaggctgaacaggctgtcgacgccgccggagagtggctgaggcgctccacgcacgcggtacgagaacggggtctactgctcgctagctttgcctacactcaggtgacccctcgcatagagagcgatgccacgtctggcgcggacgtcgtagcatagcgtaagcgtgagcgctctctggactcgcaaggggcctatcgatagtgcagctccgttgggagaaaggaggtccggttcagtgacccaccaccagaacgccgttt

SEQ ID NO: 601900 - DNA, 600 bp, Homo sapiens
  misc_feature (63)..(64): n is a, c, g, or t
  misc_feature (68)..(68): n is a, c, g, or t
  misc_feature (79)..(79): n is a, c, g, or t
  misc_feature (97)..(97): n is a, c, g, or t
  misc_feature (114)..(114): n is a, c, g, or t
  misc_feature (127)..(127): n is a, c, g, or t
  misc_feature (135)..(135): n is a, c, g, or t
  misc_feature (147)..(147): n is a, c, g, or t
  misc_feature (149)..(149): n is a, c, g, or t
  misc_feature (152)..(152): n is a, c, g, or t
  misc_feature (154)..(154): n is a, c, g, or t
  misc_feature (162)..(162): n is a, c, g, or t
  misc_feature (185)..(186): n is a, c, g, or t
  misc_feature (189)..(189): n is a, c, g, or t
  misc_feature (192)..(192): n is a, c, g, or t
  misc_feature (211)..(211): n is a, c, g, or t
  misc_feature (225)..(225): n is a, c, g, or t
  misc_feature (450)..(450): n is a, c, g, or t
  misc_feature (480)..(480): n is a, c, g, or t
  misc_feature (518)..(518): n is a, c, g, or t
  misc_feature (528)..(528): n is a, c, g, or t
ttacttggggggcaaggactggaaaaaaggccgcatgtcttttggctcactagtgtttaaggnncccngcttcctttgnttggatccacagaatatnttcctcatcctatttantgcagcaaatctntccttagntgatgagactgngnttntntccccttnaaaccccacccatcctgaaaggnntgncantgtttgcccttaaaaaccntcctcttttttccncccctatttttttaaaaaagatgggggttaggtataccccaagctcccttttcaaaatattttctccgggctttgcaaaaaacccccaacaaaaaagccctttttaaaaaggggggtttttttttttaaaaagtaagcccccccaaaacaggggcaatgttttttgtatgttttattgggcctaggaccccgtaaaagccccataaaaatttattatggggggcngtgagtttttattataagggggagaaactnaaatccccaaccctgttttgttgcttgtttttttatgncccccaattnaattggggaaaattggccccttttaaaaattgtccccaatatttccttccaataaaagggccatggggaaca

SEQ ID NO: 601901 - DNA, 349 bp, Homo sapiens
ggcaaaggggggcactctcttttttgtgtgtattctgcacggttcctttaaaaaaaaggggtgcccggggggttcccccccttgggttggggttaaaaacaccccccaaaatttaggggcctttgggccctgggtggtttttccattaaaaccgctttgggcccgggcccttacttgtttttttagttttttgggcttttccggttggccccggtccccccccccctttaaggttttttgggggaaacattcccccctccccttttcttttttccccctttttggggcccctccggggctgttgttttagggcctccttttttgttttttaaccccgggtttggcccca

SEQ ID NO: 601902 - DNA, 970 bp, Homo sapiens
  misc_feature (1)..(1): n is a, c, g, or t
  misc_feature (193)..(193): n is a, c, g, or t
  misc_feature (242)..(242): n is a, c, g, or t
  misc_feature (299)..(299): n is a, c, g, or t
  misc_feature (326)..(326): n is a, c, g, or t
  misc_feature (400)..(400): n is a, c, g, or t
  misc_feature (419)..(419): n is a, c, g, or t
  misc_feature (446)..(446): n is a, c, g, or t
  misc_feature (463)..(463): n is a, c, g, or t
  misc_feature (471)..(471): n is a, c, g, or t
  misc_feature (506)..(506): n is a, c, g, or t
  misc_feature (528)..(528): n is a, c, g, or t
  misc_feature (639)..(639): n is a, c, g, or t
  misc_feature (693)..(694): n is a, c, g, or t
  misc_feature (705)..(705): n is a, c, g, or t
  misc_feature (714)..(714): n is a, c, g, or t
  misc_feature (723)..(723): n is a, c, g, or t
  misc_feature (726)..(726): n is a, c, g, or t
  misc_feature (738)..(738): n is a, c, g, or t
  misc_feature (760)..(760): n is a, c, g, or t
  misc_feature (764)..(764): n is a, c, g, or t
  misc_feature (788)..(788): n is a, c, g, or t
  misc_feature (796)..(796): n is a, c, g, or t
  misc_feature (799)..(799): n is a, c, g, or t
  misc_feature (821)..(821): n is a, c, g, or t
  misc_feature (824)..(825): n is a, c, g, or t
  misc_feature (840)..(840): n is a, c, g, or t
  misc_feature (852)..(852): n is a, c, g, or t
  misc_feature (882)..(882): n is a, c, g, or t
  misc_feature (890)..(890): n is a, c, g, or t
  misc_feature (958)..(958): n is a, c, g, or t
ngagggggctcgaagggctggggcaggctctgggagtggacattccagagacgggcatgacagttcagaagagcatgggctgcgctaccccctcagctgacagggctgtggggcacactgggtcccagggcccagccccaagggtcccccaccagccacacccctctagcgcgcgcgcgccccgcgcgcgccncacacacacacacacacacatcacacatcacacacacacaggcagccancctcaaacactctcaaaaggccaggcctcacccggggagagggcgccagcaggtgantggtccggggagaattcagctccaccncttcaccccaatcggacacaggctggtggccgcggggtggtgagaaagggctggaaggcgtgccaggggccttnggctccagcaggggctccnccggactgaaggggactccgtgggccntcccaccgtcagggganccctggtngggggcagcctctggggctttggtggtcttgggcnggttcctcctcaacaccttctnccacctcgatccccccctcttcctcatcctcatcttatgttctcccattcttcatcctcttccccctcattctcttccccctcgtcttcaggaggccggtgggcaggagcngggatctcgggtggctgcatgggtgtctccttgggggaagtctcgggggaagtnngctgtggagtntcaggggcnggggatgcngcnccttcttttgtntcccagcggtcatcatggtcantgtnggccctgggcgctgccttggcctnggggccgnctnctctttctccttctgcggctgntgnnctcagcttttgtgcngggacaggaacnccccaaaaagtaggggggcttcggggggcngggcccanggcctgggtcatcatagcggtgggatggttcatgggcagggactgggccatccttgaacatcccatcngtcttctcggca

SEQ ID NO: 601903 - DNA, 514 bp, Homo sapiens
aacccaagggcgctattccacatgtctcaaatgattggcagggctaacttattagtaattctcggttttgtgcactgagatatctaagacctatggcatttttttcccatttataaagctcctataattcttaagtaagtactaggtgaatgtttgaatagatgctggagaaattacactggaaaaccccacccctagatttagataagatcaatcatttaatattccccaaattaattcaggttgaattaagcatgtaatataaattcagtgaattacaaaaacacatttggtgtacgggattgatcaggattttaaagtacagttgacacacttccattcatcatcatcaattaaggaccctaagaaaccccgtccgcaaagccaatttttccccaatccgcaataacagacattacatggacaatgcacaatggcttattagagcaacgattcctgctcagaaaaatttccttataaacagctccaaaccaggggtgcctgagctagatta

SEQ ID NO: 601904 - DNA, 899 bp, Homo sapiens
actctaggatctcagcacccacttattgagacgctttttgttgttccaagtgctctggtgcacagacggggggtgttggctctgaggagagctgcggttgcgtgagcattagtgtgagcgctgggacatgtgcatatagttaagaggcgagagaatgaaggaggctaaggtcgtaaggggccggggtctccttgttgcgcatgagacggctccagtccctcgtcatcctgccgatgacctcctcacattcgtagagatcttggagagtccgaggtcgaggagatagttgcgtagttgtgatatttaagattcattgtattgaagtaaccgatcaagacatctgaaaaaaaaaaagagggggaggggaaaaaaaaagataacccaagcgaggggcggcgccagcggcaataaaaggtatccccccccgggagtgggggtcggtaccaaaattggggggcccccccacgtgaggaggctcgttcgttggtagaaagagggcggaccgcagcaggggcgagagcggcagtagataaacaacacccggatcgaggagctggggcgaacccattgtgtgcaaagccagctgggggacctactgtggtggcaacagcgaccgcataccatggagcgggtgtgggaggacaaaaggactgcgccagacaacagcaggcggggggaggacgacaattagaagggggccccaagagggccctagtagatgaacaattttaacagcgtgtggtggagggtggtttttaaacaatttgtgaagatggtatatgtgcggggctagcaacagttgtggcatacacgggggcatggtcattggaagaaaggtttataggagaggattgaggagaaacaaaattttatcccgaagggtgtcaataaataacggc

SEQ ID NO: 601905 - DNA, 156 bp, Homo sapiens
gactagccgaaggtagcaggctggaagaacaggctgtgcaggccttctttctgcccttcctccccagagagcctgtcagaaaggtgagtagcagccccatcttgtcggccctggactgtcgggggggggcagtcggggctgtcgggctagtcgggg

SEQ ID NO: 601906 - DNA, 949 bp, Homo sapiens
tcccccccaaaaaccggggggggggggccccccccggggccccccagggagggggcgcccccccccggaaaaaaaacacgccggcgggggggggcccaaaattctgtctcgggccccccgcggggggggggggggagagagaaaacaccgaggggggggtcgagtggagcaaaaaaaaaaaaggcggtgggggggggcccccgcggaaagatgatatatgagcgcccgggccgtggtcagaggagggcggcgcgcccggggtgatgacacccccccccgcagggatgggggggggcgggcgcgcgcgggagaggaagaagggcgacgacgacggccgggtactcacagacagcagaggaggggtggagcaaggacggggaggaggggggggggagggctgcccgccagccgcgcgcgagcagcagctagcgaagaaggaagaagcggggtgggcgttctcacacccacccgggggagagcaataaaaagaaagagggagccgcccaactgggggtggagagcagccccccaccctagtgtgagcggggagctagtgtgttggcacgaagaaaaacccccccaggaaggacgggcgacacaatggagcggcaggagtctaaagccgggcagcaactacgctatctcggccgagacagcgatcttggagcagacaggagatgattgtcgaccacccaggtgagagacagcccgccgcaaaataggtgggcaccccctgatgaaagggaaagacgcgcgctggtgtttggtgagggaaccccccgctggtgtgagaacaacctgtggggtgaccaaagcaggcagcagaagagagacccccggtggtagaaagaggggccgcgcccacccctcgagggagaaaccggacgggggagcgcggccgatcagagtaacaccagaggagggggagggatccaccacgtgtaggaga

SEQ ID NO: 601907 - DNA, 435 bp, Homo sapiens
aattttgtgaggcagtctccatacatacggccaacagatcacgtgagaaatgctcagcatcactgatcaccagagaaatgcaggtcaggaacttaatgagacaccatctcacaccagtcagaatggctatggttaaacacgtcaataaaaataacagatgccggtgaggctgcagagaatgagggcatgcttattcactgctggtgggaatgcaaattagttcagcccctgtggaaaacagttaggagatttctcaaagaagcaagaatagaattaccattcaacccagcaaccccatgactgggtatacacccaaaggaaaataaatcacaaaagacacctgcccttgtatgtttatcacagcactgtacgttgggtagaatacgtattggtgacgaggtgactaggcaggagattcttggctgaataacatgt

SEQ ID NO: 601908 - DNA, 419 bp, Homo sapiens
  misc_feature (171)..(171): n is a, c, g, or t
  misc_feature (253)..(253): n is a, c, g, or t
  misc_feature (282)..(282): n is a, c, g, or t
  misc_feature (292)..(292): n is a, c, g, or t
  misc_feature (297)..(297): n is a, c, g, or t
  misc_feature (304)..(304): n is a, c, g, or t
  misc_feature (375)..(375): n is a, c, g, or t
  misc_feature (385)..(385): n is a, c, g, or t
  misc_feature (402)..(402): n is a, c, g, or t
  misc_feature (413)..(413): n is a, c, g, or t
attagccgggcgtcggtggtgtgtgcttgtagtcccagctactcgggaggctgaggcaggagaatcgcttgaatccgggagcagaggttgcagtgagccaagatcaggccactgcactccagcctcggggtcaagagcgaaactctgtctcaaacaaaaagaaagaaaggnaggaaggaaggagggaaggaaggaaggaaagagagaaagaaaagaaagaaagaaagaaagaaagaaagaaagaaagaaaganagaaagaaagaaagaaagaaagaaagggnaaagaatttnctttnctatttngtataaaattggaatttttaccagcttagcctcctaggagagttactgaaccgtggttaccttggggaatnttaaataganctgccaaattttaaaantggacttgggnccactt

SEQ ID NO: 601909 - DNA, 101 bp, Homo sapiens
acgctctcacccacccctgcggggagtatgacaccagccacacgtcatcccgctgaggagctcggctctgggatgttgtggtggctggtggtcaaccgtcc

SEQ ID NO: 601910 - DNA, 458 bp, Homo sapiens
ctcgaggccaagcaacgcgctggacaaccccgagccgttcctgcacaccaatgtggtgggcaccttcaccattctcgaggcggtgcgacgcaacggggtgcggctgcatcacatctcgaccgacgaggtgtacggcgacctcgaactcgacgacccccagcggttcaccgaatccacgccgtacaacccgtcgagcccatactcggcgaccaaggccggcagcgacatgctggtgcgcgcctgggtgcggtcctacggcgtgcgtgcgacgctgtcgaactgctccaacaactacggcccgttccagcacatcgagaagttcattccgcgccagatcaccaacgtgctcaccggacggcgatgcaagctctatggcagcgggcacaacgtgcgcgactggatacacgtcgaggaccacaacagcgcggtccggcggatcctggagaagggcgagtcgg

SEQ ID NO: 601911 - DNA, 427 bp, Homo sapiens
aggtgggcaggtgtagcagtgcaagccatgtggttaaggcccatcgtcgggtcaagggggctgttcgcaaggtatttgaaggccactggtgttctcaggcgcatgttgcttacaggccaaggctggttcccttagaaatcttcaggcactacgatgggttccgtcccttgcctcagcctttagacttccggctttatctggtcgattgggtcctcctatgctgactctccggaggatctgtgcttctatcagggtttgaggcacaagttctgacgccctcttattacagctagttccttctgcatgagaccactccgcgcgccaatgcagtttctgggccaacgattcaaggctctgagtctgcacgggtcgctgtgacacagagacacccgctcatctgccccgatacggatcctctcatgcgcct

SEQ ID NO: 601912 - DNA, 300 bp, Homo sapiens
atttttcattgttgatgttgacctccattacctggctgtgtttacagatttctccattgtaaagttactcattttttccttttgccatgctgtactctttgggaggaagtcactaagcacagtgcatacttaaggagtagggagttacactgccttcattgggggtaggaatatctacataattaatttggaatttttctacacaggcaattcgtctcttctccatttatttgtttgtacaatctatatgatttatatcagtatggactcatggatattcattcatacttaagaaccgtt

SEQ ID NO: 601913 - DNA, 552 bp, Homo sapiens
  misc_feature (7)..(7): n is a, c, g, or t
  misc_feature (15)..(15): n is a, c, g, or t
  misc_feature (51)..(51): n is a, c, g, or t
  misc_feature (160)..(160): n is a, c, g, or t
  misc_feature (166)..(166): n is a, c, g, or t
  misc_feature (303)..(303): n is a, c, g, or t
  misc_feature (456)..(457): n is a, c, g, or t
cactatnccatattnccaactcgaaattaccctactaaggaacaaaactgnagctccaccggtgcggccgctctaaactagtggatcccccggctgcaggaatcggcacgaggtcgtaaggctgaggatttttggtcgcacgtcctgctcctgctcaccntgttcnctcgccgagaacaagcggtcagaacccgcgcgcacaccatgcttttaaggataccggaaaacacccgtggagcggaggtggaattaccgaatcgaataccctaacaagcgcaacgtaaaccttggaaaaggtgtgtntgcttgataagagcgcaaaagaaaagaatctcaaagtaaagaccagtcgaatcctaccaagctttagaatcactacaagaaaactccttgtggtaaggtctaagcgtgggtcgttccagatagaattacaaggctcattgcttgacagccttnnagattgtaagcagattctccatcagtattagccagagttgaggtgaagtaccattgagatcttaagtaactattttaataaattgatgaccagcg

SEQ ID NO: 601914 - DNA, 264 bp, Homo sapiens
ttgtcatcggggataatcaaccgaggtgtgcgtgggagtgagagatggtgcttcccggctgccccattcgatttcgttctgcactgtaattagcccagtgtggctcacttgcttgcttgtggtaattgcggccagaagaattgtttctgtcgccagtaaccagcttgtaccgcaggaggagacataggcgaaaggggagcggttggtgaggagcagcctttgaaataagcatatttttgagacccacagtctttggcagggctc

SEQ ID NO: 601915 - DNA, 370 bp, Homo sapiens
  misc_feature (14)..(14): n is a, c, g, or t
  misc_feature (49)..(49): n is a, c, g, or t
  misc_feature (100)..(100): n is a, c, g, or t
  misc_feature (172)..(172): n is a, c, g, or t
cctcacaatgttgncaacaaatcacagttgtgttagcaatacttatttngtcaccaacagaattagaatacatattaattacagattgggtgtggtggtntgggcctgtagtcccagctattgagaggctgtggtgggaggattgcctgagcccaggaacttgaggttgcantgacagagggcctgggtgacagagggcgactctgtctcttaaccacaattagccgggcgtagtggcacgtgtctgtagtcccagctacttcaggaggccaaggcaggagaattgcttgaacctgggaggcggaggttgcagtgagctgagatcacgctactgcactccagctcgggcaacagagcgagactctgtctc

SEQ ID NO: 601916 - DNA, 408 bp, Homo sapiens
  misc_feature (92)..(92): n is a, c, g, or t
  misc_feature (154)..(154): n is a, c, g, or t
  misc_feature (157)..(157): n is a, c, g, or t
  misc_feature (187)..(187): n is a, c, g, or t
  misc_feature (228)..(228): n is a, c, g, or t
  misc_feature (374)..(374): n is a, c, g, or t
  misc_feature (408)..(408): n is a, c, g, or t
atcatgaaaaacatacattgttctctcaggggaaaactgtcctttatcccataaaggacaaatatttacaaagtactcccagtttaatgtgnccctaattagacaaaggctaaaaaactttaaaatattaaattttccttcaggctgggcatgngtntaacgcctctaatcccggcactttgggagnccagggcgggtaatcacttggggtcaggagttggagaccancctggccaacatggtgaaacctgtctctattaaaaatacaaaaattagccgggcatggtggtgggcatctgtggttccggatgcttgggaggctgaggggggagaatggcttgagcttgggaggcagaggttgcagtcagctttgntcatgccactgcactccagcctgggtgacagagn

SEQ ID NO: 601917 - DNA, 795 bp, Homo sapiens
  misc_feature (22)..(22): n is a, c, g, or t
  misc_feature (32)..(32): n is a, c, g, or t
gaagcaggggagccccatgagnccatggaaancagagagagagagaaagggagaggaggatggaaacatgaaagccaagaggagagaagaagaggaggggggaagaggaaggagagggagggaaaggggggaaaggaaggggggaaaggaggaaggaggggaggagaaggaggggaaaagggaagaagaaggggggaaaaagaggaagggagagagagggggaaaaggaaggaaaaggaggggggggggaaaagaggaggggagggaggaaggaagagggagaaggaaaaggaaagggggaagaggagaagaaaagagagaggaagaagggaagaagggagagaaaggggagaagagagggagaaaagagggggagagaaggagaagacaagaaaaggagaaagggggaggagagggagggggaggaggaggagaaagggagaagagaaggagacgaggaggaagagggagaagaaaggggagaaggaggaggagggaggagaagaggagggaaggaggagacgaagggaagaggggagagggaaagagaagaggggaagaaggaagagagagaaaaaagggaggaaggaggaggaagaaggggaagcggagggaaagggagagaggaagggagcgaagagagaaggggaggaagaggaaggagagagggaaaagggagaaggggaaaggacgaagaaggaaggagaggagaaggggaaggaaaaaaggaggaaaggcaggagggaagggaaggagagagaaagaggagaggggaaggagagagaagggggagag

SEQ ID NO: 601918 - DNA, 765 bp, Homo sapiens
ccactcccctccctctaacagcaggctgtgtgggtttcaattcccatccttcccaccccggtctcaagtgtcctaccgcggtgagatccagggttctcgaatgtgtgctgtgcgaggccccttgcaacttgtatgggctgtcacgttcgtctcacgtctcctggcttcaatccgtgccctgtgccctgggcttagcgctttgagttactcgattctggtgacttgctttggttgggaggcgtcgtgaagggagacaaactcctcatagtctctggttgcgctcttgcaccacttttgcataggggaggtcgtggttggggaaaccaggaagcgtgtggcactttagtgtcaccccatgtgcttgatcagctggaggtggtgccgcgtgcgttgtcacctagtgcgccttgcttgtgtggtaacctgttccatgtcgcagtttggttgccccagcgttgccttgcgtccttaacaatccatagagaagaagactgtacccagaacctctctctcccaaatgcgggacaccccaggcaacatccgcaaatgcacgcccaacgtcttgcggaggggacacagacgaggcttgcgcgcataggcgaagcacaggaaggcatggacattgaaacaatgaggatggaagggttgaacccgtgtaaagacccaaacgtttcctacttgaggctgcgatagacatggtaacattgtttcagcgtaaacaccttcttttcacagaagaaggcatgccattcccaaaaattttgg

SEQ ID NO: 601919 - DNA, 420 bp, Homo sapiens
ggatagcctgttaatcgtctctagaggtatcccacgccggaggctgtgcacgtcttctgctgcaaaatggcgccaatccacatattacggatatctttggaatggactgctctgctctacgctgtgtacagtgaatatacatccattatagaaaaacttctttcatcatggtacaaatatagaagaatgcatgcaaggtataggtcaatccaatgttattttcaccctattctgaatatgtcatttattttaacattgatcagcatgtaagggtcaatttaccataatttggcagctcatacattccttgaagtgagaatcattttgaagtgccttaactgtttccgattttactttaaatattggaacttttaaagaagtcattatagggaacagtctcatgtcatgcacttatggtaa

SEQ ID NO: 601920 - DNA, 606 bp, Homo sapiens
atggtctcgatctctgacttgtgatctgcctgcctcggctccccaaggtgctgggattacaggcgtaagccaccatgcccgatggccaagaattttctagaatgggtaaacatttgagaagctatgattcctgatcgggatatacaagaaaagaatctttacctagaacaagagtgaaaaaaactcaacaattgaaagtcaaaaagaaaatatgaaacagtctcaggtctcctccattttttctgtatgactgtttcaagccactcactttactgatgttgaactgatactcatcactctaagatttatagaccaaaactattaattaggcttattaattggtagctatttatagacaaagccacaagtgggaacccggtatcccttatgtccagtgcaccagttatatgtgatattctggagacaataggcaaatgaatttttatataaagaaagtagttcacttttcaaacttaaaagggaaatatataagaatgcagtcatcttttacatggttcaaaataatgagaacaatatttagcaaatacttagaaacgtgtcccaccagctaaacgtgttaggcaacaaaaagtagtagaaataaga

SEQ ID NO: 601921 - DNA, 201 bp, Homo sapiens
tcagggaaatggccttcccgccggaggccagctatttgcctgacaggctgtgacttttttttcaaccttggccttttccccttttttgagcaagtgggttgaattttttttaaggcttaagatttgtttttctcttttcccagcaacattttcttgaatttttttcggcccagcttttccaaaataaaacccttccaaaca

SEQ ID NO: 601922 - DNA, 483 bp, Homo sapiens
  misc_feature (25)..(25): n is a, c, g, or t
  misc_feature (34)..(34): n is a, c, g, or t
  misc_feature (64)..(64): n is a, c, g, or t
cccctccgtttggaccagataattnattaagtgncctacctgtgtgcccatcccactgttcctnggttactgggcccttgtccagtgaagaacagccaaaagatccccccacttacttagaggcaataacctaatagataactaagatgttagaaagtgtgataaaggctgggcatggtagctcacacctgtgatcccaagcactttgggaggctgaggcgggtggatcacttgaggtcaggagttcgagccagcttggccaacatggtgaaaccctgtctctactaaaaatacaaaaattagctggttgtggccgtgcacacctgtaattccagctactcaggaagctgatgcacgtgaattgcttgaacatgggaactggaagttgcagtgagccaagatcacaccactgcactccaccctggtgacagagcaagactgcctcaaaaagaaaaaaaagcgtgataaactctgtgaatatat

SEQ ID NO: 601923 - DNA, 208 bp, Homo sapiens
cggctatcacataatccaataggtttgatccaaaacatgaatagatcccactgcttattttaaggcatattaaaagggaactaattggaccatttctaattgtctattttattaccaaaagggtacctaattggtacactttattcagattaccattaattgagagtggttatgagttaattagtggtccacaacattacttcattct

SEQ ID NO: 601924 - DNA, 210 bp, Homo sapiens
gggagatctgtgcgaaactcaagagataagcacccagtagacgtagacaagcagtgctgagctcaagccgcaagaggttctggagcaaaggagctggcgttacagccaaagatgatattgtagacgagcaaaatggagatacctgagagaggttttctatgatcagcttttctattatggaggtgttagtggctgtatgacttaggccag

SEQ ID NO: 601925 - DNA, 223 bp, Homo sapiens
gatataatgtagctccagtaacctaaaagttttgggttcctcaaagccgatatttaaaacttggatgttaaaagcttgtcaacttatgtacctgtaagaattttgagcttgtttattgtaatattaacagaattaccatgcctttttcccccatttttaagaattcctgtatctatgtgtatggctatgggatgtaggccttgacatgtgacataaaaaaaaa

SEQ ID NO: 601926 - DNA, 506 bp, Homo sapiens
cgcattgctagctgacatgtctgctcgtcgtctctatcacagatcctcgcgctccttggttgcagacattcagttactgaagacgaaagtcactgtcaagacgataaggtcgccacaccctcattcgagtgcacgaggagtcatacttcgaggtctgacttgtaaaagcccatggtgtcagtaaaccgcatgaccagaaccaatccatatcttctagtttcttggcgagtataattgccactacatcacagttgcttctaagcatctttatagaaaggtggcaactgaagccatgaaattctcaggcaatcagcattttaaattactctttctaggctgggtgcggtggctcacatctgtaatctcagcactttgggaggccaaggcgggtggattatttgagaggtcaggagtttgaggctaacctggccaacgtgacgaaaccccgtctctactaaaaatacaaaaattagctgggcatggtggcgcatgcctataatcccagc

SEQ ID NO: 601927 - DNA, 348 bp, Homo sapiens
tctcccatggccggggctcctgtctactgcctcctaccccgcacttaaaaaaactctaatcgtaggctgggcgtggtcgttacgcctgtaatcctagtactttttgggacagaggcaggcaggttgcctgagctcaggagtttgagaccaggctgggcaacatggtgaaaccctgtctctactaaaaaaacaaaaaattagctgggcatggtggtggatgcctgtaaatcccagctactcaggaggctgaggcaggagaatcacttgaacctgggaggtggaggttgcagtgagacgtgatcatgccactgcactccagcctgggcgacacagtgagactctgactca

SEQ ID NO: 601928 - DNA, 822 bp, Homo sapiens
  misc_feature (289)..(289): n is a, c, g, or t
tcgcagccatccaaatcccatgtgggccgcttcaccgcgtccctattacccggcgctcacccccggccttgtcaaatggcctcctttacgggtattccctcttgtttccctcccagaaatttttcttttccccagagatttttttccaggcgccctgtaaccaaactgcgcgctgggtcgccctctcccgccccatttattgggggcgcctctgcgctccccaccaataggcgtctctccactcccgcgtttatctcccctcgatagtgtctccgcccctccggaaaanaccaacccgctatttttatctgcccctcagggttgcctcaaactccccgggcgccctccccaaatttgttaaagtagaacacctcacgggcgtaccacctagtatattctcggccgccgcgcgtgtaatcaccagcagtatatttcagtgggtgtgtcttattgttgtcccacctctcctaccaaccactcccgggtatcttcagtgctttctctccctttacaccactttgtcctcaggatgttcctctgcgccgttgcccttttgctcacaccctccgtccctcgccgttatacccctgattactgtggatccagccgtatccacccactttatcgtcgttctcccaccccactgaaccatgtacgaatcctcgtcaatcacccaccaccacctataggcgctgtctaaaactcccccccactgcactgaacgagccctattgtctgtcaagaagatgtcttgttgaagccgacttgttacttcgacccgcaccacatcttttcgtattaagcagtgctttacccaaagtc

SEQ ID NO: 601929 - DNA, 945 bp, Homo sapiens
gcctaaaagcgtacgtgcacgtgggcgtactcggcaccctaggaaatcctgtgtgctggagtcacatgctgggatctccccctctaataccataagcctgaagctgtccgatcgatgctgagcaactccagtatgtgtccctgtcggtcctatcctcgtgtgtcgatctacaaggcagtcaccgccgtaagctcgaagatctacatatttacggtccactgtaccgagagtaggcattccaagttgggtcaatctttgcattccatttctttgctatctaattacatcagggttttccaatacgtgttggccaaaaggtgactttcatttaaggatggtcaacctaagatcacaatcgggctccttgccccaaaaaatccctactagatgcacatttttaatcaccacgttaggaactacaaatccgggattctatacagaggacattaccattttagggatctggccatagcacactcttgacgctccatctccttgaccacctgtgggtgcgcatttcctggaaccagccaccaaagacttatcctttatcgttgtaaccctcaagaacaacacagaggctgtggttatctggcccatcagagactcgtatgagagttggtcatgtgctcaattgctctggacagttgttcctctcccccacagatacctttacggtggactactcttgcttataagttgtcaacctccaacaaaaggagaaccactgctcttcaaatattgtgggctcctcccctttaagtttcccttaactcctaatatttgctttatacgcatttaaatattaactaaagtcaggaccttattacgttactatagatgtgctgtatgtaatataggataagttattcagatctgtttccccacaagatataagaccttagggagagaccttttgtggatccactactcttgatatggccg

SEQ ID NO: 601930 - DNA, 175 bp, Homo sapiens
cacggcacatttgcagagtagccatgaaaatggacacattatcataatacttaaaaaagtaatgattgatgagaacaaaatatttaggactcatctggtctatatctactgacaatagcccttcaaagtttcttagttatacttggtaagggctatttcagtaggtatgagccga

SEQ ID NO: 601931 - DNA, 283 bp, Homo sapiens
cgtcgacccgtgactgacccaccgccaaaccggtcatgatgggggatgttgcaggcagcagaacgttctccacggtgtctccagacactatgtcacatgctcagtgtgaacctgctttcatctgtgaagagtacagggtgccagtggcaaatttgccaatcttagtgttctctggcaaatgccaaacgtcctccacagtgtttggctataagcacaacccccacctgtggacgtcgggccctcataccacgctcatggagtcgtcgacgcggccgcgaattta

SEQ ID NO: 601932 - DNA, 224 bp, Homo sapiens
  misc_feature (185)..(185): n is a, c, g, or t
ttgctatattatgcttcgtataatttttcatctttcccttgcggaactatatctattgcgccaggtttcaatatctatcgcctatactctatttagtggttaatcgttatggctaacggttgtctggttattacggaggatgaggggctctcagaagggtaccgagcatctcaattcgtaagcantacgtcattgcgtgtttccgtgttgttgaaaacccatgg

SEQ ID NO: 601933 - DNA, 268 bp, Homo sapiens
agtggctcctcactgtctcctctaagaggagtccaggttccttcatgtggtttttaatttttttttatttttgagacagggtctcactctgtcacccaggctggaatgcagtggtgctatcatagctcaatgcagttctgacctcccagaatcaagcaatcttcctgcctcagccttctcagtagctgggactagaggcttatgccaccatgcctggctaatgtttttttctctctctcctttttttttttttttttttttttttttt

SEQ ID NO: 601934 - DNA, 701 bp, Homo sapiens
gaccctgagcagactggggaaccagacacgagtgctgctggaggagcagtgctcggcacctgctgaactgagcagtgaacactgccaccatggcctactacctgtgatgagtaccgtggctgtgcagcgtctctgtgtgatgtgccctcgtcatggccctgttcaatgctgctcaacacccactgccaatgttctcactcctctctgagtgtgagagtgcaccatttccccgcaagacctagaactgcttctgaccacctggtgcttgagtgctgtgatgatttgatgtccagtggagaggctgctggacatgacccaccatgtgcaccctgtgtgtgctgtggtgacacctactccatggtctcctacagtgacacggtgttcatccacagtgcatgccacgtgcacctccaccacctgtcatgctctgtgccagtgaacactctggacctggagtgaaacttggcgagtgctgtccatgggcaatatcaactgccctcccagatgtgtcctgtggatgatgtcatgatccaccctccctgggtgtgtgtgctgcgtttgccctgcctacgtgccgtcgccacgagcgactctcgtgtgcctcaccggggcggatcgtcctccctaggcctgccccgggacgtgggcgggagacggacgtcgactcccgtctgcatgcctgctgctctcccctgttctcg

SEQ ID NO: 601935 - DNA, 478 bp, Homo sapiens
cctggggtctgccggagggccaagtcgtggcttacagaagagacgaaatgtggtctgagggacgatatgaatagtgaaagaattccgagcagaacgacgcacactccctcgaatgtcctcccagctgatgaactctggctctagtacgactggacaaagacgacgactcacttctgcaagcacggcaaccgtgaactacagggcacatgagcacgactggcattcagcaaccaacaacgtttctacctcttcccagttactgcgacacagacgcccggctctcccttactacaacacgcggcacaactaccttctcttctcacgacgaactcaacccctgctcgcgcccgacacacggacttctccaccaccacgcacgactctgggttccacgctgtccacgctaccgcacgacagcttacctcctccacgaccaaggacgcaaactcactacctcttttcccatcagctctcaacc

SEQ ID NO: 601936 - DNA, 138 bp, Homo sapiens
tgttagtttcgggacgtaattttggctgagtctttcgctatcttcacgccaactggcgcctccttattctttatctgccgtcttcctaacacgttcgggtcgagtgcctagattatcggctcattgtctctactctga

SEQ ID NO: 601937 - DNA, 174 bp, Homo sapiens
tgagcctgtcccccagtgaaaacggcactactgctgttacttgcaagagctctgccactacgaggtgcagtgattgcctcatctgtatgacctgccttcttgtgaagtaacagcggtagtgtgccgttttcctgggctgtgatgtttgtgtattaccacggcctccccctctgt

SEQ ID NO: 601938 - DNA, 83 bp, Homo sapiens
gtgtcaggagagatcaagagctagcaaatatttctagcataatcacacatttaactccagactcagccttgtagtataattcc

SEQ ID NO: 601939 - DNA, 508 bp, Homo sapiens
ctcctcctgcagttatctcgtctggaagaagtctgtggtagccaatatcagcccagaattagtgattccatcatatctgttagcttacacatatgcatctgccactctcctcccaagacagctccctcctcaaactactgctcactgtaagtccggcgtccagatacccccccttactggtgcagtcctgattctaagcccttcctcgtcctgtataactcagctcacagggccctgtactagcactatagaccattactcactactagatatccagtttatgaccatagcctcagtgggtccccagctgagtacctgcagccttcactatctgtccaacgtcttctcacctctagcctctctgtaccggtgcccactcccatccccaggacgcgatgccaccgcgggttacctgtcactggtgcagtagcagggcatagccttgaccgaacagctgaaacaagaagcgcagctgtcctagacgtggaatctcctctaagctccgttg

SEQ ID NO: 601940 - DNA, 303 bp, Homo sapiens
ctatgcccctattaaacgacaaaccgccctttttagcatgatcaccccagcgaacccggtccctgctgtctgtgtctagtggatctgcctcttctgggtatttcataacaagcggaatcaaaacacgtggcctctgtgacagggctcattctttccgcagtggtgcatgtcaggacagtgtcctgcatagttagcgggtatcaagcacttcactcccagtggccagactcaggtgctggtagtgtgagatggactgaagtgctggtgtgtgggtggataaggtgctggtgtgtgggtggatga

SEQ ID NO: 601941 - DNA, 161 bp, Homo sapiens
acatcaacccactaaaaatattaaacaaaactaacactaactccctcaacacaagccacataaaaatcaacaattataacaaacactgagaaccaaaatgaacgaaaatctgtgcgcttccttcattgaccccacaatcctaggcctacccgccgcagtca

SEQ ID NO: 601942 - DNA, 312 bp, Homo sapiens
  misc_feature (83)..(83): n is a, c, g, or t
accaaatgcaatatgagatttgacagctgaagagctcatgaatgcctagtacagattggcatggttccaaattattatgaganagctttggtcatccaatgcctgtgtctaccaaagtcaggtacgttcctgagggttggggatgatgtcaattttcagctctttaccactgtccaacttcgaaaggtctgtcaggctctcatagcgaatcttgtccaaggcatcagaagcattggagatcaactcccgaaggaaaatctccttgttggaatagaaggtattgatgatgagggacatgtgttggggataaca

SEQ ID NO: 601943 - DNA, 801 bp, Homo sapiens
catgtggggcttaatacctaggtgatgggttgataggtgcagtaaaccaccatggcactgtttacctatgtaacaaatctgcgcatcccacacatgcatcccggaacttaaaataaaataatgctttttaaagaaaaagggcaaaagatatgaatagacacttctctaaagaagacatacaagtagccaacaaacatatgaaaaaatgctccacatcattaatcatcagcgaaatggaaatcaaaaccacagtgagataccatctcacctaagtcagaatggctgctatgaaaaagttaaaaaaaataacagatgctagtgaggctgtgaagaaaaaggaacacttatccactgtggtgggagtgaaaattagttcaagccactgtggaaagcaacttggagatttcttaaagaagttaaaacaaaactaccattcaatcaagcagtcccattactggggatatatacaaaagaaaacaaattgttctaccaaaaagacaattcacttgatgttcatcacagcactactcacagtaacagagacttggagatcaagttagatgctattcaatggaggcttggatcaaagaaaatgtgggtccatatgtaccatggaatacctatgtaggcataaaaaaaagaactaataggcgcggggcagggcaatgcctgtaatcccagccttgggaggtggcggggggggcccagggggggggggccccccccacagggggaccggtttttaaataaaaaacggggggggcccgtcccaccgagagggaaccgacggggggcgagccg

SEQ ID NO: 601944 - DNA, 113 bp, Homo sapiens
  misc_feature (39)..(39): n is a, c, g, or t
tctagaggatccattggagaatgtgcatagatactgcantggtttctcagcagaagaagaagaagaagaggaggacatcagtgaagagtcacctactgagcacatcttccaat

SEQ ID NO: 601945 - DNA, 139 bp, Homo sapiens
tgcaaagaaatataacccatgtccatcaaaaaataattaattaattaaaaacactgtagtcgatgagaagaatggtgccaaagtcccaggctcctgaccgtggatcacgactctcttgacctcgtgatcgtgcccgcct

SEQ ID NO: 601946 - DNA, 193 bp, Homo sapiens
  misc_feature (192)..(193): n is a, c, g, or t
aatcgagccggaccccgaatccttttctctgtcgaatatgcttgggctagggagcgccgaaggatactatggatagtgggatagtcgtagagaaaacgcgccctgcttctttcaattggaatttgatgtaatgggtggtagtcgaccgcggctatcaacatttaacatttagcgcgcgagtgagtaggggann

SEQ ID NO: 601947 - DNA, 188 bp, Homo sapiens
ccatgagttacatgaagaacggagctgagcctggacatcaacaattactggggagaactgggccgagttgtgcatattatcccagccagggagcctctttacgtgattcaacccagaagaattgagattgattttgaaacactctagccattcacacttaaagaagcttgagcgctatgtcctttcct

SEQ ID NO: 601948 - DNA, 380 bp, Homo sapiens
cagcaatccccttcagaatatgtctaaaagaattgaaaccaagacctccaagagagctcacaccctcgttcatagcagcattattcacaatagccccgaggttgcaagcaccccaaatccccatcacccactgaatgcctacacaaaatgtggtctatatatacaaccgaatattcagccacaaaaagaagggaattctcatacaccctactacatggatgaatctcaaaggcattaatgctagctaagtgcaataagccagtcacaaaaagcaaaaattatgtgattccatttatatgaggcatccagagtagacaaattcacagaaacagaaagtagacacatatacctataatctcaccacttaaggaggctgagtc

SEQ ID NO: 601949 - DNA, 189 bp, Homo sapiens
ctctccaactcagttcttcagaattggcttttttattatggtagaaataagtcactccagcccgcactcaagaggagggaagatgggctctacgtagggacggaggtgtcagagaattggtgaacatattctaaatctctacaatacactcttcagccacagattatttacattcatcccacgtgcaga

SEQ ID NO: 601950 - DNA, 304 bp, Homo sapiens
  misc_feature (48)..(48): n is a, c, g, or t
  misc_feature (87)..(87): n is a, c, g, or t
  misc_feature (143)..(143): n is a, c, g, or t
agaaggaaagaactgcatccagattggctataggtacagttacttccnacagaaatgcgtctttcctatggcttcttaaaactaagnaaaatattcagttatgagaaaagaaaagaacttttatctgaggaacacaagtcctnttaattattgggcccagagaggtattaaaaaacaggcagcaattgttgcagaattttgctccttagttcagttgtaagtgggttcttttcacacaaccaggaaatttaggcacgcagacacattaaagggtgagtagagcaggattttattgggtgaaaag

SEQ ID NO: 601951 - DNA, 344 bp, Homo sapiens
tcggtttacctgacggaaacagactttaagactaggtatgggctgaacgcggtggctcacacctgtaatcccagcacgttgggagggttgacgcaggcggatcacttgaggccaggagttcaagaccagcctggccaacatagagaaaacctgtctctactaaaaatataaaaattaaccaggcagggtagcatgcacctgtagtcccacctacttgggaggctgagacaggagaatagcttgaacccgggacgtggaggctgcagagatcatgagatcttggctgcatgagctaagatcatgccactgcactccagccaggaagacagagtagactctgtctc

SEQ ID NO: 601952 - DNA, 135 bp, Homo sapiens
tctcatggacactgtgactacatagttttaatgcaaagtcacaagtgagccgtaaagtcacttacaggctcactttacaatctcatctgtaaaaaaagcaccgatatcttacacgatgttgggtaccggagctcg

SEQ ID NO: 601953 - DNA, 927 bp, Homo sapiens
taagggaatgaagggatttattgaaaatgaaagtacactccacagggtgggggtgagcctgagcataggagcacaaaagcccgtgtttacagaacttcagaagagtttaaataccctctagggtgattccatgtggttactgtggggcacacgtttatgtagcatggagagccgtgttacagaaacttcgtgagaagtttaagacacccttctagggtgatctccatgtgggttacttgtggggcacacgtttatgcaagatggaagaggatgaagtttacaagagtcattgtgctgtgggcctagtgttcctagtgggaaaagggtatttcgctatcaataactgaaggtggtgaatctagcctagttttcccgtggcactcagaacccatattttccgtggcctccataccttacaggctggtggtggatccgttagacgtggtcaccgtctttgcccttgtggaagcctacagggttccatacatgcgggtacaaagtggagggccgcacattagctcaacgtgcgtgaacattgtgctgggagactccggaacaaacctcaaggtgtgctactaacatgtttggtaccgtggtgtttctgggcgccctcgtgtaaggccctctgcaggggcatggccccagggtgtgaacacctacttcacattattctgtgggagacactggtaccatggggtttgcagccaaagcgcttaaaagtgggttccgtggtttcagcccttgcctgtggaagcattcaggcgtggaacccttagggctagggaaaagggttcggagaaggggaccctaaacgcccaatgttgcccgaacctgaggacacaattccacgagaaaaagcataccttggtaaacttctgggccacgtattgtggacccagaatcctagattgaaaagctctaggatca

SEQ ID NO: 601954 - DNA, 484 bp, Homo sapiens
ttgattgtacatttgcctctgtgtcccgcttgtccgggtcctagtggcgagtctcggggcccgtgcggagggtgcctcgctttctccgttcgttgcgtgacgttcgtctgccaggctatgtcgcacctcggcgcagggacacacgtggatttgtttcgtggttgaaggcgacgctatgatgtggtgccctcatcttgttcgcttgttatgtgcttgtcaaaagctgtatctttcccttctccacgatgctacacactgctaggtttctacttatgatgtagtacctttatgtcgaacatgtttccaggctggctgatctgtctgtcgggggtggggccagggcccccctagccgcgaaggccccggccgttcatcatcttgtccctcgtcccccataccacactccccctcctagacccccgcccctttaaacaaccatctggaaattaataaaattcaaaatgggtgtttaacttaaactcca

SEQ ID NO: 601955 - DNA, 877 bp, Homo sapiens
  misc_feature (23)..(23): n is a, c, g, or t
  misc_feature (30)..(30): n is a, c, g, or t
  misc_feature (38)..(38): n is a, c, g, or t
  misc_feature (43)..(43): n is a, c, g, or t
  misc_feature (46)..(46): n is a, c, g, or t
  misc_feature (49)..(49): n is a, c, g, or t
  misc_feature (51)..(51): n is a, c, g, or t
  misc_feature (67)..(67): n is a, c, g, or t
  misc_feature (79)..(79): n is a, c, g, or t
  misc_feature (81)..(81): n is a, c, g, or t
  misc_feature (87)..(87): n is a, c, g, or t
  misc_feature (102)..(102): n is a, c, g, or t
  misc_feature (134)..(134): n is a, c, g, or t
  misc_feature (150)..(151): n is a, c, g, or t
  misc_feature (153)..(153): n is a, c, g, or t
  misc_feature (508)..(508): n is a, c, g, or t
  misc_feature (553)..(553): n is a, c, g, or t
  misc_feature (576)..(576): n is a, c, g, or t
  misc_feature (663)..(663): n is a, c, g, or t
ttaaacccccaacagctgggccngggggancactaccntcaanacncananactggtagtggccccnaatggctgggcncnctgatntttattgcatacaanacaagggggggcagggtaaggagggtgaatcntctaagtgattgacanngngaagcaagtcacatgatcataggacagggggcccttccctcttaggtagccgaagcagagagagaaggcagcaaacgtcagcgttttcttgtatgcacttacaagaaagatcaaagactttaagactttcactatttcttctaccgctatctactacaaacttcaaagaggaaccaggagtacgggaggagcatgaaagtggacaaggagcgtgaccattgaagcacagcaccacagggaggggtttaggcctccggatgactgcgggcaggcctggataatatccagccttccacaagaagctggtggagcagagtgttccctgactcctccaaggaaaggagactccctttcncggtctgctaagtaacgggtgccttcccagacactggcgttaccncttgaccaaggagccctcaagcngcccttatgcgggcgtgacagaaggctcacctcttgccttctaggtcacttctcacaatgtcccttcagcacctgaccctatacccnccggttattcctaggttatattagtaatgcaacaaagagtaatattaaaagctaatgattaataatgtttataataatgattgataattgtccatgatcatctctatatctgatgtgtattatgactattctgattctaactattttctttattatactgaaacagtttgtgccttcagtctcttgcctcggcacctaggtaatcctccaccaa

SEQ ID NO: 601956 - DNA, 804 bp, Homo sapiens
gcaccgctgtcgtcggccagaagccaaggagtcctcagtgacggtgggatccacaacatctccacagtcgctgtccccacccagccaggcagcgccagcactagctcagacgcaaggacggaaccgctggactccagtgttccttgcctgggagtagtgagaaatccacctgctggtggtgctgagtgtggcctgagtggatatgtgccctgggtcccgggatgcccctgccctgagcccatgctgagcagtgagggtgagagtgtgaatgtgccagccatggagccatcccccaagccaggcacagaagtcatccctggcagcccccagtgaatgcccagaaatgttctccaaactggtcctgctcacagcctccaaagacatgcaccaagtgtggctggggtgccaagcgcaaggtgtgtgcactgtgtcatgtccctgtgggtgtgccctggcccctgccacccttgccaatggccctcctccagacccaccccgaggcccatgctgggccattgaggcagcccctcagtgagcctgagcagaaacggagcagtgcagtgacccagtgcacagacagaacagaaagacagtggattagcagcggggcctcctgaggctgctggggagaactttgccccctgctcttgtggcgcccggcatgtccctgtaaccttgacaacagcgcattctcccaggcaccaaccaggcttaggctcttctctgccgcaggcttctggggccatgggtgatcttggctttacttgttgttccttcttttttagacagttatctttggcggaa

SEQ ID NO: 601957 - DNA, 452 bp, Homo sapiens
attcacaatagcaaagatacagaatcaacctaagtgcccatcagtaacagattggataaagaaaatatggtacacatacaccatggaatagtatgcagccataagaaacaatgagatcatgtctcaggaacatggatagagctggaggctattatccttagcaaactaattcaggaacagaaaaccaaataccacaggttctcagttgtgagtgggagctaaatgatgagaactcatgaacacaatgaagggaacagacactagggtctacttgagggtggaagatgggaagagggagaggagcagaaaaagtacctattggtgatgaagtactctgtacaacaaacccgtgacaagagtttccctatataacaaaccttcacatatacccctgaacctaaaagtttttttaattgtaaataaatggatcattaaaaaaaattttattaata

SEQ ID NO: 601958 - DNA, 188 bp, Homo sapiens
tttttttttatttgaatctcctccagacttgttagagtaactggacaaggggtcaatgcctacttcttgttcttctggctgcagaggatgtctagtttcagataaggaatgatacattgtgggaactggacagcgtcaccaaaagtaactacctgtggcgcagaagggctccccagctcctgtcgacg

SEQ ID NO: 601959 - DNA, 1279 bp, Homo sapiens
tgtggtagtggacacctgtgataccagctacatgggaggctgaggcaggagaattgcttgaacccgggaggtagaggttgaagtgagctgagatcacaccatggcactccagcctggacaacagagcgagactccatctcgcctgtaatccacactttgggaagcaaggtaggcagatcacctgaagtagggagttcaagaccagcagggccaacatggtgaaaccctgtctctactaaaaagataaaaaaattagccaggtgtggtggtgcatgtctgtaattccagctactcaggaggccattgcactccagcctgcgggacaagagcaagacttcgtctcaaaaaaataaataaataaataatggctgcgcgcagtggctcacacccataatcctaacactctaggaagccaaggtgggcggatcagctgaggtcaggagttcgagaccagcctgggcaatatggccctgttggactaaggcagtcctttcacttccactcaatcccaccaggggtgaggcaaaacctggcctctactaaaaatattacaaatagcagggcaatggtgcattgtgccttgaatccaagttattggaaggctgaggaagggaatcgcctgaaccaatggagattgcctgaacccggaaggcaaagatgcaatcggcccaaattgcccatccactccaatctggtgaccagagccaactttttctaaaacaaacattcatatccacatcaccttgtggacgctctgcccatcgtcttaaactcggccagcttaccagcgtccgtatctggcctaattggcacaattccctaatgggggcgatattcaatggcgccgttataacagtcggccgcgcctcggggtcccacttacctccttgctcatcccctttctcctcgcggtatatcactcggcccaccgtctgctttctatataatgccctcctcatcgctccgatatatctctcttattttcttcacaccccgcaacttctctacatcgttctttttcacccagccgctagacccactcctctctgcacacaccacacctagcggccgttcttcccactctctcctcctttcttacactgctgccccgccttcgtctgctactacgattgctcccttctacacctctcctccaccgcttctacctctctccacactacgttctgtcagactctacctttccgctacatctactcatatacctattatctctacactctagtactgttctcctaccatactctccgctgccgtctcc

SEQ ID NO: 601960 - DNA, 1006 bp, Homo sapiens
tctgttttttttgaccctcttgtttcccttactttgggctccttgagggtcgtgtgcttatttctccatgctggtggtaacgcacctggtaagactgctccctgtatacccaagatggtgcgtcccatcggttctggcctgttcgtccggtttgctctcccttatcgtttcttacccccactggttcactcttggccccagttgccgtctccagcaagccctttggacctcctggataccagcgtgcctggcggcgctcgtggcccgccgcccgggtttctagattttcagggagtgcaagcaactgctcagccacagacgacgtcaagccagtcgctccggctgcatccacatcaggtggacggccatacccatgttcagcctgtggcaaagctttctgtcagagtacccacttgaaagaccacaggtcgcctgcacagcatctgagcggccctttgcctgtgaagtgtatgtcaaggccttttgccaatctccatgcgcctggcagaacatcgccgcatcccacacaggcgaacgaccctgacttcctgccctgactgtggcaagagcataccgctccggtcatccaacccatctggaagcaccgcaagacccatcagcagcaagcatcaggcagctgtgcaggcaagccagctggcagaggcggaggcacggaccggtggcctaggccgtcatagggaagacatgcgtgtgggaggcgctacccccctggtggtaagtccattgagatcataccctctggccgaggctgacgggggtccagatcagctggtctgacttctgcccgacttcctctttggcactctccattccctgttgactgaaggccctgccagcatccccttaagcatctgtacatactgtgtcccttcctcttcccatcctcaccaccttgtaagtttctaaattggatttaattctctcgtgaggggggtgctctggggtcctgacacacataaaggtgtaacccccaccgttccacctc

SEQ ID NO: 601961 - DNA, 930 bp, Homo sapiens
  misc_feature (266)..(266): n is a, c, g, or t
  misc_feature (284)..(284): n is a, c, g, or t
  misc_feature (290)..(290): n is a, c, g, or t
  misc_feature (298)..(298): n is a, c, g, or t
aaacccttgctttttaaaggttatttttactatttctttatccctttattggatcatcccccttgggttcataatgtaaatactatatgttggaccaatttaatgtccaaattttttttttccatagtccctgttaatagtggggctttcaggggtttaaagattttttttgttggtgttaaccttccttgccaaagtactagatgggggataactctaaagttgaattttaagggattccctaatatgtatactatctttttatntgaagtaataaataaacnatgatnttgaaagngcctgaaaaaaaaagaaaaaaaaaagagaaagaaaaaaaaaagaaaaaaaaaaaaaaaaaaaaaaaagaaaaaaaaaaagaaaaaagaaaaaaaaagaaaaaaaaaaaaaaggagcggggggcgggcaacatcctacaagcaggaggggcgagccactgatcaggacagccgactgttattagtaagaaaggaggggccacacacaatagggaggagataataaaaaaaagcagcgaggggccgagcacatcaaaacacaacgctagcagaacgaagagagaagcaacaagcagcggacaatcacgtacgaagaaaccacaccaccacaaggaggggcgaggaacagacaacaaagggagggcaagaacacaaccagacgaagaagaaggcaggaaaaacgaagcgcaccagaagagacagataacactacacagacaaggagcgactgagaatgagcgcgagagaccacacacacacagaactactcattcaatgtacgaagagagacgaaagagaaataactaacactgaagcgacacgagagtgagttactaagaaaagagaacgaactaacatcaacacgacgaggcggcggaataacacatacacaaccaagcacgagagagcgaac

SEQ ID NO: 601962 - DNA, 139 bp, Homo sapiens
aagactttgctcttttgggtctttgctcttttggggactatgctcttttggggtctttgctcttttggggtatatgctcttttggggtctatgcccttttggggtcttatgctattattgaagactatgctctattggg

SEQ ID NO: 601963 - DNA, 152 bp, Homo sapiens
ggatctcgacgagtgtgctagatgaaaaagctctggagatctgttacataataaagtacatttaacactactgaactgcacatttaaaaatgattaaggccaggtgcggtggctcacacctgtaatcccagtactttgggaggccgaggcag

SEQ ID NO: 601964 - DNA, 253 bp, Homo sapiens
attatggaacaaaggcaacttgatagaggctgaaagtttagtagttgcattacgcaggatgcagcagggcaactgggattggggcgtgacagttcctggttggaggaatggtgtgggtgggtccaaactccgccaaatttgctggtggtgacggttgcctaagcctttgtgtagctaaagaacactggaaacactaaactggcgaaatgtgtggtttgtgaactttaactcaatagagctgtttgatataata

SEQ ID NO: 601965 - DNA, 230 bp, Homo sapiens
tgcagtgtagctggaattctgtgctttgaggcagacactgagagcagccagtgtcaacatggctgaaacccagtctctacagaaaataaagtagtgttggcattgtggcacactgcctagttgtcccatgctgcttgcagaggctgagtgtgggagggttcacttgcagctccagtgaggcttgagtgcttgcagtgagcctgatatcacaccacctgcactccagcctc

SEQ ID NO: 601966 - DNA, 643 bp, Homo sapiens
  misc_feature (193)..(196): n is a, c, g, or t
  misc_feature (199)..(199): n is a, c, g, or t
  misc_feature (203)..(203): n is a, c, g, or t
  misc_feature (213)..(213): n is a, c, g, or t
  misc_feature (284)..(284): n is a, c, g, or t
  misc_feature (293)..(293): n is a, c, g, or t
gtctttccaaatattaaaatcatttgaatatgtatgctgtgatctgaacactgctcaagccatcaagcagtcttcatacagtttgcattataaaatctcattaaattctccaagaaaaaataagttgaagaattttatttcctgaccatgcatcccctggatttctgagtttcagttcagattgtagatgacnnnntanctcnttccgaaagncaacatctgaatgttaagtccattttccccatggaagaagcccgtagttccatgaagtatggattaccatntgtattttncactaacagtaaaagtatttttcttattaattgcttgccttacgattgatgaattacattttttgttcctttcttaccataaacattttgctttactaagtcagccttccttggatggtcgtttcttaataaatggttgagctgctgatgccagttttgccaagctacaagacacaatatcttaaaaaggaagccggcgccgtttggcatccgagaggacacttttgcaggacactgggccaagacaggaaatattcaacttttatgctgattaaaggagttttggaaagaatacaaaggattcctaatgggggaacaaaatccatttatgatttagatggtctttcggg

SEQ ID NO: 601967 - DNA, 1021 bp, Homo sapiens
  misc_feature (520)..(520): n is a, c, g, or t
ttttttttttaaattaaaaaaatatttagacaggggtctcactctgtttgatcattctggttttaaactccgtggcttcaagtgatcctcccatctcagcctcccaaagtgctgggattacaggcatgagccattgcacccggccacaattatttatattatatttatactttattttatatttatttttgtgagagggggctcttgctcgtgttcgccaagcgtggagttacaggtgtgcctcaactctcagctcacgtgcaaccttacactttgccaggttcaagagattcttccgtgccttcagccttcccgagttagcttgggacttacagttgtgcgcaccgccaaggcccagcttaattttgtggtattttttacttagagattggggttttcacccatgtttgtgccaggaagtggtcctcaatcttgtgtgacctgcggtgaatctgccgtgttctgcggcctcccgaaagtttctgggcattaccgaggcttgtaaccacttgttacccgngtcgttattaagctatttaaaaatctcagacagttaagcatttaatctaaatccctgctgcctgggaatgatgtctgactgacttcttgtgaatacattatgctaattttataccatttttaggatttctaaacaataacagctattttaatatatcttggataacgtggtatttggacactaagtctaaaaagcgcgggaagcctttggggacaaaagttgccctgaattttaggttcccagcgcatatggctcaagtttctttaacctttgtgcttttttttaatcatttttctcaatcaggggagaagaggttctcacaggtttctccggaaccccaaagtttccactgggttctgcatatttcccaatcccacattttggtgtcgcgtgtgccccttaaaccctgtttttctttgggatttcgcactagtgttttcacaaaatcggtgccgaaatttctcaaaaaacagtttgggggtccataaagagagttatgaa

SEQ ID NO: 601968 - DNA, 317 bp, Homo sapiens
aaagggttaaaagctgttcttatgcataccccagtaggaccattctgccagaaaaaatgattaatggccatttcccatataaagttcattgattattggtcataaaaacagaatttagttttccttgcatagttgggcatagagaatttaataaagtgttttaattatttacagtaagctgttcagctctttaatgacaatttttatgtatatggcatatgttttgagactgttaagatgaatcttccttcatttaaacaacagtgttttttacttgaccgttttaaagtcataaatgtcttgctttttaaacttaa

SEQ ID NO: 601969 - DNA, 1135 bp, Homo sapiens
  misc_feature (529)..(529): n is a, c, g, or t
aatctaggctcactgcaacctctgcctcccaggttcaagcaagttctcatgcctcagcctcccaggtagctgggattacaggcacccgccaccacacctggctaatttttttttttctcttttttttttgtggtaaaaacagagttttccccatgtgtgtggccagggtgtggtttttggaaacctcctgtggccctcaaaaaggtgactcgtgcgggctctcagccttcccaagaggtgcggggatttacggggtgtgagccacaggtgtcgggccgtctcgtgagcagtgtttgcatatttcaattattttagaatttggagacattattaagtcagggactcattaaggaactaaattggagagtggtccgtggtgaattgcaatagagtgtaactctcttttaaacattttaagactgctatactctcaaaaatataatctccaggaaccaatttgtacttagtgaccttataaatttaattcattaagagacagaggggatgtattacctcgtgtgagagaccnttgtgtggtcacaaaagggcccgtgtaaggcgtggttgtttaccaacattaggcgccagagaaaccctttttcgctcccgtgtggctaaaataactctataggagaagctcggcttaaggcgtttaaacacagaacaacaattttatctcccttttatcggggcaaaataccgggggtgccccacaaatatatgtgtgagagaactctagaagacatttgtggtggttcggcctaaaattgtagaaaggggaagaaattcatttgggagagaagaactactaatttctgggacctggggaaacatatttccgggggggaggttattaccaagtgtgcgacccaaattttacctttttgggaaatgcggggaccatggggggagctcctccacaaggcgtgcacctccgttgtggtgttccccttctccccgtataattttttccgccggggacgggtgaaagataactgcggcacgtaatgggcgaggacccagtgtgcgcgcttatttcaaaaacgggcttgagggaaaaaaacaacaaacccaggcaccggggcttccgagtatacccaaagaagtgcatttaagggaccccacccaaaccatt

SEQ ID NO: 601970 - DNA, 842 bp, Homo sapiens
aaggctaggtagaggccgggtgttggaggactcgtgcctgctggagctgcaggctccgtgcgctccgtggactacgttctctttcgctccatccagcgcagccgtgccggctactgcctcagcctggactgtggcctgcggggccccttcgaggaaagccccctgccacggcgccccccacgggctgcccgctcctattcctgctctgcccctgaagctccacccccactgggtgcccccacagctgcccgcagctgccaccggttggagggctggccgccctgggtgggaccctgcttccccgagctgaggcggcgggtcccccggggagggggccgccagccgcagccggcgcaacgcagagccccgacacgagcaggtcagcgatagcacaggtgcccatcaagcaccaccaggggcagcggccatccatcatcacggaatcccaaacaaacagaagcaagaagacacaggcccgacaaacagacacaaggaatcaacgaacatccagaagacaacgcaagacatacaggggaagcaaactaccaaaagagcaagacggaaaaaggcaagcaaaagaaaaacatacaagcagatacagagactctgcacatgaagacataagcactacgtaaccagaacaaaacacaagacaagacacatacacagaacaaacgaagacaagagatagcacggaccacgcaacgaaagaggcgcacaagtgcacaaacgagaaaaaacagaacacctgccagagccatggacatgacaaaaactgagaaacaacaggaaaaggcaaaacgggacagaaacaagaaacaaaaacagaaacacaaacagga

SEQ ID NO: 601971 - DNA, 347 bp, Homo sapiens
agtgcagtaaagaatttttaaatttctctcttgatttcatagtgacttaatgatcattcaggagcaggctgtttgtttccatggtattgcatggttatgagggttctggatggaattggagaccactattcaaagtgaagtaacttgggaatgaaaaaccatacatcatatattctcactcataagtgggagctaagctatgggtatgtacaggcatcagaatgatacaatggacttaggggactcgggagaaagggagggcaaggagtgagggataaaaaaattacaaactagatacagtgtacaccgctcgtagcgacagaaggcagggtaccgcgctcgaatac

SEQ ID NO: 601972 - DNA, 369 bp, Homo sapiens
  misc_feature (33)..(33): n is a, c, g, or t
  misc_feature (63)..(63): n is a, c, g, or t
  misc_feature (70)..(70): n is a, c, g, or t
  misc_feature (77)..(77): n is a, c, g, or t
  misc_feature (95)..(95): n is a, c, g, or t
  misc_feature (107)..(107): n is a, c, g, or t
  misc_feature (116)..(116): n is a, c, g, or t
  misc_feature (119)..(119): n is a, c, g, or t
  misc_feature (124)..(124): n is a, c, g, or t
  misc_feature (133)..(133): n is a, c, g, or t
  misc_feature (151)..(151): n is a, c, g, or t
  misc_feature (159)..(159): n is a, c, g, or t
  misc_feature (179)..(179): n is a, c, g, or t
  misc_feature (219)..(220): n is a, c, g, or t
  misc_feature (226)..(227): n is a, c, g, or t
  misc_feature (229)..(229): n is a, c, g, or t
  misc_feature (236)..(236): n is a, c, g, or t
  misc_feature (243)..(243): n is a, c, g, or t
  misc_feature (247)..(247): n is a, c, g, or t
  misc_feature (263)..(263): n is a, c, g, or t
  misc_feature (265)..(265): n is a, c, g, or t
  misc_feature (290)..(291): n is a, c, g, or t
  misc_feature (299)..(300): n is a, c, g, or t
  misc_feature (344)..(344): n is a, c, g, or t
gaatctagtcatagtctttgtgtctcaaatcangtagtccaatatttgaagacaaaatcagtncctttcncagggtnggtccagttttgcgggtncgccttctccanccccctcanccnctgcngctccgggnggatcaggcacatccggngaggagcngacacgcggcagggtcgggncggggcgctccatttgaccaccgtgagagggttcgggcanncagaanntntagtatnatttgcncggngcatgtatcccaaatnantgcccttctcatcaaataagttatnnctcgctgnntaatttttcttccaacgttacttaaagctgtgttattctttttngtcttttttccttcattctgggtgt

SEQ ID NO: 601973 - DNA, 182 bp, Homo sapiens
gtagcagctctgtcacatgctaacttattacgcatgatcgctctactattttttaagccaaatcaacaacaatcctatttagctgttccccaagcttttcctccgaccccctaacaaccccccacgctgctactgcagacagccggacccccactctattcaatgtcacaagaaatgacaca

SEQ ID NO: 601974 - DNA, 162 bp, Homo sapiens
tgtttgggcgatattaaaaatggcaaaatttttgcctatttagtatcttcaaattgtagtttttgtaacaaccaaataaccttttgtggtccctgtaaaattaatatttggtagacaaaatccatgtccctttgctaaggttagaatgaataattttttgta

SEQ ID NO: 601975 - DNA, 142 bp, Homo sapiens
gctggaattcaagcttctaacgatgtacggggacatgagtttctagtcccacctacttgggaggatgaggtgggaggattgctttagcccaggaggtcgaggcttctgtgagctgtgattgtgccactgtctcaacgaaaaa

SEQ ID NO: 601976 - DNA, 815 bp, Homo sapiens
  misc_feature (50)..(50): n is a, c, g, or t
  misc_feature (69)..(69): n is a, c, g, or t
  misc_feature (80)..(81): n is a, c, g, or t
  misc_feature (98)..(98): n is a, c, g, or t
  misc_feature (160)..(160): n is a, c, g, or t
  misc_feature (173)..(173): n is a, c, g, or t
  misc_feature (182)..(182): n is a, c, g, or t
  misc_feature (185)..(186): n is a, c, g, or t
  misc_feature (193)..(193): n is a, c, g, or t
  misc_feature (198)..(199): n is a, c, g, or t
  misc_feature (202)..(202): n is a, c, g, or t
  misc_feature (214)..(214): n is a, c, g, or t
  misc_feature (224)..(224): n is a, c, g, or t
  misc_feature (236)..(236): n is a, c, g, or t
  misc_feature (244)..(245): n is a, c, g, or t
  misc_feature (256)..(256): n is a, c, g, or t
  misc_feature (263)..(263): n is a, c, g, or t
  misc_feature (270)..(271): n is a, c, g, or t
  misc_feature (301)..(301): n is a, c, g, or t
  misc_feature (355)..(355): n is a, c, g, or t
  misc_feature (371)..(371): n is a, c, g, or t
  misc_feature (382)..(382): n is a, c, g, or t
  misc_feature (386)..(386): n is a, c, g, or t
  misc_feature (443)..(443): n is a, c, g, or t
  misc_feature (459)..(460): n is a, c, g, or t
  misc_feature (468)..(468): n is a, c, g, or t
  misc_feature (540)..(540): n is a, c, g, or t
  misc_feature (542)..(542): n is a, c, g, or t
  misc_feature (801)..(801): n is a, c, g, or t
ttaccttccttgaaagtgagagagctattcagcataggaaaatatcagtntcaaaaacacagcttaggngtaaaaggggnntttacacagtatttaanaaaaatgatctacaaaatgacaaagtaagtgttgaaatctgatttcatataaattataaaanctgggtacttagngtaaatgtnatnnggttggnaaatnngtncaatcataagcnttccttaggncaattctttaanatattaanngcatacgaaanattttcnataaatnncttttaagagtgtttcttagaagtgctgcngggaacatcattcgcatagcaaggtggcagtgttctggggacaacatgcaatcnttctgttcctaatggnagcctcatganagtnaggagactataatcatttgctcaaggatccagaagttttaagacaattctataaganagcgttaaagtgctgnncaaaatgncttaatttcagtaccccctgtcatgtaaaacttactcaaatactcagacatttctgagccacatccaatacngnaactatcattctgaaaagtgttaatatacttaatctttcattccacgataggagggttcctttttacactttacaaggattggtttaacatcaagaatcttgcaatgcaaaatataattataataatacagttgaaacaatacacatacgccactgggaaagcacaagttcttttctgcaatggtaaaggtatcaatttttaaaatcacaaatcaaacactgggtaataagaaaaatttccaaatgctgcatgccacanaactagttaaaaaa

SEQ ID NO: 601977 - DNA, 775 bp, Homo sapiens
  misc_feature (3)..(3): n is a, c, g, or t
  misc_feature (72)..(72): n is a, c, g, or t
  misc_feature (82)..(82): n is a, c, g, or t
  misc_feature (143)..(143): n is a, c, g, or t
  misc_feature (150)..(150): n is a, c, g, or t
  misc_feature (196)..(196): n is a, c, g, or t
  misc_feature (343)..(343): n is a, c, g, or t
  misc_feature (355)..(355): n is a, c, g, or t
  misc_feature (377)..(377): n is a, c, g, or t
  misc_feature (381)..(381): n is a, c, g, or t
  misc_feature (388)..(388): n is a, c, g, or t
  misc_feature (390)..(391): n is a, c, g, or t
  misc_feature (555)..(555): n is a, c, g, or t
  misc_feature (584)..(584): n is a, c, g, or t
  misc_feature (597)..(597): n is a, c, g, or t
ggngccgggagcagaagaggcccagaaggaacgccagcggcagaaagagcaggagagcaataaccgccgggngtggggctcnccaggtggggagggcacaggggacctggacgaattggacttctgagaccaacactacactngaccctncacggaaaccagactctacctggactggcttgccccccccccaccnccccaccctggaacccctgagggccaaacagcagagtggagctgagctgtggacctctcgggcaactctgtgggtgtgggggccctgggtgaaggctgctgcccctgctggcagccaccttgagacctcaccgggcctgtgatattngctctcctgaantctcactcaatcctctgcctcncctntgtggcntnncctgttattgtcccctaatgataggatattccctgctgcctacctggagattcagtaggatcttttgagtggaggtgggtagagagagcaaggagggcaggacacttagcaggcactgagcaagcaggcccccacctgcccttagtgatgtttggagtcgtttnaccctcttctattgaattgccttgggatntccttctcccttnccctggcccaccctgtcccctacaatttgtgcttctgagttgaggagccttcacctctgttgctgaggaaatggtagaatgctgcctatcacctccagcacaatcccagcgaaaaaggtgtgaagcacccaccatgttcttgaacaatcaggtttttaaataaacaactggaccatca

SEQ ID NO: 601978 - DNA, 754 bp, Homo sapiens
  misc_feature (3)..(3): n is a, c, g, or t
  misc_feature (72)..(72): n is a, c, g, or t
  misc_feature (82)..(82): n is a, c, g, or t
  misc_feature (143)..(143): n is a, c, g, or t
  misc_feature (150)..(150): n is a, c, g, or t
  misc_feature (196)..(196): n is a, c, g, or t
  misc_feature (343)..(343): n is a, c, g, or t
  misc_feature (355)..(355): n is a, c, g, or t
  misc_feature (377)..(377): n is a, c, g, or t
  misc_feature (381)..(381): n is a, c, g, or t
  misc_feature (388)..(388): n is a, c, g, or t
  misc_feature (390)..(391): n is a, c, g, or t
  misc_feature (555)..(555): n is a, c, g, or t
  misc_feature (584)..(584): n is a, c, g, or t
  misc_feature (597)..(597): n is a, c, g, or t
ggngccgggagcagaagaggcccagaaggaacgccagcggcagaaagagcaggagagcaataaccgccgggngtggggctcnccaggtggggagggcacaggggacctggacgaattggacttctgagaccaacactacactngaccctncacggaaaccagactctacctggactggcttgccccccccccaccnccccaccctggaacccctgagggccaaacagcagagtggagctgagctgtggacctctcgggcaactctgtgggtgtgggggccctgggtgaaggctgctgcccctgctggcagccaccttgagacctcaccgggcctgtgatattngctctcctgaantctcactcaatcctctgcctcncctntgtggcntnncctgttattgtcccctaatgataggatattccctgctgcctacctggagattcagtaggatcttttgagtggaggtgggtagagagagcaaggagggcaggacacttagcaggcactgagcaagcaggcccccacctgcccttagtgatgtttggagtcgtttnaccctcttctattgaattgccttgggatntccttctcccttnccctggcccaccctgtcccctacaatttgtgcttctgagttgaggagccttcacctctgttgctgaggaaatggtagaatgctgcctaaaacaactggtcccttacttggggcccggttggaaggccccaagagggttcaggcggctcctactttta

SEQ ID NO: 601979 - DNA, 129 bp, Homo sapiens
tgtgcactgcctatcatactagagagtagtaccaaataagccaagcccagtgtggttagtgggtctctgctaagggtagacggtcgtgagtcttccaggtactgttcgctgcaggtttaaggcaggact

SEQ ID NO: 601980 - DNA, 302 bp, Homo sapiens
tcttgaaaaaagcttaaaaaagcagatagcatcaaaacaatgcaagactctatagtcttcccaaaagtaatgaaaatgatgctttaaactaagagaaaggatatgttagtttcttctttatgctggaaatgttggctgtcacgacattttaaatctctactattgggaaaaagtccatgattaaattccttacttttctggtatagagatgttatcatatatacttttatatcaactctctccttttttttttttacttgaaaaggaatttagccctgtcaccccggcgggatttcatgggc

SEQ ID NO: 601981 - DNA, 487 bp, Homo sapiens
tcgacgatgcaatcatcttttgttttggaggacataggcaagaaatgtttcaaagctttctcttggggcctgaacaattgttaggcgtaagagttgatgctgatgtttagggttatagattcggctatcagcactgagtgttgaattctgagagtcagaacccatatgttttttaataaatgatatttatgatatgtgagactcttaaaaacttatgaccctgaccaaggatttccttttgcctaggtctatgggcaacaatagggaaaatgtcaattttattttttctagtatataagtgaataaattgatctattcattttatcattctatttttttaattgttcaatattacctgtaccatggagaacatagtcacacttataaaggctttattttcagagaaatagttgagattcatttcaaagagtgtgaagttaagcagaatttgatgataaaatctgatttttccctcctcatttccatt

SEQ ID NO: 601982 - DNA, 264 bp, Homo sapiens
tcgagcagtgaaagctatcatttgtatttgctattagtagatataaatatgtatatacatatcacgttatcaagaataaaaaatgacaataaagtggttcctaccttctaacacctagttaaaccaaaaaaaaaaaaaagccaaaaaaaattatccccctgttttggaggccccctatattttcgatggacttaacacatttttttatctcaaggggggaaacagggattataacggggggaaccaggggggacccctctatag

SEQ ID NO: 601983 - DNA, 861 bp, Homo sapiens
gactttgtcttctccgcacgactgttacacgaggtctccagtagccttctctctcctgtgcgaagagggtgaactcttaattgaagaactcattgcaccacgcttgcggaataagagggctatcacgttccacatgcaataagaatcacctgtgagctgggatgttggcacacacgattgtgtatgcgacgttgtgctataccagcattctgtgcgcagaagtactctgtgcctgtatggaactatgctcttgctggagtggttctaggcataggatcacagcctttaagagggagcatacatgactggagtctgcccatgcaatgtgtgtatgcgtctactctttgcatattccacgaagcatcgcttgacaaacatttttgtcggcgccaaggattgagataggcaattgaatatcgtcgctgggagcccggctcagattttactgagacggagttgggtggattgattgggggttagacccatgggcaggggtaggttctcggatcaagccagtaggcaaaaggggggggccacgggactgtgcctgggcgcttgctagaactccgttgggggggttggcacgaaaagaaaacggggcacattaagaaagacattggggtttgttcaagaacttttgtggggttcccgcggtagttcaggagcatagcgaataaagttttttttttccccccaaaattttgggttcacaagtttgtttcccttccccgaattgggagatttcccggtcctacaacgattgtaccaaggatcccacgtttcgcgaaattttgtgtggcgccacctttcctcagttttacccacttttctcggttgggcgggttttttacccccgcagaa

SEQ ID NO: 601984 - DNA, 200 bp, Homo sapiens
  misc_feature (181)..(181): n is a, c, g, or t
gacccattatcagtgaacctcttgctcccgtggttaactagttctcctgcctcagcctcccgaatagctgggattacaggcatgcaccatcacacccagccaatatttgtatttttagtacgagacagggttttaccatgcttggtcatgctgtgtctccatattcccgaaactcagtgantcgcttcttgacggtggac

SEQ ID NO: 601985 - DNA, 915 bp, Homo sapiens
  misc_feature (42)..(42): n is a, c, g, or t
  misc_feature (45)..(45): n is a, c, g, or t
  misc_feature (61)..(61): n is a, c, g, or t
  misc_feature (102)..(103): n is a, c, g, or t
  misc_feature (109)..(109): n is a, c, g, or t
  misc_feature (145)..(145): n is a, c, g, or t
  misc_feature (150)..(151): n is a, c, g, or t
  misc_feature (153)..(154): n is a, c, g, or t
  misc_feature (157)..(158): n is a, c, g, or t
  misc_feature (168)..(168): n is a, c, g, or t
  misc_feature (186)..(186): n is a, c, g, or t
  misc_feature (290)..(290): n is a, c, g, or t
  misc_feature (296)..(299): n is a, c, g, or t
  misc_feature (303)..(303): n is a, c, g, or t
  misc_feature (324)..(324): n is a, c, g, or t
  misc_feature (357)..(357): n is a, c, g, or t
  misc_feature (398)..(399): n is a, c, g, or t
  misc_feature (497)..(497): n is a, c, g, or t
  misc_feature (501)..(501): n is a, c, g, or t
  misc_feature (506)..(506): n is a, c, g, or t
  misc_feature (528)..(528): n is a, c, g, or t
gtggaaaggtaaatatcgatgtcggcggagccgaacaagacnganatccagactcttttcnagaggcttcgcgcagttccaaccaacaaggcctgtttcganntgcggngccaagaatccgagttgggccagcatcacgtacggngtttnncnntgnngcatagactngttccggggtgcacctgntccctgggcgtccatctgagcttcatcaggtccacagagttggattccaactggaactggttccagctgaggtgtatgcaggtcggcgggaatgccaatgcganggcttnnnntcgncaacatggatgcacagccaantgatgccaacaccaaatataatagccgagctgnccagatgtaccgggagaagatccggcagctggggagtgcgnncctggctaggcatggcactgatctttggatagacaacatgagtagtgccgttcctaatcactccccagagaagaaggactctgatttcttcacagaanacantcaancccctgcctgggatgcgccagncactgagccttcagggacccagcagccagacccgtctacagagagcagtggcctggcacagccggagcatggcccaagacagacctgcttggcacctcagccaaagcctcactggaactgaaaagctcatcattggcaagaagaagccagcagcagctaagaaagggctgggtgccaaggacagcgctaggggcccagaaggtgagcagcaagagcttccagtggagaatggagcgggagggctcaggggggcacgagacagtccgggaagcaggaaggcaagcgatgccaagaaggcaggcggaggaactccatggtcggctacatggagattgggccaacaggggctcccaatggacgaaaaaagaggaacaaagctacaatcgc

SEQ ID NO: 601986 - DNA, 562 bp, Homo sapiens
  misc_feature (7)..(7): n is a, c, g, or t
  misc_feature (29)..(29): n is a, c, g, or t
  misc_feature (75)..(75): n is a, c, g, or t
  misc_feature (77)..(77): n is a, c, g, or t
  misc_feature (89)..(89): n is a, c, g, or t
  misc_feature (97)..(97): n is a, c, g, or t
  misc_feature (109)..(109): n is a, c, g, or t
  misc_feature (123)..(123): n is a, c, g, or t
  misc_feature (157)..(157): n is a, c, g, or t
  misc_feature (177)..(177): n is a, c, g, or t
  misc_feature (189)..(189): n is a, c, g, or t
  misc_feature (191)..(191): n is a, c, g, or t
  misc_feature (194)..(195): n is a, c, g, or t
  misc_feature (198)..(198): n is a, c, g, or t
  misc_feature (206)..(206): n is a, c, g, or t
  misc_feature (223)..(223): n is a, c, g, or t
  misc_feature (243)..(243): n is a, c, g, or t
  misc_feature (248)..(248): n is a, c, g, or t
  misc_feature (262)..(262): n is a, c, g, or t
  misc_feature (267)..(267): n is a, c, g, or t
  misc_feature (274)..(275): n is a, c, g, or t
  misc_feature (277)..(277): n is a, c, g, or t
  misc_feature (291)..(291): n is a, c, g, or t
  misc_feature (303)..(303): n is a, c, g, or t
  misc_feature (308)..(309): n is a, c, g, or t
  misc_feature (317)..(317): n is a, c, g, or t
  misc_feature (319)..(319): n is a, c, g, or t
  misc_feature (328)..(328): n is a, c, g, or t
  misc_feature (339)..(339): n is a, c, g, or t
  misc_feature (373)..(373): n is a, c, g, or t
  misc_feature (408)..(408): n is a, c, g, or t
  misc_feature (415)..(415): n is a, c, g, or t
  misc_feature (417)..(417): n is a, c, g, or t
  misc_feature (441)..(441): n is a, c, g, or t
  misc_feature (445)..(445): n is a, c, g, or t
  misc_feature (448)..(448): n is a, c, g, or t
  misc_feature (456)..(457): n is a, c, g, or t
  misc_feature (461)..(461): n is a, c, g, or t
  misc_feature (485)..(485): n is a, c, g, or t
  misc_feature (520)..(520): n is a, c, g, or t
tagaaanaaattttattttttaggaaaanagccaaaattatcttaaatgtgaaaaaccacaaccaaaaaactgananaaagttttaggnacaagggnatatcttattgncacgcattcacagngaaacaccattttaatgcagggccagagccaacngcagtcctgtccaatcccanagggacaagggncnggnnccncttcctgngttctgcccgacttccncatcttactggggccagcanaaagnagaggtccactgtnttccncacatgnngngatcttgggttagngggagggacagngccgnnccagcagngngggggtcgngttacttaggnacagcagcccttttttcccttcttctgtgggggntttctcatgtggaagccaattgttttccaaaaaanactgaananaactttcaaattcctttggggtanagtnggnaaccaggnngggnataaaggggtccaggggatcaaanccttcctttcccagcaactcctgggggagaaaggntttccgggggttaaagagagaaccagtctggctcaaagccga

SEQ ID NO: 601987 - DNA, 112 bp, Homo sapiens
cacgaggtcgatgacaatcgcccagatcactacttgaatccccattgttacctcctgcaatacacaattaacctctagacatctaaatgagaccttttcccatggcgccaca

SEQ ID NO: 601988 - DNA, 1106 bp, Homo sapiens
agcacctttatggtcacatataataataacgctacaggcggggggtcccgcccgcctcggaccaccccttccagtgaagacagagacgtggctctccagaaccgtgcctcaagggccagaaagaagatcccagggcccagagggaccaggccacagccaaacaggagtaccaagagcacgggagacagtcactccgggcgtggtgaagacagaggtgccccaggggtggcgccagcaccttcaattctcgtgagttggcgtgccggggcgtgggtcccaggtcccagcccagcaagagaggaacaccaggggctgagcgtgatcagcggaaacccgtggccccagaaggccttgacgggcctccagtcagagcgtggtcggggcgtgcatagggaccgtgggtgccgtgccagggaagccgtgccaggcccccaacttcgggaagggtgggaggcaggagcattctcttcccagacaggccggggactcgtggtttccctctcgtggcagctggcaagggggacacggggctgcgggtgtcatgcaaaagtagcaaacctatagagtccacggagagacaaactcggggggcagaggctgcaagtcccacctcggatagacttgcccatgaaatgttgctccccgggctcagggatgggatggacccagagagagcgggtgggctcagcaagactgggaggcagtggccagggatgcctatctggtttggggggacccttgtacccccaagggtacctctcaagggctctcaaaccgaaagagtggaaagacacatccaggggggtccctgggcgtttgaagagctcggcgccaagtggtgccacgaacatggggaaaagggagaacaaacagaggggaacgcctggagaggtgtgagcagcgcgaacacccccagggggggggggcgaaagcccacgaaacgcgagagcaaaaaaggagcgacaggtgcgtggtgacgccggtgagtgacattactaagagacgagcagactctaacggggaatgcactgctcggcacgcaacgcagcaccccgaagcacaagccaacacgaggaaccaacgaagcagagccgccgcggaacacc

SEQ ID NO: 601989 - DNA, 1047 bp, Homo sapiens
gtgacgcgtgggccgcgttcgtcccgctgagcacatgagcctcgcctttgccgattccgccgcccgtccacaggctcgacggtcagctcaccactggattgagtgactatctgcgcggcggctctgtctgtcgacaacgtgctccgtgcatgtgcaaggaccgggcattactgtcgtgggcgacgatgcgccccgggcctgtcttcccctccatctgggggacgctcccaggacatcaggtcgtgatggtgggcatggtgtcatgaaggattcctatgtgggcgatgaggcccatgatgctacgagaggcatcctcatccctgaaacttacccccgatcgaagcatcgggctatccgtacaccaagcttggggaccggatcgactgggacggacaagatctgggctaccagaaccttctatggatgaatgctcgcgtgtggcggtcccgaggatgcagcccgtattctgctggaccggaggccccccttggatacctcataggcttgaacctgcgcatgaatgatgacccagatcgatgtttgaggacccttcaacacactgcaagaccatgtacgtatggtatccaagggcttgtgcctatccctgtacgtgctctggcccgtttgcattggcaatccgtggatgcgacgtccggtgacgggggatcaaccgatatctgtggcccatctacgagagggtaatgtccttcgccacatgctgatcactgctgtcttgtgatgtggtttggccgggacgcctgactttgagtagcctcatgaatgagtccgtcgaccgacccggcggattacatgctttcgaaccctacccaatgtggccccggagccggggagaactcggtgggcgtgaagcccttcatctcgcgtggacagcctgaactgcctcccttctccccctgtgcactttcgcacagccacggacgcattgcgccaatggcctaggctttccacgcctcgctcctacgggtggcaatacggcttcgacacctggccttgcgtggccaagtgtcactccaccttgcgcagcgg

SEQ ID NO: 601990 - DNA, 328 bp, Homo sapiens
  misc_feature (322)..(322): n is a, c, g, or t
cgtcgacattgtaatttgaataaagtgtaaccattgtgtaccctttttgtataaaatagacaaatagaaaatggtcccattagtttcctttttaaaaagcttaaaataagcaggtggatttatttcatgtttttgatcaaaaactatttgggatatgtatgggtagggtaaatcagtaaaaggtgttatttggacccctgttttggacagtttaccagttgccttttatcccaaagttgttgtaacccgctctcaaacgatccttcaaacaaacctgccgcctataaacaatggttcagaattaaacctttaattcctttgnaaacca

SEQ ID NO: 601991 - DNA, 1361 bp, Homo sapiens
  misc_feature (51)..(51): n is a, c, g, or t
  misc_feature (84)..(84): n is a, c, g, or t
  misc_feature (86)..(86): n is a, c, g, or t
  misc_feature (91)..(91): n is a, c, g, or t
  misc_feature (111)..(111): n is a, c, g, or t
  misc_feature (127)..(127): n is a, c, g, or t
  misc_feature (135)..(135): n is a, c, g, or t
  misc_feature (143)..(143): n is a, c, g, or t
  misc_feature (151)..(151): n is a, c, g, or t
  misc_feature (176)..(176): n is a, c, g, or t
  misc_feature (198)..(198): n is a, c, g, or t
  misc_feature (201)..(201): n is a, c, g, or t
  misc_feature (228)..(228): n is a, c, g, or t
  misc_feature (250)..(250): n is a, c, g, or t
  misc_feature (274)..(274): n is a, c, g, or t
  misc_feature (297)..(297): n is a, c, g, or t
  misc_feature (300)..(300): n is a, c, g, or t
  misc_feature (376)..(376): n is a, c, g, or t
  misc_feature (435)..(435): n is a, c, g, or t
  misc_feature (479)..(479): n is a, c, g, or t
  misc_feature (495)..(495): n is a, c, g, or t
  misc_feature (519)..(519): n is a, c, g, or t
  misc_feature (556)..(556): n is a, c, g, or t
  misc_feature (597)..(597): n is a, c, g, or t
ggttttttctttcccaattccctttctttaactggcccctggtcgctcctngcgctttggggaaggagggcttttgggggaatnangttcnatgagggggaaaggggacgnaacgatggggaagganaacgaggnggattttnaaaatttngtcatttggaaacgagggggggatnattaaaaaatggcgatttcgtngtnaccgcgtggggtcgtgggcggataatnagggtttcgaagaaaacgtggngaagtggggggggagtggtcgcgnatcgtcgtgtgagtttgagcgtnacngtattaacgtggtcgcgacgcgcgttaacgtcacgcgtggtgggggaatcgggttgcgcgtggggttttcgtcgtntcgtcgttgtggtcgcgtggggagcgaaagagcgcgagtttcgcgtaaaaaacgtaaanaacgtcgcgatttcgtaggtcgtttggggaaaggagaaaaggtnttcgtacgtcgagggnacgtggggggagagggaggtgggnacgtatattagagcgttcgggcgcgtcgtagggcgtngtcgtgtgtcgcgcgcgtcgaggcgtcgcgcgcggagcgantgcgatttactgtctggcgcgtgggtgctggcagtcgttgcaacctaccctctctctgcctcagccttacacccaagcagtaggtctgtgctctccctgtctctaggtcgctgagagaggtgcttttcttcataaaacctttggggtttggatttccccaggaagatggagaatggaatactcactcttgggtctaatctttccccttgacccagaacttcctccccacaaaaatgcctttaaaaaccttcctgagacttaagcattctgccccacttactaactgccagttctccagcactgaggtggggcagataacggggcatatttaagggggcatctttgtgtaaaagatgcatggagtcaggagaaaaccaccttcataaactgctctgtgcaaagaggaataaaacattttttccaaaaaaaaaaaaaacaaacacaaaaacaaaccattggcgggccgcaccgcggccaccgaaaaaagagctttttaacaccaactgaggatgtgggccgcccgagggaaccccagattaggataagttcaacaggtgtacaacacggcggaaccacgaaggaagaacccgggacaacgaacaaaaggactcggggcactactcccccacaaaaaaaaaaagcaccggtggtaaacagcgggcgctttcggacaacatcccaaaacggagtccgaaggcacaaacggggacgcaacacacagggcacccacagacgcgctcaaaattaaataaagcgccaccgga

SEQ ID NO: 601992 - DNA, 1013 bp, Homo sapiens
  misc_feature (71)..(71): n is a, c, g, or t
  misc_feature (75)..(75): n is a, c, g, or t
  misc_feature (83)..(83): n is a, c, g, or t
  misc_feature (85)..(85): n is a, c, g, or t
  misc_feature (89)..(89): n is a, c, g, or t
  misc_feature (94)..(94): n is a, c, g, or t
  misc_feature (104)..(105): n is a, c, g, or t
  misc_feature (113)..(113): n is a, c, g, or t
  misc_feature (120)..(120): n is a, c, g, or t
  misc_feature (127)..(127): n is a, c, g, or t
  misc_feature (133)..(133): n is a, c, g, or t
  misc_feature (140)..(140): n is a, c, g, or t
  misc_feature (144)..(145): n is a, c, g, or t
  misc_feature (151)..(151): n is a, c, g, or t
  misc_feature (177)..(178): n is a, c, g, or t
  misc_feature (186)..(187): n is a, c, g, or t
  misc_feature (192)..(192): n is a, c, g, or t
  misc_feature (208)..(209): n is a, c, g, or t
  misc_feature (223)..(223): n is a, c, g, or t
ttaattttattaccaggaaaaaaaagccttgggaccttgttgggaaatacttaaaactgcagggagagtgncatntttagtancncttnactgnccaccctacnnctgtggancgtgccnggttgtntcttgngtcggancaanncagtcntaaactaaactcattcagtctggaannaaagtttnnctcanactgggaggagtgganntatgacttggcctntaggctgtctctgtcccctcagctcccggacatgcattactctctgccgtgggtctgcagtcgttgcaacctaccctctctctgcctcagccttacacccaagcagtaggtctgtgctctccctgtctctaggtcgctgagagaggtgcttttcttcataaaacctttggggtttggatttccccaggaagatggagaatggaatactcactcttgggtctaatctttccccttgacccagaacttcctccccacaaaaatgcctttaaaaaccttcctgagacttaagcattctgccccacttactaactgccagttctccagcactgaggtggggcagataacggggcatatttaagggggcatctttgtgtaaaagatgcatggagtcaggagaaaaccaccttcataaactgctctgtgcaaagaggaataaaacattttttccaaaaaaaaaaaaaacaaacacaaaaacaaaccattggcgggccgcaccgcggccaccgaaaaaagagctttttaacaccaactgaggatgtgggccgcccgagggaaccccagattaggataagttcaacaggtgtacaacacggcggaaccacgaaggaagaacccgggacaacgaacaaaaggactcggggcactactcccccacaaaaaaaaaaagcaccggtggtaaacagcgggcgctttcggacaacatcccaaaacggagtccgaaggcacaaacggggacgcaacacacagggcacccacagacgcgctcaaaattaaataaagcgccaccgga

SEQ ID NO: 601993 - DNA, 81 bp, Homo sapiens
tcaagcttctaacgatgtacggggacatgatattgtcaaaacagtgaggaaacattaaaaaaaaagccctaaagctaaaaa

SEQ ID NO: 601994 - DNA, 852 bp, Homo sapiens
  misc_feature (512)..(512): n is a, c, g, or t
  misc_feature (659)..(659): n is a, c, g, or t
gtctatttttgtgggggtgtaaatccccccgcgcccagagagaggaaaatatataggcacacactcttccccctcaatatcgctgagagagaaagagaatctcggggataattggcgggcgcttttcacacacgacagaccctctcgtcactcttctctccccccagagaggaatataccccccgcaggctctcctctttctccccccaggaggaattacccccgcggtgggctttttgtccccgcaaccttctcccacaaaagagggtgtatatctttaaataggccccaatatctctctctgtctctctctctttagacccctctgggcgcacctcttttctcccctcgggatatcctcgccccctcgggcttctcccagcaccactatagatgtgaaggagcccacgcccctcataggagagtgtctgtcgaggaggccactctcctctgtgtgttccacttcgctgagaaagcccacatataacgcacgcgggatgtccctcttgcgnccactagccctcctgaggcctcatagagggggccccttctctggagatgccccacactcgagaggttgtctcgttggctttaatttgctggccacaacgctgacaattcttctccacggggttctaggaggggcacttttggagacntgcctgacacccaccccctatccccttcgcctccccctctcacgaagagggtggaagatgaaatgtgaagctatgggacttcttggaggataccccctgtctatttctgggttaaaagaaagtgcttaattaaaggggtttttctaattaaaacccaatgcccccctacaacaaagaaaaaaaaactcgagca

SEQ ID NO: 601995 - DNA, 354 bp, Homo sapiens
caatggtgataccctctaagtaatgtgtcatcagacaatttcagcattgtgttacacattataaagtatagttacataaacctagatggatagcctcctgctcacctaggctatacggtacagcctgttgccctaggctacaaacctgcacagcatattactgtactgaataactgtaggccggttgtaggacgatggtaagtatttatatattctaaacatgacaaggggaccttaaaatatggtataaaatatttacaatggtgcacctgtataggggcacttaccatgagtggaagcttgcaggactggaagtggctgtggggttgagtcagtgagttagatggtgagtga

SEQ ID NO: 601996 - DNA, 1018 bp, Homo sapiens
  misc_feature (1)..(1): n is a, c, g, or t
  misc_feature (76)..(76): n is a, c, g, or t
  misc_feature (80)..(80): n is a, c, g, or t
  misc_feature (88)..(88): n is a, c, g, or t
  misc_feature (90)..(90): n is a, c, g, or t
  misc_feature (94)..(94): n is a, c, g, or t
  misc_feature (99)..(99): n is a, c, g, or t
  misc_feature (109)..(110): n is a, c, g, or t
  misc_feature (118)..(118): n is a, c, g, or t
  misc_feature (125)..(125): n is a, c, g, or t
  misc_feature (132)..(132): n is a, c, g, or t
  misc_feature (138)..(138): n is a, c, g, or t
  misc_feature (145)..(145): n is a, c, g, or t
  misc_feature (149)..(150): n is a, c, g, or t
  misc_feature (156)..(156): n is a, c, g, or t
  misc_feature (182)..(183): n is a, c, g, or t
  misc_feature (191)..(192): n is a, c, g, or t
  misc_feature (197)..(197): n is a, c, g, or t
  misc_feature (213)..(214): n is a, c, g, or t
  misc_feature (228)..(228): n is a, c, g, or t
nacaccgtttaattgatgaccaggcatataaagcatctgaccccgatcggcatatgctcaaatccagtgggagtgncatntttagtancncttnactgnccaccctacnnctgtggancgtgccnggttgtntcttgngtcggancaanncagtcntaaactaaactcattcagtctggaannaaagtttnnctcanactgggaggagtgganntatgacttggcctntaggctgtctctgtcccctcagctcccggacatgcattactctctgccgtgggtctgcagtcgttgcaacctaccctctctctgcctcagccttacacccaagcagtaggtctgtgctctccctgtctctaggtcgctgagagaggtgcttttcttcataaaacctttggggtttggatttccccaggaagatggagaatggaatactcactcttgggtctaatctttccccttgacccagaacttcctccccacaaaaatgcctttaaaaaccttcctgagacttaagcattctgccccacttactaactgccagttctccagcactgaggtggggcagataacggggcatatttaagggggcatctttgtgtaaaagatgcatggagtcaggagaaaaccaccttcataaactgctctgtgcaaagaggaataaaacattttttccaaaaaaaaaaaaaacaaacacaaaaacaaaccattggcgggccgcaccgcggccaccgaaaaaagagctttttaacaccaactgaggatgtgggccgcccgagggaaccccagattaggataagttcaacaggtgtacaacacggcggaaccacgaaggaagaacccgggacaacgaacaaaaggactcggggcactactcccccacaaaaaaaaaaagcaccggtggtaaacagcgggcgctttcggacaacatcccaaaacggagtccgaaggcacaaacggggacgcaacacacagggcacccacagacgcgctcaaaattaaataaagcgccaccgga

SEQ ID NO: 601997 - DNA, 1309 bp, Homo sapiens
  misc_feature (51)..(51): n is a, c, g, or t
  misc_feature (84)..(84): n is a, c, g, or t
  misc_feature (86)..(86): n is a, c, g, or t
  misc_feature (91)..(91): n is a, c, g, or t
  misc_feature (111)..(111): n is a, c, g, or t
  misc_feature (127)..(127): n is a, c, g, or t
  misc_feature (135)..(135): n is a, c, g, or t
  misc_feature (143)..(143): n is a, c, g, or t
  misc_feature (151)..(151): n is a, c, g, or t
  misc_feature (176)..(176): n is a, c, g, or t
  misc_feature (198)..(198): n is a, c, g, or t
  misc_feature (201)..(201): n is a, c, g, or t
  misc_feature (228)..(228): n is a, c, g, or t
  misc_feature (250)..(250): n is a, c, g, or t
  misc_feature (274)..(274): n is a, c, g, or t
  misc_feature (297)..(297): n is a, c, g, or t
  misc_feature (300)..(300): n is a, c, g, or t
  misc_feature (376)..(376): n is a, c, g, or t
  misc_feature (435)..(435): n is a, c, g, or t
  misc_feature (479)..(479): n is a, c, g, or t
  misc_feature (495)..(495): n is a, c, g, or t
  misc_feature (519)..(519): n is a, c, g, or t
  misc_feature (556)..(556): n is a, c, g, or t
  misc_feature (597)..(597): n is a, c, g, or t
ggttttttctttcccaattccctttctttaactggcccctggtcgctcctngcgctttggggaaggagggcttttgggggaatnangttcnatgagggggaaaggggacgnaacgatggggaagganaacgaggnggattttnaaaatttngtcatttggaaacgagggggggatnattaaaaaatggcgatttcgtngtnaccgcgtggggtcgtgggcggataatnagggtttcgaagaaaacgtggngaagtggggggggagtggtcgcgnatcgtcgtgtgagtttgagcgtnacngtattaacgtggtcgcgacgcgcgttaacgtcacgcgtggtgggggaatcgggttgcgcgtggggttttcgtcgtntcgtcgttgtggtcgcgtggggagcgaaagagcgcgagtttcgcgtaaaaaacgtaaanaacgtcgcgatttcgtaggtcgtttggggaaaggagaaaaggtnttcgtacgtcgagggnacgtggggggagagggaggtgggnacgtatattagagcgttcgggcgcgtcgtagggcgtngtcgtgtgtcgcgcgcgtcgaggcgtcgcgcgcggagcgantgcgatttactgtctggcgcgtgggtgctggcagtcgttgcaacctaccctctctctgcctcagccttacacccaagcagtaggtctgtgctctccctgtctctaggtcgctgagagaggtgcttttcttcataaaacctttggggtttggatttccccaggaagatggagaatggaatactcactcttgggtctaatctttccccttgacccagaacttcctccccacaaaaatgcctttaaaaaccttcctgagacttagataacggggcatatttaagggggcatctttgtgtaaaagatgcatggagtcaggagaaaaccaccttcataaactgctctgtgcaaagaggaataaaacattttttccaaaaaaaaaaaaaacaaacacaaaaacaaaccattggcgggccgcaccgcggccaccgaaaaaagagctttttaacaccaactgaggatgtgggccgcccgagggaaccccagattaggataagttcaacaggtgtacaacacggcggaaccacgaaggaagaacccgggacaacgaacaaaaggactcggggcactactcccccacaaaaaaaaaaagcaccggtggtaaacagcgggcgctttcggacaacatcccaaaacggagtccgaaggcacaaacggggacgcaacacacagggcacccacagacgcgctcaaaattaaataaagcgccaccgga

SEQ ID NO: 601998 - DNA, 408 bp, Homo sapiens
ctcgaactcacgagttagaggatgtagtgagctataaacacgccactgtgctctagagcttgcagaccagatagagtctgtaccatcataaacgtcactacagatatacctactgccatacacacacagaaggctatacagaaacacctaaagacactgacagtgacagtgcagtgccatatggccacatgtgcatgtgaacttggcagacatgagtttttgcagccaagtgatccgtacaggcccctaattagactgtggtgggttattgatgctatgacaagtacatttggttatagaggccctgtgcagatgagttactgactatggccatgccgatgccttgactatagctgacaaggaagggctattggcacattcaggtttactttgtggggtctgcttggg

SEQ ID NO: 601999 - DNA, 182 bp, Homo sapiens
ctctcgaagtatgcacatgtcatcagcactcctgcggctgtgtcacatgtgctgcattcccaaccttggcccaactacactttctatcattaactgagccctgtctcagattttccgagttcccattttggtcaccacagcgggcttctgagtggcggtacccctggcctttggacctatct

SEQ ID NO: 602000 - DNA, 952 bp, Homo sapiens
ggggaagtgtcaaggtgcaccagcccaagagggtacatttgcccgagggtgtaggaattgcgaggccaggtatattggaacttggaagcttagtgcaaaagtgacttgtgctacagtgggtcactgtcttctcggcgttcacaaaaaagggtattggcaaccaagtgttgtatctgatagttaccaaggtggtatgctaggggaaattgtgcacgctttgtcacatattgggactcggtaggcttgcaacttatgttcttggggcggtgtgacacttgtgggggtctatttagagcttcggtgcccttccttgacatgtgcaaggtgcacccagatgagacacgctgtagtaataggtctcttcacctctcagatgcctgtcccgtgcttcgagctgttgtcttgtgcttgggacatgggccttcctatctgtgtctttctcaaagtcaggagctgaccaggagcacacttaggtgtggtcatgcatcattaccacagtcactcatccgggacatttcttaagatacatttaaaaatcatttcagcagtagtacttccgtatgtgctgagagtttacagagctctttgacatacgcgattcttagtctttacaaataaggaaacagctcagtttgggaaggtatcagagatgggattcaaacccaggatcctctggtcctagttgtatgtgcactggactaatcaggcaggaaacagcccagccactgtctcacagattgttttttgtatattgtagcataatcctgaaacaaatggggtcattccagtctcatcatacgaatggcaatcttggctgggtgcggtggttcatgcctataatcccagtgctttatcaggctgaggaaggagctctctgagaataggagtttacggcccagcctggcactgcgacctgccgctgctcccctgcgcggcgccctgtggggtctgc

SEQ ID NO: 602001 - DNA, 138 bp, Homo sapiens
tgagataggctccacgacttatatcctcctttggggacaggcttggacacagcaggctttcaagaagtgccagttgatccatgaataaataaacgagcctatttctctttgcaaaaaacaaaaaaaattcaaaaaaaa

SEQ ID NO: 602002 - DNA, 381 bp, Homo sapiens
cgtggccagtacggattgggcagatcacgaggttaggattaggagttcaagaccagcctggccaacatggcgaaagcccgtctctaccaacaatacaggcgtgggcacggtgtgctcacacctgtaatcccagcaccttgggaggctgaggtgggcggatcacctgaggtcaggagttcaagaccagcctgaccaacatggagaaaccccatctctaccaaaaatacaaaattagccaggtatggtggcgcatacctgtaatcccagctactcaggaggccgagacaggagaattgcttgaacctgggaggcagaggttgcggtgagcagagatcacgccattgcactccagcctgggcgacaagagcaaaactccatctc

SEQ ID NO: 602003 - DNA, 941 bp, Homo sapiens
  misc_feature (729)..(729): n is a, c, g, or t
tatcccacaccagagtggtacatttgttacaatcaataaacctccattgacacatcattatcacccaaagtccatagtttacatgaagattcactctggtgttgtacattgtatgggcttagacaaatgtatgatgatatctacaattatggaatcatacagaatagtttcactgccctaaaacttctctatgcttcacctgttcatccctttcttccctaatcccctggcaaccactttaaaaaaaaaattaggttcagggggtacatgtgcaggtaaactcgtgacaagggggttttgttatacagattatttagtgacccaggtactaagcctagtacccaatagttacttttctgggtcctgtcccttttcccaccctccaccctcaggtaggccccagtatgttattcctttgtgtccatgttatttcactcccacttgtgagaacatggaatatttggtttcctgttcctatgttagttgttaaggataatggcctccagccccatccatgttcctgcaaagggacatgatctttctttggcaaccacttttactgtcgccaatagtccttccttttctagaatggtctatgggatcatatagtatgtaggctttcagactggttcttcacttaataatatgcaataagcgcccccggcagatacggggtaaaagggccgatttttaagcccggaatattcaccgtcgtagagaaagtatcanctcccattgagacctagtgcgtcgagttggaccgaaaaacggtggcgcccacaaaaaaaaatggctgccggaaaataggcgcggcgctgcagcccttctgcgcgaccgccaccctgctgctgcgacgcaaacaagcacaccgaggagctaggaaaagacaagcaggaagagtagaaagcgccaaacaagaaagagaaaacacaaacacacca

SEQ ID NO: 602004 - DNA, 408 bp, Homo sapiens
  misc_feature (230)..(230): n is a, c, g, or t
  misc_feature (305)..(305): n is a, c, g, or t
tactttccgttattcatccataacagtttattctacatttgtacagcagcaatatgctcggtggtaacttaacacgtttatagacggtaacaaatgatgtttccaaggatttaataatctgatcaagttcttgattatttccataatagaatggactcggtctgattaaggagctaagtgtgaagaggaagcataaggttcaaatagttgttaactgacccaaacattcnttaagagaaatgcaaagaaaaaagtttattttcaatgccttcggaactatttaagtgaaagcaaaatcatttccntaaatgcatatcatttgttgagaatttctcattaatatcctgaatcattcattttagctaaggcttcatgttgactcgatatgtcgtctaggaaagtactatt

SEQ ID NO: 602005 - DNA, 129 bp, Homo sapiens
tcaacatgtagtgcccgctacctcagcctcctgcagccatgtcagatgcggcatgccagatgtcggcaacagcagcggttgcagcagctgcggctgcagccgcgggccccggtagccctggcgcggccg

SEQ ID NO: 602006 - DNA, 391 bp, Homo sapiens
taatcctgtttcttttccataagtcgtgtagtttttagcatgtaattatgcagaccataaggtttttcaggaatactaatatggcattagattagaaatgctatattaaaaattcttattaaatctactgatagtaaccaaaaaatagaagattcagaagaactagcaaatgtggagagaacggatgaaatggaagcagtgtgaacctagtgaatacttgccaagctgtatctcccctgaatttgtcaaaacatcatctccagcatctgagctagaccaaccctcagtgctaacattgatgtgattaaagagtctgaactgggagcagaattccttcaggtattttgttaataaaataaagctctccatctctccttaaattaaacaaaaa

SEQ ID NO: 602007 - DNA, 826 bp, Homo sapiens
ggagctatcaagccatgaagagacatagaggaaccttaaatagtgaaccttttttcaccatcactaagtgaaagaagccaatctgaaaaggctacataacatatgattccaactatatgccattctggaaaaggcaaaactatggagacagtgaaaatatcagtggttgtcaggggttagggaagaaggggatgaatcggaagagcacagaggattttgagggtagtgaaactactctgtatgatgccataacagtaggtacatgtcataataaatttatccgaagtcatatagtgtacaataccaagagtggaccctaacataaactatggacttggggtggccatgatgtgtcagtgtaggttcctcaattgcgaaaaacgtaccaccctggtgaaagatgtttataataggggaggttatccatgtatagcggcagggagtacataggaaatctctgtatcttctgttcattattgctgtgaaccaaaaactgtgctaaaacacaaagtctatttcttaaaactgcatagacataaatacatgggcatatgtgcataaacagacacgcacacaaataagtgcaggtaaaacaggaaatttgaacaaaatctgtggattataactgtttcaatatcttaatgttgatgttgcactatggttcgcaacatgttatattaggggaaaattgacttaaatagtaccgggatctctctgtaactattcctgcctgtgaatctgattatctcaagttaaaagtttaaaatttaaagttcctatcaaattaccaaggatgggatccctagatacataccctttccggcgc

SEQ ID NO: 602008 - DNA, 251 bp, Homo sapiens
ccgagctggttttattatgttgttaccatgagccagtgattctgaacaattttagtgttcacatattcctccctgaagggtcgttggtgtcctatgtccaccctccttgttaagccattgtctggcaccccacccaagtgggaagatgtaggataaacctctgactttgatatataagggttgttaaacattatggactgattctctagggttaggttggtctattggtgttgtctacctgccaccgttct

SEQ ID NO: 602009 - DNA, 130 bp, Homo sapiens
  misc_feature (77)..(77): n is a, c, g, or t
agaaaaagaaaaaagaacatcaataaaaagaagtcagatttgttcgaaatcttgaggagtcttcaggccagctcccntgtcggatggcttttatgaaaaaatatcttcttcccattcttggggctcttca

SEQ ID NO: 602010 - DNA, 108 bp, Homo sapiens
ggatttgctggtgcagtacaactaggcttaatagggacatggttagtaaatatttgtgcaatataaaggttggacttctttgttactatcattacagcttcaaaaaaa

SEQ ID NO: 602011 - DNA, 583 bp, Homo sapiens
  misc_feature (165)..(165): n is a, c, g, or t
gggggtatcgtggttcagctgggcgtttaacccagtggaattttggtgcttactttattgtggggggggtgtttgtgtgtctgttggagtacccctgggggaaaaggaaaaagggtttctctatggagtgctggggataaaagtaaatcaccgccgtggtgaacntgtttgggccctttaccaggaattactatgttcgggccgtcttgtatttcttgcttttggtgcccgccggcttcttgttggccaccatccttgggaccgcctgcttggccattgcgagcggcatttacctaatgggggttgtgggtggcgaacagtggacgcccattgagcccaagccccgggagcggccgcagattggaggcaccattaagtagccgccccatgaaaccccccgccggggcccccggccgaggcccgcaaaaagcccagcaaggaggaggttgcggcggcgggggggggacccccgggaggtccccaggtcaaccccatcccggtgaccgaagaggttgtgtgaccttgccccggacctgccctcccgccaggtgcacccacctgcaataaacgcagggaagccgga

SEQ ID NO: 602012 - DNA, 411 bp, Homo sapiens
catcactgaaaccttaaatatatacccttactctctccatatatattgtctctcctgtattcacataatttcctatgcctacttcttttatctttgagttagagccctactctgtcacccaggcaggagtgcagtggtatgatcttggctcacggtagcctccgacttccgagttcgggcggttctcatgcctcagcctcccaagtatgggcgtgcaccactgtcactggccaatattggtatattacgtggagacaggtatttgccgtgttggccaggctggtcttgaactgttggcttcaagcaatcttcctgccttgacctcccaaagtgttgggattgcaggcgtgggccaccacgcttcagccactgaagtgggtgtacacccccccattgctaaatttgactggc

SEQ ID NO: 602013 - DNA, 312 bp, Homo sapiens
ttcccagttttgtccttacccattccaaggggtttgccagcccctgtttatccaagttttaagtccccccccctgttttaaaaaactgttccaacggctttgggcctcaggggtcatttgacccccattgtttcaaaggtgccccctttgtgtgtgtcacaagcggcctgagtcacaagtacattttatttttgcctctagttttgtaagctcctggaggggggaaaacattttatactacttttgtattttcatggcccctagggcaggggtgggcccaaattaggggctccacccacacttgttgaatga

SEQ ID NO: 602014 - DNA, 179 bp, Homo sapiens
ctatgtagcccaggttgtctggaattccggggctcaagcagatctaccgggtcttggcctcgccaaagtgctagggattgacaggcgtgggccaccatgcctggccactcgagggtacatactggtttatcgaaattgaagggtaagtcgtaatccttagcttttgactttgaccataa

SEQ ID NO: 602015 - DNA, 549 bp, Homo sapiens
  misc_feature (10)..(10): n is a, c, g, or t
  misc_feature (77)..(77): n is a, c, g, or t
  misc_feature (109)..(109): n is a, c, g, or t
  misc_feature (127)..(127): n is a, c, g, or t
  misc_feature (149)..(149): n is a, c, g, or t
  misc_feature (152)..(152): n is a, c, g, or t
  misc_feature (156)..(156): n is a, c, g, or t
  misc_feature (175)..(175): n is a, c, g, or t
  misc_feature (184)..(184): n is a, c, g, or t
  misc_feature (188)..(189): n is a, c, g, or t
  misc_feature (214)..(214): n is a, c, g, or t
  misc_feature (221)..(221): n is a, c, g, or t
  misc_feature (228)..(228): n is a, c, g, or t
  misc_feature (231)..(231): n is a, c, g, or t
  misc_feature (236)..(236): n is a, c, g, or t
  misc_feature (270)..(270): n is a, c, g, or t
  misc_feature (313)..(314): n is a, c, g, or t
  misc_feature (316)..(317): n is a, c, g, or t
  misc_feature (328)..(328): n is a, c, g, or t
  misc_feature (335)..(335): n is a, c, g, or t
  misc_feature (391)..(391): n is a, c, g, or t
  misc_feature (453)..(453): n is a, c, g, or t
  misc_feature (459)..(459): n is a, c, g, or t
  misc_feature (502)..(502): n is a, c, g, or t
aaaaaaaaancaaaaagagaaaaaagaaatatgaaaagatgggggggaggggttaacaacccccaggggggacagtngggacgcgaacaaagaccaactcctgcccctngccgtaccagagaacacntaaaacaaccaccagtaccaancancaanaaaaaaaccccagggaacngctggatanaagnngggccaagcctacctggccctgacnccaggcnggggtanccngaacngtatccaccccgcccccaactcccaactgcatcncctcgccaccccaaaccccccagaacaaatgaaccaggaaganngnngggagatgaanaatacanaggaacaaagaaaaaaaaaaggggagggaaagggagccctccaaccaagggctgcnaagggacaaaggagagcagaaaaggacccccccacggtcactacggtgtggaagaagggtanaaaacnagtggtctccagagcattgggtgtggtggaaacccccaaaganaataaaggtagtaactggtaggtagtcggtgttctaaagtttccgta

SEQ ID NO: 602016 - DNA, 128 bp, Homo sapiens
gggggaattacctgccctaacccctccctcaattaaatacattactgtactctggagtttaggcaaaaccttaaatctccaggctttttaaagcacaaatataaataaagctgggaaggtaaccaaat

SEQ ID NO: 602017 - DNA, 338 bp, Homo sapiens
  misc_feature (18)..(18): n is a, c, g, or t
  misc_feature (25)..(25): n is a, c, g, or t
  misc_feature (53)..(53): n is a, c, g, or t
  misc_feature (56)..(56): n is a, c, g, or t
  misc_feature (61)..(61): n is a, c, g, or t
  misc_feature (81)..(81): n is a, c, g, or t
  misc_feature (85)..(85): n is a, c, g, or t
  misc_feature (100)..(100): n is a, c, g, or t
  misc_feature (145)..(145): n is a, c, g, or t
  misc_feature (203)..(203): n is a, c, g, or t
ttcttccccagaaaatgncctttcnttttctaccacacagctgggctgcaaanttnccaanatttatgctctgcttctctnttanatataaattccagtntcagataatctctttgcacatgcatataagcatacactgttagangcacccactgttaaatgctttgctccttagaaatttcttccaccagataccctaaatnacctctctcaagttcaaggctccacagatctctagggcaggggcaaaattccaccagtctctttgctaaaacgcagcaagagtgacctttgctccagttcccaataagttcctcatctccatctgaaaccatctc

SEQ ID NO: 602018 - DNA, 104 bp, Homo sapiens
gacctctttcctaatgaggaggaagaggagcccagcaatggcttgtcccgtggtacaaggtgctacagcagctcagcagggtggatatgagatcccagcaaggt

SEQ ID NO: 602019 - DNA, 245 bp, Homo sapiens
ctaacaggtgagacactgttggtagccctgaagtatacactctccttctcctccccttaactgactgacttaaacttgatccagtgatgggaccacgaacttcaaaaggtgggtcgctggagtagatgtggtagcccagctcttccaacaggtggctcagcgactcggccgtggcaacactggggcatgcatcctacaatctctcttcctacacttccacatccactttcctttagcttcttcca

SEQ ID NO: 602020 - DNA, 325 bp, Homo sapiens
tggatatggagtctcactctgttgcccaggctggagtgctgtggtacgatttcagctcaatgcaagctctgcctcctgggtttaagcaattctcctgcgtcagcctccccagtaggtgggactacgggtgtgcaacacaacatccggctaatttttggatttttcgtagagacagggtttcacatgttggccaggctggtcttaaactcctgacctcagttgatccacctgcctgggcctcccaaagtgctgggattacaggcataagccactgtgcccagctgcattgttgctgttttttattgttagttaagagaggtcgacg

SEQ ID NO: 602021 - DNA, 803 bp, Homo sapiens
ttaggctctggctcgtcggctgcggcgagtcgggacactgaccagtacttcaagcataagaagctggcgtcggacgcgtacatcttcttcacccggtcggtgcagttcactggaggagaaatttgcgccaggctgagaagactgagcttgatgcccactttgaaaaccttctggcccgggcagacagcaccaagaactggacagagaagatcttgaggcagacagaggtttcttctagcgagacacaatcccaagtgccctgatgtggagtgagttcactgtatggagaatgctggacagtgaaggtcccccttcaatgggttcacctaacgtgggagcttgctggctacagataccatggcagaacgcggcccagtgagtctgggagccgaaccattccccatagtgggaatcacactgcactcaagggtggcagacagctgacaacacgcaacgtgggaatccggttgagagcagggacttttaatccaccacggcactccatcagctttgctcacacccttgcgccaacttcctggacgggggactggacagaccatctcgaatgagaggcggctccatccaaaaccggcgatctgagacttggactgcctgcacaagcgaggcttgaagaaaggccaaggcttgcagaagccaagagccacgctctggaatcgatgaagtggaacaagggcgacgcagggagctccagcgattggcccaagaccagagtagaccggcaagacagcaaaggaaccggactcttgctggagggaaatcaagagacactcacgtgaaccaca

SEQ ID NO: 602022 - DNA, 393 bp, Homo sapiens
gggatctcggcatgagaatgtaattatcttatggaactcatcttcatgacactggagatggtaacagaaaaagtctatacacacagccagaagaacctctcagtctgtttaggggtgagagagtctgcaaagttccatgacacactcagcatggggctgccttagacacacagtggtgacttgctctttaaagcatctccattggccttcttgactcactggtctcacctcttccttgccctactggaacttcctgggagcacctcccagataagccctgtgcattcaaatcctgacctagagttgccttctagggattcatgttggtggggagcacacaggactgaaagtggactgaggccaatgacttggctaagtaagggatgctgtgca

SEQ ID NO: 602023 - DNA, 133 bp, Homo sapiens
tcgcaggtcagttgatctctctcggccgcacgggcctgctggccaagtcagttgctgctcaagtaccacacgatgttgcctcattccctgacgtacctggtcattccagtatcaagaacgttcatcctctcgg

SEQ ID NO: 602024 - DNA, 1608 bp, Homo sapiens
  misc_feature (1149)..(1149): n is a, c, g, or t
  misc_feature (1214)..(1214): n is a, c, g, or t
  misc_feature (1333)..(1333): n is a, c, g, or t
  misc_feature (1372)..(1372): n is a, c, g, or t
ccagtcgataaggtagtgtagtattacctagacctgttagtgagcttcgtgaagtatcaagcagctccgcgtactagcataattcgtcgtttgtaattgattgtcgccggacattattatcgtactgcgtcgctcgtggttggtacactagcaggagtatttcttatgagtcgtcgcgtttttgtcgttgtagtactatccgcccgcctcgctctacatatgtgttgggttctcgggagatggttggttgtccataaagttgcgcacccctatagaggcccccgtttctctcggcggagatagaatctgtgtgtctgcgccacgaacggtggtagtcgtcgagccctttttttggcgttccattattatgtggttgagaagcccttctaccactgtttacagggaccccgcggttttgtgggcatgggtaaaaaatacaggtatttacaacccggtgctagtaagatgagaggcttctctctcccctggaagaggtttaaccccaccgttcaacccgagttgaagtgaaactcccctcgggtgagggaccccccatcccccctggatgtgggtcgagctttccccaaaaaggaagttattgattgcaacatgtgttgcaagagttttttggagaaaattccacaaaatagcccctttaatattggccctcggtggtgtgtaagaaaaaccacgcatctttgggtgaagaaattgtttgtttgataatatgtgagtatgatagaaactctgtgagtattttgttggaggaaccggggaagattttttctgcgcttcttttggtgtgggcccccacgagtgcttggggaggtgcacccactagggagcgccggaatatctcccgcggttttctaacaaccgcccaaaacctgcacagacactggccccctcggggtgttctcacacagtgggagttgttcttctccctctgcctctctcacagccctctcccgcaggttatagttctcgggggagttttaaccacacggcactctgtgggccacacccacacggccccacaaactaatattgtgtgatttttctcaagtgaagagagttgtggggtgtttcttcccacactgtgttgtgctcacaggcctgtggtctctctgagaactctccctgagctcntcacaggggtgagatcttgtcccacaccctctggcgcctctccccacaggtgtccttgtgagatnttcacagggcacatgagagccacaccacatgtcccgcgccacacatgagacactatactctatctttatgagacgccacgtggtgtaatatagagttatacttatatcttatgagaaanctataatatgtgtaacaaggaggagagaaaatatggagncacgcttgttataaaggggagtaaccacgagaacactttgaatttttccccaccactgaaagagagaactgcctatttgtgtaaagggggcacctagggcttaaaattcttaatgggtataaattagtaaccggagaagaaaagaatttctgagtacccgtgaccctggaaggtaaggtggctgctgacatggacagatagaaataccattaaatatatatttaatgaaatgacca

SEQ ID NO: 602025 - DNA, 783 bp, Homo sapiens
  misc_feature (206)..(206): n is a, c, g, or t
  misc_feature (248)..(248): n is a, c, g, or t
  misc_feature (261)..(261): n is a, c, g, or t
ggcgagccccagctctccgagcaccgggtcggaagccgcgacccgagccgcgcaggaagctgggaccggaacctcggcggacccggccccacccaactcacctgcgcaggtcaccagcaccctcggaacccagaggccctgctgctctgaagtgttgacccccctgtgggaggaatggctgattgtgccccgtgcgatggactganttgccctgctgccctgcctctgcccctgtgcctggcatcccntgcctgtctgccnttgtggcttcttgtgcacgctctgtgcctccatgtggcacccatggcctgggccacctgcccgctgccccctgtggcttgccctgctgggagccgacttgcctgaacagctttacctgccggtggtgcctggcttcgtgcttggacaccaactgcctcggtcagcaactggagctaccttcctggatgtcccccacctgtgcgcctggggctgggactgctgtgctgcgcctgctgcaccacccagaactgcaacttggcgctagtggagctgcagccctgaccgctggggaggacgccatcgccgcctgcttcctcatcaactgcctctacgagcagaacttcgtgttgcaagttcgcgccagtgtagggcttcatcaactacctcacgagggaagtgtccgctcctacgcagctgctggccaggcttgggggtctggatccccaggctggcaggcttacttgaaggccacccggaacctttgcgggtttgacccgttggccatgggtccgttcggtcggc

SEQ ID NO: 602026 - DNA, 482 bp, Homo sapiens
agtaccgagagaagagtgaatatatgtgcactcgtatagtcttgcaccgttctagagtagggcaaactttgtgtaaagaagtgcagtggcgccatctccagctcactgtaacctccgcctcccgggttcaagcaattctctgcctcagcctcccaagcagatgggattacagatgcccaccaccacacctggctaattttttctatttttagcagagacagggtttcaccatcttggccaggctggccttgaactcctgacctcgtgacccacctgcctcggcctcccaagtagctcagattacaggcatgcgccacccagcccagctactttttgtatttttagtagagacacggtttcgccatgttggctgagctggtcccaaactcctgacttcaagtgatccgcccaccttggcctcccaaagtgctgggattacaggcgtgaagcaccgtgcctggcccagaaacaagtttatggtc

SEQ ID NO: 602027 - DNA, 590 bp, Homo sapiens
  misc_feature (2)..(2): n is a, c, g, or t
  misc_feature (15)..(15): n is a, c, g, or t
  misc_feature (33)..(33): n is a, c, g, or t
  misc_feature (62)..(62): n is a, c, g, or t
  misc_feature (79)..(79): n is a, c, g, or t
  misc_feature (127)..(127): n is a, c, g, or t
  misc_feature (215)..(215): n is a, c, g, or t
  misc_feature (502)..(502): n is a, c, g, or t
cntcgaccggtcacngggtcagggaagttctgnggtacccctcactcaagctccaggcgtcnggaaaggaacattccangaagtccatctggaagacggtcctttccctgctgccccccagcttctngaacattccctggaaacacagcaagtgttcagtattgttcatggagtgacagatgtctcagccaagaaggctcagcttagggaccgtnacctccaggaagccttcccaacctgccactgatcacttcttcttcttctctttgggattatcacttgtattgtaataaaatcttgttttttttctttaaaaaatattatttgcattcagcaaaattcaccctttttgatatacagttctgaggttttttttagttctataagttttgtcaaatatgtaaagttgtaatctccaacacaatcaaaatataaaacaatttcctcacccctccccaattcccttatgctcttttgtatccaacacttcttcccactccanccctggcaaccacggatttgctttctgtctgtacaacactgcctcttccagaatgtcatatataaaatcacgctgtttataaccttta

SEQ ID NO: 602028 - DNA, 551 bp, Homo sapiens
gccctggtgccagtgcgctcagactcgggcatcccctgtgctcgcccggctgccacactcattcgacagcccgtgccttcgatcgccgacagactcccctgcttgctcctcctcctttccccagccacgcactgcggaccatggctggacagcgcccagcgacgagcggaacaccggaccggaggccggggtgggcaacaacgcaggcacgctcgtgcctgcccacttgccggtccggtccgtgactccgtcagaccacctacaggggcgggcgcgcatggtgagcgtaccgggtccgacggctggcagcgaagagtgaggacacgtcaagaggcagaccactaggtacagaattactccgaacccggatgccacgaccccatggaaacgcgaacgctcagcgacagacgccgaccatgaacacatacggcgagggagaggcaaaggaagcacaccacacgagttggcgtggaaagagaaatacgaaagactgggagcaccgctcacaaccactgggaacggcttgcacagggaaagttggcaaggcacga

SEQ ID NO: 602029 - DNA, 1162 bp, Homo sapiens
agtggctgtgcccagagaggccgctctccttcagtaaattgtaacacatgtctgatggcactgtcatctgtggcatgccttccctagtgtgccaactgccatgccttcgtcttctgaagaccaacactccatgcctgctgccatgtctggtgacttgtgtcgccctggctgctgccgatgaactgctccactttgccatgcctgtgcccctctcttgcctctgtgtttcaccttcttgtttatgttggctgatcacatggcactccatgcatttagtggtgttgtgtagcttgactgctcccatgtggtgttgccattggaagccacattggtgatcatgtggttgacagtgctacccatgatctcgcatccatcgatgtgtgccctagcatcttcccatagtggtatgccttcttgtgcccaatggtcctgtcattgacggtggatcttgcgtcctttaaccccccccatgttgcctttgcgctgatgcggcatgtgttccacatgccatcactgactgcctttgccctgatgttggactcttgctggaccatgtcccctgtgtgcctctccttggccccttgcttgcccatgttgatggcgctctctacggcgtgcggttcacttgtgccttgggccccgagtcaatgcccccaccttgcattcggaccttatgtgcccatagcagacgggcctggtcccggttgctgccccccagtccctcggatcctggtccgctgccccagggctggacttgatggcgcacgagtctgcccctgtccgctggactggtgaccaatctcctgattgggggccctgaccgcttcgcgatcctgagggaatgcctgccgattacaagcgtatagcacctccaagcgacctgcatttggcaccgcatttgggccttgcgcagctacactgctagctccttgtccaaggtagcttcaaatgtccacaatacttccttcaggaaagagtgcctcaagtgtgcccagtggccactccgtaagggtgacaacactctatgctggtgccccacgaatattcctgcaaggtatgattcccccactgttcatgtcgacacctttagcagattatgcatatgacctctccctcattatatacagatacaatgcaacacgagccacgtctacatacctaa

SEQ ID NO: 602030 - DNA, 507 bp, Homo sapiens
  misc_feature (3)..(3): n is a, c, g, or t
cgntttacattaaggaggtgtagataagggtgttagctccttcatcagtctgagggtagcaaggacagttccactgcagaagcagtggcagagaggctttcagttgcccctggaggctctctccagggagtggctgagttgctactggctcaacagttctggtagggggggttaggtagaggtccaggcctgcaagacttgcctagtgagaagatataggaatgggaacccaggtaacagtctggccacttttccatagggctgctgcagtatgcccagggcccgctccagtctctagtagcctcagattttccagtacctggagttatcatcagtgaagcctgtgaaacagcaaagatggcagcctaccgctccctttggaagctttgccctagggaggtatgaatgaacttgttgctggcccaaacacacctgtaggaggtggctggagaccccagtttggaggttttgcccagcgaggaggaatggcattgggaaagtgctcaa

SEQ ID NO: 602031 - DNA, 196 bp, Homo sapiens
tacgtttcgcaagtctagaggatcgccatgagaaggactctgagagtggtggtggcaaggactgagtcaggcctgtgaggtgcagagtgcccagaaggggagtcaggatgcccaggtgcactctggctctggctgcattctgcctgtgtgccctcgggctgcagtcaatgcatttcctctggctgtcagtttgcct

SEQ ID NO: 602032 - DNA, 336 bp, Homo sapiens
ttttttgagccgtagtcttgcgctgtcacccaggctagagtgcagtggcgcgatcttggctcactgcaacctctgcctcccgggtcaagcaatgctcctgcctcagctgcccgagtacctgggatcacaggtgtgcaccaccacacccagctaatttttgtgcttttggtagggacgggatttcaccgtgttggccaggctggtcccgaactcctgacctccagtgatctgcctgtctcggcctcccaaagtgctgagattacaggcatgagccaccacgcgcgtggccaaggatgctcttcagaccgctcctgcagcaggctttttcggtcgacg

SEQ ID NO: 602033 - DNA, 323 bp, Homo sapiens
  misc_feature (77)..(77): n is a, c, g, or t
caagcagttaatacagactcaactgggaatcaaagtttcaaatcccaatggcaccactggaaagaatatacccttanacaagtcactttaatctctagaagcctcagtttcctcaactatgaaatggcagtaaaatttatacaacctcacaaggttctgctgacaattcaagacaaagcctgggagagtgttttgtaaacaataaagtgctatacaagcaagagacatttactcctccgtgcataaccctgaacagcgactggtacgtcatggccgtttaataaatgttttatgagtgataaatggtctgtattaactgcttg

SEQ ID NO: 602034 - DNA, 275 bp, Homo sapiens
tgatgtccttgagttgtgaataattcgttgtacatgagaacatttctatgcatttaagccagaaacgaggtacttggctgtgtgctcttctgtcaatcaatgataatgtgttttcacatgtgtgtctgtgcaagtaatataacacattatttgttttattcaggcattatactgcaccaaagtgtttgtacatattctatcggtatatatatcttttcccctgttaaaggatttatcccattgcttctttttaataaaatggttacaatatatca

SEQ ID NO: 602035 - DNA, 403 bp, Homo sapiens
  misc_feature (5)..(5): n is a, c, g, or t
cgtantggcgaaaccccgtctctactaaaaacacaaaagttagctggacgtggtggtacgcgccgtagtcccagccactgagtagaccgaggcaggagaattaccccgaactcggagtgcggaggttgcagtgatgctgaaagcacaccactgcactccagcctgagcaacacagcgagaccctgtctcaaaaaaaaaaaaaacgcggcaataagagtctggggatgtcgcacatttggttgtgtgtgcattcagagaaggcttcccttgggaagggcaccctgtaagggcagacctgcagaagttgaggcaggagccatgtgaatatcggggggagcatgactcaggcagaggaaacagcctgtgaaaaggccctgaggcagaatgtcttcgctagagtggg

SEQ ID NO: 602036 - DNA, 957 bp, Homo sapiens
atggtacatgcagcgcaagtaggtctagaagacgcttacttcccctatcatagaggagcttatcacctttcatgtatgcacggcccttcataatcatttcccttatctgcttcctagtcgcatgtaatgccactatttacctggacagctcacaacaaaaacataattaagtagtaagcaatctcagaggctctggaattagacgaccgtcttgaacaatcgtgcccgtcatcatcctgagttcctcatcgccttcccggattcgcctacggcagtcctgttacataaacagatcgatggtcaaacgattccctcccttaccatcaagattcaactgggtcatccgaatgggtcctgaactcggagcgattacaaccgtactagggtacgaattaatcttacaagctgccatacaattactgtgccctcatttaatactctagagacaggtgacgttgcgtactccttgggtgtagaccagtccgatgtaggtagtccctgattgatagcccccattcgtgatacatgttaccatctgccaagtacgtcattgcattctaatggagcttgtgcacctggattagggttattaatcagattgctatctcggacgtttacctccataacatttcaccggtaacacgacgggggaatactacggtcaatgtctgaatctgtggagcaaaccacagttcatgccctccgtcctagaattattgccctagatcttgagtaggggccgattactatagacgctttaaccctctagagaaaaacgccggaaacagagcactgggggcgcgctagaaggctcaaacatcggggggcaaagggagaatgccggctgcctgacgcattctcggggttcccaaaccggccgtcaaaacaggtcggcggtcaaggccagtccccggcggcctcaacgcaaccaaagagcagcagcagccactcctcccc

SEQ ID NO: 602037 - DNA, 103 bp, Homo sapiens
aattcaagcttctaacgatgtacggggacatgtttgggtctccggccagggcctagggctaggccatgcacccaatgggtgcacaataaataacaggtcaaca

SEQ ID NO: 602038 - DNA, 810 bp, Homo sapiens
  misc_feature (39)..(39): n is a, c, g, or t
  misc_feature (75)..(75): n is a, c, g, or t
  misc_feature (81)..(81): n is a, c, g, or t
  misc_feature (86)..(86): n is a, c, g, or t
  misc_feature (101)..(101): n is a, c, g, or t
  misc_feature (157)..(157): n is a, c, g, or t
  misc_feature (160)..(160): n is a, c, g, or t
  misc_feature (163)..(164): n is a, c, g, or t
  misc_feature (180)..(180): n is a, c, g, or t
  misc_feature (219)..(219): n is a, c, g, or t
  misc_feature (242)..(242): n is a, c, g, or t
  misc_feature (253)..(253): n is a, c, g, or t
  misc_feature (282)..(285): n is a, c, g, or t
  misc_feature (287)..(288): n is a, c, g, or t
  misc_feature (300)..(300): n is a, c, g, or t
  misc_feature (309)..(309): n is a, c, g, or t
  misc_feature (323)..(323): n is a, c, g, or t
  misc_feature (341)..(341): n is a, c, g, or t
  misc_feature (441)..(441): n is a, c, g, or t
  misc_feature (523)..(523): n is a, c, g, or t
  misc_feature (528)..(528): n is a, c, g, or t
  misc_feature (531)..(531): n is a, c, g, or t
  misc_feature (534)..(534): n is a, c, g, or t
  misc_feature (541)..(541): n is a, c, g, or t
  misc_feature (548)..(549): n is a, c, g, or t
  misc_feature (648)..(648): n is a, c, g, or t
  misc_feature (685)..(685): n is a, c, g, or t
  misc_feature (699)..(699): n is a, c, g, or t
  misc_feature (701)..(701): n is a, c, g, or t
  misc_feature (705)..(705): n is a, c, g, or t
  misc_feature (713)..(713): n is a, c, g, or t
  misc_feature (717)..(717): n is a, c, g, or t
  misc_feature (720)..(720): n is a, c, g, or t
  misc_feature (724)..(724): n is a, c, g, or t
  misc_feature (732)..(732): n is a, c, g, or t
  misc_feature (782)..(782): n is a, c, g, or t
tttaaaacagcttgtctttcacagtagtaaagctttggnaatacagtataaaaaataatcacccaccataatgtngtgacnaaatncctcttatcaactgnatactaagaattttaaatacaattaaaaaagtataaaaatactaaaaaaaattaanaantannaggtaagagcaaaganatttctagcgcgcaattactaggcctcatttgcgcccancgtgagttttgtggatattttanatatcacagtngcgggatcatgcttgttcctacagttttnnnngnnggggggttaggnggggggggnggtgtttgggtgantttcctatttaaaatttnggtcatatcatttcaaaacatttgcatcttggttggctgcatatgctttcctattgatcccaaaccaaatcttagaatcacttcatttaaaatactgggnggtattgaatacttcgaagcagaacaggcaatgtgcagccctcatttatgagaaaaccctcaggaaactcccagggtgatgnttggngangcngtgggtngggctgnngctggagaacttcctccagagcaaagggcttaagaaagaaagaagaactctaagctgggtctgctaacatcactccagtttagatggatcttggcaganagacatgcttgttcctctggattggaagatgatttantctcgggaatcttntntgtnagcctgtncatntanaggnttgaagcnctctattgggcaattaacattagtgtttgtactctgatggaatctctganaatactggttgtaggactggccagtagt

SEQ ID NO: 602039 - DNA, 1308 bp, Homo sapiens
  misc_feature (329)..(329): n is a, c, g, or t
  misc_feature (355)..(355): n is a, c, g, or t
  misc_feature (385)..(385): n is a, c, g, or t
  misc_feature (485)..(485): n is a, c, g, or t
cttgctgctggaataagcacaattgctcgtaatatccgcgaaccggaattgcagaatcgctatcccttactgtagtggcgacacactgctgcgctattggactagcaggcaccacacatactaacaggagtactgttggcgtctgccctgagagtagaggagtttggatctcgtagcgacggcgaaacgggtatgcccgcacagagtaggagagcagtggcgggaacgcaggacgctccaggagaggacgcaaacggttgacacccgtacctccgttacaagtgcagctggacacgtacacaatatgactgtcttagtataacccaggngtcacatgtataacatttactagagntgtaatctcatgaacatgcatgtcctcgtntatcgggtggctcgactgggatggtccaatggacctactatgcaggcaattgcctagccagtgctatcgtcgagcgttggtgccgcaacagtccataagncgtcctctggtccacgaggaatgcgagtgccagaaatccgcgcgtcgtgaccgtgtgtgcagtcaagccccagtgaagcctgggtgcacacgactatggcgacaagtatagcggacaacgtatcattcggaagggcacaagtccattgcacttgggcacgacaacgaacgagaactcgcatttctacgtttgttgtcgtggggggcgtttggccccctttggggttgcagggcctatagttacccatactaagctctaatagcgcagttggggtggcgccacggttcccagatccagaaatttgttgcacggaattcgcaaacgcgaggacacatgcattcccactgtggccaatttgcactggccttcgtttagagctacggtttccttttagccgcccaaaaacctgggtagacaggggaacttcctgaagaaaaacgaagctgtcccattggcgcacgggcacggggctttggtgtcccctggaaagcgcaattgtttcgcacttgtggccttccaatttgccgtgggttggaaccacccaggactttgacgccaaattaaggaacctcacccaagggccgaaaataggacagccttggtatggccacagtgggtgaaggtcctttcagtttgccgttaagaaggccaccttggaaggacaactggtttgagcccaaacacaagttcaattaatggcttgaaccaaagtttccaggggcttatatgcacaggcgtggcctaggacaccatgtgtggttgtgcgcccccaggacttcaatgggcgtgcggtccacaagggtgaaagggccaattaccaaca

SEQ ID NO: 602040 - DNA, 327 bp, Homo sapiens
tgtggtatggattgagcaatcttgacaagtgcagctgtaggagcgagtctacaccgatacttggcatcccctgtcgtctaaattcagctagtagagataccacgttaacatgtgcttgtaaaaaatacttatatggttttgaggagtactgtagatcagctcaacattgtatttcagagtgggattgccagagaaagttgttgacaagcaatgtaaggagtgtgagagatgtaaaagaaagtgacagttaaggaggaaaatgaaacagagatcaaagaaataaagatggaggaggaaggaggaaggttggtagggtaggaaggttgt

SEQ ID NO: 602041 - DNA, 206 bp, Homo sapiens
caatgatggtcctcagtctactccggaggctgaggtgggaaaatcacttgagcccaggaggttgccgctgcactgagctgtgatcctgccactgcactccagcctggatagcagtaagagtgtctcaaaaaaataaaaattaaaggctggacgcagcagctcatgcctgtaatcacagcaccttgggaagctgaggaccatcgttg

SEQ ID NO: 602042 - DNA, 266 bp, Homo sapiens
gggatactcattaggaatggtcttttggtgatatcattactgttgagtttggagaatgattaatctttttggtatacaagccattggctggatatatgatggctaatttttaaacaaaattggttcctttttcaattttaatttattatttatttatttatttatttatttatttattttggagacagctggtggcctaggctggagtgcaatggcgtgatctcggctcactgcaacctcggcctcctggttcaagcgattctccg

SEQ ID NO: 602043 - DNA, 441 bp, Homo sapiens
cagaaacggtgcttgcgccaagggacgtggtcctgcgctcgcggggtcaaggaggcgctgccgttgctagccgagacaactccggaccacggtcgtcaccggaggctgcttctgctgacgatactgatgctcctgctgacgactggagctgtacatggctgggcgacagaggataggccacggactcgcgaagaggactgccacttgtacgcggctggacatgagtactcgagagaggcatacccggtatcggtcgccgaccactccctgcgacctaagcaaagccaatatatgcaagacagagtcctactgaggaggaacagttgacagcgatggagatagtaacgagctgtagctaactgaatatcgagggtacatgcttgggttgttatacacagtcgatggcacatatgtgtgctcaactcagattataggtagggg

SEQ ID NO: 602044 - DNA, 132 bp, Homo sapiens
tccataatgtgtgccaggtgttctatctggcaactctaggaactcttaagtattattagtgagaactggtatgcaatgggccaggaatttaaagaaatgggggactacatttgcacacaggtggaaacagag

SEQ ID NO: 602045 - DNA, 260 bp, Homo sapiens
  misc_feature (1)..(1): n is a, c, g, or t
naaggggaggcacgagccaggtcatccttacaaccccgtacggcagccaaactctcaggacataccgccgggtatcaccgttaccaggacaaagagagctcccacctccaatctacggaccggacactacaccaacttctaatcggcatcccagcacatgcctcgggccaaacggagtctgcctcacactccatcccagaagaaacttcacataagtaaatccatccatctttgacaggttctacacctactattccaac

SEQ ID NO: 602046 - DNA, 1231 bp, Homo sapiens
  misc_feature (425)..(425): n is a, c, g, or t
  misc_feature (831)..(831): n is a, c, g, or t
catttaccatctcacttctaggaatactaggtatatcgctcacagctcagtatcctccctaactatagcctaggaagggaagtaagtactatcgctgttcatgtatagcatactctcattaacacctcaacacaccacatcgcctctttagccaatattgtgcctattgccatactagtcttagcctgctgcgaatgagcggtgggcctagccctgactatgtcgtcaatctgccaatcagcagtatggacctagactacgtagcataaccgtaaaacctatgtccatatgctaagaactaactcgtcccaggcaatgtatattactgaccatctgagcaatgagcttgtccaagaaaagcacagtaactttgagatcaatcagaaaccacccatcaggcctgaattagttagtgcatcatcccntctactagtgttgtttaagccagagatcagacaacaaacctatttagggctggttcccgcagagcttttgcttccgaacctcgcctaaggaacccccgctcctaattactagactaacctgacgtcctaaccccatcagcagagtcatggcgcagccaacgccacttatccatgtgaagccattattcactggaaaaaatactctaaccgtcgtctaatactaaatctgcccgtacagaattctccttacttgataaacatttcgccaggccaccgggaaggctcaatcatacttcgggacaattgtcttcctctcgcaaggcccaccgtaattccccaccttgggtatgtctacctctacccgtatttatgggggaaccccagtccttgaaaaagcgccgcatanaggcgagggcgcacttctgtccgcaatattctatacccacggatgtgggccccttaccctaataaataggcggagattttatacccccaaagaccctggggctcccaagacattatcttcagtcacctcacgggcacgcaatataaagcggtcgtgccccactatatagggggcagcaacagagtctttggagagcgcatctgggggcgaacatagtaaaagccactggtggccccccggcggggaatacaggggctacacgacaaggggaagaaccacaaacagcctgcaagagaacactctcgtagtatgaaccagaggaacagaaagtagctgaccgcgcgaacctcttcaaaacaacctcctctctcggcggagcaacacaggagagggggggggt

SEQ ID NO: 602047 - DNA, 405 bp, Homo sapiens
accatgtccatgcgaaatgaaaaaaaacaactttaaaacataagcttgtgctggctgggtgtggtggctcacgcctgtaatccctgcactttgggatgccaaggcaggtggatcacctgaggtcaggagttcaagactagcctggccaaaaaagcgaaaccccgtctctagtaaaaatacaaatattagccagatgtggtggcacgcgcctataatcccagctacttaggaggctgaggcaggagaatcacttgaacctgggaagcggaggttgtagtaagccaagatcgtgccacctcactccaacctgggcgacagagcgagactccatctccaaaaagacacgagtcatctgttgtaggtaacataaaacattgcaaaaagcatgatccagaaatatcacgg

SEQ ID NO: 602048 - DNA, 372 bp, Homo sapiens
  misc_feature (20)..(20): n is a, c, g, or t
  misc_feature (72)..(72): n is a, c, g, or t
  misc_feature (281)..(281): n is a, c, g, or t
  misc_feature (289)..(289): n is a, c, g, or t
  misc_feature (324)..(324): n is a, c, g, or t
  misc_feature (357)..(357): n is a, c, g, or t
  misc_feature (359)..(359): n is a, c, g, or t
  misc_feature (368)..(368): n is a, c, g, or t
ggcttagactcgctgcacangaccagcgtcagccagatttcggtgctcaacggcggcaaggccaagtgctcncagttttgcaccactggcatggatggcggcatgagtatctgggatgtgaagagcttggagtcagcctttaaggccctcaagatcaaatgacctgtgaggaatatgttgccttcatcctaactcctggggaaacggggaaaggggtcagggaggctaatggttgcttttctgaatgtttttgggggaccaaaacaagttcccctaggggntgctcccncaaaaaaggagggggcaaatggggagctttttttncctattcaaggaaaacgggccttttttttaaangntttcctttnttga

SEQ ID NO: 602049 - DNA, 140 bp, Homo sapiens
ccccgcttatctaaggatccctgttacccacaggtagcaaaccagtctgccaccaagccagccaccacttaagcccagggtttaatgatgtcctcgtgaagtcctaggtgtttgaaataacagaagaacagcgccgaaac

SEQ ID NO: 602050 - DNA, 404 bp, Homo sapiens
tgaggcaggatctgtttatgtctcctggctggagtgcagcagcatgatcaaaactcactgcaactttcgcctcccaggctcaagcgatcgtcccacataagcctcctgagtagctgggactacaggtgctcaccataatgcctggctaattttttgtatttttttgtagagatggggttttgccatgttgcccaggctggtcttgaactcttgggctcaagttatctgcctaacttggcctctcaaagtgatgggattataggcatgagccactgtacccagtcaggatgctgaattctattaaatgctttttcagcatcaattgaaatgatcatatggtgtttgtccttcattctgttattatcatgtatcacattaattgattgatttgtgtatttgagtta

SEQ ID NO: 602051 - DNA, 155 bp, Homo sapiens
agtcaagatgaagaaccattttcttttcttggggagtcctggcggtttttattaaggctgttcatgttaaagcccaagaagatgaaaggattgttttttgttgaccaacaaatgtaaggtgtttccccgattatttccaggatgcatcctttctt

SEQ ID NO: 602052 - DNA, 218 bp, Homo sapiens
ccagctgctgctcgtggtcgactcgtagagcatcctctgctgcttgtctcctcggaaagagtgatttgatatctggaaattcccatcatctcagcctcacaatatgccttaagctgattacgcaacttcagcatagtctcaggatacataaatcgatgtgcaaaattctacaagcattccatcacaccaacaatagacgaggaggataagcagcaggc

SEQ ID NO: 602053 - DNA, 298 bp, Homo sapiens
atgctgtggcgatcctagaggatcccccgacggtgcttacaacaatcaagaataaactgtctttataagagcacagtgaccagaaattaaaactcttcaatccctctagccctggggactacttgctgaagtaggtgggcacgtgaaattgtaagggccgattttgagacataacaatagttcagagcttatctgttaaactagacgttaatatcagaagcacactgctgcaaggccagcatctgggcccccgtgtcacgaataccaggctctcgttagaatattgatccactcttta

SEQ ID NO: 602054 - DNA, 186 bp, Homo sapiens
  misc_feature (36)..(36): n is a, c, g, or t
caatacttgggtcatgttactgctgtcagatgtatngttccttacataggacatcaatgcccagatgcaactagagattctcatactaagaagtaagtcagacaagagaaaggcaaaaaacatgtgatattacttatattgtgaaatctaaacatatggcacaaattaaatctacccttacaaaac

SEQ ID NO: 602055 - DNA, 246 bp, Homo sapiens
gctcgtacctgctactgggcgtatggacagacagatggagtaatgaggaaacatatttctcactcttttctttgttctttttttcttccttccttggtctttcttttctttttttcctttatttgtttacttatttatttatttttttgagacagagtctcactctgtcgcccaggctaaagtacagtggcgtcatctcagcttactgcaacctccgtctcccgggttcaagtgattctcctgcct

SEQ ID NO: 602056 - DNA, 91 bp, Homo sapiens
tcgatacgactttttcttcttccacctcagccacttcttcctcctctgctacttctactactttgtcttcactcccttctgtcgtcttctc

SEQ ID NO: 602057 - DNA, 1163 bp, Homo sapiens
  misc_feature (1152)..(1152): n is a, c, g, or t
tgtgcgggcagcaaacttctcagacatatatatgtgagatccatagcgtctgatagtctcaggctgctggagggaagagagacctgtgtgtttggagcgccaggcatcacagttgaggataggcgttgtcccaatagctgatgagagcgagctacaataacaacggagacgcaactttgcctcccatggggctgtacaatcttctgcagtttgtcgagttggtatcagtcagtgaggttgcccagaagagtgtcgtaagagttgtaataaaccatatttggctgcggagatttacaaagggctgtatcacgactatgagttgtttcaccaagaatacggggacagtggtttgactccgccagtttgcaatgctagaggggcctttctggactctgtaagtagttcacgttttggtggctatatacgccgccgattgacctgagggatacactgtgccaggtccttggcaaccaatgggaacctattagaggctacccaggactatatccgtgctctgctaagggaattagtggctatctgtgcacccttctttttaacaagtcacatattgcagacctgacactcaaagagtggctaagctacacaagagtcccatctaattttgtgcaacttccgtgtggccagtgtgtattaccccttccaatatcttcacagatagtcaccagcgtcccattctcataggtctgtctccctcacatcctgttaggtattggcaccagtcacagacaccacaaagcccatccgggtgcctcatggggcagggacatacttctaccccctgggtcactgtttcccgtttttcccgaggagagccctttttcttggatctttggccagcttttatgcagtttatttcccgccatcctgggaacagttgtcgagtggcaaaatgtcctgcggagaatacgtgtgtgttttaacaccaccctcatgggggtgcgaaggcgtgtcaaaaaagcgtggtgctcggtgaaagaaaaaaagcaaggaaggcaataatgagcgtgacgacgaaatactactcgcaagaaagacataaacgtagtggagtacgatcagcacgtattcgtctgctgctgctttcccgctttgccgttatcaactgctagatatcattattctctcgctggngggggggtttg

SEQ ID NO: 602058 - DNA, 397 bp, Homo sapiens
  misc_feature (24)..(24): n is a, c, g, or t
  misc_feature (42)..(42): n is a, c, g, or t
  misc_feature (52)..(52): n is a, c, g, or t
  misc_feature (105)..(105): n is a, c, g, or t
  misc_feature (128)..(128): n is a, c, g, or t
ccccaatattatgtccatttgaanccaaaaatatacctccantttgccgccngcatttggccatgaaatacttgacacaattaattagtcagaattaatttttantgcctatgttaaagacttttaantcttcctttgttttcgtttctcaagctcatcactgcagtggtgatgaagaactggaaagagattgttgagtcttgtgatcttaaaaattggagagaggctttagctgcagtattgacttatgcaaagccggatgaattttcagccctttgtggtaagagatgtgctttatatttaactgcatttacatacgtggcagggtatattgtaaataaacttaaatgacaaattttattagaaactttttaaaatctacaaatcacaaaaaaaa

SEQ ID NO: 602059 - DNA, 393 bp, Homo sapiens
  misc_feature (93)..(93): n is a, c, g, or t
  misc_feature (103)..(103): n is a, c, g, or t
  misc_feature (127)..(127): n is a, c, g, or t
cgtatacatctagatgagtatatattaaaacattttttaaaaatgagatcaaaataggccaccacgcccggccataatctgttcaagtttctnagttgtagtngcctccatttctttataaaatgangccattcaacattttaagtataaggtttagtgcaatgagatagggcaagttcttaggttaaaagttaatgttcaaatataacatctattttttctttcctgcagcaaaccaagaggaagctagatgatgccagcaaacgtttggagtttctgtatgataaacttagggaacagacagtaagttttggaggaggatttatgataatcatttattcctagttgctagtcagttgtcttatcagcactcccatttagtatgctgggggc

SEQ ID NO: 602060 - DNA, 798 bp, Homo sapiens
  misc_feature (601)..(601): n is a, c, g, or t
ggagatatgctggaaccagggccaaaggttgcagtgagccaagtcgcgccactgcactccagactgggtgacaggcgggaccctgttccgaaaaagaaataaatctggcccaaccttgtcatgatttaataaacccaacacaggcaagatccatctcagttgaataaactggtactaataaatttataaaaccactgaaaaagttctgaacaagacccaaactcaaggataacctaaactggaaaaagagagaacaaagaaagtgaaactgtggagccaatatttttaaagatgttggacaacaatgagaaattgttaagtaaaatatagcataagcatacaatgcaccatacatggccattggaaattgtgttagagaaatggttttcttctccaaatcccaatagggcattttttttcttctgattctatggttgacccaataggccactgtatttgacttgataagataattttagaatgcacctaagctgggcatagtggctcacacctgtaatcccagcactgtgggaaggcaaggcgggaggatagcttgagccttagcctcccaagtaactgggattacaggtgtgtgccaccncgcccggctactttttgtatttttggtagagacagggcttcaccatgttggccaggctggtctcgaactcctgacctcaggtgagttgatctgctcttgcctcagactcccaaagtgctgaggtggcgaatcacttgagctcacgagttcgagataagcctgagcaacatggcaagaccctgtctctataacaaagt

SEQ ID NO: 602061 - DNA, 309 bp, Homo sapiens
  misc_feature (18)..(19): n is a, c, g, or t
  misc_feature (23)..(23): n is a, c, g, or t
  misc_feature (29)..(30): n is a, c, g, or t
  misc_feature (33)..(33): n is a, c, g, or t
  misc_feature (35)..(35): n is a, c, g, or t
ccgactctatgaggatcnnccgnctcagnngtncncagcacagcaccaggcctcttcacctacctccagccctgctacttctttccctcctcccccttcctctggagcatccttccagcatggcggaccaggagctccaccatcatcttcagcttatgcactgcctcctggaacaacaggtacactgcctgctgccagtgagctgcctgcgtcccaaagaacagaaactcagactgtccaagacgaccctcctgttttgaacggagctcagaaagagaggaagaagcctgaagacttgatgcgtgctgc

SEQ ID NO: 602062 - DNA, 630 bp, Homo sapiens
gcttcggtgctgacgtcaatcgcgtctggttaccagcgcgccgcgggcctgaactcggggggctggcattcggtccggggaacacgcggagcaagtctgcgaggctagagtgtctccgcggcgcagctcgcggctgaaaatccggaggagaatgcgagagctgctcggataggccctggaaaacgaacagatggagcaggctatgctgaatggagaggactaccggccttcgggaaaggaggtgaaagccagccagcctgctaggaaatcgacggggacaggctcgaccgaggttgcccctagatttatcgatgggccatacccaataggcagatcagtgattggtgattggcgttgtaggatcggccgatggcatttgaggggattcataccagtggtagcggagacttggggaggaaatacaaccatagggaaggacctgaggggaagcgttgggggccggagcgatccagtgcgtagcgtattgcctatccattgtgatgcgtacgcccatcataacattaggagatcgaaacgataagatcgcagtggattgacgcgtcgtccttcgcgtgtttcacacgtagggatatcatccatcgagcataaatgctcgcgagagccgcgggg

SEQ ID NO: 602063 - DNA, 270 bp, Homo sapiens
aaagacaggttctacttttgtgccaggaatttagatgcgtcactttctttgatggcctgctcttcaagcacaggcttgtgtttctatttccttcttttttcatttcccataacactacttgaagtttcaacagacatacaatgagaacagtgtgcaacttagctcatcttctactcgccaaacgctatctgatatatttaaatgtctcgacggtacactactcagatgtcggattcagtggagtgtttcctctaaagcgctctctgcacg

SEQ ID NO: 602064 - DNA, 385 bp, Homo sapiens
agaagatctaggaaagaagattgctttggccttgaacaaagtggatggagccaatgtggctcttaaagactctgaccaagtagcacagagtgatggggaggagagccctgctgctgaagagcagctcttgggagagcacattaaagaggaaaaagaagaatctgaatttctaccctcatctggaggaacatttaatatctctgtcagtggggacattgacaggcatacagctcaactttagaggacgggcagtctgtagaccagtgttggaccctaacttacgtgataaagtgatgttcgaggccaggatatccaccatactgggatgataggcatgcgctggctggaaccacagatcagatagttcgctcatctcaaagcaata

SEQ ID NO: 602065 - DNA, 1014 bp, Homo sapiens
  misc_feature (57)..(57): n is a, c, g, or t
  misc_feature (73)..(73): n is a, c, g, or t
  misc_feature (128)..(128): n is a, c, g, or t
  misc_feature (211)..(211): n is a, c, g, or t
  misc_feature (215)..(215): n is a, c, g, or t
  misc_feature (228)..(228): n is a, c, g, or t
  misc_feature (241)..(241): n is a, c, g, or t
tggctgttaaataactttaagggttgatgtgggagtcacaagggaggtatgttggcnccaagggttcttcagngccatcctcaaagctggttagtgcagggaggtagggcagagtgggttccagtttncttccaggaagggtttagggaggtcccagcgagccccaggaatgagtccctcggtaccatggcaaccacaatttaaaaggggnttcngcccaccccgtgnagcctaccccagntccagcagaggaacaggaggccagatgtggccaactgtgctatagacagcgccgtatccagagcccaatgtgcgcattgggctcattttctctttgtgggcagattctattgccagcacctttctcttctcacacggggtgactggagccaagtgtgcgaggttgggccttggcgtgaaaaggcctcgggatccggggggaatcgcgtgagagttggaaggggggcaaccgaggcaagccctaggggaggtggttctggggggacagaattccagggaaacaggttcggggtctcccccagggcaggggtgtgggtccagtctggggctggggccactgaggcaggcgacaggggttaggcagggcaggtggttctgtaaacttggccagccagggtgggggtgtctccagccttgcgccctcccgctgggtcaaggatgtctggcaccgatgcgatgttatcaggggctcaatagccatgtcatggtccaaggacccctgttttggcagggctgggggggaaccgggaaccgggagtcacaggcaggatcaacacagccgtggtccatggggtcatgtaaagaaaagggggcaagagcccccaaacgacgctgaagaggccccgagataggcaaaaggggggacacgaaaaataccaaacagggacgggaaaagaaaaacgcgcagaaagagagaaaccacgacgacaacaccacgtgaagcaataaagagacgcacacgaagctacgagaggagagatgctgtagaaacag

SEQ ID NO: 602066 - DNA, 2586 bp, Homo sapiens
agaagatctaggaaagaagattgctttggccttgaacaaagtggatggagccaatgtggctcttaaagactctgaccaagtagcacagagtgatggggaggagagccctgctgctgaagagcagctcttgggagagcacattaaagaggaaaaagaagaatctgaatttctaccctcatctggaggaacatttaatatctctgtcagtggggacattgatggtttaattactcaggctttgctgacgggcaattttgagagtgctgttgacctttgtttacatgataaccgcatggccgatgccattatattggccatagcaggtggacaagaactcttggctcgaacccagaaaaaatacttcgcaaaatcccaaagcaaaattaccaggctcatcactgcagtggtgatgaagaactggaaagagattgttgagtcttgtgatcttaaaaattggagagaggctttagctgcagtattgacttatgcaaagccggatgaattttcagccctttgtgatcttttgggaaccaggcttgaaaatgaaggagatagcctcctgcagactcaagcatgtctctgctatatttgtgcagggaatgtagagaaattagttgcatgttggactaaagctcaagatggaagccaccctttgtcacttcaggatctgattgagaaagttgtcatcctgcgaaaagctgtgcaactcactcaagccatggacactagtactgtaggagttctcttggctgcgaagatgagtcagtatgccaatttgttggcagctcagggcagtattgctgcagccttggcttttcttcctgacaacaccaaccagccaaatatcatgcagcttcgtgacagactttgtagagcacaaggagagcctgtagcaggacatgaatcacctaaaattccgtacgagaaacagcagctccccaagggcaggcctggaccagttgctggccaccaccagatgccaagagttcaaactcaacaatattatccccatggagaaaatcctccacctccgggtttcataatgcatggaaatgttaatccaaatgctgctggtcagcttcccacatctccaggtcatatgcacacccaggtaccaccttatccacagccacagccttatcaaccagcccagccgtatcccttcggaacaggggggtcagcaatgtatcgacctcagcagcctgttgctcctcctacttcaaacgcttaccctaacaccccttacatatcttctgcttcttcctatactgggcagtctcagctgtacgcagcacagcaccaggcctcttcacctacctccagccctgctacttctttccctcctcccccttcctctggagcatccttccagcatggcggaccaggagctccaccatcatcttcagcttatgcactgcctcctggaacaacaggtacactgcctgctgccagtgagctgcctgcgtcccaaagaacaggtcctcagaatggttggaatgaccctccagctttgaacagagtacccaaaaagaagaagatgcctgaaaacttcatgcctcctgttcccatcacatcaccaatcatgaacccgttgggtgacccccagtcacaaatgctgcagcaacagccttcagctccagtaccactgtcaagccagtcttcattcccacagccacatcttccaggtggccagcccttccatggcgtacagcaacctcttggtcaaacaggcatgccaccatctttttcaaagcccaatattgaaggtgccccaggggctcctattggaaataccttccagcatgtgcagtctttgccaacaaaaaaaattaccaagaaacctattccagatgagcacctcattctaaagaccacatttgaggatcttattcagcgctgcctttcttcagcaacagaccctcaaaccaagaggaagctagatgatgccagcaaacgtttggagtttctgtatgataaacttagggaacagacactttcaccaacaatcaccagtggtttacacaacattgcaaggagcattgaaactcgaaactactcagaaggattgaccatgcatacccacatagttagcaccagcaacttcagtgagacctctgctttcatgccagttctcaaagttgttctcacccaggccaataagctgggtgtctaaaaggacagcttctcttccactcaatattgccatttttccaaagaaacatgttaaaaaaaaaaattataagacatggactagtcctcattagcatgtttgcatagcaaccagtcaagagcatttacactatttctgctgatatactcaccttagaactgctcagaaccctggtgctttatttttgttttaatcttttgttgccagtgatgattttcctattctgcaaatagtgtatttcctggattacacatagtatggtttcctgaagtattctgataaatgtgttttttaaaacctcaatatactttttagaaaaggagcatctggttatgcataaagcagagctaaaactaaatttctttcatgtcctccctacttcctcagtgtcaatcagattaaagtgtgtaatccta

SEQ ID NO: 602067 - DNA, 1983 bp, Homo sapiens
ttgtcccggttggcttccatgtggactaaagccagatggaagccaccctttgtcacttcaggatctgattgagaaagttgtcatcctgcgaaaagctgtgcaactcactcaagccatggacactagtactgtaggagttctcttggctgcgaagatgagtcagtatgccaatttgttggcagctcagggcagtattgctgcagccttggcttttcttcctgacaacaccaaccagccaaatatcatgcagcttcgtgacagactttgtagagcacaaggagagcctgtagcaggacatgaatcacctaaaattccgtacgagaaacagcagctccccaagggcaggcctggaccagttgctggccaccaccagatgccaagagttcaaactcaacaatattatccccatggagaaaatcctccacctccgggtttcataatgcatggaaatgttaatccaaatgctgctggtcagcttcccacatctccaggtcatatgcacacccaggtaccaccttatccacagccacagccttatcaaccagcccagccgtatcccttcggaacaggggggtcagcaatgtatcgacctcagcagcctgttgctcctcctacttcaaacgcttaccctaacaccccttacatatcttctgcttcttcctatactgggcagtctcagctgtacgcagcacagcaccaggcctcttcacctacctccagccctgctacttctttccctcctcccccttcctctggagcatccttccagcatggcggaccaggagctccaccatcatcttcagcttatgcactgcctcctggaacaacaggtacactgcctgctgccagtgagctgcctgcgtcccaaagaacaggtcctcagaatggttggaatgaccctccagctttgaacagagtacccaaaaagaagaagatgcctgaaaacttcatgcctcctgttcccatcacatcaccaatcatgaacccgttgggtgacccccagtcacaaatgctgcagcaacagccttcagctccagtaccactgtcaagccagtcttcattcccacagccacatcttccaggtggccagcccttccatggcgtacagcaacctcttggtcaaacaggcatgccaccatctttttcaaagcccaatattgaaggtgccccaggggctcctattggaaataccttccagcatgtgcagtctttgccaacaaaaaaaattaccaagaaacctattccagatgagcacctcattctaaagaccacatttgaggatcttattcagcgctgcctttcttcagcaacagaccctcaaaccaagaggaagctagatgatgccagcaaacgtttggagtttctgtatgataaacttagggaacagacactttcaccaacaatcaccagtggtttacacaacattgcaaggagcattgaaactcgaaactactcagaaggattgaccatgcatacccacatagttagcaccagcaacttcagtgagacctctgctttcatgccagttctcaaagttgttctcacccaggccaataagctgggtgtctaaaaggacagcttctcttccactcaatattgccatttttccaaagaaacatgttaaaaaaaaaaattataagacatggactagtcctcattagcatgtttgcatagcaaccagtcaagagcatttacactatttctgctgatatactcaccttagaactgctcagaaccctggtgctttatttttgttttaatcttttgttgccagtgatgattttcctattctgcaaatagtgtatttcctggattacacatagtatggtttcctgaagtattctgataaatgtgttttttaaaacctcaatatactttttagaaaaggagcatctggttatgcataaagcagagctaaaactaaatttctttcatgtcctccctacttcctcagtgtcaatcagattaaagtgtgtaatccta

SEQ ID NO: 602068 - DNA, 2625 bp, Homo sapiens
agaagatctaggaaagaagattgctttggccttgaacaaagtggatggagccaatgtggctcttaaagactctgaccaagtagcacagagtgatggggaggagagccctgctgctgaagagcagctcttgggagagcacattaaagaggaaaaagaagaatctgaatttctaccctcatctggaggaacatttaatatctctgtcagtggggacattgatggtttaattactcaggctttgctgacgggcaattttgagagtgctgttgacctttgtttacatgataaccgcatggccgatgccattatattggccatagcaggtggacaagaactcttggctcgaacccagaaaaaatacttcgcaaaatcccaaagcaaaattaccaggctcatcactgcagtggtgatgaagaactggaaagagattgttgagtcttgtgatcttaaaaattggagagaggctttagctgcagtattgacttatgcaaagccggatgaattttcagccctttgtgatcttttgggaaccaggcttgaaaatgaaggagatagcctcctgcagactcaagcatgtctctgctatatttgtgcagggaatgtagagaaattagttgcatgttggactaaagctcaagatggaagccaccctttgtcacttcaggatctgattgagaaagttgtcatcctgcgaaaagctgtgcaactcactcaagccatggacactagtactgtaggagttctcttggctgcgaagatgagtcagtatgccaatttgttggcagctcagggcagtattgctgcagccttggcttttcttcctgacaacaccaaccagccaaatatcatgcagcttcgtgacagactttgtagagcacaaggagagcctgtagcaggacatgaatcacctaaaattccgtacgagaaacagcagctccccaagggcaggcctggaccagttgctggccaccaccagatgccaagagttcaaactcaacaatattatccccatggagaaaatcctccacctccgggtttcataatgcatggaaatgttaatccaaatgctgctggtcagcttcccacatctccaggtcatatgcacacccaggtaccaccttatccacagccacagccttatcaaccagcccagccgtatcccttcggaacaggggggtcagcaatgtatcgacctcagcagcctgttgctcctcctacttcaaacgcttaccctaacaccccttacatatcttctgcttcttcctatactgggcagtctcagctgtacgcagcacagcaccaggcctcttcacctacctccagccctgctacttctttccctcctcccccttcctctggagcatccttccagcatggcggaccaggagctccaccatcatcttcagcttatgcactgcctcctggaacaacaggtacactgcctgctgccagtgagctgcctgcgtcccaaagaacagaaaaccagtctatccaagaccaggcacctatgttggaaggtcctcagaatggttggaatgaccctccagctttgaacagagtacccaaaaagaagaagatgcctgaaaacttcatgcctcctgttcccatcacatcaccaatcatgaacccgttgggtgacccccagtcacaaatgctgcagcaacagccttcagctccagtaccactgtcaagccagtcttcattcccacagccacatcttccaggtggccagcccttccatggcgtacagcaacctcttggtcaaacaggcatgccaccatctttttcaaagcccaatattgaaggtgccccaggggctcctattggaaataccttccagcatgtgcagtctttgccaacaaaaaaaattaccaagaaacctattccagatgagcacctcattctaaagaccacatttgaggatcttattcagcgctgcctttcttcagcaacagaccctcaaaccaagaggaagctagatgatgccagcaaacgtttggagtttctgtatgataaacttagggaacagacactttcaccaacaatcaccagtggtttacacaacattgcaaggagcattgaaactcgaaactactcagaaggattgaccatgcatacccacatagttagcaccagcaacttcagtgagacctctgctttcatgccagttctcaaagttgttctcacccaggccaataagctgggtgtctaaaaggacagcttctcttccactcaatattgccatttttccaaagaaacatgttaaaaaaaaaaattataagacatggactagtcctcattagcatgtttgcatagcaaccagtcaagagcatttacactatttctgctgatatactcaccttagaactgctcagaaccctggtgctttatttttgttttaatcttttgttgccagtgatgattttcctattctgcaaatagtgtatttcctggattacacatagtatggtttcctgaagtattctgataaatgtgttttttaaaacctcaatatactttttagaaaaggagcatctggttatgcataaagcagagctaaaactaaatttctttcatgtcctccctacttcctcagtgtcaatcagattaaagtgtgtaatccta

SEQ ID NO: 602069 - DNA, 2678 bp, Homo sapiens
agaagatctaggaaagaagattgctttggccttgaacaaagtggatggagccaatgtggctcttaaagactctgaccaagtagcacagagtgatggggaggagagccctgctgctgaagagcagctcttgggagagcacattaaagaggaaaaagaagaatctgaatttctaccctcatctggaggaacatttaatatctctgtcagtggggacattgatggtttaattactcaggctttgctgacgggcaattttgagagtgctgttgacctttgtttacatgataaccgcatggccgatgccattatattggccatagcaggtggacaagaactcttggctcgaacccagaaaaaatacttcgcaaaatcccaaagcaaaattaccaggctcatcactgcagtggtgatgaagaactggaaagagattgttgagtcttgtgatcttaaaaattggagagaggctttagctgcagtattgacttatgcaaagccggatgaattttcagccctttgtgatcttttgggaaccaggcttgaaaatgaaggagatagcctcctgcagactcaagcatgtctctgctatatttgtgcagggaatgtagagaaattagttgcatgttggactaaagctcaagatggaagccaccctttgtcacttcaggatctgattgagaaagttgtcatcctgcgaaaagctgtgcaactcactcaagccatggacactagtactgtaggagttctcttggctgcgaagatgagtcagtatgccaatttgttggcagctcagggcagtattgctgcagccttggcttttcttcctgacaacaccaaccagccaaatatcatgcagcttcgtgacagactttgtagagcacaaggagagcctgtagcaggacatgaatcacctaaaattccgtacgagaaacagcagctccccaagggcaggcctggaccagttgctggccaccaccagatgccaagagttcaaactcaacaatattatccccatgttagaattgcccctactgtcactacctggagtaacaaaactcctactgcccttcccagccatccacctgcagcctctccctctgacacacaggagaaaatcctccacctccgggtttcataatgcatggaaatgttaatccaaatgctgctggtcagcttcccacatctccaggtcatatgcacacccaggtaccaccttatccacagccacagccttatcaaccagcccagccgtatcccttcggaacaggggggtcagcaatgtatcgacctcagcagcctgttgctcctcctacttcaaacgcttaccctaacaccccttacatatcttctgcttcttcctatactgggcagtctcagctgtacgcagcacagcaccaggcctcttcacctacctccagccctgctacttctttccctcctcccccttcctctggagcatccttccagcatggcggaccaggagctccaccatcatcttcagcttatgcactgcctcctggaacaacaggtacactgcctgctgccagtgagctgcctgcgtcccaaagaacaggtcctcagaatggttggaatgaccctccagctttgaacagagtacccaaaaagaagaagatgcctgaaaacttcatgcctcctgttcccatcacatcaccaatcatgaacccgttgggtgacccccagtcacaaatgctgcagcaacagccttcagctccagtaccactgtcaagccagtcttcattcccacagccacatcttccaggtggccagcccttccatggcgtacagcaacctcttggtcaaacaggcatgccaccatctttttcaaagcccaatattgaaggtgccccaggggctcctattggaaataccttccagcatgtgcagtctttgccaacaaaaaaaattaccaagaaacctattccagatgagcacctcattctaaagaccacatttgaggatcttattcagcgctgcctttcttcagcaacagaccctcaaaccaagaggaagctagatgatgccagcaaacgtttggagtttctgtatgataaacttagggaacagacactttcaccaacaatcaccagtggtttacacaacattgcaaggagcattgaaactcgaaactactcagaaggattgaccatgcatacccacatagttagcaccagcaacttcagtgagacctctgctttcatgccagttctcaaagttgttctcacccaggccaataagctgggtgtctaaaaggacagcttctcttccactcaatattgccatttttccaaagaaacatgttaaaaaaaaaaattataagacatggactagtcctcattagcatgtttgcatagcaaccagtcaagagcatttacactatttctgctgatatactcaccttagaactgctcagaaccctggtgctttatttttgttttaatcttttgttgccagtgatgattttcctattctgcaaatagtgtatttcctggattacacatagtatggtttcctgaagtattctgataaatgtgttttttaaaacctcaatatactttttagaaaaggagcatctggttatgcataaagcagagctaaaactaaatttctttcatgtcctccctacttcctcagtgtcaatcagattaaagtgtgtaatccta

SEQ ID NO: 602070 - DNA, 3059 bp, Homo sapiens
agaagatctaggaaagaagattgctttggccttgaacaaagtggatggagccaatgtggctcttaaagactctgaccaagtagcacagagtgatggggaggagagccctgctgctgaagagcagctcttgggagagcacattaaagaggaaaaagaagaatctgaatttctaccctcatctggaggaacatttaatatctctgtcagtggggacattgatggtttaattactcaggctttgctgacgggcaattttgagagtgctgttgacctttgtttacatgataaccgcatggccgatgccattatattggccatagcaggtggacaagaactcttggctcgaacccagaaaaaatacttcgcaaaatcccaaagcaaaattaccaggctcatcactgcagtggtgatgaagaactggaaagagattgttgagtcttgtgatcttaaaaattggagagaggctttagctgcagtattgacttatgcaaagccggatgaattttcagccctttgtgatcttttgggaaccaggcttgaaaatgaaggagatagcctcctgcagactcaagcatgtctctgctatatttgtgcagggaatgtagagaaattagttgcatgttggactaaagctcaagatggaagccaccctttgtcacttcaggatctgattgagaaagttgtcatcctgcgaaaagctgtgcaactcactcaagccatggacactagtactgtaggagttctcttggctgcgaagatgagtcagtatgccaatttgttggcagctcagggcagtattgctgcagccttggcttttcttcctgacaacaccaaccagccaaatatcatgcagcttcgtgacagactttgtagagcacaaggagagcctgtagcaggacatgaatcacctaaaattccgtacgagaaacagcagctccccaagggcaggcctggaccagttgctggccaccaccagatgccaagagttcaaactcaacaatattatccccatggagaaaatcctccacctccgggtttcataatgcatggaaatgttaatccaaatgctgctggtcagcttcccacatctccaggtcatatgcacacccaggtaccaccttatccacagccacagccttatcaaccagcccagccgtatcccttcggaacaggggggtcagcaatgtatcgacctcagcagcctgttgctcctcctacttcaaacgcttaccctaacaccccttacatatcttctgcttcttcctatactgggcagtctcagctgtacgcagcacagcaccaggcctcttcacctacctccagccctgctacttctttccctcctcccccttcctctggagcatccttccagcatggcggaccaggagctccaccatcatcttcagcttatgcactgcctcctggaacaacaggtacactgcctgctgccagtgagctgcctgcgtcccaaagaacaggtcctcagaatggttggaatgaccctccagctttgaacagagtacccaaaaagaagaagatgcctgaaaacttcatgcctcctgttcccatcacatcaccaatcatgaacccgttgggtgacccccagtcacaaatgctgcagcaacagccttcagctccagtaccactgtcaagccagtcttcattcccacagccacatcttccaggtggccagcccttccatggcgtacagcaacctcttggtcaaacaggcatgccaccatctttttcaaagcccaatattgaaggtgccccaggggctcctattggaaataccttccagcatgtgcagtctttgccaacaaaaaaaattaccaagaaacctattccagatgagcacctcattctaaagaccacatttgaggatcttattcagcgctgcctttcttcagcaacagaccctcaaaccaagaggaagctagatgatgccagcaaacgtttggagtttctgtatgataaacttagggaacagacactttcaccaacaatcaccagtggtttacacaacattgcaaggagcattgaaactcgaaactactcagaaggattgaccatgcatacccacatagttagcaccagcaacttcagtgagacctctgctttcatgccagttctcaaagttgttctcacccaggccaataagctgggtgtctaaaaggacagcttctcttccactcaatattgccatttttccaaagaaacatgttaaaaaaaaaaattataagacatggactagtcctcattagcatgtttgcatagcaaccagtcaagagcatttacactatttctgctgatatactcaccttagaactgctcagaaccctggtgctttatttttgttttaatcttttgttgccagtgatgattttcctattctgcaaatagtgtatttcctggattacacatagtatggtttcctgaagtattctgataaatgtgttttttaaaacctcaatatactttttagaaaaggagcatctggttatgcataaagcagagctaaaactaaatttctttcatgtcctccctacttcctcagtgtcaatcagattaaagtgtgtaatcctaaaaaaaaaaaaaaaaaaaaaaaaaaaattttgggggggccggggccccgaaaaattttttaaaccctttgtgtggggggcggggccccatgttgtatggaccctggggccaaggggtcccaaggaaacccggtcaggaataggctgggtgttccccccaaaaaaccgcggcggacccgagcgcttttgcgaaccaatgggagtgccggttggggtcccttagggccctcttacaggacccttcgaggccagattcgttcacaacccccgcggtgggtgaaacgcacaagacagagacagtagcacaaccaaagacgaacacgaagcaaaacaagacaaaacccaacacacattacaacgaacaacaacaaacacaacagaacaaagacacaactcactgaagaacgaagagctcgcagatgacgccaaccaacaatagagaagaaagataaaaactctaaactacaagagaat

SEQ ID NO: 602071 - DNA, 871 bp, Homo sapiens
atcctcagggggtggagattttacaattaccatgttttggtgccctctcccttgcttcatcaagcatcagtcatataataccacagatttgaactcctgcccacagagggacctcccatctcctggccctatcataggatcactgggcctacctgcactgtggggccaagccctgtctttttcccaagccctctaagcacacgcatgagtgttcatcccgacttggatagggggctttatcacccttacaagatggcaaaaagattcacattgcttttttaacaaatttgttactttcgtacaaaatcccaaccttggatacgcagggaggtgctgcgacggggtagagtcaacgaaagagttgttgaggaacagtaatttaccaagactgccctctgtgggactgtatttcaagaacaacacactggtggggcttacctctcaattcacaatgtactgccctagcttctccccatctccggattgagctcatccatacctgcctctgttccatacgcacgagtaagaatgtggcagaacagttgctagggattcctccattcaatctttctcagaaaaaagtccggtaagacaatccaaatcaggggaaggttcagcgacgtggtcaccacgattaagtgacgcacacgcacataggcagcaccatcactggcacgctaacgcaacctgcagcccaaagggatccggcagcccgaaaaggaggaacagaaccggcaaagggcagacagagcccccccgatccagaagcctgcgagcagacaacggtgatgcgcggggaatcagaaaggagcacagcccgaggcgcgcaacgacaggcacgcgcaatcccagcgcgagaaccacggggccc

SEQ ID NO: 602072 - DNA, 1007 bp, Homo sapiens
aagagtgcattagaaacacacattcgatgctcatctccagtaggtacttggatcctgaacatagatgaaactgaggtgatctcgctcatccctgagaggctagctggctcaccaattagaagaatgcctcgccggaggatgcgtgacgcgtgactgcggaagcacgtcgcgagattgagagtccattgggcggtcattcactcgtgagtcctaatcaacatggaggttgccaccgcggattctccgatagtcaagagttgtagttcccggcggcctttgtttggcttggcccttggcccccaaatgtgtgggggggtacaagtggttgccttgttcccccaattggcttaaacaataccctgccttaggctcgctttgtccaccattttcttctttttgtattgtccctctataatttctcttcgtacataactaaccctaaaacaaagctgcgcaaacactacgtctcctgccagctgtgtgacacggccagttggtctaccatttgacaactgtcccttcagctacaggtgctaacgaaggggaaccaggggccgggagatttatcccttatagcacacccccccgcagtgcagacattgttgcggcaaggcttaagggcccccttggagacgcgggtcgcggacaggcgaacacgcacggggtgccagaggactgatgacactggtcgaggccggtccaggcaccacaacgggggcactttggaacgcgtgaactgatcgggtctcgccatctggaggtgtggtatgcagctaatcttcttaaccaaggacggctggattggcatctctgtccattccccggggaattcggttggtcagcctaggaataaaagccaggctggagacacgcacggccagagactggaatccttaggcgggacccaccctaggatgagcctatgtccaggagccatgcatttaggacagcgtggctaaaaagctacacacgtcgtcctgctccgagggacgaccacccaaggacct

SEQ ID NO: 602073 - DNA, 3165 bp, Homo sapiens
  misc_feature (2677)..(2677): n is a, c, g, or t
  misc_feature (2679)..(2679): n is a, c, g, or t
  misc_feature (2699)..(2699): n is a, c, g, or t
  misc_feature (2760)..(2760): n is a, c, g, or t
  misc_feature (2789)..(2789): n is a, c, g, or t
  misc_feature (2791)..(2791): n is a, c, g, or t
  misc_feature (3091)..(3091): n is a, c, g, or t
  misc_feature (3101)..(3101): n is a, c, g, or t
  misc_feature (3114)..(3114): n is a, c, g, or t
  misc_feature (3116)..(3116): n is a, c, g, or t
  misc_feature (3122)..(3122): n is a, c, g, or t
  misc_feature (3159)..(3159): n is a, c, g, or t
agaagatctaggaaagaagattgctttggccttgaacaaagtggatggagccaatgtggctcttaaagactctgaccaagtagcacagagtgatggggaggagagccctgctgctgaagagcagctcttgggagagcacattaaagaggaaaaagaagaatctgaatttctaccctcatctggaggaacatttaatatctctgtcagtggggacattgatggtttaattactcaggctttgctgacgggcaattttgagagtgctgttgacctttgtttacatgataaccgcatggccgatgccattatattggccatagcaggtggacaagaactcttggctcgaacccagaaaaaatacttcgcaaaatcccaaagcaaaattaccaggctcatcactgcagtggtgatgaagaactggaaagagattgttgagtcttgtgatcttaaaaattggagagaggctttagctgcagtattgacttatgcaaagccggatgaattttcagccctttgtgatcttttgggaaccaggcttgaaaatgaaggagatagcctcctgcagactcaagcatgtctctgctatatttgtgcagggaatgtagagaaattagttgcatgttggactaaagctcaagatggaagccaccctttgtcacttcaggatctgattgagaaagttgtcatcctgcgaaaagctgtgcaactcactcaagccatggacactagtactgtaggagttctcttggctgcgaagatgagtcagtatgccaatttgttggcagctcagggcagtattgctgcagccttggcttttcttcctgacaacaccaaccagccaaatatcatgcagcttcgtgacagactttgtagagcacaaggagagcctgtagcaggacatgaatcacctaaaattccgtacgagaaacagcagctccccaagggcaggcctggaccagttgctggccaccaccagatgccaagagttcaaactcaacaatattatccccatggagaaaatcctccacctccgggtttcataatgcatggaaatgttaatccaaatgctgctggtcagcttcccacatctccaggtcatatgcacacccaggtaccaccttatccacagccacagccttatcaaccagcccagccgtatcccttcggaacaggggggtcagcaatgtatcgacctcagcagcctgttgctcctcctacttcaaacgcttaccctaacaccccttacatatcttctgcttcttcctatactgggcagtctcagctgtacgcagcacagcaccaggcctcttcacctacctccagccctgctacttctttccctcctcccccttcctctggagcatccttccagcatggcggaccaggagctccaccatcatcttcagcttatgcactgcctcctggaacaacaggtacactgcctgctgccagtgagctgcctgcgtcccaaagaacaggtcctcagaatggttggaatgaccctccagctttgaacagagtacccaaaaagaagaagatgcctgaaaacttcatgcctcctgttcccatcacatcaccaatcatgaacccgttgggtgacccccagtcacaaatgctgcagcaacagccttcagctccagtaccactgtcaagccagtcttcattcccacagccacatcttccaggtggccagcccttccatggcgtacagcaacctcttggtcaaacaggcatgccaccatctttttcaaagcccaatattgaaggtgccccaggggctcctattggaaataccttccagcatgtgcagtctttgccaacaaaaaaaattaccaagaaacctattccagatgagcacctcattctaaagaccacatttgaggatcttattcagcgctgcctttcttcagcaacagaccctcaaaccaagaggaagctagatgatgccagcaaacgtttggagtttctgtatgataaacttagggaacagacactttcaccaacaatcaccagtggtttacacaacattgcaaggagcattgaaactcgaaactactcagaaggattgaccatgcatacccacatagttagcaccagcaacttcagtgagacctctgctttcatgccagttctcaaagttgttctcacccaggccaataagctgggtgtctaaaaggacagcttctcttccactcaatattgccatttttccaaagaaacatgttaaaaaaaaaaattataagacatggactagtcctcattagcatgtttgcatagcaaccagtcaagagcatttacactatttctgctgatatactcaccttagaactgctcagaaccctggtgctttatttttgttttaatcttttgttgccagtgatgattttcctattctgcaaatagtgtatttcctggattacacatagtatggtttcctgaagtattctgataaatgtgttttttaaaacctcaatatactttttagaaaaggagcatctggttatgcataaagcagagctaaaactaaatttctttcatgtcctccctacttcctcagtgtcaatcagattaaagtgtgtaatcctattttatgtgtgtatagtcttttttgaaacagctgcttaaaatttagtttattttttgtgtcttaggattcctgagtaaataactacatctncnaactgctacatgggttttancagatattaataaaaatgggatcactggctttaactatataggaaaagactggacattttngttctgtagaatgcattgagcttttttcnanttgtaaatgtttcaatattctgtttgagttttaagactaaattgtgtccattttatagctagaaattttttcacctattttgtttaaattacctatagctgtgccaggcatggtggctcacgcttgtaatcccagcactttgagaggccgaagcaggcagaggtcgggagttcgagaccagactggccaacatggagaaaccctgtctctactaaaagtacagaattagccgggcgtggtggcgcatgcctataatcccagctacttgggtggctgaggcaggagaattgcttgaacccnggaggcggangttgcggtgaccnanatcacnccattgctgtccagtctgggcaataagagcaaaactntttttt

SEQ ID NO: 602074 - DNA, 159 bp, Homo sapiens
atatcgtcgacccccgcgtccggaaagaactgctgcctccaagaattcagaaaacccattttttcatatccaaatttgtaaaaagaaaatagataaaatcccgtctgccaaatccgcctctgcgcttaaagaaattaagaaatgttttctcccttttta

SEQ ID NO: 602075 - DNA, 487 bp, Homo sapiens
  misc_feature (161)..(161): n is a, c, g, or t
  misc_feature (479)..(479): n is a, c, g, or t
gtgaagagcgcgatggccttgaggcagccatactcggccgagtcgacctcaggcggccagcttgtcacctgtcctggaggcgcgcacctgtccatgaaacccggcgcgctcgcggccataggcgcggcgtggaggccggcggcggccagtagcggcgccgntgtgcaggggcagcgccgcctgcgccgcgttcagcacgaagagctcgctccagctcaggcgcagcagcgccacctggtcggccaccggcagctcgggaagaagggcccgggaggaaccatttttttattacccttgcagccgcgccgccagctcgcacacgttgtcgatgccagcaaaggagcgacttaaaaccccttgcccgaagtgttctttagcagcaagtaaaatgtcagcgcgcagcagctgcgcgatcagttcggacaccggctgccccgggaagaggtctccgccgctagacactgccgccagcgccgagnccgggggg

SEQ ID NO: 602076 - DNA, 3162 bp, Homo sapiens
acaatttgaacattataaaatcaactttgatgacagtaaaaatggcttttctgcatgggaacttattgagcttattggaaatggacagtttagcaaaggcatggaccggcagactgtgtctatggcaattaatgaggtctttaatgaacttatattagatgtgttaaagcagggttacatgatgaaaaagggccacagacggaaaaactggactgaaagatggtttgtactaaaacccaacataatttcttactatgtgagtgaggatctgaaggataagaaaggagacattctcttggatgaaaattgctgtgtagagtccttgcctgacaaagatggaaagaaatgcctttttctcgtaaaatgttttgataagacttttgaaatcagtgcttcagataagaagaagaaacaggagtggattcaagccattcattctactattcatctgttgaagctgggcagccctccaccacacaaagaagcccgccagcgtcggaaagaactccggaagaagcagctggctgaacaaggggaactggagcgacaaatgaaggaactccaggccgccaatgaaagcaagcagcaggagctggaggccgtgcggaagaaactggaggaagcagcatctcgtgcagcagaagaggaaaagaaacgccttcagactcaagtggaacttcaggccaggttcagcacagagctggaaagagagaagcttatcagacagcagatggaagaacaggttgctcaaaagtcctctgaactggaacagtatttacagcgagtacgggagctggaagacatgtacctaaagctgcaggaggctcttgaagatgagagacaggcccggcaagatgaagagacagtgcggaagcttcaggccaggttgttggaggaagagtcttccaagagggctgaactagaaaagtggcacttggagcagcagcaggccattcagacaaccgaggcggagaagcaggagttggagaatcagcgtgtcctgaaggaacaggccctgcaggaggccatggagcagctggaggagcttgagttagaacggaagcaagcacttgagcagtacgaggaagttaaaaagaagctggagatggcaactaataagaccaagagctggaaggacaaagtggcccatcatgaaggattaattcgactgatagaaccaggttcaaagaaccctcacctgatcactaactggggacctgcagctttcactgaggcagaacttgaagagagagagaagaactggaaagagaaaaagaccacggagtgactgagcttgctggcagtcacgtcagttatgtagatactgcatggcaggagagctttacgctaaagacaaaagaaacagctttgggggccgggcgtggtggctcacgcctgtaatcccagcactttgggaggccgaggcgggtggatcacctgaggtcaggagttcaagaccagcctggccaacctggtgaaaccctgtctctactaaaaatacaaaaaaaattagctgagcgtggtggcgggcgcctgtaatcccagctacttgggaggctgaggcaggagaatcacttgaacgtgggaggcggaggttgcagcgagctgagatcatgccgttgtactccagcttgggcaacagagtgagactccatctcaaaacaaaacaaaacaaaacaaaacaaaaagacccggctttgctgcttttaactcttcttccttctgtgcctctctaagtgggtcagtatcctaaggaagccttcttatttatcttcctgcaaacaagggttacctgaaaagaaaaaaaaagtcaacattgtcaagctgtttgtttactctttctttgaaaacatcaccttctgaaatttgtcttttagctctctcagattcttccccaaatgaggcagggtgcagacagcacagtcagctctgcagagtttggaggggctcactgccactgggtactcagaacctctgtggactggatgtcagctctttcctttggcagcgtgtttccttttccgagtatgtgctgttaaactagattggccggttcgctttccatttcctgacacttgacatggaatgcctttgaccattggtgctctgacagagaagtcatggagtcattgccatttcctggttgcccttttggaatgtgatcctgttagtagaggttttctagcttctactaagatatttctttccctaaccatcatacacttggcatgtttcattcccatctcctttcccctcaccttaaaggagactacccctttgccccatattgtcaacctaattttctctcgtactctctctagtgaatgatgtgctaccaagtatatgccaggctgtgagaggattatactgagtagtagaaagaagctaatttgaaataaaaattatttgtataattaagaaagcagattagatgcacatggtcaacaggaagttgactgtatgtctgctagttagattcaaaacatcataaagatgatagcatgtcaatatattagcctagccattatgttagcctttgttaggtgggcagcttttctgctttttcccttcctctgtggtgacaacggaggaaatatccaacagaaatacgtctaacagggaaattgggatcatagtttatatgcatctgatttgaaaggagtattgaggaaggttttcatatatgatctatctttggattaaaaagaacatttatgaaatcaagccttctaacactagttataattgagaagcaacagtaactccgtggacagcaatcaagcttaaaattgtaaataaatatggggataattcagttgttgcaaaaaaagggcagaattcagtagaataaagtccttttctcttacaggtattaaatgaggacagagaacctcaggtgttcttatgctagtgcttgctgagtgcatactaagaaagcaattccaaatagatgtatacatctagagagagtggtattagagattcagtgtatgtatttatttacatgagaggaaactggaatataatcccataaattattggaatataatcccataaattatcaccttttatgactggaaaatatttgccaatgaagaaatggtctgtaggtatttgtcttaagatttttggctgtttaataaaaatgtaactttaacggtt

SEQ ID NO: 602077 - DNA, 325 bp, Homo sapiens
  misc_feature (179)..(179): n is a, c, g, or t
  misc_feature (235)..(235): n is a, c, g, or t
gaccaccatccagtcacctcccacaaggccccaccttcaatattgggaattacaattcgacatgagatttgggtggagattcaaatccaaaccatgtccttttgcttttttctgttttgtttgtggagtagatttttctccatccctttactttgagcctaagggtgccattgcatgtnagatgggtctcttgaagacagcataccattggttcttgcttttttatccaagtcancactgtgccttttaattggggcatttagcctgcttacaatcaaaggactcagtgacctttgaggatgtggctgtgaaccttcaacccagg

SEQ ID NO: 602078 - DNA, 3393 bp, Homo sapiens
acaatttgaacattataaaatcaactttgatgacagtaaaaatggcttttctgcatgggaacttattgagcttattggaaatggacagtttagcaaaggcatggaccggcagactgtgtctatggcaattaatgaggtctttaatgaacttatattagatgtgttaaagcagggttacatgatgaaaaagggccacagacggaaaaactggactgaaagatggtttgtactaaaacccaacataatttcttactatgtgagtgaggatctgaaggataagaaaggagacattctcttggatgaaaattgctgtgtagagtccttgcctgacaaagatggaaagaaatgcctttttctcgtaaaatgttttgataagacttttgaaatcagtgcttcagataagaagaagaaacaggagtggattcaagccattcattctactattcatctgttgaagctgggcagccctccaccacacaaagaagcccgccagcgtcggaaagaactccggaagaagcagctggctgaacaaggggaactggagcgacaaatgaaggaactccaggccgccaatgaaagcaagcagcaggagctggaggccgtgcggaagaaactggaggaagcagcatctcgtgcagcagaagaggaaaagaaacgccttcagactcaagtggaacttcaggccaggttcagcacagagctggaaagagagaagcttatcagacagcagatggaagaacaggttgctcaaaagtcctctgaactggaacagtatttacagcgagtacgggagctggaagacatgtacctaaagctgcaggaggctcttgaagatgagagacaggcccggcaagatgaagagacagtgcggaagcttcaggccaggttgttggaggaagagtcttccaagagggctgaactagaaaagtggcacttggagcagcagcaggccattcagacaaccgaggcggagaagcaggagttggagaatcagcgtgtcctgaaggaacaggccctgcaggaggccatggagcagctggaggagcttgagttagaacggaagcaagcacttgagcagtacgaggaagttaaaaagaagctggagatggcaactaataagaccaagagctggaaggacaaagtggcccatcatgaaggattaattcgactgatagaaccaggttcaaagaaccctcacctgatcactaactggggacctgcagctttcactgaggcagaacttgaagagagagagaagaactggaaagagaaaaagaccacggagtgactgagcttgctggcagtcacgtcagttatgtagatactgcatggcaggagagctttacgctaaagacaaaagaaacagctttgggggccgggcgtggtggctcacgcctgtaatcccagcactttgggaggccgaggcgggtggatcacctgaggtcaggagttcaagaccagcctggccaacctggtgaaaccctgtctctactaaaaatacaaaaaaaattagctgagcgtggtggcgggcgcctgtaatcccagctacttgggaggctgaggcaggagaatcacttgaacgtgggaggcggaggttgcagcgagctgagatcatgccgttgtactccagcttgggcaacagagtgagactccatctcaaaacaaaacaaaacaaaacaaaacaaaaagacccggctttgctgcttttaactcttcttccttctgtgcctctctaagtgggtcagtatcctaaggaagccttcttatttatcttcctgcaaacaagggttacctgaaaagaaaaaaaaagtcaacattgtcaagctgtttgtttactctttctttgaaaacatcaccttctgaaatttgtcttttagctctctcagattcttccccaaatgaggcagggtgcagacagcacagtcagctctgcagagtttggaggggctcactgccactgggtactcagaacctctgtggactggatgtcagctctttcctttggcagcgtgtttccttttccgagtatgtgctgttaaactagattggccggttcgctttccatttcctgacacttgacatggaatgcctttgaccattggtgctctgacagagaagtcatggagtcattgccatttcctggttgcccttttggaatgtgatcctgttagtagaggttttctagcttctactaagatatttctttccctaaccatcatacacttggcatgtttcattcccatctcctttcccctcaccttaaaggagactacccctttgccccatattgtcaacctaattttctctcgtactctctctagtgaatgatgtgctaccaagtatatgccaggctgtgagaggattatactgagtagtagaaagaagctaatttgaaataaaaattatttgtataattaagaaagcagattagatgcacatggtcaacaggaagttgactgtatgtctgctagttagattcaaaacatcataaagatgatagcatgtcaatatattagcctagccattatgttagcctttgttaggtgggcagcttttctgctttttcccttcctctgtggtgacaacggaggaaatatccaacagaaatacgtctaacagggaaattgggatcatagtttatatgcatctgatttgaaaggagtattgaggaaggttttcatatatgatctatctttggattaaaaagaacatttatgaaatcaagccttctaacactagttataattgagaagcaacagtaactccgtggacagcaatcaagcttaaaattgtaaataaatatggggataattcagttgttgcaaaaaaagggcagaattcagtagaataaagtccttttctcttacaggtattaaatgaggacagagaacctcaggtgttcttatgctagtgcttgctgagtgcatactaagaaagcaattccaaatagatgtatacatctagagagagtggtattagagattcagtgtatgtatttatttacatgagaggaaactggaatataatcccataaattattggaatataatcccataaattatcaccttttatgactggaaaatatttgccaatgaagaaatggtctgtaggtatttgtcttaagatttttggctgtttaataaaaatgtaactttaacggtttcttatagttgcctttataaagtgtattgtctaaaatattttggtatcatgtgcctttgaaatttgacagctgatttgggtgttggatttctgcccagccatttatcagtattatcattatattcagtagctggcaggtgtattagacaaacgagacttaggtaagggaatgggaacctcggggtgatcgcatcaccccgagaaaagaccccatagaagaaaactacacac

SEQ ID NO: 602079 - DNA, 662 bp, Homo sapiens
  misc_feature (345)..(345): n is a, c, g, or t
taatattaaccaaacttagggctcttatatccaggcagtaaagtaaggaacagcaaattgggagggctacaccattcaccatggcaacagaaaagcctcaaaacacattaaagttccctctcgacgttagtgtctcgggtatagacttctttccttagacctcagggagaaacaacacattttataacgtggccttgaaggacacaggccacggcagtcctgtggcgccccacctgtgtcgagaagggcgcgaggctgtgagaccgccgcgggctctcttctgtgtgtctcaaggtctccctgtgagaaggtgtgcttgtggttagaaggggcttctcccaaagncagggctctcctgtgcggttatttttttcagggagccacctttctttttcaagccgcgggtgtagagacccccgggacagagtggccctctcttttctcagagcaatgtgtggcgcccacagcagtgttgcaacactttgttgtgccccccgagagctggtgatcacccccctttgtgatgctgttggaaatgtggtgttggggaggtctcttcttttccgagagcgcttctcctcctcttcctcttcttcctgtggagaaattttaacttcttcccaaacccctttgtgtgtggccccctcttttgtggtggccct

SEQ ID NO: 602080 - DNA, 125 bp, Homo sapiens
  misc_feature (88)..(88): n is a, c, g, or t
tcagttggtaccgacgctctctcggtgggggcagtggtctctggtggggatagccccagaagatggggactctgtgaagtcagcctangggttgacgggggatctgaagccgagttcacacttgt

SEQ ID NO: 602081 - DNA, 3370 bp, Homo sapiens
acaatttgaacattataaaatcaactttgatgacagtaaaaatggcttttctgcatgggaacttattgagcttattggaaatggacagtttagcaaaggcatggaccggcagactgtgtctatggcaattaatgaggtctttaatgaacttatattagatgtgttaaagcagggttacatgatgaaaaagggccacagacggaaaaactggactgaaagatggtttgtactaaaacccaacataatttcttactatgtgagtgaggatctgaaggataagaaaggagacattctcttggatgaaaattgctgtgtagagtccttgcctgacaaagatggaaagaaatgcctttttctcgtaaaatgttttgataagacttttgaaatcagtgcttcagataagaagaagaaacaggagtggattcaagccattcattctactattcatctgttgaagctgggcagccctccaccacacaaagaagcccgccagcgtcggaaagaactccggaagaagcagctggctgaacaaggggaactggagcgacaaatgaaggaactccaggccgccaatgaaagcaagcagcaggagctggaggccgtgcggaagaaactggaggaagcagcatctcgtgcagcagaagaggaaaagaaacgccttcagactcaagtggaacttcaggccaggttcagcacagagctggaaagagagaagcttatcagacagcagatggaagaacaggttgctcaaaagtcctctgaactggaacagtatttacagcgagtacgggagctggaagacatgtacctaaagctgcaggaggctcttgaagatgagagacaggcccggcaagatgaagagacagtgcggaagcttcaggccaggttgttggaggaagagtcttccaagagggctgaactagaaaagtggcacttggagcagcagcaggccattcagacaaccgaggcggagaagcaggagttggagaatcagcgtgtcctgaaggaacaggccctgcaggaggccatggagcagctggaggagcttgagttagaacggaagcaagcacttgagcagtacgaggaagttaaaaagaagctggagatggcaactaataagaccaagagctggaaggacaaagtggcccatcatgaaggattaattcgactgatagaaccaggttcaaagaaccctcacctgatcactaactggggacctgcagctttcactgaggcagaacttgaagagagagagaagaactggaaagagaaaaagaccacggagtgactgagcttgctggcagtcacgtcagttatgtagatactgcatggcaggagagctttacgctaaagacaaaagaaacagctttgggggccgggcgtggtggctcacgcctgtaatcccagcactttgggaggccgaggcgggtggatcacctgaggtcaggagttcaagaccagcctggccaacctggtgaaaccctgtctctactaaaaatacaaaaaaaattagctgagcgtggtggcgggcgcctgtaatcccagctacttgggaggctgaggcaggagaatcacttgaacgtgggaggcggaggttgcagcgagctgagatcatgccgttgtactccagcttgggcaacagagtgagactccatctcaaaacaaaacaaaacaaaacaaaacaaaaagacccggctttgctgcttttaactcttcttccttctgtgcctctctaagtgggtcagtatcctaaggaagccttcttatttatcttcctgcaaacaagggttacctgaaaagaaaaaaaaagtcaacattgtcaagctgtttgtttactctttctttgaaaacatcaccttctgaaatttgtcttttagctctctcagattcttccccaaatgaggcagggtgcagacagcacagtcagctctgcagagtttggaggggctcactgccactgggtactcagaacctctgtggactggatgtcagctctttcctttggcagcgtgtttccttttccgagtatgtgctgttaaactagattggccggttcgctttccatttcctgacacttgacatggaatgcctttgaccattggtgctctgacagagaagtcatggagtcattgccatttcctggttgcccttttggaatgtgatcctgttagtagaggttttctagcttctactaagatatttctttccctaaccatcatacacttggcatgtttcattcccatctcctttcccctcaccttaaaggagactacccctttgccccatattgtcaacctaattttctctcgtactctctctagtgaatgatgtgctaccaagtatatgccaggctgtgagaggattatactgagtagtagaaagaagctaatttgaaataaaaattatttgtataattaagaaagcagattagatgcacatggtcaacaggaagttgactgtatgtctgctagttagattcaaaacatcataaagatgatagcatgtcaatatattagcctagccattatgttagcctttgttaggtgggcagcttttctgctttttcccttcctctgtggtgacaacggaggaaatatccaacagaaatacgtctaacagggaaattgggatcatagtttatatgcatctgatttgaaaggagtattgaggaaggttttcatatatgatctatctttggattaaaaagaacatttatgaaatcaagccttctaacactagttataattgagaagcaacagtaactccgtggacagcaatcaagcttaaaattgtaaataaatatggggataattcagttgttgcaaaaaaagggcagaattcagtagaataaagtccttttctcttacaggtattaaatgaggacagagaacctcaggtgttcttatgctagtgcttgctgagtgcatactaagaaagcaattccaaatagatgtatacatctagagagagtggtattagagattcagtgtatgtatttatttacatgagaggaaactggaatataatcccataaattatcaccttttatgactggaaaatatttgccaatgaagaaatggtctgtaggtatttgtcttaagatttttggctgtttaataaaaatgtaactttaacggtttcttatagttgcctttataaagtgtattgtctaaaatattttggtatcatgtgcctttgaaatttgacagctgatttgggtgttggatttctgcccagccatttatcagtattatcattatattcagtagctggcaggtgtattagacaaacgagacttaggtaagggaatgggaacctcggggtgatcgcatcaccccgagaaaagaccccatagaagaaaactacacac

SEQ ID NO: 602082 - DNA, 121 bp, Homo sapiens
cttttttgatcagtgtcctatacatcgaaggtgtgcatatatgctgaatgacattttagggacatcgtgtttttataaagaattccgtgagaccaaatttactaaagcaacacaaattaca

SEQ ID NO: 602083 - DNA, 3139 bp, Homo sapiens
acaatttgaacattataaaatcaactttgatgacagtaaaaatggcttttctgcatgggaacttattgagcttattggaaatggacagtttagcaaaggcatggaccggcagactgtgtctatggcaattaatgaggtctttaatgaacttatattagatgtgttaaagcagggttacatgatgaaaaagggccacagacggaaaaactggactgaaagatggtttgtactaaaacccaacataatttcttactatgtgagtgaggatctgaaggataagaaaggagacattctcttggatgaaaattgctgtgtagagtccttgcctgacaaagatggaaagaaatgcctttttctcgtaaaatgttttgataagacttttgaaatcagtgcttcagataagaagaagaaacaggagtggattcaagccattcattctactattcatctgttgaagctgggcagccctccaccacacaaagaagcccgccagcgtcggaaagaactccggaagaagcagctggctgaacaaggggaactggagcgacaaatgaaggaactccaggccgccaatgaaagcaagcagcaggagctggaggccgtgcggaagaaactggaggaagcagcatctcgtgcagcagaagaggaaaagaaacgccttcagactcaagtggaacttcaggccaggttcagcacagagctggaaagagagaagcttatcagacagcagatggaagaacaggttgctcaaaagtcctctgaactggaacagtatttacagcgagtacgggagctggaagacatgtacctaaagctgcaggaggctcttgaagatgagagacaggcccggcaagatgaagagacagtgcggaagcttcaggccaggttgttggaggaagagtcttccaagagggctgaactagaaaagtggcacttggagcagcagcaggccattcagacaaccgaggcggagaagcaggagttggagaatcagcgtgtcctgaaggaacaggccctgcaggaggccatggagcagctggaggagcttgagttagaacggaagcaagcacttgagcagtacgaggaagttaaaaagaagctggagatggcaactaataagaccaagagctggaaggacaaagtggcccatcatgaaggattaattcgactgatagaaccaggttcaaagaaccctcacctgatcactaactggggacctgcagctttcactgaggcagaacttgaagagagagagaagaactggaaagagaaaaagaccacggagtgactgagcttgctggcagtcacgtcagttatgtagatactgcatggcaggagagctttacgctaaagacaaaagaaacagctttgggggccgggcgtggtggctcacgcctgtaatcccagcactttgggaggccgaggcgggtggatcacctgaggtcaggagttcaagaccagcctggccaacctggtgaaaccctgtctctactaaaaatacaaaaaaaattagctgagcgtggtggcgggcgcctgtaatcccagctacttgggaggctgaggcaggagaatcacttgaacgtgggaggcggaggttgcagcgagctgagatcatgccgttgtactccagcttgggcaacagagtgagactccatctcaaaacaaaacaaaacaaaacaaaacaaaaagacccggctttgctgcttttaactcttcttccttctgtgcctctctaagtgggtcagtatcctaaggaagccttcttatttatcttcctgcaaacaagggttacctgaaaagaaaaaaaaagtcaacattgtcaagctgtttgtttactctttctttgaaaacatcaccttctgaaatttgtcttttagctctctcagattcttccccaaatgaggcagggtgcagacagcacagtcagctctgcagagtttggaggggctcactgccactgggtactcagaacctctgtggactggatgtcagctctttcctttggcagcgtgtttccttttccgagtatgtgctgttaaactagattggccggttcgctttccatttcctgacacttgacatggaatgcctttgaccattggtgctctgacagagaagtcatggagtcattgccatttcctggttgcccttttggaatgtgatcctgttagtagaggttttctagcttctactaagatatttctttccctaaccatcatacacttggcatgtttcattcccatctcctttcccctcaccttaaaggagactacccctttgccccatattgtcaacctaattttctctcgtactctctctagtgaatgatgtgctaccaagtatatgccaggctgtgagaggattatactgagtagtagaaagaagctaatttgaaataaaaattatttgtataattaagaaagcagattagatgcacatggtcaacaggaagttgactgtatgtctgctagttagattcaaaacatcataaagatgatagcatgtcaatatattagcctagccattatgttagcctttgttaggtgggcagcttttctgctttttcccttcctctgtggtgacaacggaggaaatatccaacagaaatacgtctaacagggaaattgggatcatagtttatatgcatctgatttgaaaggagtattgaggaaggttttcatatatgatctatctttggattaaaaagaacatttatgaaatcaagccttctaacactagttataattgagaagcaacagtaactccgtggacagcaatcaagcttaaaattgtaaataaatatggggataattcagttgttgcaaaaaaagggcagaattcagtagaataaagtccttttctcttacaggtattaaatgaggacagagaacctcaggtgttcttatgctagtgcttgctgagtgcatactaagaaagcaattccaaatagatgtatacatctagagagagtggtattagagattcagtgtatgtatttatttacatgagaggaaactggaatataatcccataaattatcaccttttatgactggaaaatatttgccaatgaagaaatggtctgtaggtatttgtcttaagatttttggctgtttaataaaaatgtaactttaacggtt

SEQ ID NO: 602084 - DNA, 189 bp, Homo sapiens
ctggcgtgactcatattggggcttaaaatttcaaggaagggcacttcaaatggctttgcttttgcttgtacagtgctagagcgtaggaatagacccgtggcgtccactgtgagatgttcttcagctaaccagtagcatcacagtctctgcatgcaggtcattctatgggtaaacgaaatgacttccaca

SEQ ID NO: 602085 - DNA, 382 bp, Homo sapiens
tgcacgcctggtggcctacttcaacatcgagttcacacgctgccacaagaggaccggcttctccaccagccccgagtccccgtacacgcactggaagcagacggtgttctacataggaggactacctgtaccgtgaagacgggcgagtgagatctgtcggcaccatacggcatgcggcccaacgtccacagaacaactcgggacctgtgacttcacctatcgacctgtgacttcacagggccagcgtgtgctgagcttgtcctcgctccaccgcactaccgcgatgcgctagaggcccgtgctctcccgccctggacgatgcccagggtgctgagtcgttcctatggcggtttcgggagctccccactttctctcgtccact

SEQ ID NO: 602086 - DNA, 322 bp, Homo sapiens
ctcttgtagaggcacggtgccttcttgccataaatcgtgcatgtgcgatactcctcaggaggtgaccccagctttattgtcttccctgacagagaccatttgatgaggagatgctgacgtatgggacgggctagtgtatcaacagacgcgtatgatagcactgtgaccctaggagctccatgaacatatatctggcgctagaaagatcatacagcattgtcgccagcagctatacccgagccataaggcgactaggcaactgaatggaggtccaatcgtgctatacctgagagctcgacgaatggtcatcgctgatgctccg

SEQ ID NO: 602087 - DNA, 183 bp, Homo sapiens
atactgagtggacgaggtatcatcgggatacttatatacatgaggaggcatacgttccacgcggatcttttgttgacatacagcatatctacggtcctaaaggaggtggcaacaggagagctaatgttcctaggatagggaggtgtgggtctggtgaacgcctggttaacattctatggtagt

SEQ ID NO: 602088 - DNA, 415 bp, Homo sapiens
tttttttttgagatggagtctcactctgtcacctaggctggagtgcagtgttgcaatcttggctcactgcaacctccgcctcctgggttcaagcgattctcctgcctcagcctcctgagtagctgggattacgggcgcacaccaccacacccaactaatttttctatttttagtagagacggggtttcaccattttggtcaggctggtcttgaactcctgaccttgtgatccacccacctcggcatcccaaagtgctgtgattacaggtgtgagccaccgcgcctggccctggcgctgttcttagagtccatcacagacctgaactgctgaatgctattcctcatggaaactgaggcatggacatttcggcagctcccccttggatgtggcctggaggagttggagaaatcaggc

SEQ ID NO: 602089 - DNA, 347 bp, Homo sapiens
aacacaaaaattagctgggtgtggtggcacatgcctgtaatcccactacttgggaggctgaggcagaggaatcacttgaacccgggaagtggaggttgcagtgagctgagattgtgccactgcgctccagcctggcgacagaaggagactcagtctcaaaaaaaaaaaaaaattgctccagttttgtaacgaatcagcccaaacctaatgggatcaaacacatttttttggggaaaataaaaacttttttagagcccaggctctggggctcatgcctgaaatgccaacaccttgggaggttgaggagggcggattgcctgaatccagaaggggtcccgagctcgaat

SEQ ID NO: 602090 - DNA, 261 bp, Homo sapiens
actgacactctggaaaagctcgtgtctgttaatacctactaggtcgtggtgtataatagctcttgaataactctaagatccacatgttgaagtccttacccaccccctacccttttaaaagcatatgcacagtcttttcatgatttcctcgtctggctctcgtaaatcctgtgaggtcaggcgcagcatctaggacgtcgtcctctccagcaggagtagattgtttcaggctcatggccttacaacagctattttctgtaa

SEQ ID NO: 602091 - DNA, 819 bp, Homo sapiens
gacctcctggaaccagacccatgcactggacagatgctactcccctcacccgggaaagctggaatactccatgcccgagaggaagcagacggcacagggacacccctgaccaccttgaggatctgactccaagactggtgcagggtatcgagagatggattccagatggaggtcctggtcccagacacgcagcagtcctggatagctctgcagaggagacaggaacccgagcagtagctgaagcagaagccagaccgcagtccccttgccacatagaaggcgggcttctcccagcacatggtagtacccatattgaacaaccaacataccaccacgacacacatccatgcactaccagcgatcggagggtagatgaaacacaatgtagatgatcagaaaaaacaaaaacacaaagaaaactagagaaacaccacatacacatgagaacaacaggcaagcggaggttcccatacagcaccatagcaagcatatgcaagcacacgcacgcggcaagtcgaagaacccccacaaatccactggactcaaagatacatggaacgggaggcccgccacacgaggcaaataaacaaagcacaaaacgaggcgacaacaaaggcacccagaaaaaaggaaacactggacaaagacacgctatgcaaaacatgtgaccacatcaaccttgaataccaagaaggctcaacacgcgcaagtaacatagaaaagcggacaatcaacccccgacaccgcaataatagaaaccacatgagcacaaccacaacaacgaccaggggcaaaacaaagctagaaaaagagagacat

SEQ ID NO: 602092 - DNA, 941 bp, Homo sapiens
gctggctctgcgtgtcttcctgggtctgggctcggagattcacaggcggccgcgaggccgagcgatgggactgcatggccctgagtgctggctgcagggcttggctggggtcctggaggtttgacctcgcccccgagccggcttcgaggctagcctcctccaggcagctctggggcccggcgccctgctgctctgctcagtgctccctgtgttcatgtgcttgcccatcccctccccacctggctgtccctggaccgttgggacctgtgacctgtggcctcgggctgtggcttccaaagcctggcctgcagccctggctgacccccgaggcctctctgcccctgggcccctagacctctcactatgaccggggccgcgctccaacctgggggcttgatcaccgaacatcctgttgaacatgcatctgtagtgggtcagtgtcctcaccatgcccttctgcttcaaacagtgcggcatctgtcctgggggcgctgctcttggtctttctgctcatggatgacgcaccagtcgtgcatgttcttggtgaagtcggcagcctgagcaagcggaggacctacgccggctggcattccacgcctacgggaaggcaggcaagatgctggtggagaccagcattgatcgtgctgaatgcttgtgccaccttgcatccggccttctacgtccgtgatcggcgacttgcgggtccaactttctttggccctggttgttccgcgttccacgtgggctggccacccttccgcatgttcctggttggacgccgtggtcgttgtgcatcgttgcgcccggtcagctgagggacatgatggccccatccaatcttcaaagcatggcccccttctacacccgtgttgtcggaccggcccctctacaacaggcctacgtcgggaggcggcgggcacacaccctgggggtccggccct

SEQ ID NO: 602093 - DNA, 142 bp, Homo sapiens
cggagtaacgtcgctgacagctgacaggtgattaaacgacttgctgcctcgtgttcttcatcccgaaacggttatcacattctttgactctgctctgagcatgggtgccaacaacatcggaacgcttatttacatgctggat

SEQ ID NO: 602094 - DNA, 541 bp, Homo sapiens
ctgtcattgacgatcatatgtacagtggtgagggtgagtactctatcaacagcgacggagactctgaagtggactcggatctacaggaccgtgttgacggggtcaagtcctgcttggcaaacgacaagtcacctttccacggcacgttgtgaggatggcagcttagagagttctagccccaccaggtactggaagtcccttgcccctgatcggtcagatgatgagcactaccttctagacaacacttccagaccgcgatactcacacagttatttgagtgacagcgacacagaggtcattctgacggagactaacacaaacccaatgggagtggtaggcagccacttcaccctagaccctggggtagcttggcacctttcccaaaagaggagggcaccggtcctcaccacccgcttgtctgattgtatggaaacactccgcctttttctgcacggacattttaaagttaagggaaagatgagctccccaatagaacaggtgtggaaaacgattatttttattattttttctttttttattc

SEQ ID NO: 602095 - DNA, 234 bp, Homo sapiens
aggggccagagcctgtttggtgcggccttgccagctgatggccctctttgtaaggcactgcagggcctcgccctcgggcatccgcgcaggctttttttgcagggtgtaccaccattgccaggaaggcctccaggcgcgggcgccttgagcgcatacaccggggatacaagaatttggtgtcccattcccaccaggccagctgtggggatgaggagggattggccctccgaaagc

SEQ ID NO: 602096 - DNA, 134 bp, Homo sapiens
gctggcgacaggtcgcaggagagagggaactccatggtgccgccacactgggtccagctgctgggcatgcaaaggcgcctgacgtgagatgggaaagctggccagggcagcaccagcgggaagatcacgcgcag

SEQ ID NO: 602097 - DNA, 254 bp, Homo sapiens
gacggagatagagtatacagagcggtgagggatagaaggcctgggttcaaatttccagacactgtgcagcttatgtggccatcggaccttcaccctcctgtcagatggagggggtgacttcagaagatcaaaaagaaggtaagtaggccaggaacagtgactcacgcctgaaacgccagcactatgggaggcctaggtgttggatcatttgaggtcaggagttagagaccagcctagccaacatggtgaaaccc

SEQ ID NO: 602098 - DNA, 84 bp, Homo sapiens
aagacagcagcatatatctctgcagcgttgaagcagggggccaagagacccagtacttcgggccaggcacgcggctcctggtgc

SEQ ID NO: 602099 - DNA, 142 bp, Homo sapiens
gcctgacgcagcatcagcgagcagccagtacagcccctaccagtacatctacaccagcagcaagtacagcgggtttgatttatatttgctccttcaaacttacgccggagtggtacccctcagtacaagttgctgagctgca

SEQ ID NO: 602100 - DNA, 352 bp, Homo sapiens
actatgggttgtcctctctgtgttgcaagaagcattcgcttctctcaggctcttgttatgcacagcagtcagccatttcaccataggtttctcgaatagttgcatctgcgcataatttgtctcccataagtgcaaattcagtcacttcattcactactcttacatgatcatcaaatggacactgctgaagatcctgagccaaggcgttcaacaccaaggctttgaaattttcttctcccgaatctttcaaccgatgagccaccgcactcaggtgtgcatctcgacgacacacacccctggaataaaccgagctacacatagtaaggagggaaatacaggtcacccacttcat

SEQ ID NO: 602101 - DNA, 305 bp, Homo sapiens
agaacactatcttgcatttttgtttgttttttgttttgttttgtattgttttgtatgagacaaggtctgtttctgtctcccaggatgaagtgcagtggtacaatccaggctcgttgcacccgcctcagcctccccaagtgctgagattacaggcgtgagccactgcacccggccctcagatgtctttgagcgctgcacatctacaggcttaaagtggatagaattgctttctccgaactagggaggcagcctgaagctctacaaacaaggactatttcagtaccctcgactgaagtgtttcaggc

SEQ ID NO: 602102 - DNA, 151 bp, Homo sapiens
tgactgagcggtacttactaacatattcagctgcttgagagcaggcatagagagaagagctgggtttacctaagaaagcagtttgttgcaagaaagtgggacctaagaaaggagccaggaagtaaggggtgtacacaaggagagtaggtag

SEQ ID NO: 602103 - DNA, 108 bp, Homo sapiens
agagtacagagcctctcgcttttttccagatggagctttcctttatcccttatgtattggacttggcttcctgctggaaatagtgagcttcctactcacggccaagtt

SEQ ID NO: 602104 - DNA, 592 bp, Homo sapiens
actctctaatcagatgtcctaggtcctcccaattcttagaccttttatacctgtttttctccttctgttattccatttagtttcttagttcatccaaaacggtatccaggccatcaccaatcattctatacgacaaatgtttcttctaacaaccccacaatatcaccccttaccacaagacctcccttcagcttaatctctcccactctaggttcccacgccgcccctaatcccgcttgaagcagccctgagaaacatcgcccattctctctccataccaccccccaaaattttcgccgccccaacacttcaacactattttgttttatttttcttattaatataagaaggcaggaatgtcaggcctctgagcccaagccaagccatcgcatcccctgtgacttgcatgtatacgctcagatggcctgaagtaactgaagaatcacaaaagaagtgaaaaggccctgccccgccttaactgatgacattccaccattgtgatttgttcctgccccaccttaactgagtgattaaccctgtgaatttccttctcctggctcaaaagctccccatgagcacttgttgaccccga

SEQ ID NO: 602105 - DNA, 115 bp, Homo sapiens
  misc_feature (102)..(102): n is a, c, g, or t
gtacaggtcaggggagtgggttatgcattctggaaaaggggatatttgattactgtcccccaagtcccacagcctggggtccatgcagagaccacagtgcanagagacgtggctc

SEQ ID NO: 602106 - DNA, 1579 bp, Homo sapiens
gccgggcaggggcagagccggtctcaccccagcgcctctccccggggcccgcgcgcctatggagagagggagcccactcccaaacccgggctcgaagccggcaggcgagacatcaagcgcacgtagagatcaatcagtggcacataactcagcgtgaccgacccaagcggccgcagaccagatgcggtacacgccacagaggacgccagacagcaccaccgagacacagcgacacacccagatccgcgacgccccagcaggcacaactaccctcaccaacacgacgaagatacagatcaccgggcgcgacacccaagacaactccagtacccagcccctaactgcacgcaacatcaccaggctgggccacaccgagagacccccaccagatgtctgaaccaccacagccactacacacacaacagtgctcgtatgggccccacccacgactcaccttgcacccgcgccgaaaagggaaccgaacacaaccagaacaggacaacgattcgaacacgacggcagcgagcccacagagcctgatccagccacacaacgcgacgcaagactcgagaccccaccgctccgcgccatctccgcgcctgctccggcccccaccactcctgacaccacacccgtcttcccccacgcacccatccatgcgccgcccacacaagcaggcactccacggcccccacttgcccaggacaagccgaatccaccgctcgagacgacagacaaagccaaccacccctccacacaccgctcctccacacagcgtcgctgcgatcggtagcgcccgtcacacagacgcggcagcggtcgacagcctcatcccgctcgtcctgcctccaagcctccgcccacattcacgcccgcccgacgccagccaccgccacgagaccgagctgaaacgcaaacgatgagcgcgcgtacccagactacaaggacacagacgcgcgtcgcggatagcactactgcacaactgacgccagctatccccccgccagtcaccctagcacgccctctctacctcgttccattcatctctaaatctcacccctcattacatatccctatgtcatcaattaaccacgtccttacctctacaagctcttcaacacagcacaatatcaacacacatcacaaaccaaccatacactcatcactcctcctatattcacatactatcaatcttcacatacccctccctctactatcctactacaacatgacttcacatcccctcaccacacctattcagtccaggagtgctagcgcagcaacagcaagcctgacgtcctgcacacgcgcccgtacagcaccctgcgcgcccgcgcagacacgacttgctctcgacagttcatagtactagctgcaaggcgccgcaatactctcgcggcccgccagtcggtatatacacatacagcacttccaccctgcagcttgagctagccggcgccctctcttgccaactcgtcgcacttagcaaccagcggccgcgcgaaccagtgagagagacggtcgtacgagcagacgtcgcgcgcgaccacattcgcaggcggcactcgaaagaaccaat

SEQ ID NO: 602107 - DNA, 367 bp, Homo sapiens
aagatcccttgagggtctggatagtctggatctgaaattgtctataagatacccaccatgacactgacatatcccattcgatcagcactcaggagcaggctttcttcacaacatctcatgtctcacatctttccaagccatcttgtctagtatatctatggaggagcagatggcacggaacttgctttcaggaacaccacagacagcaaacatcccatccacaatccgccggtcatttaccttaatgagaaagtctcccaactgcaatccacttaggatttcacacatgatcttcaaacactctgcatcggggatcatagggtcaaactgaccagcaatgtcaaaatcacactggcagaacaccgcg

SEQ ID NO: 602108 - DNA, 157 bp, Homo sapiens
ggttttccggggtttttttccccccccgggcccccccttttccgggggggggttcccccaagttttttccccccgtttcaaaaccccctttttccccggttggccccccgggtttgggggggggggtttaaaattaaagggggggggttttttttta

SEQ ID NO: 602109 - DNA, 866 bp, Homo sapiens
ctgtcgtccgaccgatatggggaacgggatgaggcagacgccacgcacgatgcgagcaaatcgggtcacagacgcatccatatctggggccccagcccaaaactggctgggaacataagccgcagacctgtgccgattgggcacccatgataccgccatacgaggcccaataaagtgggacaagccaccaacaatgaaaggcgggaaggacacccctttcacccaaaggcgcccggggataaatcggcgaaccccccacttgtggagaatacagacacatacttgctgcatcgcagttgtagccgcagccccccatgaggggataaggacctcagtaccgaaggcccggcgaatcaacaaaacacgtgtctagggagatgcaggattgggcaaaacccctcgagaccatgggctcaaatgcaagggaggtcacggtccacgcgacccccaacccgatgcccatgaaaacccagagaagaatagcccgggaccgcaataagaagctctaagaggcgttgtttgcaaggccaaaggcaccgtcaaccagagtgtaaccagaccaacgcccgggagtgcggagaaaatgtggtcgcacggatccgaaaaccatacgcgaccgaagggctggaaatcccgcgatctttccacggactccctacccgatccacgtgtaggaacaacaaacgccaagggtgacggcgcaaagggaccaaagaattagaccattctccaaaagaagatgaaaatatcaagggcccaccagcaatatgggaaaaagaggtccaccatccacttaaatatccggggaaagccatccaaaaccaaaaaagccaaaccacctcactccccaaaaatggccataatcc

SEQ ID NO: 602110 - DNA, 150 bp, Homo sapiens
atacagatcaactagattatatgcagagtattgtccagtttgagtagcagcaagacaagtccacattagtagtttgcatgcagcagcccaaatgcagtagcatagaagttattgtttactagcctttatatggcccatccaagctgcagc

SEQ ID NO: 602111 - DNA, 982 bp, Homo sapiens
  misc_feature (240)..(240): n is a, c, g, or t
gatccaaatgggcgctgtagtgggatcttccaacaaagccactgaatcaatccaggtctttccgatcactggtaaccagcatgtgcaaattagtcgcccgagtccctgggtggccagtgtactctcagttcgtgcgcgtgcggcgttcttgttctgggctgtgagcggatggttgctgatgcgtgtgacgtctctagtagtgtcgtaactgggtgtgcttggccttattcctagggtgtnacttataggtcattctgtggatattcaacgggctaggactcagtgtgggatcgttgtccacttgttccagatatagagagttttaaaaggttgatcttttgagaactggaaggacttagagaccccttcccattggggcccaggggcgtgacctaacacgtaatgacatttccatgagacttgataatcttggttgtagtaatctcctaatctgaaggggtaaaccggccgagggtcaggcatggagaaaggggcaatgctgtaaagtgacctcagatatccatcgcatagcaagtctcatatcgatgaggtgcagatcgaggttaccatacatgtatacagtcgtctcaaccgtccattcatacttccatggtgttttcctctgagtgccaggtagaccggttctacgatagcttgagcacagaattgtcagacgttgaaattggcacactctgggaggcagcacccactctggtccatgtagccgaactccctagttgaagcctcatggcaattgtacttgttcctggttgtcctgtctggtccgtgtgggaaatggctgggaagaaccccgtttggattctctaacagtcctttatttacaaggcccacggcaatatggggtgttcccacaatttgacaaatttgtgggggcgcagaaagccgggatttgctctttaaaagcacgttttgcggaagatttcctgtttaaaatctcttaaacacaaacggcgggccgatc

SEQ ID NO: 602112 - DNA, 154 bp, Homo sapiens
catcccgttccacagcacgaattacttcttcctgattgggccgccgctgcgtcatccccattgtatttccagtaccagatcatcatgaccatgatctgtccatgagaacttggtggacctggcctgggccgtctgctactacgtccggtctttc

SEQ ID NO: 602113 - DNA, 256 bp, Homo sapiens
aggatccccgatatttaacattaagcggaagtagatcatcaatcataaagatcttcatcttcattatcttcacattgaataggctaaggaggaggaagaggagaggttggttttgttgagagggtggcagaggcaaaagaaaatctacattataagtgaacccatacagttcaaacctgtgttgctcaagggtcaactctgtgtgtgtgtgcgtgtgtgtgtgtaagataattctaagaggataatgttagagata

SEQ ID NO: 602114 - DNA, 220 bp, Homo sapiens
ggagtgtgtactaatcattccctaaataggctgataactagctatacttcagagtcttctttaacaagattgtgcggagtcataacaagtgtcttctgttgcagaataggtcggagtcgggtctcttctcgaaggaggcttaggcttagcagggagcgaaggtgatggaggtggtgtcgcagcaaccctttccttttgctcgtcctccatctgtgcatag

SEQ ID NO: 602115 - DNA, 103 bp, Homo sapiens
gtcgacgccatccaggctggagcagtggcacactcatagctcactatggccctggctcaaaccatcctcccgtctcagcctcccaagtagctgggatcatagg

SEQ ID NO: 602116 - DNA, 173 bp, Homo sapiens
atggaacctgcatgtgcttaggtcaagggcatcttctaccactgctccaaatgacgacggaggggatttctattcagataatccttgctcctgtttcacaatcacactgctgctctaggatacctgtgtatgggggccatgtctttattgtttaccttgcttactctagttat

SEQ ID NO: 602117 - DNA, 1112 bp, Homo sapiens
ggatcttgtcgagaacgaccatctcagataggcgtccaagagcgagcttatttttcacacccagtgagttacgaacatttgagcagacgcgtggacggtactatggcagaggttaccacataaccacgtgcagcatcttcagggcagaccctccttatgtctgcttcagcagaagacagtggcacatggcgaaactgttacggtcaacaattctggggacgtcaacacatcctactgctattgttcttcacaccgcgttcccttggctgtaccaacaggatgtgactggccgagtgtacaacgaccggcttccccatactgatccgggtacgcatcgggatgaacgccatggtacttcacatgctcaactacttgacacttggctaggagctacatgaactctaacaacgtgtgctaatataatctccctcctttcatctcgcacataagatacagacatgggcatcgccggctagcagaagcttgctctgggtggacgttgtcttacaataaagcaaaagtcgaataaataattacatgaagggtgaaaggatgctggaatgggtccaggtcaagagaatatcttgagacaaaagtgagcttgcagaacgtgtacttatggcccttccgaccgcgcacatgggcctaggaaactcgaatccccttaggtttgggacactaacacccatcttccgtttaccacaatttattcccaggtcctaaacaagacgcagcaacttataacatatccgccctaacataccaaatcacctctcaaaccactacgtctaccataaaatgtcccaatgtacacttctatacctcaccatacacaccctgccaacacaacctctctcttttcctttttttctcctcctcccccctatcaactcaacaacaaacaatcacaccaaaaacctatacaaaaaataaaaaacagaaactcgtaattacaaggataacacgaatatacataatgaaaacagaaaaacaatatacagtcatatcatacaacacacaatacagatactcacaccatcaatcctccccaaaatcacacacacactcctacaacctcgaacacaaacccataaccaaccaccatcataaca

SEQ ID NO: 602118 - DNA, 277 bp, Homo sapiens
tacatcactacccaacacgtgtgtctcaacacaactgtgtgattcctcactgcatacccagcaagtctcctgaagtgatcagaatgatctctgcataaagagacagtaagtggaagttaaaacttcaccagaagcaaggaatggtggcgcactcctatagtcccaggtatatgtgaaacagaggtaggagaatcgcatgtgtacagagattccagaccatcctgggaaacatgtgagatcatgtgtcttaaaaaaacaaaacaaaggttggcggccg

SEQ ID NO: 602119 - DNA, 926 bp, Homo sapiens
gcgaccggtctgcatctcccagcagaaggcgcagccatgaatccgttattcggccccaacctcttcctcctgcagcaggagcagcagggcctggccgggccactgggggactcactgggatggcgaccatcttcgccggtgggaggagacttgcccccggtgcctctctctgcctggcgtgcctgctgcctactctgcctgcccgggccgggccctggtccctgtctgccgccatggccctccgtaatgaccatgggctccaacatcaacgtgctcaagaccctgaacctccggttccgctgcttcctggccaaggtgcatgagctggagcgccggaaccggctgttggagaagctaatctgcagcaagcgctggaggagggtaatgcagggccggcggggcctgggtacgtcgacgcacaggcagtgcagaccggcttcgtcaggcccatcggcccctgtgggcttgcagcttggtgcagcccggtctgggcgctgtcttgcagcccttcggcgcgcgtgctgggctctgcccgcgcgctccccggtcggcccctcgcgccctcgctggcagcctctcgtcgtcctacaacttccagctccagcacttatcctcgtcggccgcttcatgccggcacatctggtcgttctcgcacgcccgcggctcgggccgggatggagcccactctggtgcaacggcctggcttgtcggtgggttgcacccggatggggtgggcgtccagatcggagaccatcacgcccgagatccgggctctctacaagtgtttggccaacgtgaagcgggagcgggacgagtacaagcggagatgctttgacaggttaaatgataccaaagaggaggggaagggttcgacaagatctgtatggtgcgggagaaggggagccggattggggatggagtggaaa

SEQ ID NO: 602120 - DNA, 147 bp, Homo sapiens
tgccaggggttaacttgtcctcacaggagctgttcaggctggtcctcaaaggggcgtccaggctgggcttcctgtgcaaacacttggtacccctggttggcaggggaagccagcaggacagcagtgtggcccgatcagggaaaaaaa

SEQ ID NO: 602121 - DNA, 204 bp, Homo sapiens
gtggtgctgagcctgtccctgggcatgtccggttcgctggctgccgccgagctgaacattccggcacaatcgcttgaaggcgccttgcgcgagctggggcaacaatcaggtcggcagattctctactcccctgatctggttcagggcaaacgtgccacggcgctgcacggcgatctggatgtgtcatcggcattgcagaagcta

SEQ ID NO: 602122 - DNA, 667 bp, Homo sapiens
atgtctagaggatctccgagtagtccaaccatacggataaaagtggtggctttacgatttccaatagttatggttccggttttatccaaaagcaatacatcaatatctccggcagtttctactgctttaccagatttcgtaattacatttgcccttagcgccctgtccattccagcaataccaattgcagaaagtaaaccaccaattgttgttggaattaaacaaacgaacagcgaaattaaagcagcgattgtaatcggtgtattggcataatcagcaaatggttttagggtaacgcaaacgatgataaataccaatgtgaaactggctaaaagaatggttaatgcaatttcgtttggtgttttctggcgtgatgcaccttctaccaaggcaatcattttatctaaaaagctttcgcctggtgcggtacttacctgaactttactctcatcagatagtacttttgtgccaccggttacagaagatttatcaccaccagattcgcgaattacaggagcagattccccagtaattgcggattcatcaatggttgcaattccttcaataatttctccatcagtagggatggtatcaccggtttcacaaacaaaacatctccttttttagctgattagatgaaggattatattgttccattataataacc

SEQ ID NO: 602123 - DNA, 692 bp, Homo sapiens
  misc_feature (140)..(140): n is a, c, g, or t
  misc_feature (219)..(219): n is a, c, g, or t
  misc_feature (233)..(233): n is a, c, g, or t
  misc_feature (237)..(238): n is a, c, g, or t
  misc_feature (243)..(243): n is a, c, g, or t
  misc_feature (248)..(248): n is a, c, g, or t
  misc_feature (259)..(259): n is a, c, g, or t
  misc_feature (264)..(264): n is a, c, g, or t
  misc_feature (272)..(272): n is a, c, g, or t
  misc_feature (278)..(278): n is a, c, g, or t
  misc_feature (283)..(283): n is a, c, g, or t
  misc_feature (306)..(306): n is a, c, g, or t
  misc_feature (316)..(316): n is a, c, g, or t
actttctgatatagtacttgaaattcttaccagaagattacttggagtattgaagcctttattaatactacttttaaagaagcagttgttttattgtcaatgttttttttcccccaagcatattttcttgtattctgttnccatatatatatatatatatatatatatatatatatatatatatatatatatatatataatttccaattcggatatgcnctgccaccatgaanacgnntggcnccaanagtaatgacanatgtnaagtgtantaatanaaaantagagcaaagagccattcagctncagtctttanataccatgaataaaacattaaaacatcatatggagaagtttacatggtgattgttcacctgcagtactgtggagttttaacattttgtcctcttttcagtgaaacagagtaaaaatattcatctaccattactgttatttgctgattttgttttattttttgatggtaatattctatccttatgacactattgcaaccaaattggctttaccatcttggctttagtaggtatagaagacaatggattaccatctttattgctgtaatgtgttaagcattatatgctagtagaatctagtttaattgtttcaggtggaaagtattctttgagtttccatattgaatgtgtttggactaaacaaacaataaactactg

SEQ ID NO: 602124 - DNA, 642 bp, Homo sapiens
  misc_feature (140)..(140): n is a, c, g, or t
  misc_feature (169)..(169): n is a, c, g, or t
  misc_feature (183)..(183): n is a, c, g, or t
  misc_feature (187)..(188): n is a, c, g, or t
  misc_feature (193)..(193): n is a, c, g, or t
  misc_feature (198)..(198): n is a, c, g, or t
  misc_feature (209)..(209): n is a, c, g, or t
  misc_feature (214)..(214): n is a, c, g, or t
  misc_feature (222)..(222): n is a, c, g, or t
  misc_feature (228)..(228): n is a, c, g, or t
  misc_feature (233)..(233): n is a, c, g, or t
  misc_feature (256)..(256): n is a, c, g, or t
  misc_feature (266)..(266): n is a, c, g, or t
actttctgatatagtacttgaaattcttaccagaagattacttggagtattgaagcctttattaatactacttttaaagaagcagttgttttattgtcaatgttttttttcccccaagcatattttcttgtattctgttnccatatatatatatatattcggatatgcnctgccaccatgaanacgnntggcnccaanagtaatgacanatgtnaagtgtantaatanaaaantagagcaaagagccattcagctncagtctttanataccatgaataaaacattaaaacatcatatggagaagtttacatggtgattgttcacctgcagtactgtggagttttaacattttgtcctcttttcagtgaaacagagtaaaaatattcatctaccattactgttatttgctgattttgttttattttttgatggtaatattctatccttatgacactattgcaaccaaattggctttaccatcttggctttagtaggtatagaagacaatggattaccatctttattgctgtaatgtgttaagcattatatgctagtagaatctagtttaattgtttcaggtggaaagtattctttgagtttccatattgaatgtgtttggactaaacaaacaataaactactg

SEQ ID NO: 602125 - DNA, 152 bp, Homo sapiens
  misc_feature (17)..(17): n is a, c, g, or t
  misc_feature (52)..(52): n is a, c, g, or t
  misc_feature (96)..(96): n is a, c, g, or t
ctggagtacctgcagancccaccggtcagccgcgcctacaccactgcctgcntcctcaccaccgccgccgtgcagttggaattgatcacacctttncagttgtacttcaatcctgaattaatctttaaacactttcaaatatggagattaat

SEQ ID NO: 602126 - DNA, 137 bp, Homo sapiens
aaggagggaattttagggacggactggacagcacgtgttcttgctagctctgccttacaaggaatctggcgctcaatctcccagatgtctcagtgtgaagcatctgcgggataggtaaatatatatcagctctatgt

SEQ ID NO: 602127 - DNA, 970 bp, Homo sapiens
gaaattcgaaacggatagcaacggtggctgaggccgtttaaggaagatggacctcacagagaccaaccgtccatgtagtcttgatgcatcttagctcgtcgtggcatatgattcaagtgcacaaggagacggggaccttgcccagtagccgtttctataatcatgatcaaagtactgagatcctcgtgaggtccccttagcgtgtgagtctcatgtagaaaagtacgctacgtgtgcagatgcccattctatgaaggtttaggctgacccaggtgatgatcataaaaaactccatgtaccgagagataggcaagaagactgagagttttaggaagtgagacctgatcctgagttcgtccacttgaccacatggacgcaaacaatgcagcggcgctatcagtgccaacataggatagggcactacagattccggtactatgggactcccctggtagctggtacgctgacatgcgcttgtaatggcaaactcctattcgtctctgcaggatcagtgatcctcggtgttgatgcctgtgagagactatttcccgtcacgtgcaggttcagcaccacagtcccaattagagtaagattgtcaacgaggccaggcgcgagcggagaagctttactctgccgacagcaacctaaacttggggacacaccctggtccaacttctcgtttgggtcctgtgtgacctcaatgtcttcaggggatctaccaggtgctacgagtgtggtaccaaggaaggagacccctaccttgtggtccttccccaggtaatgcctttggagacttgtgggtcaccagactcgcattccagccaggattacacgaatgcagaacttgactccggcatggtccgttgcaggactgggtcctcgtagggtcagcctttgggcccattcttggttagacaccattggcgccgccagatcgggatgaacaaggagagctcgggaaatgttggta

SEQ ID NO: 602128 - DNA, 1239 bp, Homo sapiens
  misc_feature (4)..(4): n is a, c, g, or t
  misc_feature (923)..(923): n is a, c, g, or t
tggnctggcggtcgtacgaggcagtcacgtgttgtgcgacgtgctttctcctgtccgttccagttccgttcttcgattggttcgttagtagattagtgttcgatttgtagttctggcgcgctggtgttgagtgttgtcagctgctgtggtgggtaagtgtctcgtcttgacgtcatggctttttcagtctgtttgtgttctagtcttgttgtttcgtgtgtgatgtttcgtggtgtgagcgtgcttccgttgttgcgacacgttgttgggttggcttagtgtgttctttcttgttgaccctgttttgatggtctgtgtgggcgcggccgcgtagtcgagtgtgggaggccgtcaatttataccagacgccgtgaggggttcccaaaacaagacagaccgaatttttaggggggacacacctatgtggagactcccggaggggatgccccaccaaacggtgtggcgagcagacaaaaggccgggctttgttgtatacccggctggccccccttgtttctttatttcgccgggtctctttaaggttaacggagcccctgggtggccgcgccccaaatggggctggcgacccaccaaaggggtaaagataggaggagcgccccccgaataataagtgttcttctagcgccctttttagaaacaccatggggagttgttcccttgtggcgccacaataataatgcgcgaatctataaagcaaagagtgggtatattgtgagaacatatcaagggaatagggtgtactcgtttccaaaaagaggatagccccccaccagatggttgtacccctgaggccaaaaactgggaaggagagttctcaccacatagttttacacgccagccatagctcgtgtgcgccattgtgggtggtggaacacccacaacccacaagttaagaggcgccnagaattctttgcccagagagattatatgtgccgtattgaggccaccattatacgcaactcttatagagcccgagatagcttctcctgagaacacgtgtgaaggagaaatgatccagagaaaagagaatgaagccccaagagaaagaggtaccctggggtctaacattaagcggcgcccaacgccctgcgtcccccccgagaagacatactttgtgagaacccatgggaaggagcctgagactgctgggacctcttccctatggattcatggcataattaggtgtttaaaaaaaaaattaaggaccttctgggctcc

SEQ ID NO: 602129 - DNA, 422 bp, Homo sapiens
  misc_feature (10)..(10): n is a, c, g, or t
  misc_feature (40)..(40): n is a, c, g, or t
  misc_feature (76)..(76): n is a, c, g, or t
  misc_feature (203)..(203): n is a, c, g, or t
  misc_feature (223)..(223): n is a, c, g, or t
gtggttccangggttttaaagcccccagactttttttttntcctttttaaaagagaccacagtcttgcctctgaanacctccagactggagtgccacaagtttttttccttttccttttttttgaagaacaggttcctcactctgttggcccccaggctggaagtgccagtggcgcgatcacagcctcactgcagcccttgancctccctgagctttagtgancctccccacttcagcccccaagtagctgggactaacaggcacatgccgccatgaccagctattttttgtatttttttgttgaaacagggttttgccatgttgtgtaggctggtctcaaactctgggactcgagatctgcatgcctgtagtcccagctactcggaaattatttcacacaagttcttttttaaaaaaaaaa

SEQ ID NO: 602130 - DNA, 353 bp, Homo sapiens
catcgcatcataatcctctctgcatggacttcaaagctcatatctcccacttaatagtctttatgagtgactgtctagcaagcctcgcataagctcgccttaccccccattattaacctactgggagaacactctgtgctagtaaccaggtactcctgatcaaatatcactctccgtacttagcaggactcaagcctactaggtcatcagctctatagcgtccctctacgtagtggtatccggaacggcaaagggggcgtcacgtcacccagcactttaacagcattaagccctcattcacgtcgagagaacaccctcatgttcatacaccgtagtcccgcattgcgatattg

SEQ ID NO: 602131 - DNA, 127 bp, Homo sapiens
ctttgcactctggttggctggtgttagggttctctgttgtcgttgtttggccggatgtgtttaagtgctgtggccagaagcgggcggagggggggtttggtgtacattttatgtaatgattgtctcg

SEQ ID NO: 602132 - DNA, 130 bp, Homo sapiens
ttaccaaacgcgagaggccgcagtatccttagagagaagtggggtggcttttaggatggcagggacttccttggtcaacgcgagaacctctctgcgtttggagctcctattcaagtcctctctgcgtttg

SEQ ID NO: 602133 - DNA, 746 bp, Homo sapiens
ggagggggcgtcctcctttgcaggtgcggtgttgggaaggagcagtgagccacagggggatgggagcccaaggtgtggccctgcagggagggtccaatggcccatgagtgtgggtgattcaagaatgtcagactggctgggcacggcggctcactcctgtaatctcagcactttgggaggccaaggcgggcagattacctgaggtcgggagttggagaccatcctagccacgatggtgaagccctgtctcgactaaaagtacaaaagttagctaagtgtagtggcaggtgcctgtggtcctagctacttgggaggctgaggcagggaagtgcttgagcccgggaggtggaggttgcagtgagccaggatcatgctactgcactccagcctgggcaacagggtgagactccatctcataaaaaaaaaaaaaaaaaaaaaaaaaaaaaatttttggggggctttgggccctagaaaagttttctatacccattctcgttgtgggcgcgcggcgggcgcccactgttgtgtgtagcgtgtggacccttggggcgcaatagcgctgtgttccccaagggaaggacccggcgccaaggaactatgtggtctggggtttctctcacccaatttaaaaaaacggccgcgggggggaacccggacgttgttttggaccaaattccccagatgggggtccgagggggcctcacgggtttctttcccccggggttccaagcggcgccgtttccatt

SEQ ID NO: 602134 - DNA, 165 bp, Homo sapiens
  misc_feature (3)..(3): n is a, c, g, or t
acntaacactagcaaacagaaccataaatctattaacaggggccaggcgctgtagctcatgcctgtaatcccagagtttgggaggccaaggcgggtggattgcctgagctcaggagtttgtgaccagcctgggcaacatggtgaaacaccgttaggtctacctgg

SEQ ID NO: 602135 - DNA, 310 bp, Homo sapiens
taatttctcagcatttctagttttggaacttcagcagacttcaacttacgatcccttaaaggtaggagtttctacttttggccactgttgcacatttgtgggtctagatggttcttcatattgtggggggctgacctgtgcatcatacaatgttcaacagcatcgctggcctctcccctttcgatgccagtgtttgcctccctccccaccccggcatgaccagagatgtcgccagatagggccaagtgtcctctgctagaaagcccctggcgaaggggtaaaagtagattccaatggcccttgtcacact

SEQ ID NO: 602136 - DNA, 881 bp, Homo sapiens
  misc_feature (1)..(1): n is a, c, g, or t
nctcagcaaaatagtacacaatatctttataatctgaacttcctcaatatctccaccgaattatacatactgttgcgaacaaaattccatccatcactcgcatcctcattactgctccttactagtaggataccttatcatttgctgcacagcatatcaccacgtaaacgccgctttacataaacaaccgtccccctccgtatagttaaccctatctcacacgctatttagctttttcgcaccttctagtggtatcctaaacggcaccttggagtgtgtttaacacaccccgctgcgcccgtttgaggacgcttcccggctcccccgatggatggagattttagggcttgtgtgcgcaggccacctttaatggcgggtgcaattgcgacatgattgaagattccgcggtagttccgctcattctcgagtcccatccagtttctggtgcccggtcccggctcccccttgtgttttcttgcggccctgcatgaacgcggtagccgggcctatccccccgttgtgtcccctcccgcccttctcgcctttttggggcctcctccccactttctgagtgtttgttccaccaatcggccgtccttcgagtatattccccaagaagcaatagcgtccttagaaagcccccacctattcaggttccctcatccacccccccttataccctgatagcttatgcatcacatccgcactgatggtcttacccccatgccaaaaactcgccaaatattgctcaccaacgtttaaatctaagccctcctctgagcaaaaccaaccaccccccaccctttgcccccccaaatttcccccccacacggttttttacttttccccccttttaagaatttaattttaaaaaacataca

SEQ ID NO: 602137 - DNA, 880 bp, Homo sapiens
  misc_feature (854)..(854): n is a, c, g, or t
agcggatggagaaatttaagttcgtgtggttttaccttttccgggagtctccagctggccctcatttgtgtccggagctcaggagttcccaaaccgactcagtcgcaccaagtttccgtcttttggaattggggaaggagtttctttctttcttttcttttttcttgagccagttttaatcgctttgaataaatactcccttaagtagttaaatataggaggagaaagaatacatcggttgttaaagcaggagaggaagagagacctgccctgtagcgtgactcctctagaaaaaaaaaaaaaaagccggagtattttactaagcccctaaaatgtcgagatttgtacaagatcttagcaaagcaatgtctcaagatggtgcttctcagttccaagaagtcattcggcaagagctagaattatctgtgaagaaggaactagaaaaaatactcaccacagcatcatcacatgaatttgagcacaccaaaaaagacctggatggatttcggaagctatttcatagatttttgcaagaaaaggggccttctgtggattggggaaaaatccagagaccccctgaagattcgattcaaccctatgaaaagataaaggccaggggcttgcctgataatatatcttccgtgttgaacaaactagtggtggtgaaactcaatggtggtttgggaaccagcatgggctgcaaaggccctaaaagtctgattggtgtgaggaatgagaatacctttctggatctgactgttcagcaaattgaacatttgaataaaacctacaatacagatgtcctctggttaatgactctttaaccggtgaaatccaaaaatctccgagtcacntgcggggaaattcctttcatcaagcg

SEQ ID NO: 602138 - DNA, 102 bp, Homo sapiens
  misc_feature (66)..(66): n is a, c, g, or t
  misc_feature (98)..(98): n is a, c, g, or t
atgtgaaaaactttctgggtcctcataacagcccccagggtagggctaccagggggctattttacncatgagaaacatttgatgaggtttgggaccgngcgg

SEQ ID NO: 602139 - DNA, 804 bp, Homo sapiens
  misc_feature (678)..(678): n is a, c, g, or t
  misc_feature (689)..(689): n is a, c, g, or t
  misc_feature (696)..(696): n is a, c, g, or t
  misc_feature (771)..(771): n is a, c, g, or t
  misc_feature (774)..(774): n is a, c, g, or t
  misc_feature (798)..(798): n is a, c, g, or t
  misc_feature (800)..(800): n is a, c, g, or t
  misc_feature (804)..(804): n is a, c, g, or t
gctattctgctgttgggtcaccttctgcctacttgtgacattccttctgctcttccttgctccagggattgttccagggcccccagttattctaaatgaagatcttagcaaagcaatgtctcaagatggtgcttctcagttccaagaagtcattcggcaagagctagaattatctgtgaagaaggaactagaaaaaatactcaccacagcatcatcacatgaatttgagcacaccaaaaaagacctggatggatttcggaagctatttcatagatttttgcaagaaaaggggccttctgtggattggggaaaaatccagagaccccctgaagattcgattcaaccctatgaaaagataaaggccaggggcttgcctgataatatatcttccgtgttgaacaaactagtggtggtgaaactcaatggtggtttgggaaccagcatgggctgcaaaggccctaaaagtctgattggtgtgaggaatgagaatacctttctggatctgactgttcagcaaattgaacatttgaataaaacctacaatacagatgttcctcttgttttaatgaactcttttaacacggatgaagataccaaaaaaatactacagaagtacaatcattgtcgtgtgaaaatctacactttcaatcaaaaggcaagttccttaaaaaattcaantccggctttgnagaactnccggttccaaaggtccaagaaattattttgggggaataagttttaaagccccttttgccttttccctgagaaagncanaaatttggggcctcccaaagggtntncccn

SEQ ID NO: 602140 - DNA, 1965 bp, Homo sapiens
  misc_feature (1536)..(1536): n is a, c, g, or t
  misc_feature (1566)..(1566): n is a, c, g, or t
  misc_feature (1592)..(1592): n is a, c, g, or t
  misc_feature (1596)..(1596): n is a, c, g, or t
  misc_feature (1662)..(1662): n is a, c, g, or t
  misc_feature (1673)..(1673): n is a, c, g, or t
  misc_feature (1685)..(1685): n is a, c, g, or t
  misc_feature (1696)..(1696): n is a, c, g, or t
atttccgcattgaaggggctgctccgaatggagggggaggggaggtgtttaggagaaagtaggggctgtgggtgtcgggagccggctgacgggtggacaagggggggttagcagctgggctgcgaccgttagggaggggctcaaggtgtgcatgtgtgagggaagagagagagagagaagggcgcctcagaggtgactttcagcctgcgagccttcttcccggggcgccataaacgcccccaatttcccagctgctaaaggaagaggaagatcttagcaaagcaatgtctcaagatggtgcttctcagttccaagaagtcattcggcaagagctagaattatctgtgaagaaggaactagaaaaaatactcaccacagcatcatcacatgaatttgagcacaccaaaaaagacctggatggatttcggaagctatttcatagatttttgcaagaaaaggggccttctgtggattggggaaaaatccagagaccccctgaagattcgattcaaccctatgaaaagataaaggccaggggcttgcctgataatatatcttccgtgttgaacaaactagtggtggtgaaactcaatggtggtttgggaaccagcatgggctgcaaaggccctaaaagtctgattggtgtgaggaatgagaatacctttctggatctgactgttcagcaaattgaacatttgaataaaacctacaatacagatgttcctcttgttttaatgaactcttttaacacggatgaagataccaaaaaaatactacagaagtacaatcattgtcgtgtgaaaatctacactttcaatcaaagcaggtacccgaggattaataaagaatctttacttcctgtagcaaaggacgtgtcttactcaggggaaaatacagaagcttggtaccctccaggtcatggtgatatttacgccagtttctacaactctggattgcttgatacctttataggagaaggcaaagagtatatttttgtgtctaacatagataatctgggtgccacagtggatctgtatattcttaatcatctaatgaacccacccaatggaaaacgctgtgaatttgtcatggaagtcacaaataaaacacgtgcagatgtaaagggcgggacactcactcaatatgaaggcaaactgagactggtggaaattgctcaagtgccaaaagcacatgtagacgagttcaagtctgtatcaaagttcaaaatatttaatacaaacaacctatggatttctcttgcagcagttaaaagactgcaggagcaaaatgccattgacatggaaatcattgtgaatgcaaagactttggatggaggcctgaatgtcattcaattagaaactgcagtaggggctgccatcaaaagttttgagaattctctaggtattaatgtgccaaggagccgttttctgcctgtcaaaaccacatcagatctcttgctggtgatgtcaaacctctatagtcttaatgcaggatctctgacaatgagtgaaaagcgggaatttcctacaggtgccntggttaaattaggcagttctttacgaaggntccacgattatctaagaagatttganagtntaccagatatgcttgaattgggatcacctcacagttcaggaagatgtgaattgggacacaatggtncattaaaggangggtataacatngcaatctgggncgaatgatatccacctggagcaggaatgagacgaggatgggtctgggagctcgcatctggacactggattgaaaatctgggaccttaatagggagtccttacaggagccctaggatccaaaaggggcattatatgtagaccgcgggttaaaaagagtcgcggcattgctaaacagggacatctcgagaacaagactagagagcacggggggatcaaccatctggccacggccaaaaacgggctggcgggtgttcatcagccacacgggc

SEQ ID NO: 602141 - DNA, 774 bp, Homo sapiens
  misc_feature (3)..(3): n is a, c, g, or t
  misc_feature (87)..(87): n is a, c, g, or t
  misc_feature (92)..(92): n is a, c, g, or t
  misc_feature (103)..(103): n is a, c, g, or t
  misc_feature (105)..(105): n is a, c, g, or t
  misc_feature (119)..(119): n is a, c, g, or t
  misc_feature (124)..(125): n is a, c, g, or t
  misc_feature (129)..(129): n is a, c, g, or t
  misc_feature (132)..(132): n is a, c, g, or t
  misc_feature (737)..(737): n is a, c, g, or t
agnagagagagagagagagagagagagagagagagagagagagagagagagagagagagagagagagagagagagagagagagaganagagngagagagagananactcgtgccgctcntgccnnttcngcncgagagctgcttgggcgcggtgcggtggtgactgagctacgagcctggcggcgggtgtgcgccgagccccggcccggcccggccctcgcgtgcctcccaggctccgcacccctgatgctgcgcgggtgctgagcccgcttcggccgggacgatggtgaagtatttcctgggccagagcgtgctccggagttcctgggaccaagtgttcgccgccttctggcagcggtacccgaatccctatagcaaacatgtcttgacggaagacatagtacaccgggaggtgacccctgaccagaaactgctgtcccggcgactcctgaccaagaccaacaggatgccacgctgggccgagcgactatttcctgccaatgttgctcactcggtgtacgtcctggaggactctattgtggacccacagaatcagaccatgactaccttcacctggaacatcaaccacgcccggctgatggtggtggaggaacgatgtgtttactgtgtgaactctgacaacagtggctggactgaaatccgccgggaagcctgggtctcctctagcttatttggtgtctccagatctttccctgatttttgtctttcccctttcncacccttcccattccttgatggttttgtttttcttgc

SEQ ID NO: 602142 - DNA, 229 bp, Homo sapiens
catcagcctcccgagtagctgggactatgggcgctcaccaccccacccagctaatttttgtatttttggtagagatggggtttcaccgttttggacaggatggtgtcaatctcgtgacctcatgatccgcctgccttggcctcccaaagtgctgggattacagacatgagccaccgcacccggccttcttttttaatgtttctttttaatgaaccatctttggattcct

SEQ ID NO: 602143 - DNA, 2491 bp, Homo sapiens
atttccgcattgaaggggctgctccgaatggagggggaggggaggtgtttaggagaaagtaggggctgtgggtgtcgggagccggctgacgggtggacaagggggggttagcagctgggctgcgaccgttagggaggggctcaaggtgtgcatgtgtgagggaagagagagagagagaagggcgcctcagaggtgactttcagcctgcgagccttcttcccggggcgccataaacgcccccaatttcccagctgctaaaggaagaggaagatcttagcaaagcaatgtctcaagatggtgcttctcagttccaagaagtcattcggcaagagctagaattatctgtgaagaaggaactagaaaaaatactcaccacagcatcatcacatgaatttgagcacaccaaaaaagacctggatggatttcggaagctatttcatagatttttgcaagaaaaggggccttctgtggattggggaaaaatccagagaccccctgaagattcgattcaaccctatgaaaagataaaggccaggggcttgcctgataatatatcttccgtgttgaacaaactagtggtggtgaaactcaatggtggtttgggaaccagcatgggctgcaaaggccctaaaagtctgattggtgtgaggaatgagaatacctttctggatctgactgttcagcaaattgaacatttgaataaaacctacaatacagatgttcctcttgttttaatgaactcttttaacacggatgaagataccaaaaaaatactacagaagtacaatcattgtcgtgtgaaaatctacactttcaatcaaagcaggtacccgaggattaataaagaatctttacttcctgtagcaaaggacgtgtcttactcaggggaaaatacagaagcttggtaccctccaggtcatggtgatatttacgccagtttctacaactctggattgcttgatacctttataggagaaggcaaagagtatatttttgtgtctaacatagataatctgggtgccacagtggatctgtatattcttaatcatctaatgaacccacccaatggaaaacgctgtgaatttgtcatggaagtcacaaataaaacacgtgcagatgtaaagggcgggacactcactcaatatgaaggcaaactgagactggtggaaattgctcaagtgccaaaagcacatgtagacgagttcaagtctgtatcaaagttcaaaatatttaatacaaacaacctatggatttctcttgcagcagttaaaagactgcaggagcaaaatgccattgacatggaaatcattgtgaatgcaaagactttggatggaggcctgaatgtcattcaattagaaactgcatggtacgtgtggcttgccattcatcgaggtttgtgacgacattcttctcatggtattagatgttgccagacggtaggccgctttctcttgtcgcttgctctggagaccctgcgattcacgatttctcttttgccttggtgttgagtggttcgtgttgccttcgtactacgtgcttatcttgccctttgacttcttcttgatcaactcgtactttgcatctgtcgctgctggatatctttctcttgatcttgttgcgctccttgccgtcttctcccgtctatgccgccttgttctcctgtgttcttctgggatctgtgtcctcgtcttgccatttctctcttcccaggcacagcgatccgtcgaccatgtttcctcctctctcgcatcgttcgccttctgccacctgccgggccttcctccctcctccactcacgccctccccccacgcgccaccacctgctcgccacccctccctcgcccacgccccaccctcggttctcctctcatccgcgcccacccccgcgcccctcctcccctcctgtctgcccacaatcccctgcgctccaccccgccaccctctgccccacctcccccccccctgcgccacgcccccccctccctgaccccccccccccccccacctctgctcgcctcccctcgccccaccccccctcctccgcgcctctctcgcgcacccccccttgcccccttcgcccccctccctgctgccgccccctccccccccctccctgccgccccctcccctccgccctctcccccctgcaccccctggctcctccccccgccactcccctcctctccctcccgcccgcgcccccccctcccccacccccccccctctcccccctcccgccccccccccccttccccctcccctccccccccctcactcccatacccagtatcctcgtcctctccacctctcccctctccccactacctccccccaccttacccgcctcctccccctcctcacccctccacctcaccctcaccccccacaccacctccctccactcccccccccctcacccccccactctctcccccccctccaccctctctctcctcctcctctccctctccctccatccctcctctccttc

SEQ ID NO: 602144 - DNA, 767 bp, Homo sapiens
  misc_feature (3)..(3): n is a, c, g, or t
  misc_feature (87)..(87): n is a, c, g, or t
  misc_feature (92)..(92): n is a, c, g, or t
  misc_feature (103)..(103): n is a, c, g, or t
  misc_feature (105)..(105): n is a, c, g, or t
  misc_feature (119)..(119): n is a, c, g, or t
  misc_feature (124)..(125): n is a, c, g, or t
  misc_feature (129)..(129): n is a, c, g, or t
  misc_feature (132)..(132): n is a, c, g, or t
agnagagagagagagagagagagagagagagagagagagagagagagagagagagagagagagagagagagagagagagagagaganagagngagagagagananactcgtgccgctcntgccnnttcngcncgagagctgcttgggcgcggtgcggtggtgactgagctacgagcctggcggcgggtgtgcgccgagccccggcccggcccggccctcgcgtgcctcccaggctccgcacccctgatgctgcgcgggtgctgagcccgcttcggccgggacgatggtgaagtatttcctgggccagagcgtgctccggagttcctgggaccaagtgttcgccgccttctggcagcggtacccgaatccctatagcaaacatgtcttgacggaagacatagtacaccgggaggtgacccctgaccagaaactgctgtcccggcgactcctgaccaagaccaacaggatgccacgctgggccgagcgactatttcctgccaatgttgctcactcggtgtacgtcctggaggactctattgtggacccacagaatcagaccatgactaccttcacctggaacatcaaccacgcccggctgatggtggtggaggaacgatgtgtttactgtgtgaactctgacaacagtggctggactgaaatccgccgggaagcctgggtctcctctagcttatttggtgtctccagacctttccctatttttggtcttgcccgtttctttcccggcttgcaccagtctttccgtggtt

SEQ ID NO: 602145 - DNA, 2046 bp, Homo sapiens
  misc_feature (1617)..(1617): n is a, c, g, or t
  misc_feature (1647)..(1647): n is a, c, g, or t
  misc_feature (1673)..(1673): n is a, c, g, or t
  misc_feature (1677)..(1677): n is a, c, g, or t
  misc_feature (1743)..(1743): n is a, c, g, or t
  misc_feature (1754)..(1754): n is a, c, g, or t
  misc_feature (1766)..(1766): n is a, c, g, or t
  misc_feature (1777)..(1777): n is a, c, g, or t
agcggatggagaaatttaagttcgtgtggttttaccttttccgggagtctccagctggccctcatttgtgtccggagctcaggagttcccaaaccgactcagtcgcaccaagtttccgtcttttggaattggggaaggagtttctttctttcttttcttttttcttgagccagttttaatcgctttgaataaatactcccttaagtagttaaatataggaggagaaagaatacatcggttgttaaagcaggagaggaagagagacctgccctgtagcgtgactcctctagaaaaaaaaaaaaaaagccggagtattttactaagcccctaaaatgtcgagatttgtacaagatcttagcaaagcaatgtctcaagatggtgcttctcagttccaagaagtcattcggcaagagctagaattatctgtgaagaaggaactagaaaaaatactcaccacagcatcatcacatgaatttgagcacaccaaaaaagacctggatggatttcggaagctatttcatagatttttgcaagaaaaggggccttctgtggattggggaaaaatccagagaccccctgaagattcgattcaaccctatgaaaagataaaggccaggggcttgcctgataatatatcttccgtgttgaacaaactagtggtggtgaaactcaatggtggtttgggaaccagcatgggctgcaaaggccctaaaagtctgattggtgtgaggaatgagaatacctttctggatctgactgttcagcaaattgaacatttgaataaaacctacaatacagatgttcctcttgttttaatgaactcttttaacacggatgaagataccaaaaaaatactacagaagtacaatcattgtcgtgtgaaaatctacactttcaatcaaagcaggtacccgaggattaataaagaatctttacttcctgtagcaaaggacgtgtcttactcaggggaaaatacagaagcttggtaccctccaggtcatggtgatatttacgccagtttctacaactctggattgcttgatacctttataggagaaggcaaagagtatatttttgtgtctaacatagataatctgggtgccacagtggatctgtatattcttaatcatctaatgaacccacccaatggaaaacgctgtgaatttgtcatggaagtcacaaataaaacacgtgcagatgtaaagggcgggacactcactcaatatgaaggcaaactgagactggtggaaattgctcaagtgccaaaagcacatgtagacgagttcaagtctgtatcaaagttcaaaatatttaatacaaacaacctatggatttctcttgcagcagttaaaagactgcaggagcaaaatgccattgacatggaaatcattgtgaatgcaaagactttggatggaggcctgaatgtcattcaattagaaactgcagtaggggctgccatcaaaagttttgagaattctctaggtattaatgtgccaaggagccgttttctgcctgtcaaaaccacatcagatctcttgctggtgatgtcaaacctctatagtcttaatgcaggatctctgacaatgagtgaaaagcgggaatttcctacaggtgccntggttaaattaggcagttctttacgaaggntccacgattatctaagaagatttganagtntaccagatatgcttgaattgggatcacctcacagttcaggaagatgtgaattgggacacaatggtncattaaaggangggtataacatngcaatctgggncgaatgatatccacctggagcaggaatgagacgaggatgggtctgggagctcgcatctggacactggattgaaaatctgggaccttaatagggagtccttacaggagccctaggatccaaaaggggcattatatgtagaccgcgggttaaaaagagtcgcggcattgctaaacagggacatctcgagaacaagactagagagcacggggggatcaaccatctggccacggccaaaaacgggctggcgggtgttcatcagccacacgggc

SEQ ID NO: 602146 - DNA, 1254 bp, Homo sapiens
  misc_feature (1107)..(1107): n is a, c, g, or t
  misc_feature (1145)..(1145): n is a, c, g, or t
  misc_feature (1153)..(1153): n is a, c, g, or t
  misc_feature (1159)..(1159): n is a, c, g, or t
tgtcggacaactcatggcggcggcggcggcggcggcagctgcttgggcgcggtgcggtggtgactgagctacgagcctggcggcgggtgtgcgccgagccccggcccggcccggccctcgcgtgcctcccaggctccgcacccctgatgctgcgcgggtgctgagcccgcttcggccgggacgatggtgaagtatttcctgggccagagcgtgctccggagttcctgggaccaagtgttcgccgccttctggcagcggtacccgaatccctatagcaaacatgtcttgacggaagacatagtacaccgggaggtgacccctgaccagaaactgctgtcccggcgactcctgaccaagaccaacaggatgccacgctgggccgagcgactatttcctgccaatgttgctcactcggtgtacgtcctggaggactctattgtggacccacagaatcagaccatgactaccttcacctggaacatcaaccacgcccggctgatggtggtggaggaacgatgtgtttactgtgtgaactctgacaacagtggctggactgaaatccgccgggaagcctgggtctcctctagcttatttggtgtctccagagctgtccaggaatttggtcttgcccggttcaaaagcaacgtgaccaagactatgaagggttttgaatatatcttggctaagctgcaaggcgaggccccttccaaaacacttgttgagacagccaaggaagccaaggagaaggcaaaggagacggcactggcagctacagagaaggccaaggacctcgccagcaaggcggccaccaagaagcagcagcagcagcaacagtttgtgtagccagtctaccaccaccacagcaccccagacagctaggcttagcccctctgccctcccttcattgtactttatcattaaaaatcaacttccagccctgtctgctgtctacgtggtgggttgtggggatgcagtttggcatctgcagtacaccaagcacatgattcatgtctgagccaggtctgcttattctcccattgggcagctgaggaccgaggcacagaggtgcggtgacttgcccggggctccaggtagcctgcaggttanctggcggtaagtgctagactgtaagcccgacaagggcngggctttnggtttngttctctgatgtgtctcagtatctagcacataatagacactcaataaatacttgttgaattcaaaaaaaaagtcgacgcggccgcgaatttagta

SEQ ID NO: 602147 - DNA, 1292 bp, Homo sapiens
atttccgcattgaaggggctgctccgaatggagggggaggggaggtgtttaggagaaagtaggggctgtgggtgtcgggagccggctgacgggtggacaagggggggttagcagctgggctgcgaccgttagggaggggctcaaggtgtgcatgtgtgagggaagagagagagagagaagggcgcctcagaggtgactttcagcctgcgagccttcttcccggggcgccataaacgcccccaatttcccagctgctaaaggaagaggaagatcttagcaaagcaatgtctcaagatggtgcttctcagttccaagaagtcattcggcaagagctagaattatctgtgaagaaggaactagaaaaaatactcaccacagcatcatcacatgaatttgagcacaccaaaaaagacctggatggatttcggaagctatttcatagatttttgcaagaaaaggggccttctgtggattggggaaaaatccagagaccccctgaagattcgattcaaccctatgaaaagataaaggccaggggcttgcctgataatatatcttccgtgttgaacaaactagtggtggtgaaactcaatggtggtttgggaaccagcatgggctgcaaaggccctaaaagtctgattggtgtgaggaatgagaatacctttctggatctgactgttcagcaaattgaacatttgaataaaacctacaatacagatgttcctcttgttttaatgaactcttttaacacggatgaagataccaaaaaaatactacagaagtacaatcattgtcgtgtgaaaatctacactttcaatcaaagcaggtacccgaggattaataaagaatctttacttcctgtagcaaaggacgtgtcttactcaggggaaaatacagaagcttggtaccctccaggtcatggtgatatttacgccagtttctacaactctggattgcttgatacctttataggagaaggcaaagagtatatttttgtgtctaacatagataatctgggtgccacagtggatctgtatattcttaatcatctaatgaacccacccaatggaaaacgctgtgaatttgtcatggaagtcacaaataaaacacgtgcagatgtaaaggtaaataccgagaggaagcagtttagggcttcatgttttcacatttcgtaagttatgaagttaaagacttttttatttgaaagtttctatgttaaacaacacatttaatatgttctgtttgacataatagtatgtatcataaatccataataaatagtatcaaaatca

SEQ ID NO: 602148 - DNA, 159 bp, Homo sapiens
cgccccaattcgcttacaaaaagagaggcagatcgtctctccactgtgcagcgcttaaaggtactcagtgaaaactactgtcacatatgcgcactctttaattttgctatccactgttttacttaacctgtaaggccccctctcattgcaacaggaggt

SEQ ID NO: 602149 - DNA, 1998 bp, Homo sapiens
  misc_feature (7)..(7): n is a, c, g, or t
  misc_feature (1569)..(1569): n is a, c, g, or t
  misc_feature (1599)..(1599): n is a, c, g, or t
  misc_feature (1625)..(1625): n is a, c, g, or t
  misc_feature (1629)..(1629): n is a, c, g, or t
  misc_feature (1695)..(1695): n is a, c, g, or t
  misc_feature (1706)..(1706): n is a, c, g, or t
  misc_feature (1718)..(1718): n is a, c, g, or t
  misc_feature (1729)..(1729): n is a, c, g, or t
gggctgnaggattcggcacgagtccggagctcaggagttcccaaaccgactcagtcgcaccaagtttccgtcttttggaattggggaaggagtttctttctttcttttcttttttcttgagccagttttaatcgctttgaataaatactcccttaagtagttaaatataggaggagaaagaatacatcggttgttaaagcaggagaggaagagagacctgccctgtagcgtgactcctctagaaaaaaaaaaaaaaagccggagtattttactaagcccctaaaatgtcgagatttgtacaagatcttagcaaagcaatgtctcaagatggtgcttctcagttccaagaagtcattcggcaagagctagaattatctgtgaagaaggaactagaaaaaatactcaccacagcatcatcacatgaatttgagcacaccaaaaaagacctggatggatttcggaagctatttcatagatttttgcaagaaaaggggccttctgtggattggggaaaaatccagagaccccctgaagattcgattcaaccctatgaaaagataaaggccaggggcttgcctgataatatatcttccgtgttgaacaaactagtggtggtgaaactcaatggtggtttgggaaccagcatgggctgcaaaggccctaaaagtctgattggtgtgaggaatgagaatacctttctggatctgactgttcagcaaattgaacatttgaataaaacctacaatacagatgttcctcttgttttaatgaactcttttaacacggatgaagataccaaaaaaatactacagaagtacaatcattgtcgtgtgaaaatctacactttcaatcaaagcaggtacccgaggattaataaagaatctttacttcctgtagcaaaggacgtgtcttactcaggggaaaatacagaagcttggtaccctccaggtcatggtgatatttacgccagtttctacaactctggattgcttgatacctttataggagaaggcaaagagtatatttttgtgtctaacatagataatctgggtgccacagtggatctgtatattcttaatcatctaatgaacccacccaatggaaaacgctgtgaatttgtcatggaagtcacaaataaaacacgtgcagatgtaaagggcgggacactcactcaatatgaaggcaaactgagactggtggaaattgctcaagtgccaaaagcacatgtagacgagttcaagtctgtatcaaagttcaaaatatttaatacaaacaacctatggatttctcttgcagcagttaaaagactgcaggagcaaaatgccattgacatggaaatcattgtgaatgcaaagactttggatggaggcctgaatgtcattcaattagaaactgcagtaggggctgccatcaaaagttttgagaattctctaggtattaatgtgccaaggagccgttttctgcctgtcaaaaccacatcagatctcttgctggtgatgtcaaacctctatagtcttaatgcaggatctctgacaatgagtgaaaagcgggaatttcctacaggtgccntggttaaattaggcagttctttacgaaggntccacgattatctaagaagatttganagtntaccagatatgcttgaattgggatcacctcacagttcaggaagatgtgaattgggacacaatggtncattaaaggangggtataacatngcaatctgggncgaatgatatccacctggagcaggaatgagacgaggatgggtctgggagctcgcatctggacactggattgaaaatctgggaccttaatagggagtccttacaggagccctaggatccaaaaggggcattatatgtagaccgcgggttaaaaagagtcgcggcattgctaaacagggacatctcgagaacaagactagagagcacggggggatcaaccatctggccacggccaaaaacgggctggcgggtgttcatcagccacacgggc

SEQ ID NO: 602150 - DNA, 1313 bp, Homo sapiens
  misc_feature (1166)..(1166): n is a, c, g, or t
  misc_feature (1204)..(1204): n is a, c, g, or t
  misc_feature (1212)..(1212): n is a, c, g, or t
  misc_feature (1218)..(1218): n is a, c, g, or t
tgtcggacaactcatggcggcggcggcggcggcggcagctgcttgggcgcggtgcggtggtgactgagctacgagcctggcggcgggtgtgcgccgagccccggcccggcccggccctcgcgtgcctcccaggctccgcacccctgatgctgcgcgggtgctgagcccgcttcggccgggacgatggtgaagtatttcctgggccagagcgtgctccggagttcctgggaccaagtgttcgccgccttctggcagcggtacccgaatccctatagcaaacatgtcttgacggaagacatagtacaccgggaggtgacccctgaccagaaactgctgtcccggcgactcctgaccaagaccaacaggatgccacgctgggccgagcgactatttcctgccaatgttgctcactcggtgtacgtcctggaggactctattgtggacccacagaatcagaccatgactaccttcacctggaacatcaaccacgcccggctgatggtggtggaggaacgatgtgtttactgtgtgaactctgacaacagtggctggactgaaatccgccgggaagcctgggtctcctctagcttatttggtgtctccagagctgtccaggaatttggtcttgcccggttcaaaagcaacgtgaccaagactatgaagggttttgaatatatcttggctaagctgcaagggaaattaggttggtctttcaggcatcttctaaaggcagccacctgccgttcgcgacaggcgaggccccttccaaaacacttgttgagacagccaaggaagccaaggagaaggcaaaggagacggcactggcagctacagagaaggccaaggacctcgccagcaaggcggccaccaagaagcagcagcagcagcaacagtttgtgtagccagtctaccaccaccacagcaccccagacagctaggcttagcccctctgccctcccttcattgtactttatcattaaaaatcaacttccagccctgtctgctgtctacgtggtgggttgtggggatgcagtttggcatctgcagtacaccaagcacatgattcatgtctgagccaggtctgcttattctcccattgggcagctgaggaccgaggcacagaggtgcggtgacttgcccggggctccaggtagcctgcaggttanctggcggtaagtgctagactgtaagcccgacaagggcngggctttnggtttngttctctgatgtgtctcagtatctagcacataatagacactcaataaatacttgttgaattcaaaaaaaaagtcgacgcggccgcgaatttagta

SEQ ID NO: 602151 - DNA, 128 bp, Homo sapiens
tctgtgtatgccagtgagctagtatgtcctcctggggggtttcctgatgggaaacggtgttggtcaagatgcctgccacctgcaccagtgttggactgtgtctgcgcctcctcttcctcccattctcc

SEQ ID NO: 602152 - DNA, 337 bp, Homo sapiens
aatgcatagcgatcaggaaaggactacttaggcaagagaagcagctgaattcccacgttcccatgaagcatcccccatcgattctgagcgcatagtgtaaagtaggactaaattgggaacaaaccacaagaattatatacaagtggctgaggggctatatgataaatactcaggagatcatctattcctgcactagttagatacagctacattctttacagtacacaaaagccattaatcatgtagtatagagaccaaaatgtaaagagagatagaatacattactgatgtgtgacttaattcaagtacacgcatctacttgtgttacagcacagtt

SEQ ID NO: 602153 - DNA, 1911 bp, Homo sapiens
  misc_feature (1482)..(1482): n is a, c, g, or t
  misc_feature (1512)..(1512): n is a, c, g, or t
  misc_feature (1538)..(1538): n is a, c, g, or t
  misc_feature (1542)..(1542): n is a, c, g, or t
  misc_feature (1608)..(1608): n is a, c, g, or t
  misc_feature (1619)..(1619): n is a, c, g, or t
  misc_feature (1631)..(1631): n is a, c, g, or t
  misc_feature (1642)..(1642): n is a, c, g, or t
atttccgcattgaaggggctgctccgaatggagggggaggggaggtgtttaggagaaagtaggggctgtgggtgtcgggagccggctgacgggtggacaagggggggttagcagctgggctgcgaccgttagggaggggctcaaggtgtgcatgtgtgagggaagagagagagagagaagggcgcctcagaggtgactttcagcctgcgagccttcttcccggggcgccataaacgcccccaatttcccagctgctaaaggaagaggaagatcttagcaaagcaatgtctcaagatggtgcttctcagttccaagaagtcattcggcaagagctagaattatctgtgaagaaggaactagaaaaaatactcaccacagcatcatcacatgaatttgagcacaccaaaaaagacctggatggatttcggaagctatttcatagatttttgcaagaaaaggggccttctgtggattggggaaaaatccagagaccccctgaagattcgattcaaccctatgaaaagataaaggccaggggcttgcctgataatatatcttccgtgttgaacaaactagtggtggtgaaactcaatggtggtttgggaaccagcatgggctgcaaaggccctaaaagtctgattggtgtgaggaatgagaatacctttctggatctgactgttcagcaaattgaacatttgaataaaacctacaatacagatgttcctcttgttttaatgaactcttttaacacggatgaagataccaaaaaaatactacagaagtacaatcattgtcgtgtgaaaatctacactttcaatcaaagcaggtacccgaggattaataaagaatctttacttcctgtagcaaaggacgtgtcttactcaggggacaactctggattgcttgatacctttataggagaaggcaaagagtatatttttgtgtctaacatagataatctgggtgccacagtggatctgtatattcttaatcatctaatgaacccacccaatggaaaacgctgtgaatttgtcatggaagtcacaaataaaacacgtgcagatgtaaagggcgggacactcactcaatatgaaggcaaactgagactggtggaaattgctcaagtgccaaaagcacatgtagacgagttcaagtctgtatcaaagttcaaaatatttaatacaaacaacctatggatttctcttgcagcagttaaaagactgcaggagcaaaatgccattgacatggaaatcattgtgaatgcaaagactttggatggaggcctgaatgtcattcaattagaaactgcagtaggggctgccatcaaaagttttgagaattctctaggtattaatgtgccaaggagccgttttctgcctgtcaaaaccacatcagatctcttgctggtgatgtcaaacctctatagtcttaatgcaggatctctgacaatgagtgaaaagcgggaatttcctacaggtgccntggttaaattaggcagttctttacgaaggntccacgattatctaagaagatttganagtntaccagatatgcttgaattgggatcacctcacagttcaggaagatgtgaattgggacacaatggtncattaaaggangggtataacatngcaatctgggncgaatgatatccacctggagcaggaatgagacgaggatgggtctgggagctcgcatctggacactggattgaaaatctgggaccttaatagggagtccttacaggagccctaggatccaaaaggggcattatatgtagaccgcgggttaaaaagagtcgcggcattgctaaacagggacatctcgagaacaagactagagagcacggggggatcaaccatctggccacggccaaaaacgggctggcgggtgttcatcagccacacgggc

SEQ ID NO: 602154 - DNA, 1303 bp, Homo sapiens
  misc_feature (1156)..(1156): n is a, c, g, or t
  misc_feature (1194)..(1194): n is a, c, g, or t
  misc_feature (1202)..(1202): n is a, c, g, or t
  misc_feature (1208)..(1208): n is a, c, g, or t
tgtcggacaactcatggcggcggcggcggcggcggcagctgcttgggcgcggtgcggtggtgactgagctacgagcctggcggcgggtgtgcgccgagccccggcccggcccggccctcgcgtgcctcccaggctccgcacccctgatgctgcgcgggtgctgagcccgcttcggccgggacgatggtgaagtatttcctgggccagagcgtgctccggagttcctgggaccaagtgttcgccgccttctggcagcggtacccgaatccctatagtctcttaggggcaagcttctgagggtcaccttcaccctgacacctgcagcaaacatgtcttgacggaagacatagtacaccgggaggtgacccctgaccagaaactgctgtcccggcgactcctgaccaagaccaacaggatgccacgctgggccgagcgactatttcctgccaatgttgctcactcggtgtacgtcctggaggactctattgtggacccacagaatcagaccatgactaccttcacctggaacatcaaccacgcccggctgatggtggtggaggaacgatgtgtttactgtgtgaactctgacaacagtggctggactgaaatccgccgggaagcctgggtctcctctagcttatttggtgtctccagagctgtccaggaatttggtcttgcccggttcaaaagcaacgtgaccaagactatgaagggttttgaatatatcttggctaagctgcaaggcgaggccccttccaaaacacttgttgagacagccaaggaagccaaggagaaggcaaaggagacggcactggcagctacagagaaggccaaggacctcgccagcaaggcggccaccaagaagcagcagcagcagcaacagtttgtgtagccagtctaccaccaccacagcaccccagacagctaggcttagcccctctgccctcccttcattgtactttatcattaaaaatcaacttccagccctgtctgctgtctacgtggtgggttgtggggatgcagtttggcatctgcagtacaccaagcacatgattcatgtctgagccaggtctgcttattctcccattgggcagctgaggaccgaggcacagaggtgcggtgacttgcccggggctccaggtagcctgcaggttanctggcggtaagtgctagactgtaagcccgacaagggcngggctttnggtttngttctctgatgtgtctcagtatctagcacataatagacactcaataaatacttgttgaattcaaaaaaaaagtcgacgcggccgcgaatttagta

SEQ ID NO: 602155 - DNA, 1992 bp, Homo sapiens
  misc_feature (1563)..(1563): n is a, c, g, or t
  misc_feature (1593)..(1593): n is a, c, g, or t
  misc_feature (1619)..(1619): n is a, c, g, or t
  misc_feature (1623)..(1623): n is a, c, g, or t
  misc_feature (1689)..(1689): n is a, c, g, or t
  misc_feature (1700)..(1700): n is a, c, g, or t
  misc_feature (1712)..(1712): n is a, c, g, or t
  misc_feature (1723)..(1723): n is a, c, g, or t
agcggatggagaaatttaagttcgtgtggttttaccttttccgggagtctccagctggccctcatttgtgtccggagctcaggagttcccaaaccgactcagtcgcaccaagtttccgtcttttggaattggggaaggagtttctttctttcttttcttttttcttgagccagttttaatcgctttgaataaatactcccttaagtagttaaatataggaggagaaagaatacatcggttgttaaagcaggagaggaagagagacctgccctgtagcgtgactcctctagaaaaaaaaaaaaaaagccggagtattttactaagcccctaaaatgtcgagatttgtacaagatcttagcaaagcaatgtctcaagatggtgcttctcagttccaagaagtcattcggcaagagctagaattatctgtgaagaaggaactagaaaaaatactcaccacagcatcatcacatgaatttgagcacaccaaaaaagacctggatggatttcggaagctatttcatagatttttgcaagaaaaggggccttctgtggattggggaaaaatccagagaccccctgaagattcgattcaaccctatgaaaagataaaggccaggggcttgcctgataatatatcttccgtgttgaacaaactagtggtggtgaaactcaatggtggtttgggaaccagcatgggctgcaaaggccctaaaagtctgattggtgtgaggaatgagaatacctttctggatctgactgttcagcaaattgaacatttgaataaaacctacaatacagatgttcctcttgttttaatgaactcttttaacacggatgaagataccaaaaaaatactacagaagtacaatcattgtcgtgtgaaaatctacactttcaatcaaagcaggtacccgaggattaataaagaatctttacttcctgtagcaaaggacgtgtcttactcaggggacaactctggattgcttgatacctttataggagaaggcaaagagtatatttttgtgtctaacatagataatctgggtgccacagtggatctgtatattcttaatcatctaatgaacccacccaatggaaaacgctgtgaatttgtcatggaagtcacaaataaaacacgtgcagatgtaaagggcgggacactcactcaatatgaaggcaaactgagactggtggaaattgctcaagtgccaaaagcacatgtagacgagttcaagtctgtatcaaagttcaaaatatttaatacaaacaacctatggatttctcttgcagcagttaaaagactgcaggagcaaaatgccattgacatggaaatcattgtgaatgcaaagactttggatggaggcctgaatgtcattcaattagaaactgcagtaggggctgccatcaaaagttttgagaattctctaggtattaatgtgccaaggagccgttttctgcctgtcaaaaccacatcagatctcttgctggtgatgtcaaacctctatagtcttaatgcaggatctctgacaatgagtgaaaagcgggaatttcctacaggtgccntggttaaattaggcagttctttacgaaggntccacgattatctaagaagatttganagtntaccagatatgcttgaattgggatcacctcacagttcaggaagatgtgaattgggacacaatggtncattaaaggangggtataacatngcaatctgggncgaatgatatccacctggagcaggaatgagacgaggatgggtctgggagctcgcatctggacactggattgaaaatctgggaccttaatagggagtccttacaggagccctaggatccaaaaggggcattatatgtagaccgcgggttaaaaagagtcgcggcattgctaaacagggacatctcgagaacaagactagagagcacggggggatcaaccatctggccacggccaaaaacgggctggcgggtgttcatcagccacacgggc

SEQ ID NO: 602156 - DNA, 1392 bp, Homo sapiens
  misc_feature (1245)..(1245): n is a, c, g, or t
  misc_feature (1283)..(1283): n is a, c, g, or t
  misc_feature (1291)..(1291): n is a, c, g, or t
  misc_feature (1297)..(1297): n is a, c, g, or t
tgtcggacaactcatggcggcggcggcggcggcggcagctgcttgggcgcggtgcggtggtgactgagctacgagcctggcggcgggtgtgcgccgagccccggcccggcccggccctcgcgtgcctcccaggctccgcacccctgatgctgcgcgggtgctgagcccgcttcggccgggacgatggtgaagtatttcctgggccagagcgtgctccggagttcctgggaccaagtgttcgccgccttctggcagcggtacccgaatccctatagtgtggtgagacaagaagaggcggcagtatgggagttgggagggatcttggagttggaaatcctatttctctgcccgtggcgctttcctggggtgcaataaatcatgaggtccattcctgctagaaggcaggaatccagcaaacatgtcttgacggaagacatagtacaccgggaggtgacccctgaccagaaactgctgtcccggcgactcctgaccaagaccaacaggatgccacgctgggccgagcgactatttcctgccaatgttgctcactcggtgtacgtcctggaggactctattgtggacccacagaatcagaccatgactaccttcacctggaacatcaaccacgcccggctgatggtggtggaggaacgatgtgtttactgtgtgaactctgacaacagtggctggactgaaatccgccgggaagcctgggtctcctctagcttatttggtgtctccagagctgtccaggaatttggtcttgcccggttcaaaagcaacgtgaccaagactatgaagggttttgaatatatcttggctaagctgcaaggcgaggccccttccaaaacacttgttgagacagccaaggaagccaaggagaaggcaaaggagacggcactggcagctacagagaaggccaaggacctcgccagcaaggcggccaccaagaagcagcagcagcagcaacagtttgtgtagccagtctaccaccaccacagcaccccagacagctaggcttagcccctctgccctcccttcattgtactttatcattaaaaatcaacttccagccctgtctgctgtctacgtggtgggttgtggggatgcagtttggcatctgcagtacaccaagcacatgattcatgtctgagccaggtctgcttattctcccattgggcagctgaggaccgaggcacagaggtgcggtgacttgcccggggctccaggtagcctgcaggttanctggcggtaagtgctagactgtaagcccgacaagggcngggctttnggtttngttctctgatgtgtctcagtatctagcacataatagacactcaataaatacttgttgaattcaaaaaaaaagtcgacgcggccgcgaatttagta

SEQ ID NO: 602157 - DNA, 2107 bp, Homo sapiens
  misc_feature (1678)..(1678): n is a, c, g, or t
  misc_feature (1708)..(1708): n is a, c, g, or t
  misc_feature (1734)..(1734): n is a, c, g, or t
  misc_feature (1738)..(1738): n is a, c, g, or t
  misc_feature (1804)..(1804): n is a, c, g, or t
  misc_feature (1815)..(1815): n is a, c, g, or t
  misc_feature (1827)..(1827): n is a, c, g, or t
  misc_feature (1838)..(1838): n is a, c, g, or t
agcggatggagaaatttaagttcgtgtggttttaccttttccgggagtctccagctggccctcatttgtgtccggagctcaggagttcccaaaccgactcagtcgcaccaagtttccgtcttttggaattggggaaggagtttctttctttcttttcttttttcttgagccagttttaatcgctttgaataaatactcccttaagtagttaaatataggaggagaaagaatacatcggttgttaaagcaggagaggaagagagacctgccctgtagcgtgactcctctagaaaaaaaaaaaaaaagccggagtattttactaagcccctaaaatgtcgagatttgtacaggtacctgtgcgtgcacgcagacgggaagggctggggaagcgggaggactgagaaaagccaagatcttagcaaagcaatgtctcaagatggtgcttctcagttccaagaagtcattcggcaagagctagaattatctgtgaagaaggaactagaaaaaatactcaccacagcatcatcacatgaatttgagcacaccaaaaaagacctggatggatttcggaagctatttcatagatttttgcaagaaaaggggccttctgtggattggggaaaaatccagagaccccctgaagattcgattcaaccctatgaaaagataaaggccaggggcttgcctgataatatatcttccgtgttgaacaaactagtggtggtgaaactcaatggtggtttgggaaccagcatgggctgcaaaggccctaaaagtctgattggtgtgaggaatgagaatacctttctggatctgactgttcagcaaattgaacatttgaataaaacctacaatacagatgttcctcttgttttaatgaactcttttaacacggatgaagataccaaaaaaatactacagaagtacaatcattgtcgtgtgaaaatctacactttcaatcaaagcaggtacccgaggattaataaagaatctttacttcctgtagcaaaggacgtgtcttactcaggggaaaatacagaagcttggtaccctccaggtcatggtgatatttacgccagtttctacaactctggattgcttgatacctttataggagaaggcaaagagtatatttttgtgtctaacatagataatctgggtgccacagtggatctgtatattcttaatcatctaatgaacccacccaatggaaaacgctgtgaatttgtcatggaagtcacaaataaaacacgtgcagatgtaaagggcgggacactcactcaatatgaaggcaaactgagactggtggaaattgctcaagtgccaaaagcacatgtagacgagttcaagtctgtatcaaagttcaaaatatttaatacaaacaacctatggatttctcttgcagcagttaaaagactgcaggagcaaaatgccattgacatggaaatcattgtgaatgcaaagactttggatggaggcctgaatgtcattcaattagaaactgcagtaggggctgccatcaaaagttttgagaattctctaggtattaatgtgccaaggagccgttttctgcctgtcaaaaccacatcagatctcttgctggtgatgtcaaacctctatagtcttaatgcaggatctctgacaatgagtgaaaagcgggaatttcctacaggtgccntggttaaattaggcagttctttacgaaggntccacgattatctaagaagatttganagtntaccagatatgcttgaattgggatcacctcacagttcaggaagatgtgaattgggacacaatggtncattaaaggangggtataacatngcaatctgggncgaatgatatccacctggagcaggaatgagacgaggatgggtctgggagctcgcatctggacactggattgaaaatctgggaccttaatagggagtccttacaggagccctaggatccaaaaggggcattatatgtagaccgcgggttaaaaagagtcgcggcattgctaaacagggacatctcgagaacaagactagagagcacggggggatcaaccatctggccacggccaaaaacgggctggcgggtgttcatcagccacacgggc

SEQ ID NO: 602158 - DNA, 159 bp, Homo sapiens
taaatcgagctcggtacctaatttttgtattttagtggagagggggttcaccatgttggcagtctggtctggaactcctgacgtcgggtgatccgcccaccttggcctcccaaggtgctggaattagaggcctgaccccctgctccaaagcctgttagg

SEQ ID NO: 602159 - DNA, 739 bp, Homo sapiens
ctggaaactgggtaatttataaagaaaaagaggtttaatgtactcacagcttccacaaggctggagaggcctcagaatcatggtggaaggcaaagaaggagcaaaaaggtatgtcttccatggcagcaggcaagagagcacgtgcagggaaactgccctttataaaaccatcagatttagtgagatgtattcactatcacgagaacagtatgggaaaaacctgcccccatgattcgattacctcctaccgggtccctcccacgacacatggggattatgggaactacaattcaagatgaaatttgggtggggacgcagccaaaccatatcgggtagcaacaacctagggtcagttttgcaggtggtaaagccatttaccaagatagttgttacgtaaagaagggcagatttattagagaaacttgtgaaccatatgttgcagtgggcagctcagcagagaaggggctacctgcaaagaggcaagggctggaggaaagtttatagggtcctgctgaaagggtgctacggtgtggaatgaggtcattgtgcccgcaggttgttgtgattagtgtctctaaacaattgttcatacaataattgtccattatgttctcaacttgggttctccccaatctgggaacccttcctttattgttgcttacttatcaggttccacattacaggtgtggaacttccttcatcatattttaaccaattgtggtacctgttttaaaacttt

SEQ ID NO: 602160 - DNA, 138 bp, Homo sapiens
gggtgcatttttaaaggaaccaattgtgtaaaagcagacatcattatggaattcatcatgcatgggatttattgggggaattaccagcaagagaaaatacttgaataagtacccagaaaaagcttggagagctgttag

SEQ ID NO: 602161 - DNA, 103 bp, Homo sapiens
ttctcgcagtcgcgaccatatacacagtcgcagtagagtaggcgctctctcagtccgtcaaagtgaatggagccaaccataggggcctggaggaatgacatat

SEQ ID NO: 602162 - DNA, 468 bp, Homo sapiens
tggtgttctagaggatccctgcaagacgtatagaaccataataaaataccatccatacctatgagaacagttaaaataaaaaatactgacaacagcaactgtggtgatagagtaacgggagctctcatacatcagtagggaaatgtcaagtagtacagccaccgggaaagttggttataaaattaagcatatatctaaccaaatgttgatggctattgtgataccctggttcttgtcttcttagtttaaaagaatttaggccggacacggtggctcatgcctgtaatcccagcacctcgggaggcccaggcaggcagatcacgaattctggagattgagaccatcctgggtaacgtggtgaaaccccacctctactaaaaatacaaaaaagtagccgggcgtggtagcaggcgcctgtgtcccagctactcgggaggctgaggcaggagaatggcatgaacccaagag

SEQ ID NO: 602163 - DNA, 250 bp, Homo sapiens
cccttccccctcttgttttcctagaccccccaaagttaaaacttggggttcccctggccccccccaaacccttgtatattgtttgttttagggtcgggccccagtaaccaaccccggtttttattgcccaaaccaatgtttgctggggatattccccgtaaattttattttatctgtttttttgtttgtttggggggtttttggggggggggtggttttgttttttaaaataaaaaaaaaaatctgtcca

SEQ ID NO: 602164 - DNA, 937 bp, Homo sapiens
agactgctcagcctgcattagtatgacagtaggggggctgtaacaatcgctgctatactcggctggcttactggattatcatggcgttggaatcttcatagtaatgcacatccaattacttcgtggtacctgcagtttacaaaataattcgatccttcagtgagcatatggtgtatctggatgttccagatgttagaactataaccatatttattacaaacagatattaatccctctactcccaggtgtcccttttcaatatgttaagatcatcaattggctttgaggggtgccgaaaagaaataaaccgtaggcggagagcgggagcttatcctgatagtgcatgtccactatagaggattgtcagtaaaattaacaattccacagctaatccaataaatcaatggtacattctaagtgttctgacttttcactaatatattctcacactttgatccatcacagtaacaatgtacatatgttaactgtaaataaaaatggtttgatactcagaaataccaagaatttaacttttccaaatgtgtctacagtcctgggaacaagtaagacattattggccaaaataagaggaaagaacaacctctagtactgcattaatgagttcaccatagaattggtgggacagtactgcagacagcgtgcaagttactaaaggtctcggtttaacactattgttagagggcctgccttagcacgaaaactgttccataatgaaccgaggcaactattgcacgtattttacacaagcggctgcactgtacacctgggtttagaacatatattccgtataccccatttgcccagggttgcccaagtgtacaacaatggttcttggtatcatccccaaaaacccaacgtttatcgagcgcaacattacaccgtcttcgagcctagggaatacagccagcagcaaacc

SEQ ID NO: 602165 - DNA, 155 bp, Homo sapiens
gataagcggatgagggcaatgggatagtgggtgggggatacagagaggtgatcccaaaagggaaaacccttatccggtcttccccctcttccccggattggccaaccgtgtgagacctgaagcacatcctctaggtcagagtcgtcgaatcttgc

SEQ ID NO: 602166 - DNA, 152 bp, Homo sapiens
gctgtgtcgtctagaggatcccaggcgcggctgaactggcattttagatgtggttgactatttctgtatgtctccatctatcgatgagggtctcaaaaaaaaaataataaaattaaaatgggggtaaaaaaaaacacaatttaccatatatg

SEQ ID NO: 602167 - DNA, 257 bp, Homo sapiens
gaccaacatggtgaaaccccgtctctactaaaaatacaacaattagctgggcttggtggcacacgcctgtcatcccagctactcaggaggctgaggcaggagaatcgcttgaactcgggaggtggaggttacagtgagccaggatctcaccactgcaatccagcctgggcgacagagtgagactccatctcaaaacaaaacaaaaaacaaaaaactccaagccaaacattgggtgacttaggggcctcagaagaggt

SEQ ID NO: 602168 - DNA, 685 bp, Homo sapiens
  misc_feature (538)..(538): n is a, c, g, or t
  misc_feature (540)..(542): n is a, c, g, or t
gaagataatcgccatcatgaacgacaccgtaactatccgcactagaaagttcatgaccaaccgactacttcagaggaaacaaatggtcattgatgtccttcaccccgggaaggcgacagtgcctaagacagaaattcgggaaaaactagccaaaatgtacaagaccacaccggatgtcatctttgtatttggattcagaactcattttggtggtggcaagacaactggctttggcatgatttatgattccctggattatgcaaagaaaaatgaacccaaacatagacttgcaagacatggcctgtatgagaagaaaaagacctcaagaaagcaacgaaaggaacgcaagaacagaatgaagaaagtcagggggactgcaaaggccaatgttggtgctggcaaaaagtgagctggagattggatcacagccgaaggagtaaaggtgctgcaatgatgttagctgtggccactgtggatttttcgcaagaacattaataaactaaaaacttcaaaaaaaaaaaaaaacaaaaaaaaaaanannnaaaaaaaaaaaaaaaaaaaaaaaaaaaaagagagagggggggcgcgccaaaaatattccccagggggggccctttgggccccttttggaaaggggggcccctaggggggcgtttcgagggggggggcgggttttaaacacggg

SEQ ID NO: 602169 - DNA, 607 bp, Homo sapiens
gaagataatcgccatcatgaacgacaccgtaactatccgcactagaaagttcatgaccaaccgactacttcagaggaaacaaatggtcattgatgtccttcaccccgggaaggcgacagtgcctaagacagaaattcgggaaaaactagccaaaatgtacaagaccacaccggatgtcatctttgtatttggattcagaactcattttggtggtggcaagacaactggctttggcatgatttatgattccctggattatgcaaagaaaaatgaacccaaacatagacttgcaagacatggcctgtatgagaagaaaaagacctcaagaaagcaacgaaaggaacgcaagaacagaatgaagaaagtcagggggactgcaaaggccaatgttggtgctggcaaaaagtgagctggagattggatcacagccgaaggagtaaaggtgctgcaatgatgttagctgtggccactgtggatttttcgcaagcaccaccaatacagggagcaccaccaatacaggtagcaccaccaatatgtattggtggtgctgacgatctcaggatcctgggcttcgtaggacttgaccaagcgagcaaacttaaggaca

SEQ ID NO: 602170 - DNA, 1655 bp, Homo sapiens
gcccccgcccgccccgggccctgatggactgaatgaaggctgcctacaccgcctatcgatgcctcaccaaagacctagaacgtgcgccatgaacccggagctgacaatggaaagtctgggcactttgcacggcgcgcgcggcggcggcagtggcgggggcggcggcgggggcggcgggggcggcggcgggggcccgggccatgagcaggagctgctggccagccccagcccccaccacgcgcgccgcggcccgcgtggctcgctgcggggccctccgccgcctccaaccgcgcaccaggagctgggcacggcggcagcggcggcagcggcggcgtcgcgctcggccatggtcaccagcatggcctcgatcctggacggcggcgactaccggcccgagctctccatcccgctgcaccacgccatgagcatgtcctgcgactcgtctccgcctggcatgggcatgagcaacacctacaccacgctgacaccgctccagccgctgccacccatctccaccgtgtctgacaagttccaccaccctcacccgcaccaccatccgcaccaccaccaccaccaccaccaccagcgcctgtccggcaacgtcagcggcagcttcaccctcatgcgcgacgagcgcgggctcccggccatgaacaacctctacagtccctacaaggagatgcccggcatgagccagagcctgtccccgctggccgccacgccgctgggcaacgggctaggcggcctccacaacgcgcagcagagtctgcccaactacggtccgccgggccacgacaaaatgctcagccccaacttcgacgcgcaccacactgccatgctgacccgcggtgagcaacacctgtcccgcggcctgggcaccccacctgcggccatgatgtcgcacctgaacggcctgcaccacccgggccacactcagtctcacgggccggtgctggcacccagtcgcgagcggccaccctcgtcctcatcgggctcgcaggtggccacgtcgggccagctggaagaaatcaacaccaaagaggtggcccagcgcatcacagcggagctgaagcgctacagtatcccccaggcgatctttgcgcagagggtgctgtgccggtctcaggggactctctccgacctgctccggaatccaaaaccgtggagtaaactcaaatctggcagggagaccttccgcaggatgtggaagtggcttcaggagcccgagttccagcgcatgtccgccttacgcctggcagcgtgcaaacgcaaagagcaagaaccaaacaaagacaggaacaattcccagaagaagtcccgcctggtgttcactgacctccaacgccgaacactcttcgccatcttcaaggagaacaaacgcccgtcaaaggagatgcagatcaccatttcccagcagctgggcctggagctcacaaccgtcagcaacttcttcatgaacgcccggcgccgcagcctggagaagtggcaagacgatctgagcacagggggctcctcgtccacctccagcacgtgtaccaaagcatgatggaaggactctcacttgggcacaagtcacctccaaatgaggacaacagataccaaaagaaaacaaaggaaaaagacaccggattcctagctggggcccttcactggtg

SEQ ID NO: 602171 - DNA, 127 bp, Homo sapiens
cctggcaggctctctacctgtagttggtgataccacagaatactggactcagtactaatatttcagtcaccacattcaaacagggagggcacctagctaataccgaactggatgctaccgattcagg

SEQ ID NO: 602172 - DNA, 1444 bp, Homo sapiens
ggaggccgcctctgactgccacctggcatgggctccgccaatgaggttcggcgccggcctcaggctccgtgcgcgcgcgcaaatcttgtgtacttccagtacgtgggcaccgactttaacgggtgtcgcgagcgtcgaggggggcactcagcgcgccgctctgtggtccagaactaccgtggagagaggccgccgagcggatgaatttcctgtggagccggtcaggttcaccaatctccagccgcacggacgccgggttccaacgcccctgagcaacgcggcgaaaccttggacgtccacgcggccgctcaggcccgtgccggcccttcccgccccgagatacctggcccggagggccccttcaaaacagcaagcaccgtgcaggacaacccgtgcacatcaggggatccttgcgaggccttccgatgtgccccagcgactttccaacgcatcggtcaatgcaagcacacggttcaccgggaaccacttaaccctttgtaaccgcggcctttggaccaactgggtcttgtcaaccgtgcgttgcacttgaaggcttgcccgagtgctatggaaccggcaaaccttaattgtcttgggacagtcatccccccgggcaagaaccttgggccttgccactatatgggtacgcaccaatagccatgttgaaaagggccggtacacaaaggcgcaacgcaattcccgattttaggagccacaacaaacacgcggaagtttccatggggtgctcattttaccccaatggataccacggcatatggagaccgaaggcccccccggagttggcactagtaaggtacccaccagtagtggaccgagaaaccgggccatggctagcgccggtggtgggtaccttacccgggatattcaccccacaaagtggggccaaaggtggcccaagtgtccccccgttttttgagtacaaaggccccctcgataatgggaatgaagctaagtgggaaaaggcaatttgggagtaatcactttgagcaacaacgttggcggcacgtttatgggcaagaaagacaacaagattacattttcaccgagtgggttacattacgaaacgacgggttatacccgcgtagggaaaattaaacccgggcgcactatgctctagcatattaggcctgcggcccaggagatggctcgcgtcagtagggagagcagacagcaatatatgtggcgccacacaccgtattggcccccaatatggcgtctaaaaactgctcgcagaactctctgtggacgaggaaacaggccccaactgaacttcctcccgacctgtgtgtaagacaaagcgacacgcaacaggacagcgagcagatttgtaacagaaccccccatagtcaagccacgaacgggagacatacataattccacttcaaatcgatattagtgagtgacaagtagtcgacggagtgac

SEQ ID NO: 602173 - DNA, 180 bp, Homo sapiens
gtctgactccctaggctcagtagctggtgcctacccaatcccagggcggtgtctcgagagaagcgaacctggtaagcctccactcaggacaccagtgaacagctgaaccgaaagcagagaacgtctggccctctacccaatgaatggtaagatgggaagactacggagcactgccatagt

SEQ ID NO: 602174 - DNA, 102 bp, Homo sapiens
gcctcggacaccgccatgtattactgtgcgagagacttatctggtcctacacatatagtaatgctagtctctcatcactactttgactactggggccaaggg

SEQ ID NO: 602175 - DNA, 265 bp, Homo sapiens
tgagaaagcttcagcatttttcttgctaacaggctcagaaaagtgtttcaaagccgagcacagggttgtttggttgcttgtgaagacaacctttgttccacaatcaattattaaataagcgaacaatttccgcaatgaactgaacatgcaacatttatcctacattcagtttgtcattcacactccttaagatttggtcagaatacttatttctttgcatgtcttatacacttgtactcctgtatgaataaaatattgtttttta

SEQ ID NO: 602176 - DNA, 529 bp, Homo sapiens
  misc_feature (10)..(10): n is a, c, g, or t
  misc_feature (66)..(66): n is a, c, g, or t
  misc_feature (73)..(73): n is a, c, g, or t
  misc_feature (176)..(176): n is a, c, g, or t
  misc_feature (214)..(214): n is a, c, g, or t
  misc_feature (433)..(433): n is a, c, g, or t
tccatttaanccccacttcccgaatgtctatttcaaatcaaggccccttaaataggggttaaattnaaccaanctttgcaccttaaggcttaacaccataggaactttgctaagccattgtcccctgggaatacaagggccacacccgggaccaagtgggaagacctgtgggcttnaagcctcggggcccggggcatgcctgccaccccctganaaaaacaggttccaaagtgctacccttgcttcctgccccttgaggtgggccaggctggctcctggctatgcagggatctctggtccccaggagaccttgggggccaggcaggtaaggatcaggggtgataggggagagcaattactttgttcactgtatgcacccgcgggggcctgggagtccccatttgcaggtgggtagggcctccagcccacaccncccagacctaggcttccctcttctcaggatccaccacagggttaggggacaggaagcctgttctattctcaataaatcttacaaaattccaaaaag

SEQ ID NO: 602177 - DNA, 113 bp, Homo sapiens
tgccaccttcgcaggtgggccagaactaccaccaggtattaagaggcccgttcataaatccgtttcccccaaaccttgaggttttttgggctttctaagggttaccctgttca

SEQ ID NO: 602178 - DNA, 151 bp, Homo sapiens
atctcccatccgtggataaaatgtctgattcgcagcacatgccatcagcctacagaccctacacttgtctcttgtgcagtcgtccagaaccccaggtcattgctctggttgcccacactctgcagttataatttctggtgacttcaatatc

SEQ ID NO: 602179 - DNA, 276 bp, Homo sapiens
gccttttccaagggccccccccccccgggtgtgcgccaagctttgggttccccggaaaacaaaactttggcctcggggataaggaagtggggggcaggggccaaaatcaatggcaacaaccaaggggggggtcccatcccccttggggattaaatgggccggcggccaaaccaatccctttgggaggaatttggaggagggccccttcccttttatttaatttcaggggacaaaaatgggtttggaaaaaaaaaaaaccgtttgtttacaccggga

SEQ ID NO: 602180 - DNA, 235 bp, Homo sapiens
  misc_feature (58)..(58): n is a, c, g, or t
tcttgagacagggtctcactccattgccaatgcctggagtgcgagtggcactgatcancggcttcctggagcctcaacttcttgggcttccacctctgcctcctgagtagctgaggctacagttgcatgccaccacacctgctaattttttgtagagacaggtttttgccatgtttcccacgctggtcttgaatgcctgggctcagcaatctgcctgcctcaacctccctactaa

SEQ ID NO: 602181 - DNA, 827 bp, Homo sapiens
ggcccattgtgctgctctgaaaagccatctttgcattgttcctcatccgcctccttgctcgcctgcagcccgcctccgcccgggcgcttccttccgcctgcccgcgaaactccctggaaggcttcatcgccaagatgtcccttgaacctctcgccttatctttataaaataccccttgcattcggattcaccgggcggtgacccaaaaacattgtcaggagcgcaggcctgtaagaaacacaaggctcccggaaacatttcaccccaacccaaaggggaaccttttacacagtggtcccgacatgcaacagggaacagatcgcacggagaccaacagtggtcaggacacatcgttgggcaccatgagaaccgtgccccctcttgcataaaaccggtcgacaatttgccttaaattgcagcgacacacattctggggccgccacccccaggagacgcgcctagcccccaccattgcaacggtctacccacacgaaaacgcaccaagctggcccaacagaaatggggtggccgcccaacgcacaccgacagccgacgcgcaacgggcaagccaactcgaacgtcgtcggaactggcatcgcaagcgcaaaaagaagccgcactggcagactcttgaaccgcaattgcaagcgcaaacgccttggaagcctccacacactaaacacgcgcgcgcaaaacagccgtgacccacaccctcgcacacgaaactcacatgacgcggcatgttgaccgacatgctctgaatcacccaaaagcaaactgcagaaatgaaacgctgactgaacgttattgccaaaacaacacggcac

SEQ ID NO: 602182 - DNA, 206 bp, Homo sapiens
cctaaagttatttgttgttgttgttgttgtgagatgagtctgctctgtctccagggctgagtgagtggtgcatcttggtcactgcaacttcactggtggttgagcattctctggctcaggctccaagtagctgggtacagtcgtgtgcaccatgccggctattttttgtattttagtagagacggggttcaccattgctggcagct

SEQ ID NO: 602183 - DNA, 115 bp, Homo sapiens
gggtgggtaggttgttgatatcctagtgggtgaggggtggcttcatagtagaagagcgatggtgagagtggtgcggtgatgtaagtgaggagagtggcgggtactaggggctctg

SEQ ID NO: 602184 - DNA, 178 bp, Homo sapiens
aaaaattaaatgaattatcaagggttttggacaagacatatgagccatttttagtcattcaaaatagtaagttacaaacaagagaacaaaagaagaaagaatagttaaaatcattaatttttttatttttcaaactgtgtaatgtgatgttttcaaataaaaactatctcaaaatttt

SEQ ID NO: 602185 - DNA, 102 bp, Homo sapiens
ggagccgcgttgctgttccacggcctcggtttttcctaacttgctctgatgctgtcagggctgccccgcggtcatagacttaaaggactgcaataaatgtag

SEQ ID NO: 602186 - DNA, 670 bp, Homo sapiens
gtttttgataaccttaatagttttgaagcgacttattggtcatttggtcaaatgtccttcaattgggttttgcctgtatttttctcatgcattaactgaggttatgggtttttcttgagttaagagaatcagctgcttccccaaaaagccaagggtacgtttaatggaaaatgatattagaaatcaagatttggacatttgggatgttgttgcttctagacactctcagctgacagagcaaggaaatatttgtggatatgctaacctgactaaatacgcatatctgctccatacctacctaacatctatcttctcaagaactctgccagggaaggagtagtttctgtgtttcataaacagactgagactcaaagaggctaagtaaactacctgaagccatatagcaacacacaatgacggatgtgagattcaaacttggatttatctggctccaaaatttctagttgtttttttttttttttcccactacagcaaaactaaggagaagagacagaggtgaatagctgtctctcagtggttattctgttttcccttatctacatgttttcctcctttcactctctcttggtttgttcttatccttcagaggtaaagaggagccttcagagagctataaaggttgatcaaagtaccagattatgagattaaa

SEQ ID NO: 602187 - DNA, 110 bp, Homo sapiens
accgactagccgacggggttgaggggagtaggcaggaggatcatggggctgtgggaccagagagaagctggggtcagaggtaggagctgacgctgtcgggctagtcgggg

SEQ ID NO: 602188 - DNA, 130 bp, Homo sapiens
ggggcgagacctacgacgccggcgagcagtggccgttacgcctaaaaagatggcggtctttgcacctctaattgctctgtgtattcggtgccgcgactttcacgatggctcgccaaaccttactaccttc

SEQ ID NO: 602189 - DNA, 164 bp, Homo sapiens
tttttttttgtaaagatgatgtcttactatgctgcccagactggtctcaaacgcctggcctcaagtgatcctcccaccagggccttccaaagtgttgggattacaggtgtgagccattgctcctagctatttttctttatacctttgctcaagctgcttcctag

SEQ ID NO: 602190 - DNA, 717 bp, Homo sapiens
  misc_feature (482)..(482): n is a, c, g, or t
  misc_feature (504)..(504): n is a, c, g, or t
  misc_feature (510)..(510): n is a, c, g, or t
  misc_feature (592)..(592): n is a, c, g, or t
  misc_feature (596)..(596): n is a, c, g, or t
  misc_feature (628)..(628): n is a, c, g, or t
  misc_feature (667)..(667): n is a, c, g, or t
attcgcggccgcgtcgacgctttcctaataaagaaagcaccaacaccacattcttcgaaattactggaattttatttgcctcaggttatgacttgcaaccaaagacattgtgcaaagaaagcaaagattaagtacactttagggagaaggagacgatacacattggtaacataggagatcagggtgacaaaagaagccatccaatacacattggtaacataggagatcagggtgacaaaagaagccatccaatacactatgtagattgcaatattcaatagcgctttcaacaaaactttttttaaatcaagagcaaaaaaattaagcaatgtttacagtagacataaatcttatacaattcaaaaagcttttgttcagatcatagagcataaaatggaaaaatgtatatgcaggtgaaatctaactactgtacatttatcacctattaaagttgcttatatgtaccacagtgtaaaaaaacnataccgaacaaataaaaacctngaaaantgcctgatgaaaaaattaaaataacccggtggcttttaaagggcttctcctgggtatcagggcttccaaaagaccaaaaatntttnttcatctgaaccaggtggataaaaccagggcncaaattaaaccggttacccaaattaggaccccacccatnggtatcctattcaccccccatatttttcctcggcttttttggttgggttc

SEQ ID NO: 602191 - DNA, 1052 bp, Homo sapiens
  misc_feature (526)..(526): n is a, c, g, or t
caaagggtgactcctgtgagcggcaggcactctggccacttcatgcccccagcctggtgctgcctctgctagggccgcctcctatctcgagagcttcagggcagtgccccaggagcaggagcgcaggtccgtgatcatcaggcaatgcacacacttatgcatgcccaagaaaggacgagcggctcccttgggcaacccatgcgaaagggttacaggtgccaggtcctgcagtctgaaagtgtaactcgtgatggtaggtcgtccgggctcgggaccgaacagcaatttgtaggaccatggacgtgatagtcgcaccggaaaagtggtccacccaggagtgttgaccatgggaggccagcgacagccttgcgtcaagtagagcaactaagatgaaacttgcagtcaagagaagcttgccgaccggaagaagaagctaagttgagtcgccgctagtctcgagactcattctggaagggtctccttgaagtcccattcgcagacctgctgaggcgtaactctctcctgnggctctagcggttgtcaattcgatgggcaagggacgaggtgttcgctctgctgcctgtgttgtgtgactgggtaccgacgtggtgggagcgaagggggacatcaggtccgtatgtttcccctatccccgtgtcttatatgatagcaacccgtgctttgtagatctggtctagttttactccgtagcggtgatcctggataaatgtactggatcgaatggatactctgtggcttgttacacattccttcatgagggtggagtcagttctacctatgcgttgttctggagccatcctacgatgtaaggttccgactgaaagtggtcgcgggtggtcccctatttatattgcagcggaggcacccgttgtgtcctgggactaccaagggtccttatctttaagcggcaccatttgggttctttttcctatttacacgggcttggtttccacagaagggcctctgtattgcttttttgggtttgacttgctgggtgcagaaatggcccggcgggtggccttggccttgga

SEQ ID NO: 602192 - DNA, 128 bp, Homo sapiens
tgtgtagtctggcgctgcgtagtgtgctttctcgatgtttacatccacgccatcgttggttatagtggttagatgtgttggttagtaggcctagatatgaggagcgttatggagtggaagtgatatca

SEQ ID NO: 602193 - DNA, 957 bp, Homo sapiens
  misc_feature (3)..(3): n is a, c, g, or t
  misc_feature (93)..(94): n is a, c, g, or t
  misc_feature (111)..(111): n is a, c, g, or t
  misc_feature (118)..(118): n is a, c, g, or t
  misc_feature (143)..(143): n is a, c, g, or t
  misc_feature (150)..(150): n is a, c, g, or t
  misc_feature (172)..(172): n is a, c, g, or t
  misc_feature (176)..(176): n is a, c, g, or t
  misc_feature (181)..(181): n is a, c, g, or t
  misc_feature (191)..(191): n is a, c, g, or t
  misc_feature (259)..(259): n is a, c, g, or t
  misc_feature (283)..(283): n is a, c, g, or t
  misc_feature (287)..(287): n is a, c, g, or t
  misc_feature (289)..(289): n is a, c, g, or t
  misc_feature (295)..(295): n is a, c, g, or t
  misc_feature (323)..(324): n is a, c, g, or t
  misc_feature (329)..(329): n is a, c, g, or t
  misc_feature (333)..(334): n is a, c, g, or t
  misc_feature (362)..(362): n is a, c, g, or t
  misc_feature (413)..(413): n is a, c, g, or t
  misc_feature (418)..(418): n is a, c, g, or t
  misc_feature (428)..(428): n is a, c, g, or t
  misc_feature (459)..(459): n is a, c, g, or t
  misc_feature (461)..(461): n is a, c, g, or t
  misc_feature (496)..(496): n is a, c, g, or t
  misc_feature (509)..(509): n is a, c, g, or t
  misc_feature (532)..(532): n is a, c, g, or t
  misc_feature (553)..(553): n is a, c, g, or t
  misc_feature (598)..(598): n is a, c, g, or t
  misc_feature (604)..(604): n is a, c, g, or t
  misc_feature (611)..(611): n is a, c, g, or t
  misc_feature (616)..(616): n is a, c, g, or t
  misc_feature (621)..(621): n is a, c, g, or t
  misc_feature (625)..(625): n is a, c, g, or t
  misc_feature (628)..(628): n is a, c, g, or t
tanagatgtgccctccagagggctagatgtggaagatgtgaaatttgtcatcaattatgactaccctaactcctcagaggattatattcatcnnattggaagaactgctcncagtacnaaaacaggcacagcatacactttcnttacacntaataacataaagcaagtgagngacnttatntctgtgcttngtgaagctaatcaagcaattaatcccaagttgcttcagttggtcgaagacagaggttcaggtcgttcnaggggtagaggaggcatgaaggangacngncggganagatactctgcgggcaaaaggggtgganntaatncctnnagagacagggaaaattatgacagaggtnactctagcctgcttaaaagagattctggggcaaaaacccagaatggtgttnacagngctgcaaatnacaccaatgggagctttggaagtaattttgngnctgctggtatacagaccagttttaggactggtaanccaacagggactnaccagaatggttatgatagcacncagcaatacggaagtaatgtnccaaatatgcacaatggtatgaaccaacaggcatatgcatatccngctacngcagctncaccnatgantggntanccaatgccaacaggatattcccaataagactttagaagtatatgtaaatgtctgtttttcataattgctctttatattgtgtgttatctgacaagatagttatttaagaaacatgggaattgcagaaatgactgcagtgcagcagtaattatggtgcactttttcgctatttaagttggatatttctctacattcctgaaacaatttttaggttttttttgtactagaaaatgcaggcagtgttttcacaaaagtaaatgtacagtgatttgaaatacaataaatgaaggcaatgcatggccttccaataaaaaatatttgaagactga

SEQ ID NO: 602194 - DNA, 669 bp, Homo sapiens
  misc_feature (434)..(434): n is a, c, g, or t
  misc_feature (456)..(456): n is a, c, g, or t
  misc_feature (462)..(462): n is a, c, g, or t
  misc_feature (544)..(544): n is a, c, g, or t
  misc_feature (548)..(548): n is a, c, g, or t
  misc_feature (580)..(580): n is a, c, g, or t
  misc_feature (619)..(619): n is a, c, g, or t
attcgcggccgcgtcgacgctttcctaataaagaaagcaccaacaccacattcttcgaaattactggaattttatttgcctcaggttatgacttgcaaccaaagacattgtgcaaagaaagcaaagattaagtacactttagggagaaggagacgatacacattggtaacataggagatcagggtgacaaaagaagccatccaatacactatgtagattgcaatattcaatagcgctttcaacaaaactttttttaaatcaagagcaaaaaaattaagcaatgtttacagtagacataaatcttatacaattcaaaaagcttttgttcagatcatagagcataaaatggaaaaatgtatatgcaggtgaaatctaactactgtacatttatcacctattaaagttgcttatatgtaccacagtgtaaaaaaacnataccgaacaaataaaaacctngaaaantgcctgatgaaaaaattaaaataacccggtggcttttaaagggcttctcctgggtatcagggcttccaaaagaccaaaaatntttnttcatctgaaccaggtggataaaaccagggcncaaattaaaccggttacccaaattaggaccccacccatnggtatcctattcaccccccatatttttcctcggcttttttggttgggttc

SEQ ID NO: 602195 - DNA, 859 bp, Homo sapiens
  misc_feature (4)..(4): n is a, c, g, or t
  misc_feature (66)..(66): n is a, c, g, or t
  misc_feature (124)..(125): n is a, c, g, or t
  misc_feature (150)..(150): n is a, c, g, or t
  misc_feature (247)..(247): n is a, c, g, or t
  misc_feature (263)..(263): n is a, c, g, or t
  misc_feature (315)..(315): n is a, c, g, or t
  misc_feature (318)..(318): n is a, c, g, or t
  misc_feature (331)..(331): n is a, c, g, or t
  misc_feature (358)..(358): n is a, c, g, or t
  misc_feature (398)..(398): n is a, c, g, or t
  misc_feature (571)..(571): n is a, c, g, or t
  misc_feature (588)..(588): n is a, c, g, or t
  misc_feature (648)..(648): n is a, c, g, or t
  misc_feature (675)..(675): n is a, c, g, or t
  misc_feature (686)..(686): n is a, c, g, or t
  misc_feature (733)..(733): n is a, c, g, or t
  misc_feature (765)..(765): n is a, c, g, or t
  misc_feature (796)..(796): n is a, c, g, or t
  misc_feature (846)..(846): n is a, c, g, or t
aggncgcgcgaagtgacagctttgaaaagaaggggattcggcccggcctggctcctcagggatgcnagcccttgagactaaggaatgttccttcagggaaactagggtggggtttgaatgaganntggggggcaggcatggccctgagtncctactcagcgccccccaccctccacctctgcccttcagcaggttggggcagccagatcccttccattccagaactgccagagactgggacgctttngaaggtaagggcgcanagcggcggcgggagattgaactggggccacctgagggcccgaggccccgttntgngggcgggttgggnggagaaggccttggcctgcctgaagcnggaggcctcagcaaaggagaaagggggccaggcccatgcnccaccccggcctgggctgccaaggtccgggctgggcacagtgtccattttctaacagtatggcgggagaggggcaggcaggaggcagggccaggccccagggtgcagagatgtctgttcgggctagggggcctccagcactccgggctggaagcgtgcagtctcctggaagangagctccttcagccgcnccttaggtaggtcatccagctccatggcgaaggtgaagggctcctcggccactggctcanccgttgggtcaaagttctgctccaggnaggggtgagcnagcgcttcctccactgttatccgtttattggggttaaaggttaacanccggtccagcagggcaagggctttggagtttnaattgggggaaaagcttggcccaagccaccntgggtcttggagggcagaaactgttgggagtttcgggccttcatgttgangaaacaatacagg

SEQ ID NO: 602196 - DNA, 241 bp, Homo sapiens
catggccccacttgtatccagaagttcccaggggtgattgtgatggtggttggcgactggaggttgtataaggtgttcttggaaggaaggcgcaggagctggaattagttggtccctactgtcccccatgaggtcgtgaacccctcttcctgacttctcatgcttcttaaaggcattttggcttcttcaaatctgtacagcaacagcaacttttcctgtcaaatacactgcgaaactgcag

SEQ ID NO: 602197 - DNA, 652 bp, Homo sapiens
agcgggagtgcgcccgtggtcccggtcggcgccaggtgcgttcactctgcccggctccagccagcgttcgcgccaggcacgtagctgccccaggctccccgtccccgctgcctgagtatggcgacagcgctcctgtcgggagaaggctcagaagctgaacgagcagcaccagctcatcctatccaagcttactgagggaggaggacaacaagtactgcgccgacgtgcgaggcctaaggtcctcgatgggcttcctggaatattggtgtgttgtattgcgcatcagatgtgctggaattcatagaaatcttggggttcatatatccaggtcaaatcagtcgaacctagagccaatggacatgcagaacacgatacggtgcgtgcgagatatgggaaatgctacaatgcaagactactctatgaagccaatcttccgagagaactttcgaagaccgacagagcagatcaagcagtggaattgttctcatcagagataacatatgcacagagaagaaatactacgataaaatatgccatagctattacaaatatttcctcctctgatgctcctctgcagcctttggtatctctccttctctgcagagctgctgtggaccagaataaatgggagaaagaaaaggaaaacgaagga

SEQ ID NO: 602198 - DNA, 144 bp, Homo sapiens
acttctaacacgccctgaacttgaacttatcagcttaaattaaagtgtgcattgacaaagactctggggacgttgcagctctcagaggatcccggaaatttaacgtacctgggcacaaaacacaaaacgtgatgaacactggaa

SEQ ID NO: 602199 - DNA, 245 bp, Homo sapiens
gccctcatacatggaggatggtgttggtagcgacgagtgagagagtggataggggttatgcaccatggaggatgccttctttaccatttccctgaagccctgagggaggacagtccatgtgagttgttgtgactggagggtgtcaggatcagtccaggtgaaagcaaataggttttgggaatcaggctgtagggaaatggtaaagaaggcatcctccatggtgctgacatcctccatggtgctga

SEQ ID NO: 602200 - DNA, 146 bp, Homo sapiens
cctcgcctttttgataggatagtagaaaagagctcccaaagctcggataggagactggacaaaagaaatacctggtgcgttctgatctcacagtttgggccagtctacttcttgatccgggaagcgaattcatctccgagctgagg

SEQ ID NO: 602201 - DNA, 293 bp, Homo sapiens
tctagagtatccccactatcgctaagaaaccctcggaggtagtggctacactgcactccagcctgggggacagagacagagtccaactcaaaaaaaaaaaaaaaaaaccctaaaactggtggtaccccaaataactgaccaccaaaaattcccgccggaaaaatttagagccttctttcttgaaattaacttttaaacacgttttcaccagaaagcattgaggctaacatgtggcataaatagctgtcagctttatctcgtgctacccacagaaaaaggtaaattatatgaca

SEQ ID NO: 602202 - DNA, 330 bp, Homo sapiens
accacatatggtgactggcacaagctactgagatatcagataactttttgtcaacatatctaaagagtttatatcacgcacagtttaaaatcatgatgagatgctgatggttggacgatattcatgtcatagctgttgcctgatattaagataacacagttgatccatgattaaccatgccaagggaacatctcaatcagtaagagaacatctcagccagtgtcatcttgagaagagcatcaacagcagagggagcagaaggaggactgtctgggcttggagactcggtgcaaccccacactcccttgcatactcctcaggatggtaggc

SEQ ID NO: 602203 - DNA, 157 bp, Homo sapiens
cttcccccccccctcccaaaaaaaaaaaaaaaaaagccagggcaaagggcctggggtggcccttttttcttgccccagcccaccctttgggaacaggcagctcctttttccaaacttttttcccccttttttaaaaataaaggaactggccctttta

SEQ ID NO: 602204 - DNA, 431 bp, Homo sapiens
tgccctagggcattaactgcgtaggagtaggcagcgggaagaacctctggccaccgatttagatgcttgagtctggctaacacctttatggttgctccccatgtgatgtccgaaactcttcccatgggccttgtatctcacccctaagtatatctacagtcctgctgtcaagattgaatacatgaaaacccaccacatctgtgtatggtacgagatcccagatgcctgttaagctgagtgaaagtccatgctgtcttttaaatcactttatatctacttaatcatcccacagtaacccgagttgaacaagttacttgggtttctcataaatgattatgcacgtgctgaacatatcggaaagaaccacaccctctcactgatgaacacgtgggcagttctcagtgagagtctccgtcgaactggggatctct

SEQ ID NO: 602205 - DNA, 379 bp, Homo sapiens
acaactgtaataccagctcctcaggggacatgcatgagcctgaggcgcgggaaagcatgcagtgagccgcgatcacagcactgcactccagcgtggccacagagcacgactctgtctcaaaaagaagaaacaaacaaacaacaaaaaacacagcacagaagggtggtgctgtgggcagaggggtatttccagtggaatgggctgtaacagttatctcaaggttggtcacgatcacaggaccatggaatgctggggcccgaaggcactaaggccacagcatcaacatctacttcccagagcataacaccaaggcccagagcaactgggtactgtgctgggagctacaatgagtttgaggcagagtctgggctaaaaacca

SEQ ID NO: 602206 - DNA, 857 bp, Homo sapiens
acggacaccttcgaggcggctccgcccgcgcccgcccccgcgcccgcctcctccgggcagcaccacgacttcctctccgacctcttctccgacgactacgggggcaagaactgcaagaagccggccgagtacggctacgtgagcctggggcgcctgggggctgccaagggcgcgctgcgaccccggctgcttcgcgccccatgcaaccgcacacgccaccgcgccgccaggcgcctgccgaacgagctcaaggcaggagcccgggcttcggagcaccgctgtgactagcgaagctggcaaggacggaggccgggggcgcctgggcggcagagcgctgggcataggcgggcgggcttccctgtaaccgccgctgcgacgactgtacctcagggatacccagggctggtgaccgaagcgggcgaggcgaagccgaggaagcccgtactacccagcgatccgtccctacgggtcccagccgccggccacgggacagcggcgcggaagcgcccggggggaacggcccaagggagggcgccacgaagacagcccatggcgatcgccagcggaggccagggagccagggtcagaccccgtacgacaggggtccaatgaaggccacaggcgcaagcaaggaccccgggcggcgccacggcaacgaggcagcaccgaggtaacgacggggatcccgggacggcgaagcggcaacaaaggattcggaccggtggcgcgagaaaaagcccggcgagagaaggggccaaacgatgggccgcacgcccaggaggcacgccggaacccaagggttccatgggaaggcgtcacggggccggaacagccaagcggacttggcggaaagaaag

SEQ ID NO: 602207 - DNA, 360 bp, Homo sapiens
gtgttcccaagcttgattgccacaatcaagttggtcttctccctggcgcatgcacggatggttcaacgtaatccattacataaacagaaccaatgacaaaaaccacatgattatctcaatagatgcagaaaaggcctttgataaaattcaacaccccttcatgctaaaaactctcaataaactaggtattgatggaacatatctcaaaataataagagctatttatgacaaaccctcagccaatatcatactgaatgggcaaaagctgggagcattccctttgaaaaccggcacaagacaaggatgccctctctcaccaatcctattcaacacagtattggaagttctggccagggcaat

SEQ ID NO: 602208 - DNA, 118 bp, Homo sapiens
cttgtccttcttggatgaataaggtctgaccttccaaactttcacaacacactgagcatctaagcaagtgtcatgccaggtgtagcccagatgcttccagtgaacatgtcaccacgct

SEQ ID NO: 602209 - DNA, 407 bp, Homo sapiens
cacggggactatcccccgccagctaagcacttgactctcttggacggcgggcgatgactaatattagccgtagggcggcaaaaaaattctctcggccgatttccggtgggcccgaaggtcgtcttgagccccgcatgaacaagctcccgtcgggtccgacacaggatgagccgccgcctacagcggcggcgctcacctgtcgcaccaaggcgggcgagccctactgccggcaccagagcgtcgaggccgaaatttccgtgggccggcgccagccccacaatcggtggcctagccgcgagtggcgtctccaaaccctggcccatctcatacgacttcggtcgcacgacaatgatccggaggtgttgggccgtctgactcacaccttcctcgaacgcgtcaagccgatc

SEQ ID NO: 602210 - DNA, 575 bp, Homo sapiens
  misc_feature (178)..(178): n is a, c, g, or t
  misc_feature (182)..(182): n is a, c, g, or t
  misc_feature (190)..(190): n is a, c, g, or t
  misc_feature (195)..(195): n is a, c, g, or t
  misc_feature (206)..(206): n is a, c, g, or t
  misc_feature (217)..(217): n is a, c, g, or t
  misc_feature (225)..(225): n is a, c, g, or t
  misc_feature (234)..(234): n is a, c, g, or t
  misc_feature (303)..(303): n is a, c, g, or t
aacgttactgattatcgtgggaaatccttggtttcttgcttccacccactcgatttcacatctgtgtgtcgactgaacattctcgcttttggtgtacgcgttgcagaattcagatctcgtgcctatctggagtggtacgcatgctctgttgcttcccagtggacccttgcggcctggnttantacccctnaaganaaggaggactngggccaataangattcccnttctttcanatttgacccatcagatctcaaaggactatggtgtatacctagaggactcaggccacactcttagaggtntcttcattatcgatggcaacgccatcctaagacagattactttgaatgatcttcctgtgggtagatcagcggatgagacactacgtttggttcaagcattccagtacagtgtcaaacacgcaagcgtcccgccctgctggctggaatcctggtagtcaaacaataatcccagatccaggtggaaagctcaagtatctcgataacccgcattgagcaagacttcttccagttatgatgcttgaaagttctcaataaagttctcggtttcatta

SEQ ID NO: 602211 - DNA, 175 bp, Homo sapiens
gatcgatctacaggatctttacctggtatcccacccttgctggcaggtataagtcatgcccacctgcgcaggacgctgtggggagcatttttctctgagttgctaagcagaacccctgatgggcggtgagcagaggaaccacagaaccagccacgggcctcaatggctggcagcg

SEQ ID NO: 602212 - DNA, 160 bp, Homo sapiens
ttgctcatctgcgatggaacgctttctcagaactggagaaatagaactgtgcacggaacagcttccagaagcgaaaaccaggttgaaaggggaaaaataaaaacaaaaacgatgaaactgctttctgggggttggttacttagttaccttgcctttgcat

SEQ ID NO: 602213 - DNA, 284 bp, Homo sapiens
  misc_feature (2)..(2): n is a, c, g, or t
  misc_feature (15)..(15): n is a, c, g, or t
  misc_feature (201)..(201): n is a, c, g, or t
cnagtggcatgatcntcaagtcactgcaacctccgcctcctgggttcaagcagttctcttgcctcagcctcccgagtggctgggattacagatgtacaccaccacacccagctaaatttagtatttttagtggagacagggtttcatcatgttggccaagatagtcttgatctcttgaccttgtgatccgcctacctcggnctcccaaagagctggggttacaggcgttatctaccgcacctggtgcaaaccaggttttctgaaagttaaaaattatccagccg

SEQ ID NO: 602214 - DNA, 908 bp, Homo sapiens
tgaccacagtaacatgggcaacaagatgctgcaggccatgggctgtgcgggaaggctctggcttgggacgaaatgtgtcaaggcattactggctcccgattgaggctcaacgttcggctaaatgggagctggactatggagccaaaggcagcgcatatggtttgtcgggcgccgattcctacaacagatgctgtccggaatagccatgtttgcccggttcactgacgctggcagtgagagagagcagagagagagagatgacaacggagcacaactgaacgtggtccatctcccgaattcgctgtaaccggcctgtctctttaacgggcatgccttgctgcctgtccactagatctaagggtgaaccacttcattctgcagggtatctccctccacaccttacagaagttccccttatgtggagtagcctggtgaatggccttccttcccgccagagggctcgtgaacagaccggagaggacagtggactcgcgaagtactccagtgtacactcgtgtacatgtacgcgtgtgtccatgtgtagcctatgtcgaggtccctcagcccctcacatatcctaggggatacggagactgcttgtacacgtggtactgctgacaccacaagccacctctgatcaatcggacgctgaatgtcccatcttgcgcacaccagccatgggcactaatcggcaatcttacccaattcgggtccccgtccaccttcgggaacacctctcccagccccaaggtcggccccaaaataccataggcaccctttacgccccaggcacaaagccctgtaccacgcaccaccagcaccacgccgcaggcgccaccccacacagaaaacaccccacgggtgcggccccaaacgcaacaccgcgaaccccacgcacccggcggtac

SEQ ID NO: 602215 - DNA, 104 bp, Homo sapiens
tgctggtgacctcgcggctcgggctgtggctccaggtggagccaccaggctgacagataaggcagtgaaggactattccgcttaccgttcttcccttctctttt

SEQ ID NO: 602216 - DNA, 100 bp, Homo sapiens
gtgtacccgttgggcacgcaccgtccagttcgtccctttccagcttttacatgtgaattgctgcgtaattgttcggacccgacacggtgcgttggcccaa

SEQ ID NO: 602217 - DNA, 454 bp, Homo sapiens
  misc_feature (348)..(348): n is a, c, g, or t
aaccttgtggccccctttggcccggttttttttaaattggttcaggttttggcaaggcggtccgatattgtgggcgcttaattgtggcgctattttggcctctaatgtggggcctctatttgtagaattcctattggccacttcttttgccacggttttaaccgggaaaaccctgggaatccccgagttatcccccttgtgaacactttcctttttgcccctttgggaaattcggaaaagccccgaacggtccgccttttaaaacttttgccaactttgatggcccctggaaactgaagggcttttttttgggtaaaatttggggatactttttggtaaattgggcgnatttctaacccattgtgccccaattgggcaaattccgttaaaactcctttgaattccccggattgcgccagaatggggttccagtttgaaccaggggcccctttta

SEQ ID NO: 602218 - DNA, 762 bp, Homo sapiens
gggccaatgggtcttttccttttcctttttagaaaaagagtaaaattctactcgatgaacattcagcagcatggtgtgaagctattatggccacattctggaaatcattgcattcttccaagcaaagaaataagaaaatcttcccaaacaaatgtcagaaactttaccacactgtcatacatgctgcctgtaacatttgtcttttgttaattttttttttctggctttcatctcaagtgtctctcaagttttggcaatttcaagtcttctagtttccatggaaataggaaacaatgatctctgggagattaagagcggggagatatccactctaatggagttctagagttttcttcctttgatagtatttgtgaattgagagaatgttggtgtggaggcagggcttcggtgtcatcaacaaatctttatttttgtgcctataatgcatcaggcattgttctcttccaggaatgcctccacctccaaactgctacattaaaggtaaacatgctctcccagatgtgggctctcaggtttattcttaagtgaaattcaaattgttgagcaggaactattagctctgtagtgagaatctttaccttttccctctaggcaacctcaagcacttcagatattttatagagctctttgtgacactcgggttacaaagaaccatggtgtatatacattgttaattttatttttttattatctatttcacaaggaaataaaaatctcgacttccagagcaagacaaaaaaa

SEQ ID NO: 602219 - DNA, 459 bp, Homo sapiens
  misc_feature (49)..(49): n is a, c, g, or t
  misc_feature (51)..(51): n is a, c, g, or t
  misc_feature (222)..(222): n is a, c, g, or t
  misc_feature (225)..(225): n is a, c, g, or t
aaaaggtgaggggggaaggggccccgtgtatagtgaggaacgccccccncntattttttccgcggaaagaagggtgggccggggggttaaaaaaagagtgaatttttttttaatttctcccccttaagagaaaggggttttgggaggccccctttggtggggcccgggaaaagtggggaaaaaggggttttttaacccctttggggtccaaagattcccctnaantgccctttggccccgggataatatggggttaattgcccccggtttttaaaaaaagccccttaaaaaaaaggttttgggaagaaaccctaagggggggttattggtccccccccccaaattagggggggggggccccccctttttttggtgcaaaaacggtttttccaaggaaaagggggtttggtaaccgggtgggggctaaaaaatagggaaaaaacccctttttttttttga

SEQ ID NO: 602220 - DNA, 765 bp, Homo sapiens
tgtttacctgcgcaggagccgcaggagcgtaggcagtcatggctgcccagccggaatggcatggtcttgaagccccacttccacaaggactggcagcggcgcgtggccacgtggttcaagcagaccggcccgtaagatccgcagacgtaaggcccggaatgccaaggctgcgccggatcggtccgcgcgccgcgtcgggtcccatccgggccatcgtgcgctgccccacggttcggtaccacacgaaggtgcgcgccgactcggcggtttcacctggaggactcagggtggccggattcacaatgaatggtgtgcccggacatcgtgatttctgatggatccgaaggatggcggaacaaggtccacggagtccctgcaggccaactgtgcagcgggcctgaagggaggtacctggtcctaaactcatcctcttccccaggaagccctcggtcgcccaaggacaggcgagactcagttctgcgtgaaggaacgtgaaagctggcctagcacctatcttgaaccggactcaggtcgatagcccggtcctggtaacgttctatgatgagaggaagaagaggctcgagatcatgcacgtgagcgaaggatgaagcaattttccaatagccgttcgtctaagtctaccgttataggccgctgtgccaacggccctggctctttctggcattacgggcaaaggaagatgcgcaaggaaggcccgcagaacgaggatcgttgacaaggaatcgtggataaatgccctacctg

SEQ ID NO: 602221 - DNA, 1002 bp, Homo sapiens
tatatgcattatggaacctttatttttcatgtgattctgtacataaggagtatgagagtaaccctttacaaatgtcattccatcactgaaggacagatcttctgtggaaacaaaatggtctacaaaggtatccgccctgcaataaacgtggctgacagtatctcgtgtcggatccggtgccaaaccaggggctatgaagcaggtaccaggtaccatgaagctggaatgaggctcagtatcgcgaggttgctgctttagcccagtccggatctgacctcgatgctgcccatctcaacaactttcgagatcgatggagtgcgtctaacatgagttgctgaagacaaggaccgtattctcccatggctattgaacaacacaagtgggctgtcatcatatgacgggcggtaagcgggaaatctatgaatcaaaactggcgcccaccaagatcacaacaggtttcgaaaatcgcactcactagactccaatgtacgacagccacacacaccaaagccaccgcagggaccaccaacacagagcccgacgccaaagatccagcaacaccccaaaatgccaccacgccagcaaaacgagactcgtacaaaagatccatcaggcccccggctcagaacctcaaacccaccggggcaatcccacatcaacactaacacaaccacatacgccaccaaggtcccagacaactacggcccatccggacaccgggtcacatcaccagcactcctgtttgatacagaaaccgaccattgaacagaacacaaggtccaccacagtgcctacagcaacacaaccgccaaacccaaccgtacgcgacccacaacccagacacgagcacgcgaacaaccaaaaaaaagcaggacacctcaccccaaatcccacaggacacacgacgcccacccccaaacacaacccacgagaaataaacaccgcagagcacaccacaagcacaggacgccgtgaagacgacacaccgagtcaacacaagca

SEQ ID NO: 602222 - DNA, 221 bp, Homo sapiens
tttttacccccgggtccccccccgggtccccggaggggtggggaagcaatgaccttgcctgccccgttttttaaccgccccatccccccccctttattgaggggggggggaaccccccccgccagtttttgggggggaaacttttaaaaggttgggaaatttttcccaaaagattttttttcaaaaggggttaaaaaacaaaaaaaattttttttttttta

SEQ ID NO: 602223 - DNA, 209 bp, Homo sapiens
taagattgtacagttgaggggatcagatcatccgtgcagtacaatacttggtacaagttcaataagcccggtacgcttccatcacacccgccagaccattacggaaagctgggacaatggaagagttggggagatttcttaggcgtggtcaatacgtatcccgtcaatgaaaagattgactggcgtccatataacgaatgtttagctta

SEQ ID NO: 602224 - DNA, 111 bp, Homo sapiens
gaggatcccggaagcacgactgcacatgattaagggtacagatgcagcctcatttccaccttttgtgagaaaagccaggtatgcagttcttttcttctgatatttgcaggt

SEQ ID NO: 602225 - DNA, 490 bp, Homo sapiens
accaggatacagggacaagcctctccacccggctccctagagccattagaaagctcagcacagcagggcagtggtggcacacgcctttaatcctagcacttgggaggcagaggcaggcggatttctgagttcgaggccagcctggtctacagagtgagttcccggacagtcagggctatagaaaccctgtctcaaaaaacaaaaacaaaacaaaacaaaacaaaaacaaaaaactcagcacactaggatccaggttcctcataactagcttgatacccagcgttgcttggattggccctgggcctctttgatctgggtcccagatgctatggataccaccacttccaccccaacagtctcactatttccctgcattataagctgtgagaggctctgggctatacctctgctttccctgccccaacccactgtttccttggtgtccaagggagccaaggagttgaaaccagacggggctttgtgcttactg

SEQ ID NO: 602226 - DNA, 730 bp, Homo sapiens
catatgtacaaatcaccatattcttcaggaactatgatgactggcgtctggaaagaataaagagctctgcagcagggcgatggatggaggtctcagtgttctggtgatcttacagattggttgaccagctttcagcaggaagaagactagaaagaggagatcgtgaagaattcataggactaagaagatagaagaatttcagatagctgtggagacaatatggtttagataattctggaggatacatagactatacaactaatttacggacagagtagtggtagagtagaagtatataggggaggaatgcctgcatctgaatttggcataggagagatcatgctgatattgagtggaagtcattagctgcttggattttgagcgatggataatcagcaaagactttcggaagtaattgaagcagttcatgaggtattatcagagatgatgccagcagatgtgagacgggtgtggctttcttcagtggtggatcactttcattgatctttagcgcgaacaaaggctggggttgtggttacgagaaatttccatagtgatactttcatcattattacgagaatgatggttacagcgatgcttgaaaggtatgtgattccttgcattccaagataattcatctatgatgaacgatgcatggaggaaggttggatcctcagggggcgtctcagtaataacaggttacagggaggaaggctggattggagcgtgt

SEQ ID NO: 602227 - DNA, 161 bp, Homo sapiens
gactctacaggatccccagttgactcgtaatgataaatacagcttatttgatggctatagggctatcagattgtctacttttaaatttatgtatatctttatttgagatggagtcttgctctgtctcccaggctgagcaacagagtgagactcgctgtttc

SEQ ID NO: 602228 - DNA, 134 bp, Homo sapiens
  misc_feature (27)..(27): n is a, c, g, or t
  misc_feature (114)..(114): n is a, c, g, or t
cgcaaggaaagttgaaattttacccangcatattatagcacggctaaccctataccttcctagaaaaatgaataaccaggaaatacctttgataagggggtacctaaagcttangcccccccaaaccagggggg

SEQ ID NO: 602229 - DNA, 672 bp, Homo sapiens
ccccatgtgatctggatcccctgagcggtcacacctgctccccgaattcctgctctgggagcccgagccctctgccccaggctctaccgagccccctccggccgcctcccagaagaccagaagttgcccctgggcccgcggggcatctcttggtgtagccccccgcccgccggaggaggcccccgcctgcgcccggtctccagcgcacgaccaccctgggcgggcccttcgctccggtgggcggggcccaggtcacgggagacgccccccggctgcctgggcggggcgtggcaatccgaggggagccccgcggacattccgctctccgcttccgtcccgcggggcccactcggcgttttggggccgcacgccgggagccctctcggcaagatgaccttgctacagaagctctccctcaccttcccccccacgccccggcccaggcaggccccccccccccgcgtgtcttccgtgtcaagccgtgcttgagtcctgggagcccccgagccccacccagggaccctcgaggccccatcccgttatccgagacccttcctacccccccttcctcggcgctgggatctatttttgcccacagggggggggatgggggggctggcgccaccgaacctgcacatttcaacttgttactcccataaaccgaagtgacca

SEQ ID NO: 602230 - DNA, 314 bp, Homo sapiens
taaattcgcggccgcgtcgacggctctttttagtgtcaacccaaatacacaatcaatagaggttcacgcggccgaaccggactattaaatcaaaaccttcgcacgtggtttttttagcgtccattcgtcaatcatatccgcccaatcctgcaacatcgcccgacgctgatcgcggtattcagccttgttgtaaacggcccgtacccccttctgctcgtgcgcaaggcacttctcaatccagtctgagttgtaacccgcctcatgcagcagcgtgctcgctgtgcgcctcaaatcatgcgggccgaacttgctta

SEQ ID NO: 602231 - DNA, 107 bp, Homo sapiens
tatgcagaccttgatagtaatgacaccatcctggaagtctggctccgaggagaacactttctctctagaggaggttgacacgctcggcctgcagggacaccagaact

SEQ ID NO: 602232 - DNA, 310 bp, Homo sapiens
aatcaggctacacaacagtatagtgatggcgtataagtcactttgccagggggtcaataggcggcttctactcatcagtaacaatgcataaggagagtaaattagcgaagcgacatctcaggagagaccaaaatacatcgacacgactaaaaagctactttgtgaatcaggatgagggagacactgaaaacaggaaatcctttacggtggggcaagatcctggaactttggtaacggtacagaacagtgtagtgaaaccaaggtcagacagacccacccaatcaccacataactaggaaaaactgtggaa

SEQ ID NO: 602233 - DNA, 369 bp, Homo sapiens
acctcctaccccacgctcctaccccacgaaggaatctgccaaagaaagaaaatcagtgacattccaattcctgaaagagctccaaaacgtaagttagatagacttggaatgtgtgctactacaaagaatagtttacactagaaagtatattttatgtcaatattttaaatatacatattttgagattaagtatatgctcagctttcactaggttttggacaacccccaaatctcactggcttatgacaaacatttatttctaattaatattacatgttgtggctgcagtttggctgtcgtagttttatgtgtagcgaaggaatagtccgtatttgggaaagatttttcttgtgacgtggggtaggaggt

SEQ ID NO: 602234 - DNA, 252 bp, Homo sapiens
ccctaagggaggctatgtacatatggagccttctagaaaatgacctttcttaatatcattgtctcaggtgctaatgacagttgaagagaaatgattatttttctaacaccatttctttggttcctaaatagaatctatttcaaccaatttcaaagcatgagaagagagcaaaatcttaagggacagaagaagcttgtaatatgttgtgttagaaatgcatattttattcagcttttttctgagctggcttca

SEQ ID NO: 602235 - DNA, 485 bp, Homo sapiens
ggtgacctagaggttaccggatggcgacatttcaagtatactgttcaatggcttttagtatattcaaggttgtgcaaccatgccacaatcaattttagaacattttcatcatcctgtaaagaaacctggtactcattagcagccagtcctcatctctctaccttttccctaactccccaaccttaggcaaccactaatctactttttatctctagggatctaccttctggaaattccatataagttgaatcatgcaatatgtggccttttgtatctggcttctttcacttaggatcgttttcgagattcatccatgttgtagcatgtctaacaacttcattccccttttttttttggacagggggtctctggtctaggtggaagtgcgggggtgccatcatcgctcattacagcctcaattcccgggatacaagcagcctcttgcttgggctcccaggtagtgggactacggggttgtccaccac

SEQ ID NO: 602236 - DNA, 858 bp, Homo sapiens
gagctgtgatcgtgccattgcactccagactgagtgacagagtgagactgtgtctaaaaaaaaagtttgaattaaaaaaaaaaaaaaaaaagtcggtgtgcccgggggtcatgcctgtgatcccagatttcggaggccaaagggggtgggattacctgaggtcaggagtttggagaccagcctgaccaacagggtgaaactccgtctctactaaaaatacaaaaattagccgggaataggggcgcatgcctgtaatcccagctactgtgtgaggctgaggcaggagaatcccttgaacccagaaggcagaggttgcagtgagctgagatggtgccattgaactccagcctgggcaaatgagcgaaattccatctcagaaaaaacaaaacaaaaaacaaattcaaatttagcatgataggatcaggctacttagatcacgttctgagaggtatggtaccatagggtaatttttgatagtgaaatgtaactttgaggtttgttatatataaacatcttttccctgtggctaagggtcttagtatcagcaaatggtaagtcagttagacacatcaaatggcttttaaacttagtgaatatgaaagtgacttgggttcattaagaagaacggttattatttcagacaaaacaagtggttgagggtcggcgaatttgtcactggcctaatagcatttagatggaggtaaatccagttaaaattcggagggtcaaatatccagggttgatgaagatttggaaagcggtgtcgaggaaagggaaaggaagacggatagggaggaaaaaaagaaggttgagtagggtgatagagagttaagtgtgtttaacacgtgtttgcgtgtg

SEQ ID NO: 602237 - DNA, 220 bp, Homo sapiens
ggtcgacatcatgcagtggaatgcagttatatttggaccagaagggacaccttttgaagatggtacttttaaactagtaatagaattaactgaagaatatccaaatataccaccaactgttaggttttaatccaaaatgtttcatccaaatgtgtatgctgatggtagcatatgtatagatatccttcagaatcgatggagtccaacatatgatgtatct

SEQ ID NO: 602238 - DNA, 201 bp, Homo sapiens
  misc_feature (62)..(62): n is a, c, g, or t
tgtagatgtgtgtgtggtgtgtgtaggggtgtgtgtaggtgcatgagtgtgtaggtgtctcncccactataagaaacaggtatcgcaccgtggccagaatggggtaggtattcacagagagtggttatcaaggtgtctcactttgtcttctgatcgttttccagagattcctgttcataatgcagccactgtatctctact

SEQ ID NO: 602239 - DNA, 81 bp, Homo sapiens
aatccttgggacaagatctttctaaaatggcaattatgtactggaaagcaactaatgctggaccctttgataaagaatctt

SEQ ID NO: 602240 - DNA, 348 bp, Homo sapiens
gctcctgaaaatgttattaaataattgtttaggccgggcatggtggctcatgcctgtaatcccagcactttcaaaggctgaggcaggcagatcacctgaggtcaggagttcaaaaccagcctggccaacatgctgaaacctcgtctctactaaaaatacaaaaattagctgggcgtggtggtggatacctgtaatcccagctacgtgggaggctgaggtgggagaattgcttcaacctgggaggcagaggttgcagtgagccgagatcatgccactgcactccagcctgggcaacagagcaagactgtctcaaaaataaataaataaataaaattgtttaaatgaaaa

SEQ ID NO: 602241 - DNA, 316 bp, Homo sapiens
tactgaacttagcaagcgtaattaggtcacggttcatgagggactgaacgcacagagccgagaacgtcccggagatggggtaccacgaagggtgtattctcatgcacaaccgcagctcggaatcacagccacacacacatcccacctctaatgctttaaaatggctgagtaccgcagcccgactcggcatactagctccctgctcatacctgggccatgtcagtacagtagaattcgcgcgcggctagctgaacgcttgggacaactcactcgtcatgccctgtaacctgtagcccatctccatacagtgtgggac

SEQ ID NO: 602242 - DNA, 196 bp, Homo sapiens
gtatatggtgtaactgtcccctgagtttgggggctgcactcccttggagatggaatcgttactgtgagaacatccctgcagtgggagggattccctgggcgaagggattctgtgtgtcgtgttataaatgtggccccttacatccaggcttgctgctgtttgtgctttcttccccaaatttttattttaaggggta

SEQ ID NO: 602243 - DNA, 784 bp, Homo sapiens
  misc_feature (632)..(632): n is a, c, g, or t
agcggggcgctgcctcgtctctgctacccctggttgggcgcgtcctgcgacagcggctccttcgggcaggccccgcggtcgcttgagccggccgaaggaaggcgttcacgttcttttgctcgcactggccaaggccgtgacgaccaagcaagggtcgagaactcccatcagacgtgggtcggaacgacgtgtgaagccactctgcatgctactagcctacgacgtgagtcacaaggaccgagtcatagagcactggcatctgtaaccttagaacttgctagtgtcgagcctgaattgcatgagtcatggtacccggcatcgtgcgaccccctgtggtacagacggttgaccgtaccctcggagcatggagctttctcactggaggtgaactggttagcgagaggctggaagtgaaataaagacgcgctcttgtttcaggagttcgtcccctgctgagataggaatggcagagccaccttcctcatcgtctcgccatcactgcagacttaagcgtataatctaaataagcctaggcatctgtcgtaatagtttcagataccgctagtcgtcagatcaagtcagtggcgtatggcagtcagttgcacgtgtcgggtcacatggcgtgcggctgnaatgcaccacttggtcctgcctttgggcccattccatgctgagtgtccctggggcagaagatctcggatcctataatgggccagtgatggccagacagaaacatgaagtcgtgctcggggcagggtggtgccatgcccaaggggaagaaaac

SEQ ID NO: 602244 - DNA, 294 bp, Homo sapiens
tcctgactgggcgataccatgtctcgcgctgttagtagaataggatgggagtgtacatgtctctttgatgttctggtttcctttcctgggaatacaatacccaggagtgggattgctgcatcatatggtagttctgtttttaatttttcgagatacctccatattgttgtccatagtggctgtactagtttacattgtcaccaacagtgtgcaagagttcccttttctccacattcttgtcaacatttgctgtcgttcatctttttgatagtagccattctatctggggtgagg

SEQ ID NO: 602245 - DNA, 823 bp, Homo sapiens
  misc_feature (350)..(350): n is a, c, g, or t
  misc_feature (730)..(730): n is a, c, g, or t
  misc_feature (744)..(745): n is a, c, g, or t
  misc_feature (751)..(751): n is a, c, g, or t
  misc_feature (760)..(761): n is a, c, g, or t
  misc_feature (764)..(766): n is a, c, g, or t
  misc_feature (769)..(769): n is a, c, g, or t
  misc_feature (787)..(787): n is a, c, g, or t
  misc_feature (792)..(792): n is a, c, g, or t
ctcaggtcgcggggcgcctaggcctgggttgtcctttgcatctgcacgtgttcgcagtcgtttccgcgatgctgcctctgctgcgctgcgtgccccgtgtgctgggctcctccgtcgccggcctccgcgctgccgcgcccgcctcgcctttccggcagctcctgcagccggcaccccggctgtgcacccggcccttcgggctgctcagcgtgcgcgcaggttccgagcggcggcctgggcctcctgcggcctcgcggaccctgcgcctgtggctgtggctgcggttcgctgcacaccgacggagacaaagcttttgttgatttcctgagtgatgaaattacggaggacangaacaatttcagaagcataaaaaccttccctaagatgtctggaggttgggagctggaactgaatgggacagaagcgaaattaggtgcggaaagttgccggggaaaaaaatcacggtcacttttcaacattaacaacagcatcccaccaacatttgatggtgaggaggaaccctcgcaagggcaagaaggttgacagaacaggagcctgaacttgacatcaactcccaatttccgtggttgaagttctacacgaatgatgatggcaagaaggccttgtgtgggactgtcattatccagaggatgaggttggccagaagacgagggtgagagtgacatcttctctatagggaagttaggtttcagtccactggcgagtctgnatggaggtctattnncactcnacaagattnntgnnnggnttattgacactagggttnctgcngcgggggggacaacttgggagagcgggggcc

SEQ ID NO: 602246 - DNA, 160 bp, Homo sapiens
ccggtcacgttgggggcagtagtgtgcgcctgtaatcccagtactcaggaggctgaggcgggaagaattttttttttttagagtctcactatgttgctcagactcagacggttttttggttttgttttgttttgttttgcccaacggtgaccggcgactt

SEQ ID NO: 602247 - DNA, 614 bp, Homo sapiens
cactttaatggtccaagtacaggcgtgacaagagatctgaaatttgtgcaagggctgttaagtttcttgatatatgtacaatcttttgagagtctagtcccagcagtatagacactaaagctcgagcttggccaaagatacttatttatacaagtgatttctaacacgctaaaagagtacatttacatcagttccgaagcacggcatgtcctggtcattcacaaggctcctgtgtgagcaagattctgctccagctacgacatatatgcttaacaggccagcaggctgctctggatttggtttcagacaccagtgaccagaagaagccagttttgcgtgtgaggtgtgtgggcccccgctgccttgggcctgctcaccggggtggattgacccccgtcgggtcacagcctgctttcacttctgtcttgtgggcctattctgcatctgggctgttgggctctcctgctctctgtccctcagtcacgtcattgtctggctgtccggtgctggctgcactctcatttgtgaggaataccccttccttcttcttttctcccaatacctccagccccatcatcctgagataatgaagcggtcattcttaggcacaaaag

SEQ ID NO: 602248 - DNA, 814 bp, Homo sapiens
gtaaaagtaccatttgcttgctgtatccctatgtcaaagatattaaggtagcagcagtcttgaactgtgaaatttgtcacagaggaatcgtgtgctgtcaactgacttaattagctgaattatctgaaaacagctcaatctataaagccataccaagaatattctgattgctagactgccacttatctcatagtgcaaagttaggaataactatactatctaatctgcagagagaggactgaaatgtacatgtcaaggaacgataatctgcttacatgaaatatccaagaaggagctcagaaaaatatggactagagaaggttcaatactgtcagtccgacaggaagccaatgcaccagtccagctgtccagagaagccagcaaaagtagcagagagcaaacaaattcacagaactcaggaacaggaaacaagtcctacctggcagcgaagcgcttaacggaacgctgaggacaacatccgggcagatgctgactggcagcgaaagggacccactaagggagcactctctgcggacagcgctcttacctccttgcccctccacattcctgtgtggcggtgcatgagagacgatgtctgcagtggaacacagcttacctcagtcatgacacgcaaggactgcttaaatatcagtcactggccatggacacacaatcacaataaatctggcatcagacgctgaggcaccaaatttgcttcgcaagaccatggatcattataaaaaccgagctcttgacctgacaacatatagaccaaggaataagcatatacacattactcgggagaatgtgtgat

SEQ ID NO: 602249 - DNA, 107 bp, Homo sapiens
tgctcggtaccttacctcccaaagtgctgggattacagccaccatgcctggctaagatgtattttggagttcatgtgatacttatgtaatacgctggaatggaattg

SEQ ID NO: 602250 - DNA, 837 bp, Homo sapiens
  misc_feature (16)..(16): n is a, c, g, or t
  misc_feature (23)..(23): n is a, c, g, or t
  misc_feature (26)..(26): n is a, c, g, or t
  misc_feature (43)..(43): n is a, c, g, or t
  misc_feature (46)..(46): n is a, c, g, or t
  misc_feature (55)..(55): n is a, c, g, or t
  misc_feature (67)..(67): n is a, c, g, or t
  misc_feature (69)..(69): n is a, c, g, or t
  misc_feature (81)..(81): n is a, c, g, or t
  misc_feature (104)..(104): n is a, c, g, or t
  misc_feature (107)..(107): n is a, c, g, or t
  misc_feature (110)..(110): n is a, c, g, or t
  misc_feature (132)..(132): n is a, c, g, or t
  misc_feature (160)..(160): n is a, c, g, or t
  misc_feature (199)..(199): n is a, c, g, or t
  misc_feature (209)..(209): n is a, c, g, or t
  misc_feature (228)..(228): n is a, c, g, or t
  misc_feature (253)..(253): n is a, c, g, or t
  misc_feature (272)..(272): n is a, c, g, or t
  misc_feature (274)..(274): n is a, c, g, or t
  misc_feature (299)..(299): n is a, c, g, or t
  misc_feature (304)..(304): n is a, c, g, or t
  misc_feature (309)..(310): n is a, c, g, or t
  misc_feature (330)..(330): n is a, c, g, or t
  misc_feature (332)..(332): n is a, c, g, or t
  misc_feature (339)..(339): n is a, c, g, or t
  misc_feature (487)..(487): n is a, c, g, or t
  misc_feature (560)..(560): n is a, c, g, or t
  misc_feature (562)..(562): n is a, c, g, or t
  misc_feature (586)..(586): n is a, c, g, or t
  misc_feature (658)..(658): n is a, c, g, or t
  misc_feature (679)..(679): n is a, c, g, or t
  misc_feature (682)..(682): n is a, c, g, or t
  misc_feature (704)..(704): n is a, c, g, or t
  misc_feature (706)..(706): n is a, c, g, or t
  misc_feature (716)..(716): n is a, c, g, or t
  misc_feature (730)..(730): n is a, c, g, or t
  misc_feature (743)..(743): n is a, c, g, or t
  misc_feature (766)..(766): n is a, c, g, or t
  misc_feature (834)..(834): n is a, c, g, or t
tccaaacccaattaanaaaaccnctnccgacgtggtatccacnaancaccacacngcagccaacccngnccagccttggcngtgaggcagtccccggggcctgnccngcngaggccacaagagtcagacgcncagacagccggggtctgacgggcccccngggctggcccaggagggctgggtgtgtggtctgtgagcnaggggcaacnggcgcccccccccaggacnctggggagcccaggccacagcagancagaggccccaggcccccncnggcccatgggaatggcacgtggcgnccccngcccnnccccagccggggccccaccncnccccccnctggaggagacggaagccagcccagggcggagcccaagcctccgggctccggtggttccgccagggggacagcctctttcagcagccgtcgctccaggtatctctggcgtcggggtgcagagtctgtgggtcagtggtttgggctccnccccgtgaataagggtattgtctcccccacggccaccgtggtgacgtccggaggggcctgcagggcctcaatnantgtggcctcaccttctgcctcctntcttttccgctggacggagacgatcaccttgactacatcaccccttggctttcttcttttcacacaaatgantaggccaactgtggagcaaanaanaaaaaaaaaaaggctccctgananaaaccaccanacccagtgggagcngctggtcccagcnccggccttcgtcaccagccagcngcacttggtctggtgctgacattcctccagggtcccattgggagaaaaggtcccggggggcagttctnaca

SEQ ID NO: 602251 - DNA, 376 bp, Homo sapiens
actccttccctctctcacgtacggatcctcgtatcagagaaagctgagttacagatctgccctggctccactctgcatgctgtctaggcgagaagaaggagagtctgaagatctggcctgccgcctgcagttattcccggcgcgcgtgtgggagagttggagcgggctctctctgctgctctccacgcagcaccaagaaggccagcacaggttcaacaaggagttaaccaaagagagagacgccctcaggctggagcttatactatgaacaccctaagcactgaggacctgaagccagagaaatccgaattggaagagacgcttcgggtcctagtgactgagaaggctggccatgcagctcaacttggaagaattg

SEQ ID NO: 602252 - DNA, 172 bp, Homo sapiens
ggtaatatgattcaaagctgctaatgttctcattgccataaagactccgtgtcaattgtgtcgacctatgggattaatctacctactgatcccgagatcgtcgtctagctttctttgttgggtttctattctagaagattgagaagtgcatataacaggctgagagcagctc

SEQ ID NO: 602253 - DNA, 977 bp, Homo sapiens
  misc_feature (977)..(977): n is a, c, g, or t
ggcacaagctgttggatgagatagagtcgctgacgctgcggttcagtgaagagcaggagaacaagaggagaatgggggacaggctgagtcacgagaggcaccagttccagagggacaaggaggacacccaggagctgatcgaggacctccgaaagcagctggagcacctgcagctcctcaagctggaggttcggtagcagcggcggggccgcagcagcagcatgggcctgcaggagtaccactagcctgcagcgcgggagagctgaggctgtggagcatgtggatggtccgcagaggctgacatgcagggataagcgcaagctgaaggagcagaacagagggagactgaacgggcgagatcgattaaccctcagcatccagggccgccaagtagcctcttctccagagccttctctgagtccctggctgcagagatcagctcctgtctccgagatgagctcatggaggcgattcaggaagccaggaggagatcaactttccgcctgcaggactacaatcgacaggatcatcgtggccatcatggagaccaaccgtccatcctggaggtcaaagtagaggcaggaaggtccagcctgagctggattcggggactcaagcaccctggagtggttccgggcacgaccatgaggagccaggatccagcaggtcccacagtcgacagtgcccagagcatgagggaacctcggtgagcatgagcgggccgcaaagacgggctgccaagggccgaggtgcgagaggcaaggcaaagcaagaccagtcggcgtgcaagggatgaggcaaggacgaagcaccgaaccagcccggacagcgcacagcacagacagcgagacaggaatccacacacgcgggacgcacacgatacacggcgcgagcacccagacaggaaagaaaccggtgacaagcacgacaaggcacaagaaaaatggagaacacgacaccaccgatggggagtcccn

SEQ ID NO: 602254 - DNA, 415 bp, Homo sapiens
gtactctaagatccaatgaggtcggtgagcaataccttgtatggcggtagtcactgcttctctgtagcacgcatcacttgggtaaagaagttgatgtgggactgacgaaacatagcagatcttctaaggcatctgggaaggccgtcttccccgatggaaacgccgcagtgggagccgcagaggttgatgttagctctcggagatggcggccatgcgaatctggtccaaggcccgcgtgaagaaggctgcaaaagtgctgcagaagggcaccgtcctgttgcgggtggcacagcccaccgcgatgctcaccatgttctgctcagcaatgtagcactcgatgaagcggtccgggtgctcctttttgaagatctccgagaaggtggaatttttggtgtccccacccggacctcaattt

SEQ ID NO: 602255 - DNA, 240 bp, Homo sapiens
gatattgggaccgggcgacacacgaactacaatgcgccaggcacaggatgaacgaggtgagcctgaggaacctgcgcggtactagaaccagagcgaggacgggtctcacaccctccagaggatgtatggctgcgacctggggcacgacgggcgcctcctccgcgggtatgcacagtccgactaagaacggcgaggattacatcggcctgaacgaggacctgcgctcctggaccgccgcgg

SEQ ID NO: 602256 - DNA, 154 bp, Homo sapiens
ttactataaaacttagtactacatatacataaccctaatacgaacttaaaattcatcatacatttacttcattttttagctatgaccttctagtacatctttagcttcatagatattggctgctatatacggagatcctcctttgtcaggatga

SEQ ID NO: 602257 - DNA, 100 bp, Homo sapiens
tttttgggtttttttttcccccccaaaggggccccttttttttttggggggggccccccccccccaattaaagtttttttttgcccccttgggggggcca

SEQ ID NO: 602258 - DNA, 735 bp, Homo sapiens
ggttcctttccaagtgtcaaataggacacccatcttaccggccaatgtccaaaattacggtttgaacataattggagaacctttccttcaagcagcaaacaagcaactgcagggcgacaacagcaaacaccaacaatagtttcaagcaacattttttttttaacatcaaaaacacaacagggacacacagcgggaagcactggcacaaatctacaccctacaaggccagaacaggcaaagcaaactggaacgccacagcgcagatatataatgaaccccgacgctcagcgcgccgctacttactactctacttaattcccccttaacggttgaaactctgtgaactgaacatacacacacgggttgactgactatttcacctgactggtagaatcgaaagccccatgcaccgtacgccttctgttacatgaccgtccgctgggaaatagcatgtatctggtctctactgaccaatatattttaactgacctttctagatgccttaactattggcatgatcacgctagttctcataggctttagtattctctgctgtttaccgcatggacatcactattcctggttatactcaccaacgaaaggctagcgaggcggcgtcagaggtgctgggtgaacagagccatgagcccgcaattttatcacgcactctgactttctcaacagttcaccacaccctctctgaactcctctgttagccttactttaatccagtac

SEQ ID NO: 602259 - DNA, 277 bp, Homo sapiens
aaacgagctgggaaatcttaccccgcctgtttaccaaacctaccgagcctggtgatagctggttgtccaagatagaatcggtaggcaactttaaatttgcccgcagaaccctctaaatccccctgtaaatttaactgttagtccaaagaggaacagctctttggacactagaaaaaaaaccttgtagagagagtaaaaaatttaacacccatagtaggcctaaaagcagccaccaattaagaaagcgttcaagctcaacacccactacctaaaaaat

SEQ ID NO: 602260 - DNA, 347 bp, Homo sapiens
  misc_feature (302)..(302): n is a, c, g, or t
  misc_feature (316)..(316): n is a, c, g, or t
tgagaccaagtcttgctctgttgccaggctgaagtgcagtggtgcgatctcggctcactgcaacctctgcctcctcggttcaagtgattcttctgcctcggcctcccgagtagctgggactacaggcgcgtgccaccacgcccagctaatttttgtgtttttagcagagatagggtttcactatgttggccaggatggtctccatctcttaaccttgtgatccatcgcttcccaaagtggctgggattataggcatgagctaccgtgctgggccttatttttctttacctccagcctcctantggtccttccttantctggtctgtggggtatgcatactggtcccg

SEQ ID NO: 602261 - DNA, 210 bp, Homo sapiens
tccaggaatatattctttattgagaattgcatacctgtgtcagatgaaacatctcaggtaccccccaaatatatacacctattatgtagccacaacaaattttttaaataggctgggcgcagtggctcacgcctgtaatctcaacactctgggaggctaaggcgggtggatcacctgcggtcaggagtttaagaccaaccggcatttcga

SEQ ID NO: 602262 - DNA, 817 bp, Homo sapiens
tctgggttgagcccaggtacttaattggatgggtacttgacaaggggcggctccctaggcccctcccctcttaaaggggtctacttggaaacggtaaggaggggaaattcagtggggggggggaggactgattgtggcaggaactccccagcagggagggtctctctctctccttctggttgcctcttggcgggggctgggtgtggctccagggggctctatacctccttggagaggccagtgtgtgggccattgaggctccaccaacccgtgttttgctgttagccaaaatttcgctgtgctcatttaccaggaaagtagagtttgagcaaatgtggctcgtgtggagggcaatgtgccaagccccagcgctcaaaggtggagagagtgtgggtgttcgcgtgtttgaagtctcagaaggaaaaccacctggggtgctcagtgtgtagcccaggattgcccttgaaggggggccctccgagcgccgtggtttcaccacctttctgggagtgtcatcatattgggccaggttttccataaagcggcaggctcaggtccacacaggtgacacgtgggcatgggggcgaccacggaaggcacagtgccagtagagctacccggtcaggctcggggaatgacctgtgcccacaagcctgtgggcaaggcgccagataaaaggcaggggatagatgtcctgggaagagccccgggggccaatcaacggccaaacagttcccccggggggggggcgaatccacaaggctctgggggggcaagagattggcatggacctggggggccatgagtccttccagga

SEQ ID NO: 602263 - DNA, 414 bp, Homo sapiens
  misc_feature (213)..(213): n is a, c, g, or t
  misc_feature (393)..(393): n is a, c, g, or t
  misc_feature (398)..(398): n is a, c, g, or t
taaggtgctggaccaatgttaagtcacatgaccatttaaagcaaatagtgaaatgagtgattcaccaactttgagaccttggaataacatcagaaggaatcatttaccaggtgatcaacttctaatcagtaaagtctttagggaaaattgataagtattttgaacagcttacattgtaaagtctcaaaaggaaaattgctagtttccttggangacatatagtgctcttttttcaggaaatttttccaaatatcaggacatttggtctaattaaaactaacactccgcgtattctcataaaaaattatccaacggcctcatgttcatttatttctttattatttgtgggtaataatgtctccttattcctagaaatgatgttggatgtgttcngggcncagcctaggttaattg

SEQ ID NO: 602264 - DNA, 116 bp, Homo sapiens
atctatgatatacagtcactttacaacatatagtaacttgcaacagaaactaaacaccactagtcattatagtaacctatagaagacaaaactaactaaacacaagtatatatagg

SEQ ID NO: 602265 - DNA, 212 bp, Homo sapiens
cccccccccccttttttttccccccttaaaaacccccgggccggttcccccccccggtttttttcttgggcggggggggggtttccttttttccccggggacccccttttccccttggccctttttgggggcccctttaaacccgttttttccaaaaaaccggggggggccgggcccggatttcccggggttttttgcccccccgggcccca

SEQ ID NO: 602266 - DNA, 960 bp, Homo sapiens
gacgtcaccctgagactgggcggcgagctgggatgtgcaacagcctccgtgggcctcgtgacttgtcttggctccgtgagcgcccccgcccggtgtgggagctcagtgcggcggctggccgctgaggaggaggagcgagaggtggtgcagggtccgagtcaagcatggtgatggggccccatggtggcctaccccatgtcttctctccccagaaatgtgagagcttacttgcctgcagagtatccgctactattagctagtagatcccacagatcacctacgatcgacgtgttgcagcacatcctcataccgagcacttatgatataagagtgggaagaagaacttaggcatacagctaacctgggccgggaccaggctaggacaggaagtttaactactcaatatctatcttgactgggacctacagagacagccttatgcacactagcctaccaaaagccttaacactagacaaattgcagtagtacgataattacgggccctacggcaggacacggccacatatgataaagaagacatagggaccaataagtcagggcgccaaaagactgtcatatgaacaatccgaaggtgttagcatggctagagaaagacggtcagtcaacctgaacgaacttgacgacacagcaccattaaacacaggaccaatacatacaatcatgatgggccccggtaacccattgtgcctacacgggatccaaacgacagttgccatgaaggccttgggatcggaacatggggcggcaaagcaatggctcaccaagagcgcgataccagggacccgacccccccttgaacggcgcaatgacatcgaaggaagatcagcgatacgggtacacacccagaaagcgccacggcatggaggccacaaggccagtccgcggaagcccccgagagacgaacggaatggcagcccatggcgaggactacctaaagtg

SEQ ID NO: 602267 - DNA, 215 bp, Homo sapiens
gggaaaggtacaggcgtgggaggcagtgaagacgctgcaaattcctaaggtggaaaaaatccaagcaatttattattttactttgggttgatgattcagaattcattgctaagcaataactgttacttttcttcaggcacatgatggtacagcactagattagatgattcctactctcttgaaacccagcacctggaaacaacctcaaatcatac

SEQ ID NO: 602268 - DNA, 185 bp, Homo sapiens
ccccccccccccctttgttgtggatttttttaaagggcggttttaaaacggggccttttccccgctttttttgttttggtttgagggcatccttttttaaaaaaactttttttttcctgggggggccataattttttaaatggggggggggggttggtttttataaaggttgcccccccccggta

SEQ ID NO: 602269 - DNA, 740 bp, Homo sapiens
gtgcagtggcacaatctcgggtcactgcaaactccgcctcccaggatcaagcaattctcctgcctcagcctcccaaatagctgggattacaggcatgtgccaccacgcccagctaattttgtattttttttttttttagtagagatggggtttcaccatgtttggccaggctggtttctaactccgtgacctcagataatccacccgcattgggcctcccaaagtgctgggattacaggtgtgagccaccacacccagccctcacctccttttggaattgtgggactgtatctttacttaaaagttgggatagattaaaccgggcatttccacacacgtgttcaaatacaactcatttaaactacaagtgtactttaccaaatatacaaacaagcaaacaaaaccagcttatcatttaaagtcgtgtgtcagccaccactcatctgtaagtccagattagaagccttggagtcatcgtgtggtccttctctctacttggtctctcaccgtgcaattccttccttaagcaccaaatgccaggtattaagctaaacactgaggatacaaagcttagccagtggtggtagtagggtgcttgtactcccagcttacttgggaggccaaggcaggaggatggcttgagcccaaaaggtcaagtctagcagtgacccatgatcagtgccactgcactccagcctggacaccacagtgaaaccctgtctctaaaaagtaaaatatac

SEQ ID NO: 602270 - DNA, 199 bp, Homo sapiens
atcctcctgctgctcgcaggatgttaggtcaaaacgtgagcaggaggtgaacatcctgaatgaatgaccctggtatggagtgagtgccaatgacccactgaggcccagatccaggagatgatggcagaatgcactcacagtgccgtggagtgagctggctggagcatgctgtgagcagactgaagctggtgtgaaatgc

SEQ ID NO: 602271 - DNA, 326 bp, Homo sapiens
ataatagaaatggagaaatgcccacagtagcagagaaaaatcagcattcaaggttcagttagggaatgatctcaaattcaagtgtatgtgtctggaatcaaacagaataaggtcagcagcaataggccttagggttagtgcagaatttattttcccaccatgtgaaaacaaatgtgactgtttctcgtcaccttgagaagaggtttagcgaccacttatacaacagcttcttagtatgggttcagaattgaacatgtatttagactgctcctgctgtctgcgcactgtgtggggctcagaacatggtgtttagggaaggccagctt

SEQ ID NO: 602272 - DNA, 253 bp, Homo sapiens
tttgttttttttggccagaacacacacgggtatgggttcattcttggtctctggggacggtgacggggtctctcacaaaagaagaactccctctggcgggggatgtgactagggactcattgggccggcaacacccacaaaagaatctaggctttagaatgaactactggaccctgagtcaaagacctgttagggatatttggcccattttctggcctctagttgctggaataggggaaagacggggaaatat

SEQ ID NO: 602273 - DNA, 299 bp, Homo sapiens
tattcagggtgtgtggggaaggcatccctggagaggtgatgactgagaagagacctggaggcagtgaggagcaggccttgcaattacctgagggaagagcattccaggcagaaggaacagcaagtgcaacagccctggagcaggggaagcacctggtgggtctgggatctcaaggatgtgtgatggtaaagaaaggctcatccaaggttttgacatgtggcactcattgacaggtgcctggtgtccccatctctatttctcccacaacctgagagggagatggggttctcccatgtcac

SEQ ID NO: 602274 - DNA, 146 bp, Homo sapiens
aggacgtcgcttagcgaagtccagctggagagacgctcaatatgctgaacaaataacaggagagagggcccacgtggcagccgtaggactgaggcaccatgtcgcacggacggtttgcacacttgcacggcggagaagacagcatg

SEQ ID NO: 602275 - DNA, 105 bp, Homo sapiens
tacacttccgggcgctacatgaggtgggacttcaccaaggtcgggggccccgggacaggcacagcgtcacgggggtctcaagatgttgtcccggctggtctcaaa

SEQ ID NO: 602276 - DNA, 218 bp, Homo sapiens
gactagaggatccccatcatggggtcctggaggcaggagttcgaaatcgagcctggccgaacatggtgaaatcccatctctactaaacaatacatgaacattagcctggtcatggcggttcctgtgagcccaggagtttgaagctgtagtatgctatgatcatgccacagtgcacttcaacctaggtgacagagcaagaccttgtctcaaaaaagaaa

SEQ ID NO: 602277 - DNA, 494 bp, Homo sapiens
gcctacagagtgattaaatggtgtccccatgtcacattgatcagcagcattcgtgatcatcactaatatcaatatatgacggggaggctgttgggtttataagatggactccttgaaggcccaggggaggagacgctcagggggttctgaaatatagatgataggaagttagtctcctggttgaatggaatcaggaggaacttatctgactctgcacaggagaatgaagcctgcacagatagctcctccatcttttcctcctccgcaggacctctctcaagccagttgtctctcacattcagcctggcacgtgggaccatctcccacagttggtccgccttttttctctgtcttcccggctgccacctctcctctcctaacttttccccccgaatgtgtttcttccttcttctttgtacagttggcagtttttcagagcacttggatcagataaatgggcgaagcgagtgtgtggacagtacagataattcctc

SEQ ID NO: 602278 - DNA, 423 bp, Homo sapiens
taaaacgacgttcagggaaaacgaaatttttttcctcgcttattaggggaggggggacctcccaaaagctttcccccctaatttttccaagatggggcggctaagggggggaaaaaaaaaagggtctttgtttttcttcctaagggggggcgggggctataaaaaaaccgggttaaatggtcccctcccgttcaaccccctttttttaaaggccccttttttttttaaaaccacacccgggggggggaaaaaccaaggggcccggggttttaatttgcaaattttccccttttggttaaaacgcaaagggtagccttttttttttcccattttttttgggccaaccggaaatggcgggggttttttcccccttttggcaaaagggggtttgccccactcccccgggggaccttttttttgttg

SEQ ID NO: 602279 - DNA, 1370 bp, Homo sapiens
gaacttgataacgccacatactactgataataaactccgggatgccagagaagcgtctgatgtttggctggcaatggtgatgatgaggcgtacctctgtgctaaaaagcccaagataggggataggaccccatttgcgaaggccgcaacccttgtccttgatcaagtagagaattcgtgcaaggtatacccaggatcctagccatgctattcccagacataggcccaggtcacgaatgacggcaacgtcactcaaacacgattagagtcctagagggtccgatgagagaacacagaaggaagacaaggtttcatctgcgaagactgtgtgcacaagatacacctacgcttggcgtagcgttggcacgaacggagacacgcggtgggtaacgccctggtgcttgagtgaaagacacgtatctgcccacaagatagcgcgtcagatagtcatctcatacgcttcacattcgagacgatcggtgcgctcggtcacaaagccgttgtgtgtgtagactcgcaccgaggtcccaaacaaatacacccacttgctagttcccaagaactcactggtagttaggcaaagaacaccttgagagaagtcgcggagccggcatttagacccaccgctgagcggtgaacccgaatgtcgttgccaatcagatccaccttctcacattggggaacggaccccaagactaggtggagtggacccaaaagggaagcggtgggtggcgggatattctttgcccccatgggaatgagcccccagaacattgagtggctgacgactggggcgcctcttaaatcatagaccttattagatcggcctaagcgtggaggtacactcgccttccttgttgtcctatcccctttcaaacacatgcgaaatagtgtattctcctccttgcgttataacgcgacacacgtgaataagcaagccatacaccacacggaatgaagagaatttgagttggggtctctaaatttgggcacctaatcggtgttccaacatcgccaaaattccacgtcccagaattacttcccaacggaccatatgctggtttagaacacagaggaagttcctcccggagagagaagaaggcaaattctctttttgatccagtggcatgttggaccgtttatacgccgttttccagcatggacaacaacgggcaacaatggaacatgggcgtgttgtgcagggtggacataagggctccgccaagttataacagaggccaccaaaaggggcgcaaccaacgtgggggggttggaaacgggaaacgttcgaattatccgggaaagcccacccgcacagggaaagcagagcacgcacgcctatgcgaaccacaacgacggtacatgttgcag

SEQ ID NO: 602280 - DNA, 241 bp, Homo sapiens
cgaggatcttcacatcacgcaccacgatataattacaaaagtgtagtgcataccgtgggataaaacagtcaatgttgatgccttgaggacttggatcttttatttatttacagtagggaggaggaggaaagttgttaagagagaaaaggttacattacaaaatcctgtcagacctgcgagttcacagactacgccgggtagaacatggtgacaaccccgtactctacataaaaatacaaca

SEQ ID NO: 602281 - DNA, 294 bp, Homo sapiens
cacgatctttgcaaacagcgtaactggcaaagaactgacatctagaatttgcaaagaactttcaaaactcaactgtaaaaaaccaaataatacaagtagaaaacaggcaaatgacaggaaaagatagttcaccaaagaggatatagagatggcaaattagcatgtgaaaagatgttaaacatcactagccattagggaaatagaaattaaaaccacaatgagctattactatgtccctgtcagaatggttaaaataaaataaacagtgacaacaccaaatgttggcaaagaatc

SEQ ID NO: 602282 - DNA, 824 bp, Homo sapiens
  misc_feature (806)..(806): n is a, c, g, or t
cgcagtacaggggccagatcctcagccctcagtggcccatgctccatcctcttgtataaatggtggaatttcagaagggacccccgtggaacaagggtctgtagaccctcaatatggtcactagtttctaggatggatctgtgtagtgtaatgtggatgtaatcgattacaccagggtaagcgatatttgcttgtgattacggcgttctaattgtgttgctacgccttgtttacggactgctgtctgtgcatacagggttccttggttcctctgttaaagtggcttgctgtgtatctctgtgtctgccacgagttgtgtcgactccgtagtagaatcacaacgcgaggcactctttggttattgatgctcttacgtgctcttttctggtgagtaaaagacaacttctctgcctaagtcattagtaatcaatcgtatactctgcaggacaacttgacgtactcgattgctggatacacgatatatgtcaacgaaggtaatcacacttaagtaatgcttggcctcttggtgcacaagcaccaatggataaagagcgtattactgcacgagtgctctctaagctactcccagttctgctaaggatacacaatactaaagttgtttataaaattatgacaaagagaataattcgcctatatcctctatctatgttaaccgtattcttattgtttcgtatagattcgtactatatataagtcacttattcatggttccaagccaatgagtgtaatgtattttctcccaatagtaattgttaatattcataattattcagctctgctgctantacatcgtggacttcgtt

SEQ ID NO: 602283 - DNA, 380 bp, Homo sapiens
tttggtgatcatctcctctattcagtcctacacttctctccccatgccaatgtataggccatgcagacaaggacatatactaaatagcaccacctatccatccagcttccatcacactgctagagataacacttcagaaaatccaagtacaatcctattaaaatcttattataatcaatcgtctatataataatttttattattgcccattactaggatagagaattccaagtttgtcaagtaatgaactgcatgatattcctggtctctttattcaaagtcatctcctacttatacccctaatgtgtgcgcgcgcacacacacacacacacacacacacgtacacaccatcttgccttccagtcaccctcagccacctt

SEQ ID NO: 602284 - DNA, 207 bp, Homo sapiens
ctttggtatgccaggcgggtggactgctgagctcaggagtcaagaccacccttggcacatggtgcaatcctgtctctactaagatacaaaaaattagccaggtagtcccagctcctcaggaagctgaggcacaagaattgcttgaacctgggaggcaagaggatgcagtgagcccaggatagtgctacagcaaccccagactggggc

SEQ ID NO: 602285 - DNA, 747 bp, Homo sapiens
  misc_feature (512)..(512): n is a, c, g, or t
aaagattgtttcccacccccacttttgacgatgaccataggtttgcgcccacccctccccctcttctctttccgtgtctatctctctaacagtcgacatctaagggattacgcgccccgcactctctcaagggttgccacaactcataaatcaagtggtcatatgacaagtgcgcgcgccactcactttccttgtgatacgactcgacatattacagacaacacgtcgcacacccctctgtgttgttctataataaaccacccgcgcacacgtggtagtatatgtctgtggcggcccacctccatcaccacttcttttccctctatatttacttctctcatatacacgtatgacacacccttgttcccccacacagcgctctttataaaaaatttcttctgttccaccctctttattatatataactcagagagagtgctgtctcctcaacccacagttggagagacccttttatgcaaccgctcgtacgatactcctctccatcggagatntttctaagaaagtgccaccccaagatgatggtgtacgagaagtttcacccatcgccgcgctgtgtttcgaaaatggcgagcgagccgctcccagatcaggacgtcctttccctagagtgatcactgcgccgagcgctccgttcgagtcaaattctcccacatcgtcttctacgcgccacctcaaggagttccaaccgtaaatgcgcccaccacgccccaacaattagcacgacaa

SEQ ID NO: 602286 - DNA, 312 bp, Homo sapiens
ttcggcactgaggtagtgtttgagtccgtcgtgcttcaccggtctacctcgctagcatgtcgggccgcggcaagatctggcggcaatggccgcgcctaaggccaagtcgcgctcgtcgcgccggcctccagtcccagtggccgtgtacacggctgctgcggaatggccactacgccgagcgcgttggcggctgccatgtgtacctggcggcagtgctggagtacctcacgctgagattctgtatctggctggcatatgcggcctgtacaataataatacgctattcattccccgccatctgcagctggccat

SEQ ID NO: 602287 - DNA, 123 bp, Homo sapiens
ctttccttacttgcccaggactcaagctgctggccctgtgtcccacggctaggcagcaggccaggtgacccctccaacccctcctcagactgctcatgccatccccgttccatgggtccccgc

SEQ ID NO: 602288 - DNA, 558 bp, Homo sapiens
  misc_feature (12)..(12): n is a, c, g, or t
  misc_feature (24)..(24): n is a, c, g, or t
  misc_feature (51)..(51): n is a, c, g, or t
  misc_feature (58)..(58): n is a, c, g, or t
  misc_feature (154)..(154): n is a, c, g, or t
  misc_feature (194)..(194): n is a, c, g, or t
acgatttttccnatggaatggaanggggatgattttcagggttgaaacctntcccacnttaacattcggagcattagttggaattttcccttagggagcatgcaacctaagatcccttcgcatgtgcaaattcacaaatggagtttcgcgctcntatgggcatctaatgccgcccactgatcggaccaggagcnagagctcaggcttgtaaatgcttcgctcgccccactgaagcccggttcctgacaaggccacaaaacccagttctggtccgaggcccagggactggggactcccgctctagaggaggatctctccttgccacttctaccttctggtagtcccaggtgtgtctggacccaacctctgcctccttcatcacgtgccattctcccttctgtgtctctgtcttcacatagcctttcttgttatgaagacaccaggtgaaggtacagtgctcatgcctgtaatcctagtgctttgggaggctgaagcaggaggattgcttgaggctagagttcaaggccagcctgggcaacacagggagaccccatctct

SEQ ID NO: 602289 - DNA, 344 bp, Homo sapiens
ctttactactctgcttatttctctcgtatacttcagactgctgagtctgtaactgcattatcttatttacatgctttctctctacaatgatgcaatggtttgaatgtctcctcccgaactcatgtttaaatttaattgccattgtaacagtgttaagaggcagaacctttaaaaagtgattaggtcatgagggcatagccatcctcaaatggatgaatgtctttattgcaaaagttggttagctggagtgggctcctgataaaaagataagttcagcccccattttctctctgtctcatacactctcttgccttttcactttctgccatgggataatgtaacaa

SEQ ID NO: 602290 - DNA, 255 bp, Homo sapiens
taatgagtacagggagaggttatgctgcagagtgacacgtgattgagagctgacaagacagccctcagtgcgaccgcgtgaacagcatcaaacatcaaccaggtcagcatcacgtttgcaggtggccccggcagagatggcaccattgacttcacacccggctcggagctgctcatcaccaaggccaagaacgggcacctggctgtggtcgccccacggctgaattctcggtgataaaggcgcccactggaccct

SEQ ID NO: 602291 - DNA, 213 bp, Homo sapiens
tgtggctactgctgaggagtgacaggcaaggcaggatggaattggtagcaaggcagagaggactctgggtgactttgcagcagagtatgccaagtccaccagaagtacgtgcaatgcggtgtatggagaagatagaaacggggcaggtgcgcctgttcaagaagatggtgggaccggggaaagcacagctaggcatgattgaccgggtggtac

SEQ ID NO: 602292 - DNA, 296 bp, Homo sapiens
gccgagctgcgggtgtccatggagacgatctaccagtggttcaaacaagcgcatcaagatcacaaggcgtcgcctacaaccctgatgggcgaactgtgcgcaccgacggacaagcatcctgcacatagtcatcaagcgtggctggaaggaaggcaccaagatcaccttccccaatgaaggcgacgccaaagctgacaacatccctgctgacatcgacatatgtgctcaaagacaagccccatgcaacagttaccgccgagaatggccaccaatgtgatctacagatgcctgatcag

SEQ ID NO: 602293 - DNA, 245 bp, Homo sapiens
cccccaaaatttgggggccttgggggccggggggttttttccttttaaacccatttggggccgggcccccttttttttttttaatttttgggggcctcccggggggggcggggcccccccccccaaaagggggggggggggaaaaacccccccccccccccttttttttttcccccctttgggggcccccccggggggggttttttggggccccctttttggttttttcccccccgggggggcca

SEQ ID NO: 602294 - DNA, 392 bp, Homo sapiens
agtatagtgagaaacctgtgcacatttactatctctatcaacgggagagtggtcagcagtatttttccgtctatttgatccaaaggaatcgtggggacaagttgtccagttgacttccttggtgcctacaaactacagcatgacttgtcctggactccgtatgaggacattgataagcacgatgctaaaatcagctagtgatggacacgtggctaagccagtcagtggccctgtcgtccgtgcactgaacccagattccagggactgactcactgagagtgggctttgacaaacagctctcacaggagctggctgtcaacctccttgttgcccccactgttgccttgagacttgaagacatgtaggtgactcacaaacttcttggaaagaga

SEQ ID NO: 602295 - DNA, 292 bp, Homo sapiens
  misc_feature (42)..(42): n is a, c, g, or t
ttcatgttattcagaattgttttggtgatacctccaaccccngaatcccagcactttgggtgggtgaggcaggcggatcacttgaagccaggacttcaaagccagcttggccaacatggtgaaaccttcatctctactaaaaatacaaaaattagccaagtgtgatggcacatacctgtaatcccagctacttggaattggaaatcgcctgaacccaggaggcggaggttgcagggagggagactgcaccactgcacttcagcctgggtgacagagggagactctgtcttaa

SEQ ID NO: 602296 - DNA, 343 bp, Homo sapiens
  misc_feature (142)..(142): n is a, c, g, or t
gcacacagctaactgccaaaaatacatggacgcgtagtagctgttcaactccatagtacttgagaaatacagcgttatggttacatgtccagctcacaacaaaacccacacacaggtaaattgtttattaataagtcagtgngttcgataatttaacggtgactggaaaatgtgcacacaggtgactcatacatgacggtgtgtgttaacaatgactagctattattcaacaagtgtctattaggttaacttggggaccctttgggaggttacaagacagtcattataacacgtcctggtttcgtgtttaacatgttactcatagaattttttttaagtgaaa

SEQ ID NO: 602297 - DNA, 455 bp, Homo sapiens
  misc_feature (102)..(102): n is a, c, g, or t
  misc_feature (268)..(268): n is a, c, g, or t
  misc_feature (308)..(308): n is a, c, g, or t
  misc_feature (388)..(388): n is a, c, g, or t
  misc_feature (441)..(441): n is a, c, g, or t
agccgttgggcctgcctcggaggaggcgtcgccgccgccgctgccgctgccggcgccgttgccgctgccgggaaacacaaggaaagggaacagcgcaggggngatgggcgggggtagagccccgcggagaggctgggcggctggcggtgagcagactgtgcctgtccacggtgcctcctgcgatgtctgctgccctgagctgtgccgaggtaggtgacagcgtaccacggtgggagcatgaatgaggtgtgtgtgatcaagaggtggntcagagggtgtgaataatcaagactggagccaggtattgntgctgagagcgacgctcttcattgggtacaggagaggccgaggcgctgatcagatctaccccttaaacactgctccgtanagatgcagctgatgaagacgagaggcgcgagccaacactttgtgatacgctgnctgccagcggacac

SEQ ID NO: 602298 - DNA, 385 bp, Homo sapiens
ccattccattccattccattccattccattccattccattctattccattccattcccttccattccattctagtagggttaattccattccattccattccattccattccattgcattccattccattcaatttcattgaactctggttgattccattccattccatgccattccattccattccattccattccattccattccattcctttccgttctattcaattacattcggattgattctattcaattcccttacactccaatacattctattccattcgtgttgtttccattctattccattccattccactccattccattgcactctggttgattccattccattcccttccattccgtatgactccattccatt

SEQ ID NO: 602299 - DNA, 169 bp, Homo sapiens
acgcacttggtcacacgcacttggtacatacacacgtagtttaggaggtgatataggtagccttttccataaaatttgaaggatcatttattcagtaagtgttgggatgatttatttcaaataaatgaaagattttaacacaaaattgatttgcccccaagttgcgtgt

SEQ ID NO: 602300 - DNA, 250 bp, Homo sapiens
aactactatcacccaggttggagtacagtggcatgatcatgtctcacatgcagtctcgacctcatgggctcaagcaatcctcccacctcagcctcctgaccagctgacaccacaggcatgcaccaccacacccagctaatttattgtagagatggggttttccatgttacccagagctggtcttgacactcctgtagcccagaggaatccacctagcctcagcctacccaacaatgctagggacctacag

SEQ ID NO: 602301 - DNA, 102 bp, Homo sapiens
taaaatgggacatcatgagtacacatagttaatagattcccatattgtgcctctagttgcagaactttatagaccctttagtcggataatatgcaatgtgaa

SEQ ID NO: 602302 - DNA, 616 bp, Homo sapiens
gggctagggacctcaacaatgtgggtacagaagtcccctcagtgcctgccagggcctggagtggaggttcaggaccaaggggcttctggtcgctccacgcccctgtactcggaccatgcctctgcggtcactgtcggttgccgcccctaattgtgtctcaaaggctgaccctggtcccgggctgcgtacacgcattgccatgctttgccttaaagtcctcggggtctgcccggcccttcgccccgtgcctggcactgctcaccgcccaaggcgacgccggactggagccacggcaggtgcctggcctttctcctgcccggcatcggaaccagcttttctctcttacgatgaaggctgatgccgagagcgggctgtgggcggagctgcggtcagtcccagtatctaattttgctttgagaagaggctcctctggaccgctgctctcctgcagggaggtggctgtcccgcgggaagccatcagcttgggccagctggcaggtggcaggaatggagaagctgagcctgctggccaggaaggggccagaccccccccaacccccagctgccatcgctctccacccagcttggccccgcatatcgcctcctgagccgaggc

SEQ ID NO: 602303 - DNA, 198 bp, Homo sapiens
ctagaggatcctcatcacattacatacagtacttgatattctatttaatgatggtggtgtgtaatttcttactggtgcctaatttataaattaaaattcatcgtaggtatgtatgtacagggtggaacatctctaatccaaaaatccaaaattggaaccgttccaaaatccaaaattaatcgaagccgctgtgcccgg

SEQ ID NO: 602304 - DNA, 291 bp, Homo sapiens
  misc_feature (23)..(23): n is a, c, g, or t
  misc_feature (75)..(75): n is a, c, g, or t
  misc_feature (247)..(247): n is a, c, g, or t
  misc_feature (279)..(279): n is a, c, g, or t
tgaacaaatgataacctgcaatncccttttcaaaatagtacaaggagatataaatagaaacccataaaaaccttnaaaaacaggaggaatgaagttaaagtgtacagtttttattagttctcttcgccctgtttgtttttgcaatcagtgtcaagttgtcactttaaaataacatgttatgttatttgcaagcctcatggtaacctcaaatcataaaatctacaacacatacacacacaacaaaatnaaaaacaagaaactaaaacatactgccagagnaaataaacttca

SEQ ID NO: 602305 - DNA, 338 bp, Homo sapiens
gtttagtatcttctgcttacctgctcctgcatcctcacatattaggacttgtgggactttaggattgttggatggccatggagtctctcatcacagggacgccaggaggacaaacacccagatgacaagcaaccagagccacatgggaactattccctttgagggggacgagtgtgaattacaagctcaggagtagcctggactctctccttgtgacctgaggctactcctggatcccagggctgttctctaccactggactactgactatgtgttaccctgaagttgagtcccatgtggtatcggtgctttaggtcttgggtacaagctctaagtga

SEQ ID NO: 602306 - DNA, 195 bp, Homo sapiens
aaaccttttcccccccccggggggggggcgcaaaaagggggggggggggtttttttttcccccccccttgggggggggggggggccggggggggggcccccccccccccccccccccccccccccccccccccccgttttttgggtttttttttttggtttttcccggtttttttttggggggggggggggggga

SEQ ID NO: 602307 - DNA, 95 bp, Homo sapiens
aaatttaggtttatggggtagatttagcccccagttgccagtttttagcgctcccaaatgaatgaataaacatgagcttgcgctcctagcctaga

SEQ ID NO: 602308 - DNA, 797 bp, Homo sapiens
acgctcctcgtccatccaccggtaccccacaacggttgagagagtgtctccccctcatcatttccctgactaacagacttaagtatgccctgacaggagtatgaactaatagcaagatttagcatgctgctgtgttcattaaaatctgatggcaaggtccgaactgatataaccttaccctgctggtattcagtagtgagtgatcagtcacgcattgactagagactgggagcagagattctccgctctagatctatgacaccaagggctcgcattgtgctgtacatcgtgattacagcctgtaggaggccagagtacaagttgtgcaaagtgagaaggatctttgttgggcactataaggaatccctctatctgtgtgacatcatgatgacccgctatcgctagtccgctaccccgagtcccctcatcagagggtgaactgagtaccattcagatctgagtttagagactggcaagattactggatcttcatcaagttcgacactggttaacctgtgtattcgtgactggcggtgctaaacctaggaagaattggtgtgatcaccacacatgagagagggcaccctggagtcttgtgacgtggttcacgctgaaaggatgccaatggccaacaagcttggccactcgacttttccaacattggtgtatcggcaatgggcaaaaaccatggatttctcttccccgaggcaagggttccgcctcaccattgctgagacgagagcaaaagatggggccaaagaagcagggtcaatggcctggggactgtcacttgcaga

SEQ ID NO: 602309 - DNA, 104 bp, Homo sapiens
gggagacgataatgggttgctgctgttgggcgatcaagcggacagcaagacacccactctgcagtggctctcatcctggtacggtgcgttggcccgaacacggt

SEQ ID NO: 602310 - DNA, 125 bp, Homo sapiens
  misc_feature (121)..(121): n is a, c, g, or t
cccttatcacaacacaagaacacctcgtgattactcgctgccatctatgacccttgtgccattaatatgatttatctaccacacgtagcagtagaccaacctgaacccccttacgaccttngccg

SEQ ID NO: 602311 - DNA, 1138 bp, Homo sapiens
cagagtgaggcctcatctcaaaaaataaaaaaaaagggccccaagaactcagctaattaaaaatcaaagagtccatttagaaattgggcaaaagacgttgagttagatgttccactgaaggaggatctatagatggcacagtaagcatatgaaaagctgttaaactccataagtcatcagggaaatgcaatttggaaaccacagcgaggctatgactttacttaatctcaagggctaacagaaaaaatagtgaaaataccaaatactgatgaggatacaaacgggatattttatacattggctgacaggaatgtacaaggggtacagccactcgtgggaaagagtttatgaacttgtcttactcaccgtttaaaccataatttttaactcaagtttaaaccttaagacccagcagtggtgctccgtggacatttcatttccagagaactgaaaaccctatattggtcctggtactcaatttattcataggagcttaattggtaatagccccaaactgggaaacaacccagatgtcctacaacaggtacttggttaaacaaaccatccatacctgtggaactcactgctcgggactgaacgggaactacctgtggatacaagacctcgggttgtacctcaggggctatcagggtgaccacaacaaaacccagtctcaaatgggtccccatatggttttgatcgcttctatataccattccttgaggtgccaaacttttcgacactgacaaccacgctcacgggttcgcccaggaatacgaccctggacagggcgcgtgtgacgcaccactcgtacgacacttactcacgggggcactacaccccaggcgcgtttcccgttgtgagtggccgtgtattggcaacagaggtagctacatgggacctttctgaaagagatatcaagaaaatggttggacagcaaaaaacgaatttgaggacatatattgaagcggagctcagcacacagtgaggaacttcttttcacgcataacactgaaaagtatagatgtggaacctcagataacaacacccacaaatgaacagtggagtgtacaaaaccgggggtgatgactgtaaaacagatgtgagtctacaaaagtagacgataaaatacatggta

SEQ ID NO: 602312 - DNA, 299 bp, Homo sapiens
tagaggatcgtgagtatctgacaggtacagcatctagctgggcagagtgagagaaaagtgaggaggtgagctgaggtgcgggtcagatggaaggcaggattgggtctaaaagggattactctgctgggtgaggaagatgggggatcagggcaggaggagaggggctggcaggagatgacgggcctacgttgcagagtagaggggacaaggccaagtaagaagacagaccattcaggaccacgggaggggcctggtaaccgaggttggagaggttttggtggaaggggtaacagagtggg

SEQ ID NO: 602313 - DNA, 402 bp, Homo sapiens
tgcctgttgtctcgtcacctgcggtgcctgtgcgcagccctatctgctcaggctccgagaccatctgtgtagcccgtgtgtgctgctttgctggcgttcgctcgctgcgcggctctctggtatccttgtggagagagtcgagaagctggagtcctcttatagctcgtccggtctgcctgcgactatgcgaggtggccgtcagtcccacaactgttgtagtgcaccccccgtggggtaccacaatacctgcctcatccctctacaccagccgccacatccaccacacacacctccacacaccacacctccacccatagacctacacacacaccacacacacatctacacccaccacacacacctccacacacagctacactcatacacctacacagacacccc

SEQ ID NO: 602314 - DNA, 117 bp, Homo sapiens
gagtctggtgtatccttggaggtcttgactggaataacactggcgatttttaaaaggaagtagtagagtgttgaccctattaaaaaggaggagggcagtattttgggatttttaata

SEQ ID NO: 602315 - DNA, 158 bp, Homo sapiens
aactcacatcctgtcggaattgggataggagagtggtattcataaatccatgactttgggattcagcacaattatcagttagttttgcagaactggttgaatgaactatgtatcaaaactgtgtgtgtaccatggtatttcacagacctagagaaagg

SEQ ID NO: 602316 - DNA, 1157 bp, Homo sapiens
cacagaaactaatcatattgttatatcttctccgaaaccacagattatccccaagcattggcatatcatcacccgatgaggcaaccagccagaacgcctgaacgctggcacatacttcactagttctacatcgcgcgtagtaggctcccttcccctacgtcatcgcgactaatttgcactcacaacatcctagggctcactaaacattctactagtcactctcactggccaatgagctatcacaacttccgtgagccaacaactttaactatgagctagcgttacagcacatagcttttatagctaagagagtacctcgtattacggagctcgcaaattatgactccctaaagcccagtgtcagaagtcgccccatcgacttggtcacatagtagcttgagagcaagtacgtcttgcaaactaggcggctatggatataactacgcgctcacatcatcattctcaacccacctgagcaaaacagatagcactaccccgttccttgtgacctgatccctgatgaggcataattattaacaaagctccatctagcttacagaaaaactagacctaaaatacgctcatgtgcaatactcttcaagtcaggcaaatacgcctcggtagtaacagccatcctcatccaatacaccctgaaagctttcaccgggcgcacgatcattctcataatcgctccacggcacttaaatcctcattactattcctgcactagcaatactcacaatagaacgcatcagcagtcgcatcaatgatcctctctccaggacttcaaattctattccaataaaagcgttacggaagacactgttacaaatcatgattaacattcgcctttacctccattattaaccatctgggagaaccctcagtgtctaaaaccagatatcctagtcaatatgacgagcaaaaaagaaaccaaaacaaaacaacgtttaaccctcaatttccacacaacgggcacccccacattatgaataaactctcagagaaccctttagaattacaatataatacccactcggttctcaaaaaaaacgggcgagaattcgaggaggcatagcgctttcatcaccttcatatcatcgacgagcacagaccgagcatactctctatgcactgctgcccaaaagcaagcacga

SEQ ID NO: 602317 - DNA, 1048 bp, Homo sapiens
gccaaaacttgattcagaacactaacatcgacgaatggacaagaagagcgagtgatggacccagtacagcgctttgagaagctgccatggaagagttctatgcagctcatgtagaccagtctggagcatgtggccatgcggccttggcgcattgagtgcctgtcacaatgagttgtgactagggccaagcaactctcgcgaacgttggtgcgccacgagccacctaagacgccgacagctagttgcagccgtgacagcctcccctacccacagtacctggcggtcatcaaagcccagatttcctgtgccaaggacattcacaccgccctgctggactgtgccaacaaggtcacgggcaagacacccgcaccacctgctggccctgggggcactctgtgaagtgggggacagggagtggggcaggcagtggttggtgggtggtgtgcaagggaatgaagagcgtcctgggcctaaacacagcagcctcctctcttcctgcctgagcaccgaagcgggagccagcagggggcagcagaggccaacagggagctcgcaggccgggcccctgcgtaccgtgcccttcttcctgatcaccctcctagcctaagggtagactttgaactgtgtgtgtcgatgactgctctgttgcacaggccgtcccccattcttgcctgggtgtggagcctggctgtcccctctccctcagtccttctgactgtctccagctggaggtggctctgagctgcactcctctgggttctattacaggtggggtcccataatcctgtttctttaccgtggattcactggtcgaaaagggatacccaaggccaatgcttaatgacctcactttttaaccctagaggattaaccaagcctaagggaacatggcaagcaagaggaaaccagagaactggaaaagaagggagtaaggggaagaaaccaaagcgaaggaaacccaacaagctgagcaggagaggacaaaaacggcagaacaaacacgaacagaaagagagcagacataaagaacagcaggatcgcgcggagt

SEQ ID NO: 602318 - DNA, 135 bp, Homo sapiens
attcgcactggaggctagtggcggatcacctgagatctcaggagtcatacagcagggcacatgcgaactcgttccaccaaaatacaagaacagcctcgcgtgtggtgacactgtaatcccagctacttgggaggc

SEQ ID NO: 602319 - DNA, 128 bp, Homo sapiens
cacgagggcggccatgatgcacattttgtaagctgtctgactatgatactctttaaactagtctggtcatggcgtgaaactgaactacgtctttcctggcagaggccggcaatagcgagcaggaacag

SEQ ID NO: 602320 - DNA, 625 bp, Homo sapiens
  misc_feature (625)..(625): n is a, c, g, or t
agaaggatttgaaaaccccggatcgaggtactgcttacccgaggccgctgatgcgcggagaccacggggagaagccaccgtcatcatgtgtgaccagtaggcaaaaccttcaactgaagacttgagggataagaaggaacgtgaatatattaaactcaaagtcattggacaggataccagagcgattcacttcaaagtgaacatgacatcacatgttacgaaactcaaagaatcatactgtgaaagacaaggtgttgcaatgaattgactcaagtttctctttgagggtcagagaatcgctgatgatcatacttcaaaagaactgggaatggatgaagacgatgtgattgaagtttatcaggaacaaactgtggtgcattcaacagattagatattctgaagatagcttatctattccctcaatccttttttatgtgtcaaaatagatctatttgaatgtggagttccggaatatgaaactgtcaccccatctctatgcatctggtagtttgaattctagtgctcatgattcatgattgactgtattcatcgtgctgactattgatgagcgcgtcagatccctgcgtagtagcccttgcttttgagtggtgatagatagtcgccn

SEQ ID NO: 602321 - DNA, 156 bp, Homo sapiens
atgacacaagcaggtgtaggtgctgactgaacccagccttggccggcgctaactaaggcggacctggtttccaactcatagtagtacaccccgtataccctctcggcaagatgcacgcacagtagttgtcctccatagccctatgctagctacagt

SEQ ID NO: 602322 - DNA, 201 bp, Homo sapiens
aggcttatcgctctaaagattaaaaatgccctagccccacttcttaccacaaaggcacaaactacaccccttatccccatactagttataatcgaaaccatcagctactcattcacacatagcctggcgtacgcctaacgtacataactgaggcactactcatgcctattggaggcacctagcattcacataacttcctct

SEQ ID NO: 602323 - DNA, 485 bp, Homo sapiens
tagattcatcctttatctgtagctgaggaatacagtgccgtatatcctatagtgtactatcgtagtggtgttggtacaatgaaccataggcgtcgctcattatctcagctatggaaattccttcgcacaatcatccttgcattctctcttctagaagtggaacagaataatataaaaagggcaggacattgcaaaactaatagcttcatcgtcatgatctgtgcatttaaaatcatatttagagaaggaactactattctgtatacttcttgggcgaagttgaaacaggaaatcctttgagttaggatagaagctggagaattccaaagctggtgaaaccttgctcctggagaaatactagtgtttcctttatagctgtgggagaatttaacaaaataaatgggttttggcttaacaattttagtagccaaactttcatgttggcctcagagccacctacatctagataactctcttgaagaaca

SEQ ID NO: 602324 - DNA, 119 bp, Homo sapiens
tgtcaatgagacccgacattataaacagtgacctagcggccactgccatgcgagggttaagtcttgtaccctactctttaagaatagactagattctaactaccacatagtttttattt

SEQ ID NO: 602325 - DNA, 479 bp, Homo sapiens
tcacacgcacttgggcatggagatggatgcctgtaatcccacctacttgggaggctgaggcatgagaattacctgagcctgggaggcagacgttgcagcgagccgagattgcgccactgcactccagcctggatgacagagcaagactctgtctcaaaaataaaacaaaacaaaaacaaagaaaggaaagaaaacaaaaataggacgggtatagtggctcacaattgtaaacccagcattttggtaggtctaggtgggaggatggcttgaggccaggagttcaggactagcctaggcctaaaaactaaaaaagaaggccaggtgcaggggttcatgcctataatcccaacattttgggaggctgaagcaggaagagtacttgaggccaggagtttgaaaccagcctgggcaacacagtgaaaccctgtctccactcaaaatacaaaaaaattagccaagtgcgtgtgagggtaccgagc

SEQ ID NO: 602326 - DNA, 197 bp, Homo sapiens
actgagttccctgataggaacaccagaatagtcaccaccaagcatagagaggacccttctctgcgagctttaacgtgtcccaccatcatcccctgatgaaaaaaaatttttaacacagaaaagcaggacttcatgattgtggatcagtgattagcgaacccaactagacatccaggagcaatgagggtttgatcccc

SEQ ID NO: 602327 - DNA, 685 bp, Homo sapiens
tggttgcaatcgcctgggacgccgccgaatggtctgtgcaggttcgcgggtcgctggcgggggtcgtgagtggagtgcgccgggagcggagatttggagggagatggttcagtacccagagcctccagatgccggggaggacagcaagtcgcgataatggggagaattgtctcccatctactgcatctgccgcaaaccgagacatctaagctgtcttcatgatcggcgtgtgacaatctgcaatgagatggttccatggggactgcatccggatcactgagaagatggccaaatggccatccgggagtggtactgtcgggagtgcagagagaacgtaccccaagctagagattcgctatctggtgcaagaagttcacgggagcgtgcgtatggcgaatgaggcgagtgactaggcagtgagcccccgggactcgatgggtcggacgcggcgcgcagaggccttgtccctgatccagacctgcgagcagccggggcagcgggtcagggcagcacgggcgttggcggccatgcttttgcctcgtgggctctgttttcgcccccaggcatatccctctcgccgcaattgccctttggtgtgccttctcccaaggctggtgattctcctagcagcaaggcagccgccgaatcactctgggtcacgcccgcgatgttttggtgagtgtgc

SEQ ID NO: 602328 - DNA, 191 bp, Homo sapiens
actgtaccgcacggccgcagaaaaaagtctctcgcctgcgcgccggcagccgggtgcgctgataaatttggtcatggaggttgaagcggcgacaaactgcgcgaaagcctcgcccccggcaacctggcggtaggcatcgcggccggtgacgaacttcaccgtcacctgcgcccaatcggcatccatttccg

SEQ ID NO: 602329 - DNA, 108 bp, Homo sapiens
atcttctgctgaccacactgacctcgtatcaccggctcgacctcccaaaatgcttggattgcaggctgagccaccgtgcccagcctcattagttcttaaagtcactaa

SEQ ID NO: 602330 - DNA, 532 bp, Homo sapiens
  misc_feature (8)..(8): n is a, c, g, or t
  misc_feature (69)..(69): n is a, c, g, or t
  misc_feature (78)..(78): n is a, c, g, or t
  misc_feature (133)..(138): n is a, c, g, or t
  misc_feature (252)..(252): n is a, c, g, or t
  misc_feature (283)..(284): n is a, c, g, or t
  misc_feature (291)..(292): n is a, c, g, or t
  misc_feature (294)..(295): n is a, c, g, or t
  misc_feature (331)..(331): n is a, c, g, or t
  misc_feature (354)..(354): n is a, c, g, or t
  misc_feature (392)..(392): n is a, c, g, or t
  misc_feature (441)..(441): n is a, c, g, or t
  misc_feature (461)..(461): n is a, c, g, or t
  misc_feature (463)..(464): n is a, c, g, or t
  misc_feature (531)..(531): n is a, c, g, or t
ccccagcntccaatccacaacaccagcagacccttcagagacatgccgccctctaccaagaagccagangcctaggancatacaacatccatatttttttagaaaaaagagtcaaaaggagcatctatgagannnnnnaggggtgcaggctgaagcagcgcctcaacagccagggacatgtaggcaacacgagcaggcacagcgcggccaccactgtccacacgctcacacaagccaggcccgcaggtttcnggagagctagcaggttacattcaggcagatnnccctttnntnncccaaacccacagaaccccaaacaaggcatcaccangaaagacacgggaaagccaaatnacagttgaaccagggacagagaacccttggccccactnatgtcccaagccaccagcagctgcttccaaaatccctatgctattacantgggaattatatcatttaananncctgattattccaggcttctaatctttcatataaaactgcctttgttttgctgctttgttcaactgng

SEQ ID NO: 602331 - DNA, 475 bp, Homo sapiens
accagtgtcctgcgatgcactgtgtctgtgcagcctttaccgcagctatcataagtggaaagcgagaagcatgtgaaagaacagacgaaaaaaaccagcataacgtccctaacctcagaaattaagatacacttagtgaacacagtgctgacgactttgggtagcaaaatctgcacggttcttaaaatgggagtcttcaaaagtacttcttcaaattcaaaagctaagaaaaccaaagagggaccagttacacaggcttactggagatgccgcctgtcatgaagatgaccatcagtcctacttcccagacacagtgagaaccggtgagcctgacgaacctgaaggaaaaggccggctgacgggtgctagatgcaatagactatacaagaacacaccgggtcaactcatcattgacagcgagagacacactactgctcctcctggctgatgcacggctgcctttctgcacctcaag

SEQ ID NO: 602332 - DNA, 272 bp, Homo sapiens
gatcaggaaaaggtccctcctttgcagaggcaaaagaaaatccacttcctcaaggatctgtagattataataatcaaaaacgtggaaaaagagaaagccaaacatctattcctgattattttatgacaggaatcacaaacattaataatgagcttcagtggtataaaattgaaaacatttgatgtaatctgatttcagatccagtcgagtatagttcattggtgtccactgggagtgaatccatgaggcggcggttggccttagccgcgcct

SEQ ID NO: 602333 - DNA, 310 bp, Homo sapiens
ggaagatgaggatgacaccgaggaggctgaagaggacgatgaagaagaagaagaagagatgatggtgccagggatggaaggcaaagaggagcctgctcttacagttgtacaacagcgtgttgcccttatacgagggaagcagtttattttggccaacgcaggagacttttgctttttgatctttaggcttgcaaagctttagacattttcctttcttcaaaccagaggtgtaggtgatctcacgcgtctaaggatgttctggtggcaggctaccatgtgtggcgtcgtcagcggggctcttatcttctcc

SEQ ID NO: 602334 - DNA, 177 bp, Homo sapiens
tgtcggtaccatcagaagaggcattaaacaagaatgcagcaaacagctggctgtccggtctccctgcaccaggccctgctctgctgccagcctgctggaacaggaccaactccgctgcccacttctgcgcccagcacccactcgcagctgccaagatcactggcctcttctgatcag

SEQ ID NO: 602335 - DNA, 205 bp, Homo sapiens
ctcttctttattctcttattttatttatttctttatttttgagacagagtctcactttttgcccttgatgaaatggactggcccaatcatggctcactgcagcctcaaaatcctggcctcaagaaatcctccagactcagcctcctaaagtgctgggattacaggcatgagccacagcacctgacctagactgttttaaactaga

SEQ ID NO: 602336 - DNA, 405 bp, Homo sapiens
cttttaagggaactatgtaaacagggcaccagtccagtcatcccaaggggctttttattggctctataaagcgaatctcgattcctcaaagcagtctcgtcatatccaaaaatacgtcatcccagtccaagccttggtagaataaccagggtctccaattgtgtcctgttacaaggacaacagattcttactgaactcatgcaaagaactacattgccataaaataagaatacctcatgaatcgcttccagatttttgagaaatcaggtagagaaaaagacaaatatttcagttttgctcacaaaagtatatgtcactcaattgctatagctataaatagctcaaaaagaaaaaggttttctgactctggaaaacaaaatataaaaagagtcagcaaggtttcga

SEQ ID NO: 602337 - DNA, 335 bp, Homo sapiens
aaagttttcttgtagtaattgcatagattgaggtcttagatttaatacatttaatacatttttgtttgatttttgtatatggcaagagatggaggcctagtttcattcttctgcatatagatttccagttttctaagcactatctatcgaagagacgtgtcttttccccagtgtatgttcttggcaactttgtcgaaaatgggttcactgcaggtgtgtggatagacttatacggtcagttggttttatggggtcgtgtttgttgaatgactgagtgaaagaaatcaaagatctaaattaagtagagacataccatgcccacaggttggaagctt

SEQ ID NO: 602338 - DNA, 652 bp, Homo sapiens
ggggcgataatggcggcgtcgaggctggagctaaacctggtgcggctgctatcccgctgcgaggcgatggcagcggagaaactgggacccggacgagtggctgcctggagaagtacgtggtgagccctagaggacatgttgcatggccctgaaggtccgacgcgagctaaaccgggcctctgaggtgatcaatgaatattcctggcaggggtggcattttctgaagggggatgctgcaagccgagaagcatgaccttcctcctcaagagaaaagcactggccaaccatgttcctggcccctggccgtgttgccaaccaacaggccagagagcgaggtgcccgccacaaagacggtgcattctgcaggtcacggggcgcggtacacccagccgagatgcggagtgagctactaggcaacggaactctgcagagcctgagatggacgtagggaaggagaactggagtggcagggtcccagccagtgagtgagaaagcagtcggcagctgagcttagacctcgtcctgcagcgacatcaagaacctccaggaaaagctggggaagagatgctagggactggccggagcctcagacacattaccttggccgcccagagttgtctcaagagggacacaagaccctgtcacactcatg

SEQ ID NO: 602339 - DNA, 733 bp, Homo sapiens
gtaaggtgccacaggattaagctgaaagcttttctttgttggcggtaagaactttaaatgtgaaataaccttttgcagtttaagtcctgtaaaccacattgaagcatggagatgaggcacaggaatagtactcactgaagttgaaatgactgccccacttccaagatcttccttgtgtttacacccccgtgtatgttataccaatccgaggccttttgtagatgctttgctgacttgttcagctctgtaaaacacccgaaatcacgaccccttttgtaaagcggaaaatcactgttacactggaacactgtcctgtatatagtcaccacctaacctggtaatggagtcttaatgataagtgccagataataatttaatgatgggattagtctgatcgcttaatatgcacccatcctggagagtgaattacttgcactcacgatatagtgatatttattatttctgtaccacgagagaaaagatacactataaaacactatgcttacccttacactgccaccgccggatttcactgctccactaatcttttctattttttaatttaccccttctgtaaatgatgtgcatggaatatgccttatagaaaaatgctgttcataatttgactacgtggaaaagtgcctatatggtggtaatgctagtaaggccaataagaccaattatcatgttggtttactacatcccccgttaacctttcatattgtgatgttta

SEQ ID NO: 602340 - DNA, 131 bp, Homo sapiens
acctatatgccgctaggctgtatacctatgagacggaaggactgtgtgaagaactatccaacattccatagtgtaattgtgatcgctactgtggcctgggcgatggctaggagaggttcaaagattgcagg

SEQ ID NO: 602341 - DNA, 109 bp, Homo sapiens
ccttcgcctgttatccagcgcttgttgaggtcgaggcaggtggatacttagcccaggggtttgagaccagcctggattacatggacaaaaccccatctctacaaaaaaa

SEQ ID NO: 602342 - DNA, 729 bp, Homo sapiens
  misc_feature (431)..(431): n is a, c, g, or t
tccagccatacacttgcttttttttaaatcagtttttttcaaaatgcagccaaatcttaatgattgggacagcccaaagtacccagcccttatttccactgtggagtttagttttacccccacagcgagttagacacccaggtgcgtggtttgtggttctccgtggcccatgtggtgtgggacgagccgtgtgagagggtgtgagtgggaagggtctcttagccaacagaggtgagggtgcgtgagtgtgccacgcggcgaggggtgcttctctgtggcgagaacgagcccttagagagcaagaggtatacagcgagaggagcaccactctcgcgctttcgagaaccacgcgagaggcggggttttgcggacacccgagagagggcgaggcaacttttttctccctctcccacttgtgtggcaaagagcgngcacacagcggcgtgtttgtggtctcttctctctatatcctctctatgttgtggcgtcttttttcctatataaagggggcggctcaagcgacgctactagcgcgccgctgtagcacgcggggtctccagaggagatgtgggggtcctgagggggcgcgttcaacagtgtgggcgagcggagggcaccccctgtggcactgtgggattgagaggtgtcgccctgtggaaaaacccctgtgtgtggggggggcgttttcagcccctgagagggggcccccttttgtggaggggctaaatg

SEQ ID NO: 602343 - DNA, 1039 bp, Homo sapiens
gcaatgagtgctgctgctaactgcggtccccgtgcacgcaccatctgttgccatccctggccggcctgaggccattgccagattcttggacagatggcaaatgttcattgacaccctgtgatccatgtgacaacccctctaggcttggggtccctgttgcaggttccctgagcagtttctgggatattgcccatacccagacctgtatcaggctaacaggcacgaatcgagcctaccgcacacacgcgctctgcagtgacctggcaaccagttgacgccacccaattacccaaatgactaacacgcaaggataccagcaacgactacacgctacctctcttcctcaccctctctggcgttagtgattgtgcacacgtttccacacttcatttgccttctcactattccccccattgcaaggtgcacgtggaactgcaccacaggctaatgcctttttcccctacgcctagggccttgactaacttcacccacaccggccgtgcctgtgccaaagatcagctatcggcaccatcgctaaaccggttggccgccttttacacccaataggcccggtgctcaccacttaccggggatatctttggcactgcacgtgtgagagtccgacgccaattgcacggaggtaagaagcgcctctttacagcctggcccacaactcgagaggtgaacgcgagagaggcggtgaaacttcccggtacttcctggggctacaacaccagcagctggtgttacatggcccacagcgcgttccatccaaggatcgcctatggggccatggcgtacatctcccccattggaccccctcttaaccactgcaaacgtcgttggaccccacagaagtatccataagtgaaacccacgcgtcaccgggctactggaacttgcacctaaccctgcgccactcatatatcccatgtagactcgcattgtcgccacggcgcgaaacacgcaacagtaaagaggcgtattatgcccagtgtgtacatcatcgacgcccaaaagccttcctacttggagccag

SEQ ID NO: 602344 - DNA, 371 bp, Homo sapiens
gtgatgttatcccaacacaaaatacaaaaaaaaaaaattagccgtgcgtgtggcatgcgcgtgtatcccagctactctggaggccaaggagggaggatcacttgagcccgggaggcagaggttggcttgtaggccacatcttatcactgcactccagtctgcgtgacaaagcaggactccatctcaaataaataaatacaaattggccgggtgcggggactcatgcctgtaatcccagcacttttggagaccaaggcaggtggatcttttgaggtcagtagatcaaaaccatgctggccaacattgtgaaaccccgtctttactaaaaatacaaaaagtagccgggcgtggtggtgtagggcgataaatca

SEQ ID NO: 602345 - DNA, 463 bp, Homo sapiens
  misc_feature (17)..(17): n is a, c, g, or t
agcctttgtaaaagganaataaatcctggggcctcaaaatcactaagctaaagtgaaaagtcaagctgggaactgctcagggcaaacctgcctcccattctattcgaagtcacccctctgctcactgagataaatgcatatctgattgactccttgggaaaggctaatcagaaactcaaaagggctgggcgcaatagctcacacctgtaatcccagcactttgggaggccaagggaggtggatcacttaaagtcaggagttcaagaccagcctggccaacatggcgaaaccccatctctactaaaaatacaaaaattagacaggcatgatgtcatgcacctgtaatcccagctactcgggaggctgaggcaggaaaatcacttgaaccctggaggcagaggttgcagtgagccaagataacgccactgcactccagactgggtaacagagtgacaccctgtcc

SEQ ID NO: 602346 - DNA, 999 bp, Homo sapiens
cccaagctggacacctttctggagcacatcagaagccaccaggaggagctggtgtactccgcgtgccttctctgtagctgggacctatcctcttcacctcgatatgtagcctggcgctttactagcagctacttccacgaacagccctccatgaacgagctgcagctcactcgagtagagcgatcatgctgcagtcataggacgttgtgtctcagttggtgttagaccatggtactctaaactcacggagtccctatgagagcaaccatggtgcaagaagaggcactcaataacgtaacacgctgcgcgtacatggctgtagtcggtcgttctcgctcatgtagaaatacctacacttccgcggaggtcactttggggacaaccagtgtgaaggtaaggggggcacgtcattaagcgttgcccacgtagtctcgtaacgagcttcataaggtggaaccgccgtcatgtaaccgtctaagcctgacgagggctcactatcccaccatcccgtggagaaggcgtcgtgaccagaattgctcgatggttggtatactgtgagctatctaactcgccgagaaaacgaaggctgtaagcatcaaagctggactggatcccacgtagcccttcgagtgaagatagcaacattgaccccatgtctcgagatgtgtgaaggtgtggcttcaagggagttacagaacaggctggacgaaactagatggtcgcatttatccgtactccctatcgctggtatagaagggtgtcccgtggatttgattgcacgatggtgttctgcagcagatggagatgacatcccgagcggacaaggctgaaaacccgtagttgacatactactcaggggcggtggtgacaggatcgcttccaggtggccttgggtgatagaagagtcccacacagttgtgggcaaccttgagggcaaaagaggattgcactcttgtttgcacacccctttgcctagaggagaaacattccagaaaggga

SEQ ID NO: 602347 - DNA, 420 bp, Homo sapiens
gagctacggagaaggagcatgatgttcaactaaggtgtggactttgtgctggacacaggggttcagcatgttgactacgctgggctcagtgcaggactcttgtatggctgcctctcctagctttccactgcgcatggatatataagctgcagccacactgcatagcccgtcttaacctctactaccttatttggcgccagccactgcgcccgactttcctccacatgatctcatcttacgctgcactcaatcgagtggatctatagtatgaactaatctgaatgcgatatataagacgcccgagctgttcactgtatgagccatatttgatgaggctgagctgcgtgctcatagctagactacagagatcataatgctgctctgtgcataccattgggagtctgggctatgagcatggcg

SEQ ID NO: 602348 - DNA, 1197 bp, Homo sapiens
gagagagagagaactagtctcgagttttatttatattatattattttttttttcccggggggagtgggaataatggggaacatatacacacacacaggggcgctaaaaagagaggattaacttcacaaagtggcaagaagacagagggaaccaacaagagagcgccgaagggcgcgcaaagggtacgcacgcgaatcacaccccaacagggggcgaaatgtggagtgggagagaagggcatctcccactctcacacagagagagagaagggggagaacccggacatgagcgagcgccagggcccaaggcaggcgggcacacacacacccggacaccacggggccccctctggtgcgacactcggcaaatcagagaccacgcgcgcacacacagagtataatataccacacgcgcctgtggggcccccccaagactaggggcgcctcccatgtgaggacaaagaagagcggcgttaaaaaaaagaagagaaataaagaaggcgctatatcgtgtggacaacaccccccttcttacccccctcctcttaagacccgcgagagatataggagaacacacatgcgcgcgacaaatacagacacctacagagggcaaccccccgcgcggagaaaacagcggaggagagggcgcgtgcggagggagagcaagagaacgtgggcgctccgaacaaaagaagatcatacacaacgagagacaaaatatataaacgcgcgggggttccgcgacaacagacagcaaattccggcgcgcaagaaaaaaacacctcactaatattaccctaccataacactcccgccaacaactggtgggaaccacacccgtgatgcgaacgaatatacccgagagccccataacaccacaagcatacccaaaggggggctcacacccccccccaagggggggcaacctccacgacaaccaaggggtaccagcgacaccaaccacgtggtgagacacaaagttcatcgtgcacccacgccggcgaacaaaacaacacagccgatgccaacagcaaccgacgacacaaaacgcgccccaacatccgaaagaggagcgcgactcccgcccggcacaccagaaacagaccggacccaaaacacaccgccacgaagccggacgccagactaacaacaccgcgaagcccacgaaaaactaacaaggcaccaacccccccctgcg

SEQ ID NO: 602349 - DNA, 469 bp, Homo sapiens
  misc_feature (30)..(30): n is a, c, g, or t
gccatcttcttgtcctgaagcatttgaaanctgggtcccagaaccttctgctcctttgtctgagattctcacatgtaccatgcagggacttgatcaaacagcagatctccatagcttctgcaggtctgtgcagtcaatagctctacctacagtccaccatattgtttgagaagtcttatacatattgctgctatacactgaagttaggggccacagccttgctttttttgcatgggggaaaaatcctcaatccttcaatctttccttagatatcaccttctaaatgagccctactcttatgtatattgttcctacttatgtccacctcccaaccagcatctcactctctcctgtcctcggctcctcctccttcacctgttttcccttgtctgtataatcttgtagaatactggagctttctttcccagcatgcttttgtttcttaccaccagcatagaaactgccttac

SEQ ID NO: 602350 - DNA, 866 bp, Homo sapiens
cactagctagtcaggtctggtgttatcggccgagggcgggagctgcgcgcgcgcccgtcccagctgccgccccgcgcggcccgccgcggccaggatgctggaggaagcgggcgaggtgctggagaacatgctgaagtgcgtcttgttctgcctctcggcttcatcgtcttcctgcccgctgtgctgctgctggtgtgcggccgcctgctgtcctgcctgcgcgacgtcctgctgcacgatgttcacctgtgtacctgcgagtgcagcacgtacggacctgctagggccatgccctatctggcaacacggaactgcagttgctgacacagcggaggctgctgcacagatggcgtgctgggagtgtgcttgagcctgccgcctgcgtgctcatgcgtgctactggacttctcgctacgagcagtaccagaatggccctgcggcagtcgtgcagggctgccgtggtcatcatcctgcccagggccatgtgccgcctgtgccccagtgacgtctgtcctgtgcaattcatggagatcgagcctggagatgctaggccatggagacctgcccgtccccgtgtacttttgccgtggaggacgaggccctgctgtctatctacaagcagacccagggctgcctccgcctcccagtggctccgccgtctgctgctgaagtactgctgctgcactggcactgccacggcttccagatggtcaccagcggggtacagagcgaggccgtgagtgactggctgattgcagcgtggagggcggtgacgggctggctggtaggcctccccatcgtttgtggccctagatgtttgagggcccctggtgtgtgggcggcccggccggcttcctgctcgctca

SEQ ID NO: 602351 - DNA, 470 bp, Homo sapiens
  misc_feature (10)..(10): n is a, c, g, or t
aggcgcacantgagatcctgggggagcaaggcttccagtccctcatggaaacggtggacacagagattgtcacccagctgcaggagtttttgcaaggattctaagagcacgtgtcatgtggccaccatcccttctgaaagaagctgagtaacccagcctgccatccatttatgagcctgcctgagataagatcatttgtgtatgaatataaagaaaccaagaccataaattttttactataaaatataaagaataagtataaatcccaaatattaaagtcagaaaactattcctcaaaagaatttaattttatatttatgaggggccctgtgctgactagaggtgcatttattgagagtagctgcattgtctcttgttaagaaactcgctgattatctttgaatcatgagctcttaacacttggagaagatgaaggttgatgttccagatgtttttctgcaacccaaatt

SEQ ID NO: 602352 - DNA, 707 bp, Homo sapiens
  misc_feature (52)..(52): n is a, c, g, or t
  misc_feature (55)..(55): n is a, c, g, or t
gaggtcgatctagacgatccctaggtagatttagtgctgggggacgccgacnatnacatcagcctcaccgattcggagtccgacggttatcagcaccaaagcgccggcagcggcaagggcatcgccgcgaacttcggctaccgctttagcccggacctggaaacgcgcttctacttgcgttaccgcgaaaccaccaacgattcacccggcaggctcacgcgtgaccagatcagccatgatccgcgtgccgccaacagcctcaatgccgcccacgattcaaagcgcctgcaaccgggctccacctggattgccaacaagaccaccttgcggttggacgataatgcgcgggtcgaggtcgggctggcctatcacgattaccccatggacctgcgcgaaggcaccaaccgcctcaaagttgcctacaccgatatcagcggcaccctgaattacatccggcaggacagcctgttcggccatgccagcaccaccactctcggcctgcgtactacccaggcgatgccgaacaatggcgcgtcggaatacgtgcgcatccctgcgggcaatactgccatttatgcccccggcaccaagacccgcgactacagctacctgggctccgataccgtgctgcatgtaggcaacgagctggaactggtggaggatctgtggctgaccaccggccttgccgccatcaaatctacgtgggc

SEQ ID NO: 602353 - DNA, 409 bp, Homo sapiens
tcgaccctgcctcagcctccccagtagccgagactacaggcatgtgccaccatgcctggctaattttttaaagtttattttttttgtaaagagggagtcttgctgtgttgcctaggttggtctcaaaatcctggcctcaagagatcctcctgcctctgcctcccaaaactctgggattacaggtgtgagccactgcacgtggccatatcatttttttttaatgtgaccaaattgaggccgggcattgttgctgacgcctgtaatcccagcactttgggaggccgaagttggaatatcacttgaggccaggaatttgagaccaccctggccaacatggtgaagccccgtctctactgaaaatacaaaaattagctgggcgtggtggtgtaagtctgtagtcccggttact

SEQ ID NO: 602354 - DNA, 257 bp, Homo sapiens
acgtattcgacgcgccattgttcggcatcgcctgggcagtacgcaggccgagagtggtggtgctggcatggccgaacaggcgcgtcggaatacgtgcgcatccctgcgggcaatactgccatttatgcccccggcaccaagacccgcgactacagctacctgggctccgataccgtgctgcatgtaggcaacgagctggaactggtggaggatctgtggctgaccaccggccttgccgccatcaaatctacgtgggc

SEQ ID NO: 602355 - DNA, 1017 bp, Homo sapiens
gggaggaggagcctgtggcccccagcagtgtggcacccaggtggctggaggagtgaggccgctctgcagctggccctccacctggtcactggagcctcaatggtcaggtggctgagcagtgaggacggctgctgccctgctggcaagccctaaccctctccctgctggagcagaccccgttggagtgcagaagagcccccagatgtgggtggacttgatggcaaggcccagctggtggtgcactcggacctttgagcaggatgtggaggagctggacctgggcgctcatgggctgccttggaggtccacagtcacaggaggagacggttggggccctgagctgccgacacactgcctgcagagctgcagtgctcgactggagcggtgcatggatgtgagtgtagccctgagtggatgacatgcaacatcctccgattggattcggaggccacaacctgaccagtgcatgaccgacacattggatgagccacttctggctggaccctgagatcagagctatggcactattacccatatggagcatatcaggacccataccattgagagggggcagacgcccgaaggggaccattcgaaacaaacactgcgagcgtctggccagagcaacaaccgggggagttccaggaggatggttgatgggccttactaacgagaagcctggaaagactgcaccgcgagacaacaatacagcgtcgaacagagtgagaagcgcgtgtcgcaaaacagagatgctggcagaccgacacatcactcgacgcatccgttaccaagtggacagaccgcaccttgctttgccaggcgaaatagagaagaggggggcggcccgcgggagtggaggacaaggagagcggaggtaccacagcaggggaacaggacggcgaccaagggagaatgcagtagacaataatggaaccaacggggattacgaaccgagcagaagtcacggggcgactgaaaaaagagcacagggacaacgtaggaaagggcggtgagata

SEQ ID NO: 602356 - DNA, 851 bp, Homo sapiens
  misc_feature (416)..(416): n is a, c, g, or t
  misc_feature (427)..(427): n is a, c, g, or t
  misc_feature (637)..(637): n is a, c, g, or t
  misc_feature (688)..(688): n is a, c, g, or t
cttggtccccccttccttctctaacgcaccccttgtccctttccctacacgcttttccactgtgagactggaacatcatcgggacagcccaaaatgtcctcttcccctgcaggagctcagcaaacatccacagagtgaacattccaagcaacatagtccaggagccacgttccagccatggggcctctgcactgctgttctcttcacatggcctgcccttcccccagaaagagagaagaggccctctctggttgtcccatcaaaactccacccttctctcaccctcctcccagctgtatcccttctctgcagccctaacatgcattccactttatttcccttgtctactgtctgcctctctaactactaagtcagttccagccgctccaggatttttgtcttttcagtttagcccnggttcctcagngccttagtgactagtgtgtagtgcctagcagccagtagatgctcaataactgcttgctgattgactggggtgagctccccatccatggagctatttcaagccaagcctagacgatctttcagggctagttctaacctaagacttggtagttccatgactctcttcctggcccagaccgaaaaggaactttcagcaggaacccgggactgngatctgagatggggctccttggaggactctgactaggaagagagacggganggcgcaccaaaaacacaagcccttcatgtgtctcccaggcgtaggtctggggaatcccccaggcccctcaggatcgaccctgctggccctggatctccaggacgcgtccctctgacctgcctgccgggtctgtgagtccccgggcagacaaggtagagccgag

SEQ ID NO: 602357 - DNA, 1021 bp, Homo sapiens
gcagtgagccaggattgtgccactggactccagcctgggcaacagagggagatgccgtctcaaaaaaaaaaaaaaaaaaaaaaaaaacccgcgggtttcttaagggatggggggggggttataaaaaaagagggcaggtagagaggatgaacctccaggggtttgggggaccggacagggggagttaatttatgggagaatagggcaacttgtaggagggcacagaatttgaagaggcaaagaaacttcaagaaagacgaacgcgttttggggtatggtcagcattgggagaaggcccttttgggacggtcacaccggggaagaatggtctgaaggctaggccagatgcgaattcgatgaaacctgggaaattccagaaggaagagagggttcagggctacgataaattacctttcgggaaacattaccatccaggggtaatcaacattaccttttttaaaagcgccattggggcgccttatgagaaggacacccttttagaaagatgtcgccttggtaacactacggagaacactgtggcgcccaggggcattgatctccccacattaccaggggtcacggggaaaacggattcaggagcggacaccaggcaaacgggaggttccaaccaaaaaagaccgtctgtgacggggacagactccgaggagagaacccaggcaggggtgttgtcgttggcaggggtgccagtcttaagaaagtgttggtcacacacaggaggcgtgtcacgacaagggcttaaaaacttaacccttggcttcagggctcaccaagcggtgtggcacgctaaggcgtgtctaaaacactaaaccggtccgggattgccaagaaatgggcatgtgtcttaaagttccgtggggttcacaccacaccccaatgttccaacccaaaggtgcttttgtcaggagccttggagtcccgtgcacgcgaggggtctctaacccgctgtatttatacatcctttactgcctatgtacagccaccatttttcactatttgcaaa

SEQ ID NO: 602358 - DNA, 110 bp, Homo sapiens
acgcaacacattcattcaatcaacatcacatgcacatgcacaggcaagggcaggcaaggcatcataccatcaccacctagtatgtaaatgcaacatgtgggcgtgctgca

SEQ ID NO: 602359 - DNA, 134 bp, Homo sapiens
gcggtccgtggggatacgatttgcccatcatgcaaaacccgtgaagcattagttaaactttacttcctccattgctaaccccactaaaacactcaccaagatcctcaatccccttgaccccctatgcctcatgc

SEQ ID NO: 602360 - DNA, 1238 bp, Homo sapiens
  misc_feature (330)..(330): n is a, c, g, or t
gttctcctcacctttagaagcaccagcagtgacttgtcacaatgactctgctgagccgtctgctggctcgttggggcatcctacctggagacaatgtcgtgtgctgctctggatccactgatacgtaatccatggactgaggatctcccaccggaagagtgcgagacccaggaagacggattgacattgctggaacatgggattcagggatgaaccacacagaacgtatcacactttatgatgcacacccaccaaagtctagtattgaagattcgcccatttacaagaccatattatctcgcttctagtcatgggccaccaggcaaattnccatatatgctatctcgactaattactgtggctattctatcaccctaaggtgtagcaactccggactttagctggcccttaatggccttagattggtaaccatacgcttgggccagccccatgggcgggccacaaactcctccggattgaaaacattccgtggcaatgagcccgtggaaatggtttaacggcttctggcgggaaacatttgacgaggatcggcggctggtagctccaagtcgtcccgaggattatcctatgggagacatacatcaccgttatccacatacagaaccctggggccaggaacacgtccagcctcacaacgctggaagcatttcggggcaaaaggcgtcgatgtttccgtccgaaacgttaggcgcccatgaaaagctgaggcaggattctagatccaaagggtaagcgaattagtggaaatagacgtggcgctaatgcaactaatccagactccgtaactagtgctcggatcgtaccaggggcacacgaccccgtaatgaacagagctaataaattctggtcgatcaatcgcaagaattgcttggatacctaaccggctaactacctaggagggggaacatggctgcttggaaataaggcgcctcctggagagcgctaggacattgcaccaacttgcaagtgtggtcggcacatcttgggtagacatctgaactgatccattgcccttgagaatggagcccatagcccgttgtcaaaatcaaacactgtgtcttggaacatgtgttcgacgtggacccacgctcgcacgggaatacgagttgtccatcaccacaccgtttttggacactgcaagggcgtacaaccagacacatgtggtaaagcacagggcagccaattggtatatcaacgggcgttgtacacagtcggca

SEQ ID NO: 602361 - DNA, 118 bp, Homo sapiens
ggccggtcggtctaagtagtgaaaacatttgacgtacatgaagactcgtataaataagtcaacttttctgtgggactcgcgtttatactcgaattcctcgggtgcccctcgttgtctc

SEQ ID NO: 602362 - DNA, 367 bp, Homo sapiens
cctacgggttcgacgggcaccggccggtagggcactccgtcgactacgtgtgggggaacactggctacttttacaactacgagaccacgtcacgggacagacacgtcttaggactaaacacttccgttgactcacgacgactcttacgcggggactgacacgaccgacacgactcgacgacccgacgacacgaccggacgctttttggcacgacacggacgcacggactctcgaccacgctgacccttgacgacacgcttggtgacgaccggagcagacagacgacggtgtgggaccacgggaacctggactagacctcaaagacactcaggactgagcgaccactaaactacggactaccagatac

SEQ ID NO: 602363 - DNA, 1117 bp, Homo sapiens
ggagagaactagtctcgagtttacgatgttattttcgaaaagcacttgtctcctttattgaacatctgcagggggcccctctgccctgaccaggcagccaaaaaacaagcaggcaggtggtggggggcagggtgagcatggggcaggaagacgcccaccctcattatccagtccttgaaaaatggcttgacaaatgggactctcatggccctgaggcaaacatctccacctgagtgtccggggcgaatctgcatgcgccaagaatgaagccctcggccactgtgcagggttgcctgccgcataccttatctacatactcgacttatggccccttcaagaatatagaatctgtgccacagaagcccgtgtgtccagacaccaagagcgagtacatcagatatcagcacgtccagggggcaaagtgggcttgaagttcacgccaccttgtggcaccagggtaacactctgtgctacccagggtgggcattcaatagagaaccttataatacacaaaacagcgtgacgggccctgtgtggccattttgtgcgcctgtggctacacgacaggcattgaagggattcttacgctaacagggggatagtagacgcctacgcttaacaagaagccgaaggtgtcattagagggagagccccgaggaaaccgtgggatacactctccagcagagtgttcactctacccctcaaataccagtggaaccaattcttccaaccttgggggccctttgccccacattagtacggcactaccacgatgtgttcccctgttatttgtcgcccaaggaggcccaaagtgtcccccactccgccgcatatagtaagcatgtcccccccagggaaaaatgcgtaggggagcaccctttatcacacagcccacaaaaaccaacggtggtcgcaaacaaaagttgctccttcctgggggccccgaggggtttccccgagacgagaagtactctcaccagtcgtccccccatagtgtgattgtggaacaagcaccatggtcccccccaggatatacataagggtgccccccgggtgtccgcgtgcgtgagaccacagcagcattgataaccattctccatcacccccccttttcaag

SEQ ID NO: 602364 - DNA, 350 bp, Homo sapiens
  misc_feature (115)..(115): n is a, c, g, or t
  misc_feature (195)..(195): n is a, c, g, or t
  misc_feature (252)..(252): n is a, c, g, or t
  misc_feature (283)..(283): n is a, c, g, or t
  misc_feature (336)..(336): n is a, c, g, or t
tactagttctcattgcatcagcgggcccagttgatagagcagcagaagcaacagttcctgcgggagcaaggggagcagcaggaggagtaggaggagattgtgggggcacaggagntggagcactcacatctcccccgggagcacctccagacacaggggtctccatccccagtggaggaggtcactcagttacanggctctccccagtatatagcaggcgtgagaagacaaggcagccctccagagtcatgngaacgacacgtctgatgacacagagcgcagntcatgatgggtaatagcaccctcccagacccctgggacgatcgacaccgcagntgcgcaggcggaga

SEQ ID NO: 602365 - DNA, 222 bp, Homo sapiens
gggaaaacaaaataaattttttcggccccccccacataacattttccctgaaggggagggtccctggcacctggcccaatttccacaaggggaggggtgggccccttccctccttttactccctaattggcccaaagcttttgaacagacccttaaaccaagcaaaggaagccttggggggccttccccccctgggggggtacatttgaaattcctcgggcc

SEQ ID NO: 602366 - DNA, 229 bp, Homo sapiens
tagtgactcaccaaggaattaatttttacctagaaatccatgcctgagcaacatagtgaaagtccatctctacaaaaattacaaaaattagccaggtatggtgcctgtagtctcagctatttgggaggcagaagtgggaggattgctggagcctgggaggttgaggcagcagtgagctatgattgtaccactgcactccaacttgggcgacagcgcgaaaaacagtctt

SEQ ID NO: 602367 - DNA, 188 bp, Homo sapiens
gagatcatgccactgaattccagcctgggtgacagagcgaagaccccgtctcaaaacaaacaaacaaacaaaaaatgaagatcaattttcatcctactcattcccagataatactggtcccaaaccattacttctgcctgccactggcacaaatacagtaggaatgccatccccttctgtcgtcttct

SEQ ID NO: 602368 - DNA, 154 bp, Homo sapiens
gcgccattcgaggcttcttccggggggctgagatctagagaggaggggtgtgtgctgctgggagtcgagtgccccgggcgctgtcgtgcctgtcatctggtgtggtgtggtggcccggcctggggtgtccttctgtggtggtagtctgcggcag

SEQ ID NO: 602369 - DNA, 113 bp, Homo sapiens
atgtagtaaacaatgaaaataaagctattttctaggttaaggctatttctaggcttatttagtaataaagctatgctttagaagttgcattgctgcctgcaatcccagcactt

SEQ ID NO: 602370 - DNA, 430 bp, Homo sapiens
  misc_feature (422)..(422): n is a, c, g, or t
ctgtggaagacggggcccacatttctgagggcaggactcgaaacaggcggttccaccgggccccggcccattgctcctgggggttaatttggtcttggaagatgacctgtgcttcccactgtcccgtcccccagcgccctagatcggtgggcaacgtgagtcttcctaggggagggcccgggccagggcgctgcagtaggagtggacacgtttcagtcttgggaaggcgggttcatgcagggactgtgccaggcatggggctgtctggtaccagggagagcccgctgggcccactgaggcagacacacagccctcgggggcatctcacccctccccagcctccaggcagggcaactcctagagacaaccggtgtcacggctacttacgtctgaccccaatccctcccgctgctgtggaaggngagggagg

SEQ ID NO: 602371 - DNA, 163 bp, Homo sapiens
gctagcacgggaaaggagagagagtggaatggactgggagtctggggttagtagatgcaaactattacctttaaatagatgggcaatggggtcttgctgtatagtccagtgaactctgtccaatctcttggagatagaacatgcttggccttgccatatgcaa

SEQ ID NO: 602372 - DNA, 574 bp, Homo sapiens
  misc_feature (574)..(574): n is a, c, g, or t
acgcctgacctcaaaagatccgcccacctcggtctcccaaattgcgtgggattacaggcatgagccatcgtgcccggcctaaaaggccttaatctcgataggctttttgcacatgcactatataaattgagtgcagtactcaatacttacgcccttgcccccttctccctggatcttatttgctaaagaagacattgatttctcttgaaaatgtaacaaaatttttgttgaacattttagtgttgagtgaaaagatgagaattctcagacatgaattttttatttgataataggaaactgtagttataggggaaagtcagtattttgaaaaggcataccaaataggcaaatatttatggaggttctaacacaagcaaggctccctctgtcagaatggacatcaggaaaagtccacttggtgaacattcaataaaatttataagttgctgggggggataaaaaatatataaatttgccttaaaagttggtttgatggtctggaaacggtaaaagtaaggattgttttttttgccaagttcagaccaattggggcagccgtggtttttggcagcan

SEQ ID NO: 602373 - DNA, 1385 bp, Homo sapiens
aacatagcctgttctctaacacaatgcaaaaaaagacgtagaacaacatgtttacgatgtctctttcgctgactgctcactactaaaatctgtacgactgacatgctggctacacactgtgctaacttactgatccaccttatgtccttcaacacgctctgacgctctctctcactcctctctgaccctccacacacactgtctcacgacgcgcgcacgcgcccgcctcctaacacctacaaccaactcaagcgacacagcgatctgccccacagcctacttctcacactaccctaaggctctaccccattcccacctacattcttacggctacgcctcattctccggtcaactgcgtcctgcctcacaaccccttcaaccatcgccattcgggttgcttggcatctgccccttctcacgcacactacttccacgcacactctctcccctctcacccccattacccaccacgaccacacctacccttccaacacactacatctacactttcaccgaaaacaaaacacccacccccatcaccccaccccaaacgccccacctcactcctgcaaccctccttcttcctcctcgcaacgccggaagcccacccgcaacgcagccggcaacgcacccacggcaggcgcacacataccacaccctcaccccatataccactccaccaccacaccccttaccaattcgccatctgccaaaccagcacctaaccccttaccaatccactggctcccattcaccccacccccccataacctctcgcacaacaacctggcaccagcggcccacacacaccacacacaaactgcgcagaaaaccacaagggaccactcacacaaactccgcaacacccctcacacaccaccccactccccccaaccaccacacccccaccaccgaccaacatcatacctcaccccaacacaaggccacacacacgcccccagaccaaccccacaaacagccacacatacaccccgcacacacaaccggccacccccccaactaccccgcacaccccacccaaacccaccacccacaccgcggtcacccacagcccacctacccccaacccaccccgacaaccacccacaaacacacaccgcacccacaccacaccgcacccaaacaacaccgcaacaagcgcccccacgcacacacacacaccgccatccgcacccaaccacaccccgcgctcacaacgacagcagacacgcagcgaccacaccacaccagcagcgccgccaccaccacccccccatcaccccaccgccatcgcgccacacagcccctccaccacaccacacacgacagtaccgcccagctagcacccacaacaaccaaacaccaccgccaacaaccaacaacac

SEQ ID NO: 602374 - DNA, 180 bp, Homo sapiens
ggtgcatgcacgtgcgatatgaactcgttttgcactgtgtgtgcatgtggacatgtatactgtgcatgtgtggtatgtgcatacaaatgtgtgtgcatgtgtagctctgcatgtgtgttagcaagctctctgaccagcacagactgggccactaactacgcagcccccactagtgctcca

SEQ ID NO: 602375 - DNA, 156 bp, Homo sapiens
  misc_feature (102)..(102): n is a, c, g, or t
  misc_feature (109)..(109): n is a, c, g, or t
atgcttaaaattacatgagaaaagctcaattctgtattgtgcaggatattctaagcattgcaggacattcatattggtaaaactctgtttgaaatatcttanagttagnacaccaaactctattttacgtataaacacaagaataaccatttccca

SEQ ID NO: 602376 - DNA, 196 bp, Homo sapiens
aagcatttgtgaaagaacatcatgtccaagctaaaacctccgtgcccaagaaagcccaagggaaaggctgtgaagggacgtctcaatctcccaatgtgtgatgctgaaacaagcggcctggagtcgtgggaaggagggaagccttaccaagactcctgcaaaacccttggacctctcacgtggttgccgtatctgg

SEQ ID NO: 602377 - DNA, 216 bp, Homo sapiens
gctcgataaggccaagctgaaccactggtgaaaccctatctactaccgaaaatacaagaactagctgggcgtcgtggcgggcgcctgtatcgccaggtacacagtgaggctgaacgcatgtgaatcggttgagcctggcgagcgggggtggccgcgagctgagatctcctccgatttgcactccagcctgtgtgaaaattagtgttccgcagtctc

SEQ ID NO: 602378 - DNA, 440 bp, Homo sapiens
  misc_feature (13)..(13): n is a, c, g, or t
  misc_feature (94)..(94): n is a, c, g, or t
  misc_feature (120)..(120): n is a, c, g, or t
  misc_feature (152)..(152): n is a, c, g, or t
  misc_feature (158)..(158): n is a, c, g, or t
  misc_feature (172)..(172): n is a, c, g, or t
  misc_feature (174)..(174): n is a, c, g, or t
  misc_feature (261)..(261): n is a, c, g, or t
  misc_feature (263)..(263): n is a, c, g, or t
  misc_feature (318)..(318): n is a, c, g, or t
cggcctgaggagncgactgactgagcagcgcacccggggagcaaggaggcgcggtgaactgagcggcccctgagctgacagatacactgcgcantgggaacggcgagcgagccgacaggngagttgagggggccgcacattgaatcacctcngggccngcctggaattattncncttcctggatgaagatgaaccacagcttaaggaatttgcacctacacaaattgaatgcagttgttaatgacttctgggcagaaattncngagtccgtagacaaaatagaggttttataccgaagatgaaggtttcccggagtcnggcagtttgcagccttagtggcatctaaagtattttatcaccctgggggcttttgaggagtctctgaattatgctcttggacaggggacctcttcaatgtcaatgataactctgaatatgtg

SEQ ID NO: 602379 - DNA, 522 bp, Homo sapiens
ggctgagctacggcccaattctccctcagcttccgctcctccaccctatatatccttctatcacttcccgtcctcacaggcggtccagcttacagcttagttccgtgactagctcttccccacctgcccaacaatttcctcttagagaggtggctagagctgaaggcatagtcagggtacatgtacctttttctctatcagacctctctcagatcagtcagcgtttaggccctttctcatcagaccccactaaatatatacaggaattccaatatctaactctgtcctacaatttaacctggagtgacttaaatgttatcctgatttctaccctctccccagatgaacaggaaagagttttttctctagcccaatctcatgctgataaccgctggcttcaagaaccagacctccaggaaggcattagagcagttccctgagaggatccccaatggaactatcaggcagattccacaggtatagctaggcaagattacatgatttcctgcctagctgaagggc

SEQ ID NO: 602380 - DNA, 335 bp, Homo sapiens
atcttggacggagactctcactaactcactgttgaactgagacattgaggatacgtgagagagagaacctagtggatatctgggaggaaagctttgccagaacagagggagcacacatgttcttaagaagctcaagatcagtatgcttggctagaacatcaggcaggtccgtgctgactggagcaaagatagtaggagctgtcaagtcagagagctggctggggtacatttcacattaggcctcctagaccttctgcttttctctgagtgacatgtgaaaccattgaacagtttgaactagcgaatgatctggttttatatctcataccatgttg

SEQ ID NO: 602381 - DNA, 1252 bp, Homo sapiens
tgagtaagtctggctccgggggctccgatcgcctgcccggacgccgaccggcagccacgggaacgcgcaggcggacactccgtgcgctagccaaaccctttcgcgaactgggtcctcgtcgtgacgcatacgtcgcagggcactgctcgtctccacctcgctcctgccgccgcgtcgcaggcagaatgcttaaggatttgaaagagtgggtggaactaggggtatagcagtggtagcatgaaaggatgagagggatcacagccgtgagaggactgaggaaagcacgggacgcaccggagtcgagcgtgttctgaggaacgttgatcattgtgagcaagttgctagaagtacaaatgactggaagagaattgaggggcattaagcacgtcgtgaactcttggtgcaactatagatgttccgtcatggtttatagtaagactggtaggccttgcactctcagcctctgtcaaaatcgtcacccaaaggctggccataaattcggaagaagagccttgacatgctcaggtgacaaactagaatctttgcgcagcgtctggcacactgttcagcgtgcaaaaaccttccaagcatctcacagcatctaacacttaagctggacacataaactggaaagactatcagcaccgttgagaaccattgtgaacaaacgttagaatgtctgacaacagcctggaacctctttaagctgtgaggttaccaaccgtgaactgactaccgaagagagtgtcttcaaggctcctgcccccagacttacctcacttgcgatggcgtatgaccgaggagcgaccaggaagcaccctgaacctcaccactgcgcgaacgatggcatgaggaggactcggagcaacgaaggagagaccgcaacaagggagaaggatgaggcacgcaaccaacaccgacgcaggggcctggtgaccgcaacacggacgcctggcggaccgcagacacggcagcacagaggcaacaagcaacaaaagcggcaaagcaggacgaaccacacgcaccacagacacaacacagacgaagacaaacaggacaccctccacacagaagacagcacagagagcgaacacaccaacagcggacacaagacgagaacaagaaacgagagcacaagaaccagaaggggacacacaagcaacgaaggcacaacacgaaactggccaccaaccacgacccgcacgacgcgcagaagagagaagagacaacagagcagcaacaagccagcaca

SEQ ID NO: 602382 - DNA, 937 bp, Homo sapiens
tcttgaaaggccacctgtagaacatgcgagcaggaggaccaactctcaggcctcggtattcaggtcataaatatcggtgccaggacgtcgacgtgttgctggaacgttgtcagcacaagagggggtagcccaaatttcgtgtaaccgccgcgatcaatcttgttgggcggtgtttccccccgccaagtgtctggtttctttggaccccagagcggtaaatataattttctggacttcttacaagcaatcgggtaatattgccgtgctgtctaaagaaaatatcctccccggcgccatctgttgtaccaatgctcccggacgccccggccttttcggttccaacgggcagtcccgatactaaccccaagacaatgtttctcgagaacccatagacgaaaaaagcgggtttcacaagcccgtcccgtcttccccaatgggagactatttttttccggcccaaccctgtgagtatattctactagccggggattcccccaaaaacacccatctcgggtagcatgtttacaagtggcaaaccacattatgcgagggcaataagacaacaaaactgtcttcctcgcaaagaggaattatgaaggccattctgtctgacacaaagatacagtaagacaaactctctcaatcaaacaccccccgcttcccatgtgtggaaccacgcaaaagaaacacctcgcgtgtaataatattcagtaatagaaagcactcttctgagaagaatgcaaaaacaacaggaaagagcacaactattcaacaacctttttcttctgcagacgcccccctcatgttagatttccgcaactcgaaacaatattttacaaatcgtggcctccacagaccccaagtttcccaacttgcttccattttccgttgggggcccaaaaaaaacaaggaaaattctttttcgccccacaaaaca

SEQ ID NO: 602383 - DNA, 1013 bp, Homo sapiens
  misc_feature (6)..(6): n is a, c, g, or t
  misc_feature (68)..(68): n is a, c, g, or t
gattcnacgcaggtgatctgcaaggactggagcaatctggctgggaaaactacatcattctgaacatnacagagaacatagactgtgaggtgttccggcagcaccgggggccacagctcctggccctggtggaagaggtgctgccccgccatggcagtggccaccatggggcctggcacatctctctgagcaagcccagcgagaaggagcagcaccttctcatgacactggtgggcgagcagggggtgtgcccactcaagatgtcctttccatgctgggtgacatccgcaggagcctggaggagattggcatccagaactattccacaaccagcagctgccaggcgcgggccagccaggtgcgcagcgactacggcacgctcttcgtggtgctggtggtcattggggccatctgcatcatcatcattgcgcttggcctgctctacaactgctggcagcgccggctgcccaagctcaagcacgtgtcgcacggcgaggagtgcgcttcgtggagaacggctgccacgacaaccccacgctggacgtggccagcgacagccagtcggagatgcaggagaagcaccccagcctgaacggcggcggggccctcaacggcccggggagctggggggcgctcatggggggcaagcgggaccccgaggactcggacgtgttcgaggaggacacgcacctgtgagcgcagccgaggcgcaggccgagtgggccgccaggaccaagcgaggtggaccccgaaacggacggcccggagcccgcaccagccccgcgcctacccgggccgcccccgcggcctggccctcggcgcgggctccttcccgcttcccccgacttcacacggcggcttcggaccaactccctcactcccgcccgaggggcaggcctcaaagcccgccttggccccgctttcccgcccctgaaccccggccccgcgggcggcgggcggcgcttcctgcgccccgggactcaattaaacccgcccggagaccacgccgggcc

SEQ ID NO: 602384 - DNA, 1079 bp, Homo sapiens
  misc_feature (6)..(6): n is a, c, g, or t
  misc_feature (68)..(68): n is a, c, g, or t
  misc_feature (1014)..(1015): n is a, c, g, or t
  misc_feature (1018)..(1018): n is a, c, g, or t
gattcnacgcaggtgatctgcaaggactggagcaatctggctgggaaaactacatcattctgaacatnacagagaacatagactgtgaggtgttccggcagcaccgggggccacagctcctggccctggtggaagaggtgctgccccgccatggcagtggccaccatggggcctggcacatctctctgagcaagcccagcgagaaggagcagcaccttctcatgacactggtgggcgagcagggggtgtgcccactcaagatgtcctttccatgctgggtgacatccgcaggagcctggaggagattggcatccagaactattccacaaccagcagctgccaggcgcgggccagccaggtgcgcagcgactacggcacgctcttcgtggtgctggtggtcattggggccatctgcatcatcatcattgcgcttggcctgctctacaactgctggcagcgccggctgcccaagctcaagcacgtgtcgcacggcgaggagtgcgcttcgtggagaacggctgccacgacaaccccacgctggacgtggccagcgacagccagtcggagatgcaggagaagcaccccagcctgaacggcggcggggccctcaacggcccggggagctggggggcgctcatggggggcaagcgggaccccgaggactcggacgtgttcgaggaggacacgcacctgtgagcgcagccgaggcgcaggccgagtgggccgccaggaccaagcgaggtggaccccgaaacggacggcccggagcccgcaccagccccgcgcctacccgggccgcccccgcggcctggccctcggcgcgggctccttcccgcttcccccgacttcacacggcggcttcggaccaactccctcactcccgcccgaggggcaggcctcaaagcccgccttggccccgctttcccgcccctgaaccccggccccgcgggcggcgggcggcgcttcctgcgccccgggactcaattaaacccgcccggagaccacgccgggccnngcnaaaaaacaatacagcacagctcacacgcaatcagaaccaacaacgaacatacaaaaacggg

SEQ ID NO: 602385 - DNA, 1096 bp, Homo sapiens
  misc_feature (6)..(6): n is a, c, g, or t
  misc_feature (68)..(68): n is a, c, g, or t
gattcnacgcaggtgatctgcaaggactggagcaatctggctgggaaaactacatcattctgaacatnacagagaacatagactgtgaggtgttccggcagcaccgggggccacagctcctggccctggtggaagaggtgctgccccgccatggcagtggccaccatggggcctggcacatctctctgagcaagcccagcgagaaggagcagcaccttctcatgacactggtgggcgagcagggggtgtgcccactcaagatgtcctttccatgctgggtgacatccgcaggagcctggaggagccctaatgcaacctaccccaggaggaaccatggcaccccaggacctcagtctgaggaaacctggcccctcccaccgcttagagattggcatccagaactattccacaaccagcagctgccaggcgcgggccagccaggtgcgcagcgactacggcacgctcttcgtggtgctggtggtcattggggccatctgcatcatcatcattgcgcttggcctgctctacaactgctggcagcgccggctgcccaagctcaagcacgtgtcgcacggcgaggagtgcgcttcgtggagaacggctgccacgacaaccccacgctggacgtggccagcgacagccagtcggagatgcaggagaagcaccccagcctgaacggcggcggggccctcaacggcccggggagctggggggcgctcatggggggcaagcgggaccccgaggactcggacgtgttcgaggaggacacgcacctgtgagcgcagccgaggcgcaggccgagtgggccgccaggaccaagcgaggtggaccccgaaacggacggcccggagcccgcaccagccccgcgcctacccgggccgcccccgcggcctggccctcggcgcgggctccttcccgcttcccccgacttcacacggcggcttcggaccaactccctcactcccgcccgaggggcaggcctcaaagcccgccttggccccgctttcccgcccctgaaccccggccccgcgggcggcgggcggcgcttcctgcgccccgggactcaattaaacccgcccggagaccacgccgggcc

SEQ ID NO: 602386 - DNA, 153 bp, Homo sapiens
tagtcgtgggcaccgattattaggggaactagtcagattgccaaagcctccgattatgatcgggtattactagtgaagaagattattacaaatgcatgggctgcgacgataacgcttgtagatgtggtccttaccctgaagattgtcggctgg

SEQ ID NO: 602387 - DNA, 107 bp, Homo sapiens
tagaggatccccaaccatgtcgaacggactgatccaatatttgtgacgaacattagaggtgcgaagttgtccgtgaagagtgtgttggatcagtccgttcgcacttt

SEQ ID NO: 602388 - DNA, 191 bp, Homo sapiens
gacagcatcctaaccagcagaggtgcagtacagtgtcttgtcccagcagaaaagtgtcttcaggacagccctctaaagcacagtgagccaatgggtgttgacagaggggcagcctttgcacccccatggactcctataggcttaatacgtggtcctgactggacagaggctggagccatggacgttgaatc

SEQ ID NO: 602389 - DNA, 595 bp, Homo sapiens
gccgaaaccggccacccccgagggcctaacttcgcctctctcgtccttatcgcctcataccttccgtaaacccgcgcgcgcgcgcgcgctaagtccggtgcaactacggctacagtcgcccttcgcgcgaaaccgccacttgtctataaccttatataatacatgagttggaagtacaaagcgcaaagttcggggcgttcaacgagcgagtcaatctataccaaccgtgccgtgtctatcgtttgtcccttagctgggaaattcgctgcgttagtcgtaccaacgaactggttaatgtgtggggagaggtggcccgtgcaccgggtgtctccttgtccatctgtctatcgatctgtcgtgtctggctgcctggtcgtggtgagtggcactagtctatctaaaggtggcaacatcgccacttatagaactatgggacaatgtaggaaagaatacgcgagtaaaaggttagtcaaaggttatgaattgcaaaaaggttgtgccgtcggtgcccccctacaggtcttgttttttcgatgagtactataaaaactgatgtctaaactagaggcggtgaaattttgtaggatcaccaaga

SEQ ID NO: 602390 - DNA, 1854 bp, Homo sapiens
  misc_feature (555)..(555): n is a, c, g, or t
  misc_feature (1470)..(1470): n is a, c, g, or t
gcgtaggacatgaaagctccccgaggtgaatgatgccgtgcattactggcactccagcgtgcgtgtaacccacccgaagttaggaggaggacggatcaatgcccaagaggttcgcaaggtgcgtctagcgtccacacatctctgacttgctgtctaccacttcattcctgtcggagccaaaggacatacatgcaacccgtcacgtgacggtagcgagtggattgaagatcttgtcgctctatcaagcattcatcctgctcgcattcacctacgtgttgctctctctgttcgcttgtctcagatgatagacttagtactcgtgcagcctgtcccagaagtgaggttaactgatttgtgcacaccatgtgggccttgggttcccgttcatacacacgtagaacacgtattacgcactcgggggtgctgtatcacagttctttgggggtcttgccacccgatgtgtgccggcgatggtacattgcctgcatggcgttatcctcttcatcttttcttaccaagactgatgggggaaacgatgccaagagctgagagttnccgcggggagagggtggttagagacacaggtacccctgaatgtcatcaagaacgtgaagcgctgccttttatgagcgtaagggacaacacacgtccgcttcgagcagagattccctacaaataaacttttccctaggggaagaaagggcttattgaatacccgacacaaagattcggtaaaggcccccatggccctggatactcaatcttagtgaaattggagatgttatctgatgacatttgttgaagttagtaatatgagaggggagaggccaaagacggtaaagcgactcacatgcaaacgaaagcttaggattttcaaagtggaggcagtttgtgtaaggggaaagacaggtctgttatggccccattgtgaaacaaaggatgaaattctggtccatggacaccaccccccgtttccaaggaacttgggtttgccccttgacaaaggacatggcattgcacacacacttacacattcccgttagacaatggagatagcttacatacccagccggagaaaagcaatcctaaagaaaaggtgggggccacaggttaatgtacagaccgacgggcttcgaccccaacagggggtccatggtacccagggttcaaaatgccaaatgggggcgcattacagtggaacatactttttgcaacacacaagagagggtggcaccctaaagagttttaaaacatacaccccttggggtcaccagagggtaagcaaagacaaaggagacacgggcgaacccatttcttggtgtccccaatatatgattgctctcttcaaaaggcgcgggggacactgtgtggaaagagtccccatatgacctgggaaggaaggagataacccgcctaaagagagaggccaataatgacgtcgcacgtatagcagaacacacttggtagaanattgtactgaaaacagaaaacctgacaatttaatcccatggaataaaaagtaggtggagaggcaacacgagaaaacactagcacgggagaggcctcaccacacaggagtgtaagcaccagaccaccaagcgagaaaacgaagaggcgacacagaacacacgacagaaaaaccacaaggagcagacgacacacaagcgagcctgcctaccaaacagacggactgcacacagaggttctaaaacagacaagaagagcagaggcacaacccagagactgagccagaaagacagaacacaaaccagagagcacgacgaagacagacaaccacgaaccagtcaccagcttcagcagtcacaacgacagcacgacatgaagagcacatag

SEQ ID NO: 602391 - DNA, 156 bp, Homo sapiens
aggatagtatcacagacccgggaggtgtagttacctttggtgcatagagactgttgaaattcttctgggtggtctccttggtgaagcggcaggagacgagggctggtatgatgtccggaccccacctttgggatgtcaggtacatggaagtatctc

SEQ ID NO: 602392 - DNA, 875 bp, Homo sapiens
  misc_feature (1)..(1): n is a, c, g, or t
  misc_feature (3)..(4): n is a, c, g, or t
  misc_feature (11)..(12): n is a, c, g, or t
  misc_feature (18)..(18): n is a, c, g, or t
  misc_feature (32)..(32): n is a, c, g, or t
  misc_feature (38)..(39): n is a, c, g, or t
  misc_feature (69)..(69): n is a, c, g, or t
  misc_feature (80)..(80): n is a, c, g, or t
  misc_feature (82)..(82): n is a, c, g, or t
  misc_feature (89)..(89): n is a, c, g, or t
  misc_feature (91)..(91): n is a, c, g, or t
  misc_feature (103)..(103): n is a, c, g, or t
  misc_feature (122)..(122): n is a, c, g, or t
  misc_feature (161)..(161): n is a, c, g, or t
  misc_feature (165)..(165): n is a, c, g, or t
  misc_feature (175)..(175): n is a, c, g, or t
  misc_feature (177)..(177): n is a, c, g, or t
  misc_feature (182)..(182): n is a, c, g, or t
  misc_feature (184)..(184): n is a, c, g, or t
  misc_feature (186)..(186): n is a, c, g, or t
  misc_feature (198)..(199): n is a, c, g, or t
  misc_feature (204)..(204): n is a, c, g, or t
  misc_feature (213)..(213): n is a, c, g, or t
  misc_feature (220)..(220): n is a, c, g, or t
  misc_feature (234)..(235): n is a, c, g, or t
  misc_feature (255)..(255): n is a, c, g, or t
  misc_feature (259)..(260): n is a, c, g, or t
  misc_feature (270)..(270): n is a, c, g, or t
  misc_feature (277)..(277): n is a, c, g, or t
  misc_feature (280)..(280): n is a, c, g, or t
  misc_feature (286)..(287): n is a, c, g, or t
  misc_feature (289)..(289): n is a, c, g, or t
  misc_feature (297)..(297): n is a, c, g, or t
  misc_feature (306)..(306): n is a, c, g, or t
  misc_feature (308)..(308): n is a, c, g, or t
  misc_feature (355)..(355): n is a, c, g, or t
  misc_feature (369)..(369): n is a, c, g, or t
  misc_feature (380)..(380): n is a, c, g, or t
  misc_feature (384)..(384): n is a, c, g, or t
  misc_feature (391)..(391): n is a, c, g, or t
  misc_feature (393)..(394): n is a, c, g, or t
  misc_feature (403)..(403): n is a, c, g, or t
  misc_feature (419)..(419): n is a, c, g, or t
  misc_feature (421)..(421): n is a, c, g, or t
  misc_feature (437)..(437): n is a, c, g, or t
  misc_feature (451)..(451): n is a, c, g, or t
  misc_feature (458)..(459): n is a, c, g, or t
  misc_feature (461)..(461): n is a, c, g, or t
  misc_feature (482)..(482): n is a, c, g, or t
  misc_feature (501)..(501): n is a, c, g, or t
  misc_feature (549)..(549): n is a, c, g, or t
  misc_feature (678)..(678): n is a, c, g, or t
  misc_feature (701)..(701): n is a, c, g, or t
  misc_feature (765)..(765): n is a, c, g, or t
  misc_feature (857)..(857): n is a, c, g, or t
nannaaaaacnnaaaaangaacggccaaactnaaaacnnaaaggcaaaaaaaaaaaagggccaaaaaangggggggaaangnactgtcnantgttcgagggantaaaccaaaaaaaaaaccnaaaaacaaacatgtgtgtagcccgaaaaaaaaaaaaaangacnatttcatgtnangactncntnttggcttccccnncaaangcattcccngtgccantctgtacaaaggannaaccaaaaccaaggccaaanaaannaccacaaaanttggcancancaaaannancctcaaanaacatttcncncattttgaaaaaggccattcccgtaagcaatgaatcaaaacccgccngaagttgtggtccnatccgttccancccnaactgtncnnccacccccngtaatccacctttgananttttgcagcccttcangaggtacttcacancaaaaannanaggaaaaaacaatcgaagganctcaaaaaagtaaagtccntcttcaggcaagtaaaagttggttaggattttgattaagtagccaaantcgtaaccggtatgaaatgacaaccatttgaccccttcacagaggaccactccagaagttataagaagttctgcaaagtactgggtttcaattccttcctcctcatgttttttaaactggataccagangttgttagtagctctatagagtnctgggcatacatgtcctccgtcaaattaaatttaaaattaaactgccaagttgaagttcctggngggtattctccttgctcattcataaatgtcagttctagctgaattatctttaacaagtctacattacaccgcaatagttggtattgatagtnagcattgctcctgaattc

SEQ ID NO: 602393 - DNA, 347 bp, Homo sapiens
tttaagtgttaattgggaggtgagggtaggagatcaagaaaagaagtgtcaggatgtaattcagtgggtttatggtagatgtctcaccttggaagttatagctgctacctttgtctatcttgtattcgggtgagaaagccattgaatggaggagtgaaagagaattttagattgctcagatccgggagcaaggccaagggggaccaagggccttgcagggtaacttgaggacagagactcacctgatcggctctgcctgcacgtttctgcagtgatgacgcgtccgcaccctcaataattgctttccagttgaggaaaggagtgttctgtttgaaatcctcccagag

SEQ ID NO: 602394 - DNA, 121 bp, Homo sapiens
gccggcaccttatgactacagcgagacctgatgtcttgttgcagtgatgatgccaagggcagcttttctctgatgttctcagaagatcccatctttgggttctagattgataatgtgatag

SEQ ID NO: 602395 - DNA, 335 bp, Homo sapiens
gccgcgtcgaccttgaataaattttaagaattagaaatcctgtaggctgggcacagtggctcacgcctgtatttccagcgcttagggaagctggggcaggtggttcacatgaggtcggtcgggagttcgagaccagcctgaccaacatggaggaaccctatctctactaaaaatacaaaattacccgggtgtggtggtgcatgcctgtttcccagctactggggaggctgaggcaggagaatcccctgaacccgggaggcagaggtcgccagccatgaaccgagattgcaccattgcactccagcctgggcatcaagagcgaaactccgtctcca

SEQ ID NO: 602396 - DNA, 136 bp, Homo sapiens
ctttaggcaggacactgcctctcctcctagtttacgcctctagtcacctgactttaatagctccactccacccagggcatcctgttcaccatatcgagtcccttgtcagtccctgggggcctctcacgtcctggcc

SEQ ID NO: 602397 - DNA, 549 bp, Homo sapiens
  misc_feature (120)..(120): n is a, c, g, or t
  misc_feature (255)..(255): n is a, c, g, or t
  misc_feature (279)..(279): n is a, c, g, or t
  misc_feature (291)..(291): n is a, c, g, or t
  misc_feature (293)..(293): n is a, c, g, or t
  misc_feature (336)..(336): n is a, c, g, or t
  misc_feature (341)..(341): n is a, c, g, or t
  misc_feature (349)..(349): n is a, c, g, or t
  misc_feature (361)..(361): n is a, c, g, or t
  misc_feature (369)..(369): n is a, c, g, or t
  misc_feature (407)..(407): n is a, c, g, or t
  misc_feature (453)..(453): n is a, c, g, or t
  misc_feature (486)..(486): n is a, c, g, or t
ggaaggtcagcagccccgacagccgacagtcacagcagctctgacaagagcgttcctggagcccagctcctctccacagaggacaagcaggcagcagagaccatgggccccccctcagcngctccccgtggagggcacaggccctggcaggggctcctgatcacagcctcacttttaaccttctggcacccgcccaccactgtccagttcactatgaagccctgccgtccagtgctgcagagggaaagatgttcntctactggctgcaatatttcaganactattcaagcnantatggcacaagggaaaaggcagaaggagccctctcatgctggntatanaacagacntcaagcaaatancccagggncgcatacagtggtcgagagacagtataccccaatggantcctgctgttccatcacctggaggacgcaggatctacacctacganccataatgccagttacgatctgaccagcaactnggcagctccagtacacccgtcccaggctttctgtggggcgtcgtggcatgtgtgggtctggtg

SEQ ID NO: 602398 - DNA, 1488 bp, Homo sapiens
  misc_feature (45)..(45): n is a, c, g, or t
gtcgtcgtctgttgctcttctgtacgtgtcatgtatctctttacngtggtggtccatctctatcgatctggtcgtcgtgttgtatctaagccgactatacatgtgttgtttcgtcgcagatcatccttgtaggtaccgtcggggggcgccccctcccctccgctctacagacatctcgggttttgttcctctcacacgccttgttgtcccccgcagtggtgtggggccttgcttacccccaacagggacggcggcgttcccccgcctcgttgtttgttgagggggcccgctggtccctcatgttgagcacactttgttgatagattcgctcctcgtgccacttagtttctcccgcgctgccctagtacccccctactacaggggtgtgtggaaatactactacctccccccttctcatggggcccattttttggtggcccacacgggggcttgggactcccttttacagcaccaatcttttttttgggcttccaagagagggtattattaccccgccggggttggaccctcgtggtcctggcacctccctctatggcgcccaacccttgggggaacgtttggcgccacaggggggaaatgtgtgatccctcggggagttttaccttctcccccctgggtaggaaggggttccagccccggatttgtcacgcccctttggtcaggaaccccccgaggtttgggacccccacctctctaaccacggtcacaactaacacaacgtgggtccacccttgatcccgcctcgccccgagagggtttcccccatgttccgcacctcagtgcaggaacccccggtcccgggttttctccccgccgaggggtaacacttgtaaggcttgcctgttgcacactattgcccgcccacttatgtagccctctccgcctccacaaccccttctgggctggtagaccccccccctcgcggttttttctaacccccacggggaggtcccccccgttacacaactattccagccgcttctaagtgcccccggttggccccacccaagacccttctctccccgtttatagatctcggttaccgggcctttcaatccacccgttatcccccccgcttttacaccccaccgggtttacccgtggtccatccgctgacgtaccactgcaccaagcccagagcgcctttaatggcccctacgctggcaccacttatttccatgcccttctggccagagtgtgccagcttagaccaggctgtaaccggccaggcccgaggactccccccgggggtgtgccctccatctgccagcctcccgggtagtgattcgaggaccccctgcctccagaatcctggggtgccctgttaagccatgaggattccctggaaagtaagcttcgtgggacccggaaattctctctgaattcttagaatggtgcttagtgcctaatgcgccattccaattaaatagctgatgaatgaataaattaatgccccccggaaattta

SEQ ID NO: 602399 - DNA, 405 bp, Homo sapiens
agcattaggggaggtgaggctgcagctgagccgtgactcgccactgcactcagtgcgtgagcaacagagtagatcctgtctccaaaatagacgttgatttaaaaagtgaaaataaggtccctgccacctccttctttgtgcacaggcttataccagtcagttcatctctctggtgatgtttggtttgatgatgtctgaagaccgaatttcactacaaaagaggaggcaagagatcatccgtggcttgagatctttagctggtatgttctagaattcagctttccagtgttttcagatctagtggactgttgctggccattctctgttgactctcacctgtacaggatgttgttcatttcttcttcctcctaaaacttcctagcttccccaactccctcctggagg

SEQ ID NO: 602400 - DNA, 103 bp, Homo sapiens
  misc_feature (2)..(2): n is a, c, g, or t
tncccttggacaaaaagcaaaggaactttgataagatcctggcagaatggaaacagaagtgtgaagaaactcatgctgaacttgaagcttctcaaaaggaatc

SEQ ID NO: 602401 - DNA, 197 bp, Homo sapiens
  misc_feature (62)..(62): n is a, c, g, or t
tctctccacacggatatatctgacatattaaagggtaaggacctaagtgtgaatgatcaggntgttccaggagtggaagtggttatccgttgtgcaaacagggttatgctctcaaggctagaactgttggtgtgctttgtattttcactttcattttttgcagctggacctcagagtcaatcccagggtggagagag

SEQ ID NO: 602402 - DNA, 359 bp, Homo sapiens
  misc_feature (37)..(37): n is a, c, g, or t
  misc_feature (94)..(94): n is a, c, g, or t
  misc_feature (243)..(243): n is a, c, g, or t
  misc_feature (268)..(268): n is a, c, g, or t
  misc_feature (311)..(311): n is a, c, g, or t
  misc_feature (314)..(314): n is a, c, g, or t
  misc_feature (318)..(318): n is a, c, g, or t
  misc_feature (326)..(326): n is a, c, g, or t
  misc_feature (329)..(329): n is a, c, g, or t
  misc_feature (342)..(342): n is a, c, g, or t
ttgctggcaatggcggagcaagccgtcaagcacccgngaaacgcagccagatgttcctgtgggtggccgccgaagagcaaggcctgcttgggcnagcgcccctacgtcgccaagccgctgtggccgatcgcgaagaccgccgccaacctgaacctggacagcctgaactgggtgggcctggtgaaggacgtcagcgtgccgggcagcgagcgcaccgaactgggcgtgatgcggcagccaacncccaggcgatgggtttgaccgtcgncagccaagcctgacctggctggcggctacttccgcagcgaccnacnttcnagttcgcncanacggcgtgccggngttctcggtgggcgcgg

SEQ ID NO: 602403 - DNA, 162 bp, Homo sapiens
catggatttgctggtgcagtacaactaggcttaatagggacatggtggctcacgcctgtaatcctagcactttgggaggccgaagtgggtggatcacctgaggtcaggagttcaagaccagcctgaccaacacagtgaaaccccgtctctactaaaaaaaaa

SEQ ID NO: 602404 - DNA, 426 bp, Homo sapiens
ctggctctgtacttaggacttcgcagctccagactacgcgataaattcctattgtttataagccactcagtcaatggcatcttgtctatcaacctgcagggactaagataactatgatccatttctgatacttattttaatgcaaaattggttttcctaaacatgtgggagggaacaagaagtcagatcttttccagagctcccaagtcagttgttttcatgaaacattaaaaaacatggccgattgcaaagacctttgcttcgctccccacatgtatctgaactcctctttccattgctactcctgcggctgttctgggcaattcagagtctcatttcagcagcttctcccagcactggggctggagctagaggagagcttggctgatgccttgcctaagttcagagccagggggtaccgagctc

SEQ ID NO: 602405 - DNA, 283 bp, Homo sapiens
tctagctcggtacccaccaatattttatgaaattctgtagttacaaacactcaactgcaacatggcatatctccttttctgaacgactacgacctgactgagaaaaccatttccaaaggtacagactgcaccaaacaagggaagatttatattcgattttaaagtagcaaactacctataaacctcaaacttccaaagccactaaatgaatcatattggttcaactttggcaatacctacattatactcacaaaacacacacacacacacacacacacacaca

SEQ ID NO: 602406 - DNA, 392 bp, Homo sapiens
cggcacgaggggagagtgtatttctaataagcatttaccaaattttcagcatctcttgattgatggggctattctatattctttcaatggtaacaaacttaacactttcaggtctttttagccaatgtgcctgaagctactttcttcagtgcttgacctctcagagctagatgtttatatacactgcagcccacctactgttactccctggctgtgagtcctgccgtcgaagtcaggccttttacatagacagagggtaccaaggctgtgtgttgcgatcttattgcaaaccgtgcattaaaggttttgaaacgtggtatgtcctatggcagatttgctaaggattgtttagacaactctttacatgccagagagatggcaagaagtctaaa

SEQ ID NO: 602407 - DNA, 257 bp, Homo sapiens
  misc_feature (7)..(8): n is a, c, g, or t
  misc_feature (40)..(41): n is a, c, g, or t
ggttccnncagcgagacatcaggtctggggggcccatgtnncctccagactggaagggaccactgggagcggtgcgaggaggtgagggacgaagggcagggccggcctagggctacgtacataacctaaacctactccaatgctaaaactaatcgtcccaacaattatattagtataactgttattagttttatccctatgcgtcatttgtatcacaagatccatctgccgtctacttactattctgacttggatca

SEQ ID NO: 602408 - DNA, 284 bp, Homo sapiens
gtccgtctagcttctcaggaggctgaggcaggagaatcacttgaaccaggaggcagaggttgcagtaagccgagatcgtaccactgcactccagcctgggcaacaagagcgaaactccgtctcaaaaaaaaaaaaaaaaaaaaaaaaaaaaaaaaaaattattttcctttgaaaaggggcccttttttttttcttagttgagggaccctttttttagaacttttaaccttttaattcagttttattttttttaaaaaatttaaggctgaggcccattcgtttgg

SEQ ID NO: 602409 - DNA, 165 bp, Homo sapiens
  misc_feature (155)..(155): n is a, c, g, or t
gcagctgctgcgccccggaacaaagacgggaagggcaaagtgtgtcctgattcgtgtgccaccgctcacttcttcgcccacctccaggagtttctaatcctcctcgggcttgcctggagggtagggcagaaaaggaacggcaggaaacgcagaanggatccggaa

SEQ ID NO: 602410 - DNA, 432 bp, Homo sapiens
ggcccgaaccaaggggtgaagaatttacaacagcaggcattttctcttcctcctctgtcaagggaagccgggcagaggactgctcggagtcgcttcgtcaaacactgccttgaggcctcgctgtgtgagcgccgagcactccaggtattttacaagaaccatctccttagccatggctagaccctgcggataggtgatgggagtcagggtcttctccttcagtttctcgatcgtgtctttatcatccctaagatcaagtttagttcccactaagatgatgggagtgttgggaccagtggtgccgcacctcaggataccactttgcacggaccttttccaactgatgcaggactcacaagggaaaagcaaattaagaacacatctttttgcggataggataaggggcgtaaactgtcataatcttcttgtcca

SEQ ID NO: 602411 - DNA, 298 bp, Homo sapiens
  misc_feature (73)..(73): n is a, c, g, or t
cccccagatccagctcggtacctcctgcgctgtgttggccacttggggctatgagcgaactggcaggaatacnctacgcaggacaggaactaactttttcagagcaagtgccacactattctttttctctttgccaagtctgggctccttctaagatgctgctagctattcctagcccgttccccaatacttctctgcccccaccttttggaatccttatctaggtctaaaaacggttctagatcctgacccctttgattgggggatgtagaatgggattcttttcaggggacatcca

SEQ ID NO: 602412 - DNA, 345 bp, Homo sapiens
ccgtgactgtgcatatactggtggctcagattcccctgatctctgcactctgcgactccaagtcgaactgctttcgcacaggtcctctggaatctcctggaggctgccccctcagcattccccaaatgaaaagcaccccgtccaaaccctttccctcttcctgggccaccctctcagtgactaccaccgcctccatctgccagaaacccaggacgctgccttctcctctccccttgagtcgggttcaccaagtcccatagctcgggccggccgtcctctctcctgacagatcagctgcctcctcactcatctcctgcctttgcctggccccactcccccttctct

SEQ ID NO: 602413 - DNA, 301 bp, Homo sapiens
ggcaacacaggaggactcgagccagtacaccctgacagccttccggacttctctcttggcaaccagtgcccccgctgtcttgaaccttctgcaacgagcggctggaggacacccattttgttccagtcccgtccgccctttcgcacaagttctgcttcccttgctccagacaagcgcatcacacagcaggggcgctagtagagaggtctattgcccagtggggaaaaatgccctcttgtgggctccaatgtcccctgggcctatatgcaaggggaaattacaccatccttgctggagatgt

SEQ ID NO: 602414 - DNA, 372 bp, Homo sapiens
gtgtgtcgatagttgcacaagagtagggcaggatatttagggaaatgatacattagcagtctttatgccgagattctatatttagtcatggcagatggagcctaccatgaagataatgatgaataagcctcagaatgctgactaatcctcaactatatgaaagcatttgaagtcggctaatcataatatcacgctttagtgggaaatacagcaacgatgtattggatcagggctcaatgaagattctcatatatgatcgtatttggatgattgaagtccatggtttgatcatgaacatatgtgcttcattagatcatccaaccaatgcataggatgcattgacccagaacctgacttaatggctttggacat

SEQ ID NO: 602415 - DNA, 595 bp, Homo sapiens
ttcagatcaaatacatataccagctgtttgggtgaggcagagttagataaattcttcttctgtaattcaccatatgaatatgtgataaagcaaactatacatggatgtggctattttaagaaggacaagatagggcgcacacgtagtcgtaccatcacccttctgtttaccactgtcaccacatttccatattccctagttcagcaaaactgacaaaggggagtgaaggaggcaggccaggatattgcaacacaacacagctttgctttctacacaccaaagtgtcccaacacatgggttaagcaagagcaatctgtatcatcggaagttcctaaggttcacgattgacagcgatccagtcccaggtaagccctcttctctctgaccgttaccagggggcccgggagaatgcaaagaaaaggagactgtgggcaccctgcacccagagcatttgcacctcaaggaaacttcaccagccgatatcaaatagcgaacactgcctgtcatacttccatagctagggaaaggaattttcccttttgcagcttcctggctgccaaccaggaggctacccctttcattaaactgaaatgag

SEQ ID NO: 602416 - DNA, 199 bp, Homo sapiens
  misc_feature (64)..(64): n is a, c, g, or t
caatataataaaccaccaatgcaatagtacattttaacacaggttcaacattccatgttcatgntgcaattttcaccgtccaacacaacatcaaatcaacatcccaaaaacaaaagttcatttcaggcaggtcagcagtcgcatggcatggccaacatggtgcatggcatggggtggtgggcgcgcatcaaatcagggg

SEQ ID NO: 602417 - DNA, 329 bp, Homo sapiens
tgggtagcagcattatctaacggacatcctatatatgcacacagatatattacaggtaggtacgtagcttacagaaaagtcatggcaggactaaagcctaagtcctatacagttatcctccatctgaaggtaggtgagttcatccacttcatagtaatgctgtaataccaagacatttatagcagatggacccaaaaagaatttactgctatagtgtacactacaacaggatagggacatcagacagacccagaaaccccttccagatctgatatgggactattaattaatatgctgtaaataggtattcatacacaatgcagtaaaag

SEQ ID NO: 602418 - DNA, 320 bp, Homo sapiens
agaaaactagggacaccgtccagtcagcaaaatcgatcatctgagtcctatataatcttgaattgccttaaagctttcctcataggcgagaaaattctagatggtttctttccttaaaaagctccatggtatactcagcagaaagcaccacccatctgttcagctaacaaatacataccctgtggcaatgacttccaccatgtggaaaaatatgtgcagcaaagcccattggtcataggagcaaatgcaatgtgagttttcagttccagggcccagatcctgaggagtctggatggggagagagaacatctggatattag

SEQ ID NO: 602419 - DNA, 151 bp, Homo sapiens
aaaaggacacacttgcaattttctacttttgacatgacagaccctcctcttagttcacacatgttcaaaggcacagtcctcgtttcggaacgcaggagagcatgactttcccaagagctacacggttcatactgaggatgatatgagaatt

SEQ ID NO: 602420 - DNA, 363 bp, Homo sapiens
tggggttcctggatttgttttgccagtattttattgagaatttttgcatcaatagttcatcacggtatattaggtactaagaatatctacctttataggattagtgctctctagccagcgcttaggtatcaggatgatgctttgcctcataatatgagttaggtaggattccctacttttatctattgattggcatattttcacaaggaatgatactagtcttcctcctatgatcttctggtttgaacttggctgtgacttcatctggtcctggacttatttttggttggtccgctattaattactgcctctttttcagaatcctgttattggtgttttctggcattccacttcttcctggtt

SEQ ID NO: 602421 - DNA, 362 bp, Homo sapiens
ggaagtccaggatgcagtgagccatgatcaacccactgtactccagcctgggtgacagagtgagaccttgtctcaaaaaatataaatttttttggccaggtgtggtggctcgtgcctgtaatcccagcactttgggaagcagaggcaggtggatcatttgagtccaggagttgaagaccagcctgggcaaaacagacccgtttctaccaaaaaaaacaaccaaaaatgggcctggtgtggtagtgcacacctgtagtcccagctgctccagaggctacggtggaaggacaatctgagcctggggacattgaggatgcagtgagccaagatcaagccagcgcactccagcctggacgatggaa

SEQ ID NO: 602422 - DNA, 343 bp, Homo sapiens
ttccagtgggtgaatggataaataaactgtgtaacaatgcagtgttattcagcactaaaaaaaaacgagctagcagaccacgaagagaaagggggagctttaaatgcatattagtaagtgagaggagcccatctgaaaaggctgcacactgcacgattccaactacaggacattctgaaaaaagcaaaactatggagaaagtaaaatgatcggtggttgccaggggttggggagagggagcgtgttcgagaggaacttaccacaatgatgttttcatgctcctgggtggtcaagtttgtgttctaaaggattgaatggagacagcaggaggaaaacaaaacaa

SEQ ID NO: 602423 - DNA, 137 bp, Homo sapiens
tgaacattcgtgtcccttttgatcgtggtgatttagtagggtgaactcactggaacggggatgcttgcgtgtgtaatcttactaatgagctaatagaaaggccaggatcaaagcctatggacactgaatgttcagga

SEQ ID NO: 602424 - DNA, 480 bp, Homo sapiens
acaaatacagcgcccccaagtagctgggactgcaggcatgacactattctggcttttagtggagacagggtttcgcatattgcaggctagtctcaaactcctgggctcaagcattctacccgccttggcctcccagagtgctaggattacaggcatgagtcatcgcgcccagaagagcttattctaaaattgaacttctttgccctctaagtactgtcatgccatgggtggagaaatttaggagagttctggaaatccctccctagggaattcaaatgtgtcagaacatctcccaagtgtgccggcaatttcagtgcgttctgagtaattggtacacaagaagctgttgttacggctcatcttgattcaaatattaagccaggaggcttacaagtaaactcagaacagtgagatagatgatacggcagagattccaggaactgctgagtcaggagagcgttttcaagacatctggcccca

SEQ ID NO: 602425 - DNA, 545 bp, Homo sapiens
cacagtggctcacgcctgtaatcccagcactttgggaggccgaggcaggcagatcatgaggtcaggagatcgagaccatcctggccagcatggtgaaaccctgtctctaccaaaaatacaaaaaatcagcctggcatggtggtgcgtgcctgtagtcccagctactcagggctgaggcaggagaattgcttgaacccggcaggcagaggttgcagtgagccgagatcgccctgctgcactccagcctgggtgacagagggagactccgtctcaaaaaaaaaaaagtctgagagtagctaaaaattttatgtaaaagcaattcagaagttttaaatttaggggacccaaattaaacctataacctcatagcggtttataagaactcagaaataatacttcattcaacctttacttatgagggccacacattatttcgccggttggtcctatactctaggttcgggaaaacttatccttacatagtcggtctaatatgcctaaatattgacacaaggtgggtctaaggtaattctggaaaggactct

SEQ ID NO: 602426 - DNA, 760 bp, Homo sapiens
  misc_feature (1)..(1): n is a, c, g, or t
  misc_feature (210)..(210): n is a, c, g, or t
  misc_feature (403)..(403): n is a, c, g, or t
  misc_feature (533)..(533): n is a, c, g, or t
  misc_feature (676)..(676): n is a, c, g, or t
  misc_feature (691)..(691): n is a, c, g, or t
  misc_feature (700)..(700): n is a, c, g, or t
  misc_feature (755)..(755): n is a, c, g, or t
ncgccgcggggggggccccggggcccgagtaggcgccgccgccgccccagccgagggggctgggccggagcgtgcggaggagtgaggccgcaggagacccccccgacgacccccgccccggcggggaagtgagcaaggatgattgaggaaagtgggaacaagcggaagaccatggcagagaagaggcagctgttcatagaaatgcgtgcncagaattttgatgtcatacgaccatcaacctacagaacagcccgcaaatcacgatttgtacaaaaacgatgcaacccccaccccgtcgatatccggaacatgattgaagccctccgagacaatggccttaatacactggaccacaccaccgagaccagtgtgtcccgccccgaaaccgtcaccccccccaccnaccaccagttgaacaagcgcctcccccccacccaccaaatcagtgtggaacaatccaccagccccccccccaaccccacgattgccgcatatgacagtgagggccgaggcaagttgacggtattttcagntaaagctatgttagcaaccatgtgtggtggaaaaatgctggacaaattgagatatgttttctcccagatgtcagattccaatggcttaatgatatttagcaagtttgaccagtttctgaaggaagttctgaagctcccaacanctgtctttgaagggncatcttttngttacacagagcactcagtccgcacctgttttccacagcagagaaagataatgcnaaata

SEQ ID NO: 602427 - DNA, 178 bp, Homo sapiens
tgctgcttctcctccggggtggagggagttggcgggagcagtttttgaatgactgcagtttggggttggtgaggagagggaggttcttcagtggcctagctatttcctcgagccttcctctactgaagctttgtggaaattgacacctattttactcactgttagttgtttaccacag

SEQ ID NO: 602428 - DNA, 321 bp, Homo sapiens
tgccactgatcgatgaaaatctccataacatgtaatttcttcctcgggatcaggggcatggcttataatcccagccaggggttggaactggttccagtgtcaacggccaggtgctcggcttcaagggggaactagcctttggtgaatttttggtacataagtattggtaacaaatatttaagcaaatgctttctatttctctggctggtgcgtatctgggcgggcgtaacaaaaaaatagtgtaaacattatttccttaccggggaatgagggttttttctttttctttttttcttttttttttaaaacaaagcggggggg

SEQ ID NO: 602429 - DNA, 95 bp, Homo sapiens
cctagaaccaagcgacctcgactcttgacgtgacaattgagtagtacttccgattgaagccccattcgtattattattacatacaagacgtcttg

SEQ ID NO: 602430 - DNA, 285 bp, Homo sapiens
ataggtatgtctcacagcgtgtcaattcaagcagactcttcttagcaaggttcaggcattagcatcagcttctgacacttgcttcaatcattgtgtacatgtaaacttccaattctgcaatagggtgttctatctccgccttaggattcaagagatccgtgtacagacagcatatggttagcagagtagtgcttcagatgccatgtgcactcacatgcacccgtgtattcagtcgctgcagcatccccttgttggcccagggtagtcaatcagctgtcatgctag

SEQ ID NO: 602431 - DNA, 182 bp, Homo sapiens
tgatccagtagatttcagaggctcattgatctgcctgcaagtgatggctgcactgcaggcttaccttatgtcccttgaatggtagcagcccattcgctgcaggtgcaaacactttgctgaccagcacagtgctgcgcttggctttacatgcaatacatgttccaagtgccgcaggattccat

SEQ ID NO: 602432 - DNA, 579 bp, Homo sapiens
gcccaatgtacagacttctggaggactgtggcttgagtgcatagcacgagttcagtcctgagcagcaggcggccattcaggagctccttgacactctgcgtgaagggccttaatgtcacccaccagaaaatacgctccaaataaaggcttaccctttccttaaggtcctttgtagggttggagcaacaagagatcggcagtgtggtgtgtcaggccattcttctggagagccacaagcaggaagagcagcgcttgtgctgcagaatggcagttcccatggatttctaccagaccacttgaagggagtccctgggaagcccttgcggtaagtagcattgaagcactatttcctcaatggtttaaccggcccaccctgacgggcgacacgtggcaccctcacacttaactttcctcgggtgaacccattacggaacattttaccgggacaaacccacgctttcagcagcaccagctttccccaggataccattgtggtgctccccccaaaagtgggctctgcttccaggtgctccatggtcacctgggcagagtgcagtctccgcgcagggtcaaccgcag

SEQ ID NO: 602433 - DNA, 83 bp, Homo sapiens
  misc_feature (46)..(46): n is a, c, g, or t
  misc_feature (66)..(66): n is a, c, g, or t
tactcctgctgcttggctgtactgtgggaccctcccctgctgcatnttagtataaggccataggcnagtcacttaacctctgg

SEQ ID NO: 602434 - DNA, 148 bp, Homo sapiens
agctattgcgtgaaggagtaggctgatggtttcgataataactagtatggggataacgggtgtaggtgtgccttgtggttagaagtgggctagggcatttttagtcttagagcgaaagcctacaatcactgcgcccgctcataagggg

SEQ ID NO: 602435 - DNA, 908 bp, Homo sapiens
  misc_feature (183)..(183): n is a, c, g, or t
  misc_feature (274)..(274): n is a, c, g, or t
ggtggagactcgagcctggggtcggcggagacagctggtgtctgaagccgctcgcgcccagggtgaccctgtttgcagcacgatgtctgaagaagaggcggctcagatccccagatccagtgtgtgggagcaggaccagcaggtgagggctgcccctcccatggagcagggacagaaggtatngtgtgggacagtcccttctaggagcgtttcaggccaggtatcccgccccactcctctccttgctgggaaaacctgagtcataaaatatttnggtccatggaggggatggtctatttcctagtgggggcttaatgaggccctgggaggggagtgtctctcaaagacacccagctggcttctgtggcccctacccaaccctttccctctcctttgatccctgggtctccacctgtatccttctgtctccacgtccaccatcatggcgccctcagtaacaacaatagtaagagcagcaatcactgtatcagtcacagttccaaccgtttcatgtatattggctccttgaacacccatcacaaccctagtaacccatttcatagatggggaaaccaaaggcaccgaacagttcagtggcttgcccaagttcacacaatttgcaggcagctgaaccagaagtgaacagaggccactgtggctccaggggcaggggctctgaagcccccagactctaacatttcttcctcgaggcagacagatcggcagtggacccttcaacaacatgggtttgaactgacaggtcaggctgggtgcaggggtcagacgcctgtaatcccagcaatttgggaggccaggcgggcagatcactgaggtccgggttcgagaaccaactggctaattggtgaaccctggttttactaaaattccagaattacccggttggtgga

SEQ ID NO: 602436 - DNA, 312 bp, Homo sapiens
  misc_feature (306)..(306): n is a, c, g, or t
ccctcgggaactggtgccctcctaaccccccacctgcatctggggcccatacctggttggctcccgcggtgccattgtctgcagtgtgccccccagccccggtggctgggcagagctgcatcaatccttgcaggtgggggttgctgtgtaagttagtttttgatacagtgttcgggtgtgggttctacagccttgtccccctccccctcaaccccacccaatattgaagttgtacagaatattttctattgaagttcggaactgtccttgtccttggctttattgcacatttaaacagattgtganatatta

SEQ ID NO: 602437 - DNA, 374 bp, Homo sapiens
  misc_feature (360)..(360): n is a, c, g, or t
gcgcggaatccagtggcgcaccgaccgttggcgactcgacgatattcagcagcatcgacttggcgcgcacccagcgttgatcacgagcttcctgcggtgcggtcatgctgttgaccaagatcccacgaacggcgtccatggcggtgagcgtgatgttgcgaatgactcgcagctcttcgtcggtctgactcaccgattgacccagcgtcgagaactgctgcatcacaataaattcgaactggtccatctgagccgatagttcaggatcggttcgcgcggcaatccatagctccatggtgggcgatgaacatcgaccctgggtgcattcgccagagtgcattccagacaacggctgacgantgggtttccatttt

SEQ ID NO: 602438 - DNA, 206 bp, Homo sapiens
gcttctgcttctgcctgaatggtggagtgatggtggctatgatgtgtgggtgatgatgaggctattgttttttgtgaattcttcgataatggtccatttggtcaaaaagccggttagcgggggcaggcctcctatggagaggagggtggatggaattaatggtgttagtcatgttagcttgtttcaggtgcgacatagtaacacgg

SEQ ID NO: 602439 - DNA, 770 bp, Homo sapiens
ccactacggaggaggaccgggccgcagaggccccggagcgctcgtgctactttttcatgggccggtcccattgctccgggcgtctcaggggcttgcagttgttgctgtctctgctggccttcatctgtgaagaagtggtatcacaattgtacttaatgtggaggacttatattttttggagttgtgtaagctgcagtcgctttcttctgagtctccttatactgatgtgtgtatggactccattttatgagagagttgataccacaaaagtaaaatcatcggatttaatattacttgtgggaacaggatgtgtgtcggtgggcatccatcatttggtttccacacatgacaggattcagctgagattgctgcaatgtgtgtgggatttatagcaagttttatgttcctacttgatttatcactatgctgtatgaaaaacgacaggagtcccagtttgagaaaacctgaaaataccattaggggtgaagcctcatgagccattaatgctaaagactctgggggagcagatgttacctaaggtagtgaccctgcatttgtggtgctgaagcctggaagaagtcttgtaaaattgtgtgaattgttaaacacttctttgggagagccagggaaggtcaagaaggcagttatccaatatggtgtcagtcacaaaagtagggcagataggttaaaaagattttttcaatatattgcactttttcaatgggattgggggggagggaacacttgttttgaaacacaggcaacgggaa

SEQ ID NO: 602440 - DNA, 419 bp, Homo sapiens
  misc_feature (286)..(286): n is a, c, g, or t
atacacagtgggcctaggactggtgagtagtttcagcatcagaatgaggaggaagagaagaggctggagaggaaggtgagcctgtgttggaggctctgggaggccacgcgtgcctctgggatggcttccataagcaaaagggagccactgatgctcctgggcaggagactaagctccggaaagcagggcccatcttttgccatcaccattgcactcccagtgcctggcacatggtggcaattaaccatctcagaacgaaaggacaaactcacttagcatctaaacntccactgcccaggtctgttggagaaaggtctcatgagtgggtgctgcttctcccacagcaccacatgcccctggacagcaggagccgccgtccctcaaaagagcctcaacaaccctcaatccgcagcctcgtg

SEQ ID NO: 602441 - DNA, 896 bp, Homo sapiens
gcgcaagcgcatggccaagtccgtatgtgccatgtctgcggggtccacctcaacaggctgcattcctgcctctactgtgtcttcttcgggtgtcgcacaaagaacttcatattcccgacgcatgcgataggcgaagacgcgacaacgctggccgagtgatctgatgtatggaggcgatctacgtgttgactgtgcctagggactacttctatgacatagacatggaactaatcgccaaggaggaccaccgaacacagcttggacaaatgccaggcggttgggagagaagttttcacacgttgggaacgcaactcaagaacggggagcttgaactagctgaagcacaacccgaaaaggagaccgatcacctcagaactggcaccataggtctgcagtggtgctgatcaacacttgggaacacgatgcttcatgaactgcagtcgttgcatggccctgtaaccccgacagcgctcaatttctgcgtgagacttcttcctgtctgacaggctacctgctgtgagattagcgagagcccgcagactcctgtcgtggtctgtgagatgtcctcactgtttcacggagttttactctggacacctggtccccggctctacattccgtatatagtagctggacctggtgttggacctcacgtcgaggcacctagcaaggtctacgagcgagcagagaagcccacgagttccgtcatcgcggtcctggacgtggtccaccgacagtgtcaggttgatgcccatggggaagcaggcaagaaggccgatcaatgggttggatcatagaccagattttcaggcgggttggaagcaagaaggttacctgccaagtttgcaggggtttccccacaagcgcccttttggacccgttggttcccgggctcc

SEQ ID NO: 602442 - DNA, 796 bp, Homo sapiens
gatacactggggagatagcatataaaaatgatgctccaaaatgagaattctatatggggctttccctaagaagaatccatcccagcacatattttgaaaaggtggtgaaattaaaaagtacaagagtttgctcattataaatcaagttagccaccaggaagaatcctgaaggtgatgctatacatttgtctcatatatttatgaatacgtgatcgtcttgagagagagactacggcattgcccgggcacttgcagatgccttagtgaagtgcccctttgagtattggaagtgtggatatatttataataagcaacatggattgttattccaaatctcatcattggatttagtaactcgaagccgccagaagaagtaggccagctttgaaatagctagttcgtggaatttgaacagaacgcttgatggaatgcagttgcatgtgtgagggacgagaaagaaaagaggttgcttgcagaacctcatggaggaataatgagaattgtggtagctaggttgactttcatgtgtcttgggaggttgagggtgtacaagatacgttaaggcactcggcaaaatgcaaagcttcctttgttgaaatgccaattgtacatctacattaattcatctattgcaaaagttgtgttgtcatggttgtatattacactatatttctcattaggttctgtaaacatcaggtgttaatatcgatatttatgaattgattttttaaaccaaagtatcctaataagttgggtgctgtgttttcctggatgggtttgaccaaggtcaaacatc

SEQ ID NO: 602443 - DNA, 199 bp, Homo sapiens
agcagagtgcgtccatatgttgtacctaggaagattgtagtggtgcgggtgtatattatcataatgtttgtgtcttcggctatgacgaataggaggcgaggaggtggcatattcgatgttgaagcctgagactagttcggactccccttcggcaaggtcgaagggggttcggttggtctctgctagtgtggagataaat

SEQ ID NO: 602444 - DNA, 126 bp, Homo sapiens
ggaaagaataacattggagataaagcaatagaaatgaacaatagagaaaaaataaactggaaaatgaacagagcctcaagagcctggtgaacattaacaaaagatttaacatttagtcatcagagt

SEQ ID NO: 602445 - DNA, 225 bp, Homo sapiens
ggctaggacataaaaaatcctcaataaaattaagaaatacagaagctgggcgcggtggctcatgcctgtaatcccagcacttcggtaggccgaggccagtagatcatgaggtcaggagtttgagaccagcctggccaccttgatgaaaccccatctctactaaaaatacaaaaaattagccaggcgcggtggtgggcacctgtaatcccagttacttgggaggat

SEQ ID NO: 602446 - DNA, 335 bp, Homo sapiens
tagtctctagggcgcgtgctatcatgtatctgtgtccgtgtgtgtgtgtgtagcctgtctaggtagtatctagtgtgtccatgtgtgtacctgtcagtgtatctagtgtcctgcatgtgtccgtgtatagcatagtcttgtggcgtgtgcttgcaatgtgtgccttagtgtactgcatttctgtgcatctggatagggtatatagtgtgtagtgcctgtgtctagatgtctgtagcgtccgtgggtctgcctgtgcgtgtactctctgcgggtccacacagacacgagggacatctccaaacaggtggacaaaggctgggcacaccattatggag

SEQ ID NO: 602447 - DNA, 898 bp, Homo sapiens
  misc_feature (213)..(213): n is a, c, g, or t
  misc_feature (218)..(218): n is a, c, g, or t
  misc_feature (290)..(290): n is a, c, g, or t
  misc_feature (305)..(305): n is a, c, g, or t
  misc_feature (316)..(316): n is a, c, g, or t
  misc_feature (330)..(330): n is a, c, g, or t
  misc_feature (333)..(333): n is a, c, g, or t
  misc_feature (342)..(342): n is a, c, g, or t
  misc_feature (358)..(358): n is a, c, g, or t
  misc_feature (382)..(382): n is a, c, g, or t
  misc_feature (385)..(385): n is a, c, g, or t
  misc_feature (389)..(390): n is a, c, g, or t
  misc_feature (413)..(413): n is a, c, g, or t
  misc_feature (450)..(450): n is a, c, g, or t
  misc_feature (483)..(483): n is a, c, g, or t
  misc_feature (493)..(494): n is a, c, g, or t
  misc_feature (531)..(531): n is a, c, g, or t
  misc_feature (582)..(582): n is a, c, g, or t
  misc_feature (588)..(588): n is a, c, g, or t
  misc_feature (608)..(608): n is a, c, g, or t
  misc_feature (610)..(611): n is a, c, g, or t
  misc_feature (634)..(634): n is a, c, g, or t
  misc_feature (645)..(646): n is a, c, g, or t
  misc_feature (654)..(655): n is a, c, g, or t
  misc_feature (660)..(660): n is a, c, g, or t
ccgagatgatcccgttgcctgctcgaagctctttgttgtactgtgccagagaaactttatggagtacttctttcctccgcctttcctctgttttcctcttcctgtctcccctccctcccacctttttctttccttcccaattccttgcactctaaccagttcttggatgcatcttcttccttccctttcctcttgctgtttccttcctgtgtngtttngttgcccacatcctgttttcacccctgagctgtttctctttttcttttctttcttttttttttttttttaanagggattctcactcnggggcccaggntggagcgcaggggngcngatctcgantcatgggaacccccgnctccggggttcaagcgattctccngcnccannctcccaagtagctggggaggacnggtgtgagctggccgcacccagccggtttctcttttnccactcttctttttctcatctctttctggggtngccggtcggnnttcttatctggccggtttggcaagcaccttctccggngtcctggggagccctgagattctttctctccttgctccacccacctccaanggtgcngagtcacatccaaacccctngnnagcgtccatgccaaagcccccanggggccccatnngccaaagnnatgcntgccaccctcgcttgtgccttagtcagggtgtacgtgtgtgtgtgtcgtagataaccagagaagcaggaagggacgcaaacggggaattgggacctctttctccaaggggagaacagggtgcagctgtctcccccttttaaattaaaacacctttttttcttctcaaacacaaaaaaaacaacaaacacaaacacaaaacaacaaaaaataaaaaacaaacaaaaaagggggggcaaa

SEQ ID NO: 602448 - DNA, 170 bp, Homo sapiens
  misc_feature (38)..(38): n is a, c, g, or t
  misc_feature (69)..(69): n is a, c, g, or t
  misc_feature (105)..(105): n is a, c, g, or t
  misc_feature (124)..(124): n is a, c, g, or t
  misc_feature (134)..(134): n is a, c, g, or t
  misc_feature (144)..(144): n is a, c, g, or t
  misc_feature (165)..(165): n is a, c, g, or t
attgggtgggggttttcaggggtgggggcagtagtttntccttcacccccaccctggtgtcctctcctnaaggacagacggtcacattccaaaatgggtgttttnttctaccgtgtttgttcantgtaggaggntatgtttatntcatcaggcagctcactaatnttgac

SEQ ID NO: 602449 - DNA, 264 bp, Homo sapiens
gaccagtgcagagcgtgaattcagtaagccaagttgtctagcaagcactgtcccccgactttgagtgagcggtgcttatagtgagtgtctgggcattccacattcaggattacggctgtgcacctaatagtatgtctaacagtatgctaagtgatggcaagtgtgagatgagtataagcttcgcacgtgatcatgtccattgagagcatagaccccagcaaactatgattaagaaggcacatatcactcgatactaggtctcat

SEQ ID NO: 602450 - DNA, 287 bp, Homo sapiens
  misc_feature (1)..(1): n is a, c, g, or t
  misc_feature (47)..(47): n is a, c, g, or t
nggtcgggggaccaaaaacaaaacttctgtttgtggaatacccagtnggaattcggatggctctgaggatttcgttggaagcgggattacatataacatctagagagaagcattctcaggaacttctttgtgatgtttgcattgaagtcacagaattgaacattcactttgatagagcaggtttgaaacactcattctgtagtatctggaagtggacattttaagcgctttcaggcctatggtgagaaaggaaatatcttcgaataaaaactagacagaagcatcct

SEQ ID NO: 602451 - DNA, 853 bp, Homo sapiens
agctgccgcggcctcggccccggcgactccgccccagccccccttccctccgcgggcagcggtcgctccctccccagaacagctgaaggtctcagtcacctccgaggggagcgcagggggaggggaggggcgggggacgcggcggaggggacggtgggggagcctggacgctgcgtgcccggggacgcggcccggtggctggtgggaacaggggcgtccatccatgcgcgccccccatccccaagcgtcccaccgtcccggcggcggcggggaaagtctctccgaaagcgtgaagggggattggcggaggtttatactttccctttgtgcgggtgcgctggggccggactcgagtgctggtgtggggccgcgggattgggggctccccgtctgagcgcgagcaggaggcggcgacaaaggatgcgtcccgccgggggtcacagtctccgtggcccaactttgcggcgcggcgccctgcgcccctggggagccgcccggatgcaggctaagaacccaggcgtccgcggcctggggagaggggccgcgagcggtccgcaggtggcgcaggccccggagtctcccgaccccaggagagagaatccggacatccatggaaagaaagcgagaaggcagagtacggacaaagggaaccggcctagccccgggaaacacacggagacacgagaaacccacgccaaaaccacatgaccgggggtcggagccctagaagacccccatcacagaggggcacaggaggaagagggacataccaccacgacagttcacaacacaaactcataaaacaacaaacgagacgagagaaaaacacaggagaaagacactaaaaagaaag

SEQ ID NO: 602452 - DNA, 687 bp, Homo sapiens
ttttttttttaaaaggaaaacccggtaatgatgtcggggttgagggataggaggaaaaggggggataggtgtttagaccatgagggtgtttcctcgggtgaatgaggtgttaaatgtgggtaaatggtgggtggggtgaggtgagccccattgggtgtgtgtggggtaaatattgatagaagggagttattagggcgtggtgactagtatagtgtgtgagctccgtgtgtaagatagagagagtgtgattattgtgattcagggcaaaagtggtggtttactaagcacagaagaagtttctccacagtatgaggtgtataaatagtgtgtgggggtataaagggcgacggtttagcgcgaaggccctgagacatagaaagttcattcaaaagagcctatttaggtgggaagttaaagtttgttgaagttcctgggagaagaaggatatagttgaatggcacaccgtggtgaaggtggcgcttcgcgtaaagaatgtgagagagattgcgacatacggacagaaatatagcctaacgtagacggatttgttaaagcctccgggggagaccgaatatattagacaaaattgtaccgtgggcgcccgggtgaaaagcatccagggggggttctggggaataaaaaaagggggcgtgggaaacatcgcaagggactatattggggtctgat

SEQ ID NO: 602453 - DNA, 133 bp, Homo sapiens
  misc_feature (1)..(1): n is a, c, g, or t
ngtgtggaggagtgtggagaggagtcagtttaggagtctgggctgatgaagtgatgagtctgctcttgagaatggcggtctgacggtcgaaatgagaggaacgaggtgaagactcgtgtgaagaataggattg

SEQ ID NO: 602454 - DNA, 1455 bp, Homo sapiens
  misc_feature (282)..(282): n is a, c, g, or t
  misc_feature (591)..(591): n is a, c, g, or t
  misc_feature (1164)..(1164): n is a, c, g, or t
  misc_feature (1249)..(1249): n is a, c, g, or t
gtggttgtggggtgtgggggaggatggtgggtagggtggggtgtctgtgagtgttgggggttttggtgtgtgtggggtgtgtgtggggtggcacggtcgcgtgggtacgggggggtgggtggagcggcgccgcgtaccagcaggtttaggtgaacagatgttgcgccccctttgtaggtgggtgtgtcccgcaggtacccgccacatgtgccggggaattgtttttaagggggtggcaacacccaccatgtagttgtatgggaaccgcttgcttcgaagagngggggggctcctcccccccaccaagagggtggtgtttggtcgaacaacacaagaaatagaagcgcacctgggccgcctttgtgtttgtaataaaaagccggagccccggcgcgcacacagggtgtgacctctttatgatatccaccccgggtgcctctcttaataaaaggggtgtatgagcccacgagaggcgcccacttcgtggtgtttgtgccccagaaattttttcgggccacacaacgacagagtgtggggagacaccccctcgccacggctccccgccacagagagaaatggtgtagagatgcncctcttcatatagagaggagatcccgccgcagagttttgcgcccaccatgtgtgatgtgagacactcccccctctgtgtgtaaaaggagagaggggagagttacacactgggttggcccccacacagagatagagagattgtttcacacacacatggccttatatgtcacctccgcggaggtctttgtggcacagacacacacagagaatgtgtgcccccacacccgctgtcacagtgtgtcacagtgagaaggccccacatgccacgctgtctgtctcccacaattgtcctcgcagaggggctacacgctggagaagagagaccacagctttgcgcctctggagagacacactcttgtctgaactggggtgacacctctgatccccacactgtgagagggatgatatcccacgtggagttgctctccgctcgagatttacacgctctacaattctcggcccctctgcgagagagatttgttgacctcgcacacacctctatgacgccgcgctaagcccgctctccacagaagagatctcggccacaggacctccggcgctctataaagtgtntctcgagagagggttgagagcagacacctcggcgagagaactcacccaagaagggggaaagcctcgacacacagagagaatatcnctcaccacgaccgcgagagtgcctgtgcacaccctcggtggccgcacaccacagagaaagccgcaaggtctggggtctgggtcacaccacaccccgaaatttcccagatttagaaggcggatttggtcctggacgtggtccagacccccctccagtataaattggagaggattctttttgcccttgaataaaccttaccaccccca

SEQ ID NO: 602455 - DNA, 104 bp, Homo sapiens
gtccgatgatctgaagcacgggaatttattggacgggctttgagacagctcatgtatggaaagctcttaagaactaggtttagaaggtgagagaccaggcaact

SEQ ID NO: 602456 - DNA, 175 bp, Homo sapiens
aaacccccaattttttggggggaaaaaaaatcccccggggttgggtaggacccggggttgtttttttcgtttttcccccccccaaaaaagatttttccccctgggggaaagcccatgggggttgttttaaattcagggggtttttttcccccccccccccccttttaaaaccggg

SEQ ID NO: 602457 - DNA, 1212 bp, Homo sapiens
  misc_feature (1138)..(1138): n is a, c, g, or t
gacatctctttccattgccataacgcagccatggcatcgtggtcccaagaagcatctgaagcgggtggcagatccaaagcataggatgctggatacattgaccggatgtgtttgctcctcgatccatccaccggtccccacaagttgagagagtgatcaccaccctcatcattttcctgaggaacagacgttaagatatgccctgcacaggagatgaacgtaaagaagatttgcatgcagcggaaacattacaaatcagaaggcaaggatccgaacagatacataaccataccctggcgtgggatacacgggatgtcaatcaagacatagacacagacgggagcaacaattgccagctctgaatccatgacgcaaccaaggggagatcagcaaaggcatgctacaatacgaacatcaccacacaatgaggcaggcccaagaaccaacgacgaagcacacagatggagcacacagagtcatcaaggtgagagccaacaacaaaggacaatccacaatcgagaaatgagatgaccatccaaagaaatgcacacgcaaaccaaacacaggcaaaaaccacagaatacaacctacaatcaacggggaacaatgactaaccaaaaccagacaatgcacaaccaagaaaacactgggcacagaaaataacaggatagaccaccacagcaaacgatcaccggacacccacggggcaaacgcccatggtgagtaactgaagtgcaactggggacaggagctgaacacaaccacaacaagggcaacagaacacagtggccatggttagacaaaccacccacaccaagacagaagcaagggcaaacacctgtgaacatcacaataaggaacagagatggcgtaccacaggatgaacacaacatcgagccacacggggacaaaaaacagacgagatggcgcaaccagaccggaaaggaagtcacaaacacaaaaaaacgacgaaaaaatagtgcaacggatgggggacagccaaagaacccgtagggacattcaccacgaaacacctgcagaaagagcacaacggagtgaaacactcaggacaaagaacatccccaataggcgcgatagacaagcacaaagcaaacaaagacaacacgatgagacgcgntccaaacacgaaacgagctaaggagaggtgtacaacaggggtccccactgagattgcacagttactcaaacttt

SEQ ID NO: 602458 - DNA, 332 bp, Homo sapiens
gtctgcgaattcagctcgtatggacaggcacctattggtcagctccttctctaacaacagccaatgctgtcccatcaccaaagccggtctgactggacccacatgggagcacttagacgatgtggggtccgtcgccctgatgtagcgagtaacagctcctaaagatgagcgttgctctatcccactactacccgtgcatgacccataccacaggataatgagtatcgctgatacccttcatctgagagatgtgaagtgttcaagcatcatacaggacatgatgcggcccgaggctacttggtagccacccatgatcctccaccacggtccct

SEQ ID NO: 602459 - DNA, 407 bp, Homo sapiens
cctagaccttacctctgacagagcctactccgttgacagggatccagacactgaaccctggatatatcacacatcatggctcttgaacactcaacactcatcacactatctcaccagcaatggatccaaatacagaagaaactgatgattgatccgctgaagaatctaagtgtcaagttactaagctaatgacggagtgaccagactaaggcaaaggccaacgcatggatgttcagtccataatgatactggaagagaacggagaaatcttcaaggatatatatcgcataggattatacactcacagcttctggcatcgtacacgctgacagaacgcagaatgctcaggaacgtctcaggagtctaattgaccataactagcgatacttagagctcacagcttggtc

SEQ ID NO: 602460 - DNA, 467 bp, Homo sapiens
  misc_feature (450)..(450): n is a, c, g, or t
aacgcgctgatagcctcctagcctcccaaaatgctgggattacaggcgtgacccactgcaaccagcctgtagttttatttttaagtagtcattagaacacagggattttacataatgtgcttcaaacctcctcagtatctttattaatgcttcagtgttaataagaactctcacactttttgcttaggcagtctttgctattgcatcggttactgtttttaggaaacagaactaggtaaccaggccgggcgcagtggctcaagcctgtaatcccagcactttgggaggcagaggcgggcggatcacaaggtcaggagatcaagaccatcctggctaacacggtgaaaccctgtctctactaaaaatacaaaaaattagctgggcgtggtggcgggcgcctgtagtaccagctactctggaggctgatgcaggagaatagcttgaacctgngaggctatcagcgcgtt

SEQ ID NO: 602461 - DNA, 480 bp, Homo sapiens
  misc_feature (253)..(253): n is a, c, g, or t
ggctcgagtcggtgcgcagaccgtgcgccgatatgtcagtgtaccgctgagtatccacgtaggacgcagccgggcagtgaccaggttcgaccgtcggcagattccgggtacaatgggggcataggagcgagcagcctcgcgctcgacgctactcagaggcaacctctgtccttgatcccctagtgtgaagatgcagagagatactgcttgactataagataggcttgacttcggctagtaggatcggacgtcncttgggcatgcccagtgttgctgcgagttggttgaacgccggggggtcgttgtgagtagggtggcctggtatcgtttggcataaaacgtgtgccgcataataacccctaagaacctgtgccattagagcgtctcaaaggggatagtcggaagactttaggttgaaacttgaagaaggccgtttcatggagccggcatgggggaattagcacccattgatttccagta

SEQ ID NO: 602462 - DNA, 170 bp, Homo sapiens
cagaaaaatcacttggacccgggaggcagaggttgcagtgagccgagatcacagcactgcactccagcctgggcgacagagtgaaactcggtctcaaaaaacaaaaacataaacaaaacaaaacaaaaacttctagtccaaccacctaatcatacagacaaagggaaaca

SEQ ID NO: 602463 - DNA, 642 bp, Homo sapiens
gaattcggtacgaggacaaccttagctatgtaataatataactccatgttccatgcaactggatttttggaccctgttaatagcattaaggtagaggtttactctatcacctaacacctcaacactacctgtgggatgccttagttacccagcagcaggttaccaagggctgtctggaaagggagggacaaaaggacccagaagtagaagaatggggatggagtggtgagaattgaatggttaatgcactgccattcataattgccaattgaggacaacacaaatgggattggtactttatagtaataaatctgaccagcagagggagggatcaggcagcaatgtttagaggacaacaaattgccactgtaaactgaaagttagttaactgtgatttatgacttcgagatagtcttttaataagtgatacactttacaatgtaaagaaccatacttgataaatcaaatcgtgaagggactgctaaaatgtaatgcagggttttcttttttctttgatcacatattttcccattttaaagccgtagtatcccgtattaaagagctcatttttaaagacttttaaatttttggaacatacccatgttgaaaggttgacttgcttttaaccgctattgctttcct

SEQ ID NO: 602464 - DNA, 192 bp, Homo sapiens
atgacacttgaaaaaaaattacacaatccctaaattgatcccaaatcatgagagggacatgaagcattatagaaccatgtcactgtattccaagcaaaaagttattccattttaagtctcctgtacatttctgtttgcttctgtaacatgccaaaagaagtggtgagggatagcagaatgtgtggggacttg

SEQ ID NO: 602465 - DNA, 286 bp, Homo sapiens
atagaaggatgtgtgtacctgagaatgtataattgagactcagaagaagtgggacccaaaggtagctggccacagtgaggactacctgggcagtggcaaaccattgaaggatttcacgcagaggattcgatgagctttggcctgagttttaagacagtcgttcattgagaatagactatagaggttgaaaggctaaagtcagagaccccaaatccgtgggtttagcagatagttgtggcagtcaggatgataggcaggagtaagatgtctcaatagggcagggtac

SEQ ID NO: 602466 - DNA, 907 bp, Homo sapiens
attgccccttgctgctgccatgcaatatctttctcccgagggcacacaaccccttgtggtgggcacaaggggtgacatatattgcgcgtgcccagttattttccggaggcccattttttccggtcccgagtcccactgtgcctgggggaaccaagccatggtataaagctctcttccatggtagcgtcccctcttggtccgtctacacgccctggtcaccgagtttactcttccggtccccgggcaaaacttaacatgggcggattttgtgcccatgtcttagagcatgccggagaccgcagtgttgtgtcgcccgcaccttcttttctgtacccccaagaataaacctttgtggaaaacccagggaccacaatttccacaaattactgtttgcccgaaccccctattttgtactccacatttcacaacatcccacacagatattttcccacaaaatttgaaatcctgccccacttcgtataatatactctatgccaatagtgccccccccaactggggcccaccgccatcttgcttggctttacaccccccccttcagtcccacacacaccttgtggaaagcacactacagtgccacacgacagaccaacgacggccaccacgacgacatgagcacccccccctcgggccaaacacacgcgggcgaaaccccccccgttgcggccaaaaaacatacccccgcccacctttttagccgcggcgctcgtggcacggcgccccgtagtacccacgagactccacaggaggcccgcgaggccaaggaccactatggggtggacactatagcgaagggtcgcgagcggtgatcccgcgagtgcccgagaaccaatgcccagtcaccgccacccctcagggccacaaaaaccagaacccgcctcccataaca

SEQ ID NO: 602467 - DNA, 156 bp, Homo sapiens
gcagccctgctaccatcaatgaaacagatacatgtggtccgtggagatgatgatgaacttcagtctgatgacattggagatgatgatgaagatattgatgacatctaacttgaactcaacattttacattccatcctttctgaagccgtgccctgt

SEQ ID NO: 602468 - DNA, 219 bp, Homo sapiens
aaaaaagggggccctttttgtcccctataggggagaattccccccaaaattttgggggaatgagagaccttttcccggcctggggggggggttttttttggcccatattgggggggggggggcccccttttttttttatttccttttgggaaaaatttaaaaggggttttttgttggggtttgaaaatttttggggaaaaattttttttttggtccata

SEQ ID NO: 602469 - DNA, 945 bp, Homo sapiens
gggcgacatctcaggatggctgacagaaagggctggtccccggctgcgtggggctgggtcgttagaagcgctcgtgcgcgcctgctgcaaagtgacgctgacgagcgtgctgtgtcggtacttttgaaacgctgggccgggtcggtgctgtatggagcccgctgtgtgtttgcttgtccgcgggagtgcatgcagctgtggtcttagtgtgtgtccctgcgccactggcgctgctcgcatctcccggggagccgggaatcgaccctggcgcctgtgatgcgcccgaacttgcgtggctctgagtgcttcgtcatttcgggcatcaccaggggtttatatcgagcgtgtctggtatatccagtctgaagaccttaacctcgaagtagctcaagtacggactcatcgcttgcttggaaactagcgtgatcttgtgcagctcgtaattataccctaatcttggtgtggtccggagcacgggtgtaaaaaaactgtgggtacaatgaccatggttgttcatggtacagtaaacttgtgtgtagctatgcatcgagaaatattggaataagtcgggtgagggtcctgtgatgaagagagcccagtttacggatatttgcgtcgttgacatacgaccttggtatgatgacagtgctccatgggatgcggtctcagaatggtttgcccggagtgagatcccggtgccggggtccgagcgattcaaagctacgggggacttcgctgaccgtgccggaagtttcgtgtcctttggctgggggttaataccgagcctgtttgggtgtcctgaaactgggaggaggctgggcccaggttttacccttctgaggggggacccgggtgtgggatacccctccccagtttaggggggccgagatccgtgagggggcgggggggggaaacagagttgggtggagcggtcgcgacggggct

SEQ ID NO: 602470 - DNA, 256 bp, Homo sapiens
aaaaccgtgtgctattagcatgggtcaaccccaccgtgtttcttcgacatagccgtcgacgcgagcccttgggccgcgtctcctttgagctgtttcagacaaggtcccaaagcagcagaaaattttcgtgctcttgagcacttgaggagaaaggatttgggtataaggggtccctctttaacaggattattccaggggttattttttcaagggtgggacttacacgccaatatgcacttgtggcaagtcactattg

SEQ ID NO: 602471 - DNA, 404 bp, Homo sapiens
  misc_feature (25)..(25): n is a, c, g, or t
  misc_feature (56)..(56): n is a, c, g, or t
  misc_feature (75)..(75): n is a, c, g, or t
  misc_feature (77)..(77): n is a, c, g, or t
  misc_feature (121)..(121): n is a, c, g, or t
  misc_feature (209)..(209): n is a, c, g, or t
  misc_feature (274)..(274): n is a, c, g, or t
  misc_feature (278)..(278): n is a, c, g, or t
  misc_feature (283)..(283): n is a, c, g, or t
  misc_feature (286)..(286): n is a, c, g, or t
  misc_feature (293)..(293): n is a, c, g, or t
  misc_feature (295)..(295): n is a, c, g, or t
  misc_feature (307)..(309): n is a, c, g, or t
  misc_feature (324)..(324): n is a, c, g, or t
gtaacctcctaggaacctggaaccnacccaggaggcaatcattcctgtggggtccncaggcaatgtccttgtccnanaaaactgtcctgtcctagcttggccaggaactagttgtcctcantctttgcctattattttccctagtgagacagtactttgaagagggcagagagaaatccccaaagaggcagcgtccctcattggtgggnccatgtggtccctctctttgggaagagaggtagagtctttcacagcatcagttgtcttaagaatncttngtggncanggtggtncncacctgtaatcnnngcactttgggaggcnagggcaggaggattgcttgagcccgggagttaagagactggcctgggcaatatggtgagaccttgtctctacaaaaaaaa

SEQ ID NO: 602472 - DNA, 258 bp, Homo sapiens
  misc_feature (27)..(27): n is a, c, g, or t
aattttttttcccaaggttttaatttnctgccggggaaattattttcttttaaaccccgggactgctttttggagaagaaggctggctagaggcctctttttttggagcgggtttgggccccccctaggtaacttagccttttggagaatttttccggggttttattttttttggagcccctttggttttttaaatgggatatactttgggccctttttaaaaattggggggtggatgaatcccctgttggggggtta

SEQ ID NO: 602473 - DNA, 427 bp, Homo sapiens
  misc_feature (25)..(25): n is a, c, g, or t
  misc_feature (56)..(56): n is a, c, g, or t
  misc_feature (75)..(75): n is a, c, g, or t
  misc_feature (77)..(77): n is a, c, g, or t
  misc_feature (121)..(121): n is a, c, g, or t
  misc_feature (209)..(209): n is a, c, g, or t
  misc_feature (274)..(274): n is a, c, g, or t
  misc_feature (278)..(278): n is a, c, g, or t
  misc_feature (283)..(283): n is a, c, g, or t
  misc_feature (286)..(286): n is a, c, g, or t
  misc_feature (293)..(293): n is a, c, g, or t
  misc_feature (295)..(295): n is a, c, g, or t
  misc_feature (307)..(309): n is a, c, g, or t
  misc_feature (324)..(324): n is a, c, g, or t
  misc_feature (386)..(386): n is a, c, g, or t
  misc_feature (399)..(399): n is a, c, g, or t
gtaacctcctaggaacctggaaccnacccaggaggcaatcattcctgtggggtccncaggcaatgtccttgtccnanaaaactgtcctgtcctagcttggccaggaactagttgtcctcantctttgcctattattttccctagtgagacagtactttgaagagggcagagagaaatccccaaagaggcagcgtccctcattggtgggnccatgtggtccctctctttgggaagagaggtagagtctttcacagcatcagttgtcttaagaatncttngtggncanggtggtncncacctgtaatcnnngcactttgggaggcnagggtgggcgcatcacctgaggtcaggagttttagaccagcctggccaacaaggcgaaactntctctactaagantacaaaaattagccaggtgtggtggcac

SEQ ID NO: 602474 - DNA, 164 bp, Homo sapiens
gacattgaagcccactatcaggacccttcacttccttaccccaaagaagataacacactttttatatgaaatcacagccctatcttgcaggccagcctggccattcacaacccacttaataagcatatacataacaacaaagcgctttaccctattttccaatt

SEQ ID NO: 602475 - DNA, 115 bp, Homo sapiens
ggtgcagtgcatatatttcgagtctgtacattcgggcgagtagcgtatgtgggcagtgaggggcgcaatgcatctaggctataatatcggagtatacgttagcggtaatgaaaaa

SEQ ID NO: 602476 - DNA, 674 bp, Homo sapiens
  misc_feature (636)..(636): n is a, c, g, or t
  misc_feature (654)..(658): n is a, c, g, or t
ccgggcccaattatttgtattggaatctcagctttactccctaactgttacctttggcaaataacctctctggatatcaggcaggtctggaaaataggaaagataactatctcattaatttgtttagaaagtagttatgttaattatgtttacttaagtacttaatagttcctaacatagtagatgctctaaatattagcttcttttccttcccttccttgaaatcactggtttgcccctcaggggacacttagcaatgactggagacatctttggttgcataactgagggagttaaggatatgttgccaacatctgataggtagaggctacagatgcctctgaacagtctgcaatgcacagagtaatccctcccaacaaagaattattcaacctaaaatgtcaaaagtaccagagttgagaaaccctgcttagatgtacggcatttttatttttcacttaatgatcatttatgggtcttctaaagagaattacaaattacttcaagaaagctattggtcttcagttaatatagccttgaaagttcttggtttgcctttacatttttatttcttctgtatttcagccaaaattgccttggaaaagagcatgtttgcctttaaaatttttgtttttnctgtatttcagccaaaannnnntgtaaaagagcagtgg

SEQ ID NO: 602477 - DNA, 132 bp, Homo sapiens
gaacaactcctacatctaacttatcataaatccccagttattcaaaggcaggtcagatttgagactgtctcacctgccctctcactttggccaaattgaataacctttctctgctcctaagcactgatatgt

SEQ ID NO: 602478 - DNA, 1415 bp, Homo sapiens
  misc_feature (264)..(264): n is a, c, g, or t
  misc_feature (496)..(496): n is a, c, g, or t
  misc_feature (828)..(828): n is a, c, g, or t
gaactgacattaacctgcattggtcgtctagtgttgcttaacgcacttttgctcttaccctgtgtggtgactcctgtgtgtcctctaaggaaccttttcccccatcctctcgtgagcaatgcggacatatcctctcactgatcaggcgctatgaggctaaatgtatggatcagcctgacgtgagagggtcgtcacgcattcgaccgagtcaagcagaaagtgatataataccggatgtaatctgactcttaccacgattctgtntggcactttgagtacgcacgaaacggtcatggctaaggacctgcttagactcttccttagctaccatcgtagcctctggcaagtctacccccagatacaacggagcgtgatatcatgacatggtgtgggatagggatctcgatcgataaggccattggagtgtgtgtgtgctgcatgtgctaggactagcgatgatcttgatcgaggtgtactcgatctgtagtccatctanttatctaggacctcattctttggagctttgtatttttctttgcgtctgttgagaacgcgttaattaaaagcacttggtacaatctcgccaggaatgagttggacatatagatgaactatgaggcaccgcaatggtaaagggagaggaaattacaagtcaagaggcgtagtaaatcgactgtttagtaatttgaaacagttttcttgattacagatatttaagacctatgctaaaaatacgttacctttgtaaatccgtaacacaaggaatgcacacactacgcatgtattgggtgggcgagtatgacacagccgtttacgtattgtgtgtangaatattactagatatacctggggaggaaaagcgagggttctggggggaacgtttgaaggcccatggaagaaagctgttgtaggaagtgcattgcattggaccgtgtgaaagcaggggatattaatgcctctccaacggcaatgttacacacgtaacgattatctctaggggttttgggaaaagcgaaattacactgacgttaggggaaatgggaactgttaagcggaaacaagggaaaggaacaaggaggggtagggggaaagacaaacttttgagccattatattttaacaccacatacaggcgttaatacgggagttttacgacgcgctgagacatttgcggctcgattagtatgtggagcgtgccagtctaaactacacaccggattggttacgagtttcctcgcgaacagcccacattaataaggggcaaatgctgcacccaaatatcgcggcttgagaggcaaacgcggattccaaccgtgattggcgaggccccacccacgtcgtgaatgagtttcccttggagggaaaacccacaggcccgtagcagcgacaaatacgcatcacaagtgtacaaagaag

SEQ ID NO: 602479 - DNA, 806 bp, Homo sapiens
ggcaggcctcaggactgtcatcgcctctgggtgtgagggtactttggccaccgtccccggaaataaccgcgcctgcctctcaagataccccatcctctccacgccgttgccgttgccgccatgcaaggggaggacgccagatacctcaaaaggaacgttaaccggcagggactctagatgtacatccatcagaaaaagcatcattgttcactatgaagtgaagctaccattcttggagaacatgggggaccccatgttgggagaccgacaacgaatgtcaacacaaatcattcgacttaagagtctcaatgccaccacagattataacttccctggcaaggcacggtggttgccacgacatgtaaaactcattcatccttcaaaataacatgaggtaccaacaagctgtggtactatctacagaaccgccgtgattcaatggtcaggcacccgcagaccacacagaaaacttcaagcaagcctaaagatccacctcctttgaaggcaatggagcattgctgaagttgctaaacattaattgacatggttgcaatatatggcagtgattcatattgacagatattcctgaacaaagttcggaggatacttgctatggatcctgcagttggttcggaaatccctggataactttgaacacactacttattcgatggcaactggccatggttgcattagcacgggtccctgaacagcatgatctggcaccacatgttagagttagctacaacctaattaccactttgtggtcccagcttactcaattccagggcgtataatcacataaa

SEQ ID NO: 602480 - DNA, 262 bp, Homo sapiens
tatcgactgccaccccctccagccgtggtcaacggagggagtggcacttctgccttgagtccccaggtaaaaaaaaaaaaaaaaaaagatttttatgaaataaagggtaattggtgtaaattaagctttagggttcccaaaatatgcaattgggtattaatttatccaagggtgtacttggcggtgtccttatttttagagattacctcatacttttaaaggttttttccatttaacggtgggcatcgataaacacggggta

SEQ ID NO: 602481 - DNA, 742 bp, Homo sapiens
  misc_feature (588)..(588): n is a, c, g, or t
gggtacaactctcagtatgatgagccaatggcacagttccagcgcaatctattgaagtccttgagaacagaatggctgtacttaacgacacggtgaaggaggcttaagatcgtctgctgaataccaggaagaaattgagggaacttaagggactgctaccccggaattagagagaatgattgaagatgcgccaaggattctcccgcctagtgggaaatgtaagctgaactggcttctgaaagctactctggtggagaagttctacttcacggtttcactccctggtggaggaggctcttccagtctctccatgattgcccagtagaaaagcccaccagaccggtgcttcctcatccaaattgtgtgactgatatttccccacccttgtccagaaagaagagaggaaacccgaggaagagagtccccggaaagatgatgccaagaaagcccaaccagagccgcgaggtgaacgcgaggcaatggggatgctgtcccccagtggaaatgaaatttcggaaaacacactggaggaaggaggctgagaatcacggctgtaaagccgggcacccacgtggaaggggaccacantggaaggctggaagctaccacgttgaaaagccctgcactgttaaagaagggggcaccacgccctcctcccacagggaaagtgtttttgtatataaagtattttttcacttttggaggattctttttgtataacttccataaagattgtaagcca

SEQ ID NO: 602482 - DNA, 750 bp, Homo sapiens
gggggagggtgggaaagtttggggggggggttgtgaagatttcagggggaccttgatagagaactttataaacttcttcctcttaataaagactggtcttacaaccgtgctgcccattaaaggcacgtgttctagagtttcagtacacctaagtacacccacaaaaactaattatgaatatggagatcttcctttacccctcaactttaattggccccagttatacctcagtgtggtagcacgtagctgtgataccttggacagtgctttgatcttacgatgccctcgtgtactgacctgacggagacctaagagtcccttatccctatactaggagtttagacatcatacgccttgatgtcggtcttctctgtacaatgtccttgtcccctacattgtaaaagtgcttaactgctcactgtggctggtatcgggtagcactcggggactaacggattttaactggggtactcttgaactgggcttttaaaaacttaaaccaattttatacatccctttacacttttattcaacctatacgaaaccatatgcggtggtcatttaccagaacagggcgatcttaagaccctaatttcttggttggagttgagccacctagcttcggcaggttccagattcttcccacagggactacttacgtgtgcataaacttctatctccatgttggtggcctatacgggcacccatgtgaccaaggaacgttgccttgcacacatcactttgccggga

SEQ ID NO: 602483 - DNA, 1549 bp, Homo sapiens
  misc_feature (412)..(412): n is a, c, g, or t
  misc_feature (1020)..(1020): n is a, c, g, or t
  misc_feature (1182)..(1182): n is a, c, g, or t
  misc_feature (1187)..(1187): n is a, c, g, or t
  misc_feature (1190)..(1191): n is a, c, g, or t
  misc_feature (1204)..(1204): n is a, c, g, or t
  misc_feature (1224)..(1225): n is a, c, g, or t
  misc_feature (1250)..(1250): n is a, c, g, or t
  misc_feature (1253)..(1254): n is a, c, g, or t
  misc_feature (1261)..(1262): n is a, c, g, or t
  misc_feature (1281)..(1281): n is a, c, g, or t
  misc_feature (1292)..(1292): n is a, c, g, or t
  misc_feature (1395)..(1395): n is a, c, g, or t
ttgtgagacttaattaagtgcgtcttcgctcgtggaggtatatcgtggttggtgtgttttcgttcgatccagaaacgagcctctcgttttttttagtataaggtgcccactataatccctcgatttgtggttcgctcctctcgttcgtttttttgtttgcctcgtccccccagggggcataacatttttttttgaaacccttccggggaaaaaaaggtttttgttgggtgttgcaatattgtgtcggaaaacataaatgtggtcacaaacactgttttgggaagagagaaggtttcgaccacgttgtccgtggtcgccccctttgtatcctcttggcacagggggtagccgccggttgatccctcttgggtgtatgcctcgcctgccggaccctcgtttgttgccccctttngcgcatagatgggtcccctccccgtttccccccagagtttgggggccctttgggtcttttatattgggggtttcacccaaaacgttgtgcccaagtttatggttattaggaagagccccagagtggggccccacacaatttgtcccaccccacaaaaattcgttatttgggaaatgttcctcaattgtggagtgacacccaggtgaaattgggccgtgtggtttaacttttagacccggagctcccacgggtttgaaaaagggagaggtctcgtataaagggttgtcttggtcctggtcctgggaattatccacacgagagagtgtaaaatatttgtaggggaaaccttataaaaaggggaacacctgggcttatccccccgcgaaaatgtatagataggagagaaagagatttatagatgaagatattcccacacaaggagagtttttctcacagcgcgctgacttttggggaaaatcgttaaagcctgtgagacaactcggggctctcttgagaaaaggctatcactctctgggggttggagaggaagtttttctaactctcccacaggttttttcacactcccctcgtgttgagacagagagcgngctctttcacgttgctccacatgagattgcccacgcgtatgagaatactctctgctactcacgagccgcggtgtgcgtcctcctcacatcacaaaatgtgtgtgtgtgagacgtgagatatattttgccgcacaccgttgtgtcacgaaaagaaagaggganaaccncgnnggaaagaagaggntccccgcgagaaagaatganngcccacagagaaagcccacacccangannccgcgannggtgaaccgcgagggcacnctggggaatgnctgttccccacgtggagaaatgaaatttcggaaaacacactggaggaaggaggctgagaatcacggctgtaaagccgggcacccacgtggaaggggaccacantggaaggctggaagctaccacgttgaaaagccctgcactgttaaagaagggggcaccacgccctcctcccacagggaaagtgtttttgtatataaagtattttttcacttttggaggattctttttgtataacttccataaagattgtaagcca

SEQ ID NO: 602484 - DNA, 429 bp, Homo sapiens
tttttaatggttggatatcactgagttttttctcttaagaatttttttattgaggtaaacttcacataacataaaattaactattttaaagtgagaagttcagtgccacttagtattgttaacaatgttgcataaccaccacctttatttaaagttccaaaaaaaatgttctcctctaaaaggaaaccccatcccattaagcagatactctccattccttccttcctccagcccccagcaaccaccaatctgctttctgtctctatggatttatctattcttgctattttatataaatcgaattgtatgagaccttttgtgtctggcttctttcacttagtacaagtttttgagatttatttacatagtagcatgtatcaacacttcatttttatggccaaataaaattgtattatgtgtttatagcac

SEQ ID NO: 602485 - DNA, 485 bp, Homo sapiens
ggatcctaggggattcttagcaagaaaaagcttgaattgcaaggcctggaaacaatgtaatatgtaaccaaatggtaacagtaacagctgggaaagagagaaaggctggcttatggcagatgacaccaggatgaatagtgttccatttttatcccctgtgggacactaacattcccaacacgcatactatttagcttatttttagcatatgcagccttgcagggaaaaccgctagagaacattccacgtgtaaactcctcattcagactttctgacagtcagacattgtctagatgagtaacctgttacagaaggagggtttggggtggctgcgctgtgttccttcataggaaccgttgacatgtgtttaggggtgtctgggcactgtgacctcgaggcagtgtccgctgagagtgccagaggatggatggccccttgaagttactccgttttctctgccatccaatgaattgcttgttccgctg

SEQ ID NO: 602486 - DNA, 181 bp, Homo sapiens
tgttgcccctgaatcaacgggattggataccaccgccgagaatattgttagccaccagcaaggccgggtaactccgccgactgatcattcaacgcaaatggcaggatcgccaggtagaaagcattcgccttgtccggcgtttctatcgatttcgactgggattctgccgtcagattcagag

SEQ ID NO: 602487 - DNA, 380 bp, Homo sapiens
gaattccccccccccccccccccccctataaaaactttaagaaatgccaagtttaggcagacgagggctttctttcatacagtggagcaaaaaagattagagagaaggtgggaagggaatggcagttggagattgaaaaggttagattttagattagagaatgttttaccctgaagtcagcatgttcttaggaggggcacagaatgaatttttaagttagctcagattgagggtagctcaaagttcaggagcccacgtaaaattttacttagaccactgaagacaaatttagctgatttttttccccccgggatggagtcttactctgtcgccaggctgaagtgcagtggtgcaatctcggctcactgcaaccggatccg

SEQ ID NO: 602488 - DNA, 232 bp, Homo sapiens
tgcatgatcgctgctactattacatcaactacaccaccattgacgctcttcagtcatgtccctcaagtgccaatgaccaaggtgcgaggtgcttatctgagatcatctccaatgcagccagagtatgctgaacattgcccatccggcaccactgaagagccattctcctgatggcatgttggctcagagaggtcccccacaatgctgaatagccctaagttcataagccagg

SEQ ID NO: 602489 - DNA, 106 bp, Homo sapiens
tcctgcctcagagtcctgagtgctgaaattacaggtgtgggccaccatgcccagccagaagcatcattgaaatataggtgacatactagtaagagatacttgttat

SEQ ID NO: 602490 - DNA, 340 bp, Homo sapiens
cccgtaatgcttatttatttatttttgagacagtctcactctttcacccaggctggagtgcagtggcgcaaatctcggctcaccgcaacctgtacctcccgtgttcaagagattctcctgctgcagcacccggagtggctgggattgcaggcatgcgccaccacacccagctaattttgtatttttagtggaaacagggtttctccatgttggtgaggctggtctcaaactcccaacctcaggtcatccgcccgccttaacctcccaaggtggtgggattacaggtgtgagccactgtgactggccaaaattgtatttcttagcacctgcttttaaaaaa

SEQ ID NO: 602491 - DNA, 989 bp, Homo sapiens
gtcgagacgaacctgggccagtcacgagaggctgtgtaggtaacgatcacatctacaacgttttcgtcagagtccatgcatatgtaataatcttcttcatagtaatacccatcataatcggaggctttggcaactgactagtggcccctaataatcggtgcccccgatatggcgtatccccgcataaacaagataggcttctgagcgtcttacctccactctcgtcctactcctgcttcgtcatctgactattagggggaggccggagcaggaacagggttgaaacaggtctacccgtcccttagggagggaagctacgtcccacccctggaggcgctccgtgaggaccgtaacgcagtcgttctccttgacagccctagtcaggtgtctcctcatatcttaggggccatcaagattcatcaaataccaagttatcagatattaacaagcccctggcatgtaacctgcaagtaaccaataggaccccttcttcgtctgagtccgtcctagtcacagaagtcctaactgtctcctatctctcccaggtcgctagactgctggacaatcacgtatactactaacaggagcggaactcgaaaacaccttctgtcgtacccggcggaggaggagaccccattgtatatcaaaagctatttctgaattgtgcggtcgaccctggaggttcatattcttatactaaccaatgctttcggaataactctcccagtaatgtagattactactccggaaaagagatgaagccacttcgggtaccagtaggtatggcctgaggtatgaagatcaagggattctaagggtacaacggggtggagacatcaatatatcccagaaggctacagcgtgaccacgagaatatataccgcggggcgcaaacaacaccagcgtagcccacgggggagagaataaaaggagccccaccacgagagcataaaagtcgcgcagctcagccagaaacaccacggagcaca

SEQ ID NO: 602492 - DNA, 429 bp, Homo sapiens
tgagggaaggagttgtagggccaggagagagttgggtagtaagcaatggaagatggtgggtcagggacatggagagagcatcgagacatgtacgggtgttgccgagtgggaggagaccagaccacccataaggaatgtttggcaaaaaagttgagttggaaggcgataaaatatatagaccagcgattctcaagcggggaccattctgtcccccagggacacttagcaacatctagacacattttgttaatgtgtcacaacttgggggaaggggactgctactggcatctggtgcagggaggccagggatgtcgcgaaatatatgctagcaaggcacaggacacgtcccagcccagggaatgatccagccccaaatgttaagagtcaaacctggtctggacactatctcaatttctgtgcccatttcaa

SEQ ID NO: 602493 - DNA, 581 bp, Homo sapiens
ggtcgacacattttcataatcaaaattattatttacccacattgatgtgatgcgaatagaaaattgagtggggagtaatattgggagcaagggtaaagagagctaaatttttatcctccacaatatcaaaccaatagaaaatgactaaaagtaataaacataagaactgccacattttatttagagatacagaaataaatatcaaattatcagtgaaaaatagggagtgctggtttccaataagaaaaaaggaaggatcagggactactgtttttcataacacaatttgtggtactattgaactctacttaactatgtgcacacataatttttatttgaaagctgcatgatatgaaaacttgtaggtgaaaacaaaatgaaagtcataaatagcagcgtttgtattagccagcattgaaatagtgagctcatgaaagaaagagttgaaaaattccaccagagacagaaagtcctaataatcagaagaacagagtgtccaaaaaagaaaaaaagtttggctcaagtgggcgtattacagtcgcgcggcgcaatttgtagtgtagtcacccggaattcgaccg

SEQ ID NO: 602494 - DNA, 834 bp, Homo sapiens
  misc_feature (13)..(13): n is a, c, g, or t
  misc_feature (83)..(83): n is a, c, g, or t
  misc_feature (106)..(106): n is a, c, g, or t
  misc_feature (136)..(136): n is a, c, g, or t
  misc_feature (142)..(142): n is a, c, g, or t
  misc_feature (364)..(364): n is a, c, g, or t
  misc_feature (377)..(377): n is a, c, g, or t
  misc_feature (410)..(410): n is a, c, g, or t
  misc_feature (457)..(457): n is a, c, g, or t
  misc_feature (508)..(508): n is a, c, g, or t
  misc_feature (512)..(512): n is a, c, g, or t
  misc_feature (533)..(533): n is a, c, g, or t
  misc_feature (616)..(616): n is a, c, g, or t
  misc_feature (722)..(722): n is a, c, g, or t
  misc_feature (759)..(759): n is a, c, g, or t
  misc_feature (771)..(771): n is a, c, g, or t
  misc_feature (809)..(809): n is a, c, g, or t
cgagcggatttanaaagaaaagctctgaattatcggtttccacgagctttagggagtgcatcttcacctgtaggtagcaatgnggttctgatgagggtgatgtgcnaaaccaatcacatccttctcgtgcactgtnaaagtnctctccagtttgccagtcactgtactgaaacagtagagcacaaagctcgctcccctacacagtagatgccagtgtcacctacggggagagagggcacagcacaacaaagtccccaccttctctcttctaccagcaactgaagcttgctgacgaactctgcgcgcctggcatgtccgatgagtgaccaccgtgtttgatctgttgcacaccacaaagtgctcngggtttttacggnagtagaatcacactgttgacggtaatatctgtncctgcggtgctgcccagggatttaaaggtatttgaacattctgtggncttcatattccagatctttacagtgccatcagaggatgcactaataatgtnatgnccatctcgtgtcaatgttgcntcgttaacaaaggagggatggccacgaaattccttcagggttttcccagactttaaaccatgaattctacattgtctggtcanaagaagcactaaggatctgactgcaatccttagaaaagcttagacaggtgacacccttactgtgtgccctctcaaatctccttaaacattgtccactctgaatctnccacaccttgatttttccatctcgggccccagtcgcnaacatttctgtntctctgccgaaacacatgcagaggacagcatcatccancaacataaagttatcttgggcctgg

SEQ ID NO: 602495 - DNA, 262 bp, Homo sapiens
actgccaatatttcgtctccaaagagggtaccaagtgattcgtcccaattgtcagcagctgcaagagagacacatgtattcgcaaatccggtcacttcattcgctatctaagcgtgatcttcaatggggtctcggaaatctgggacactgtgacccccctcgctcttgtgtgcctctatggtaaccgcgcctctgcaataagccgaggtacagagacaaaagagggacataggggtcccccctcacagtgttgcatctcgtg

SEQ ID NO: 602496 - DNA, 465 bp, Homo sapiens
gatgccgcctggtgcttgatgttcgtgtccatctcctgggtcgcctggcggccactcgtggatccacaggtctgctgggcggaaggtggtggtcagtacgctgtgaatgcatcaccatttctggcactttctacagacacaagtagaagtaactggctttcctccgcaagcggatgaacaccaaaccttcccgaggcacctaccacttaccgggcccccagccgaatcttctggaggaacgtgcgaggtatgctgacccacaaaaccaaacgaggacaggccgctctggaccgtctcaaggtgtttgacggcatcccaccgccctacgaccagaacacgcggatggtgcttcctgctgccctcaaggtcgtgcgtctgacgcctaccagaaagtttgcctatctggggcgcctggatcacgaggtcggctggaaataccaggcagttacatcgggataccgagct

SEQ ID NO: 602497 - DNA, 496 bp, Homo sapiens
  misc_feature (61)..(61): n is a, c, g, or t
  misc_feature (144)..(144): n is a, c, g, or t
  misc_feature (317)..(317): n is a, c, g, or t
cctgctcggtagaacctttttgtgggccgcgtgggggaaaaagggttcctcccccgccctnggatccacaaaaaaattttataaattgggccggggttcccttttaaggggggggaagtggttaaaaaaaaagccccccccttnttttcccttttttccaaaaaaaaccaaccctttggggggttttttccctattgggaaaaggcccaaaacttttttctttttaaaaggttttggggggggaacaaaaaaaggggggtccccccccccaaaacccttttgggggaaaaaaaaagggggggttttggaaaaaattncccttaatttttttacccccccccccaagttgggcaagggggctttccccccctggggggaaaaaaaaacttttttgggccccttaaaaaaaaccccattttcaaagaaaaaaggggttttttccccggacaaatttttccggtggggggggttccaaaaaaaatttttttcccttgga

SEQ ID NO: 602498 - DNA, 450 bp, Homo sapiens
  misc_feature (46)..(46): n is a, c, g, or t
ctgttcataacaatatatgcatcctgttaagatgataggagatttntctgcacctctcctctttgtgagcctgcagggacattccctttaatgtccatatttctaccagcagtctcttcaaggcagtctaggtttttcctaacatacacctcaaaattcttgcagctttggccaggcacagtgcctcacatctgtaatcctaacactttgagaggccaacatggacagattgcttgagctcaggagttcaagaccagcccgggcaacatagtgaaaccctgcctctacaaaaaatacaaaaattagcccagcatgctggcgcaggcctatagttccagctacccaggaggctgaggtgtgaggatcgcttgtgcctaggagattgaggctgcagtgagctgagattgggccactgcactccagcctgggagacagcaagaccctatctga

SEQ ID NO: 602499 - DNA, 420 bp, Homo sapiens
  misc_feature (100)..(100): n is a, c, g, or t
  misc_feature (217)..(217): n is a, c, g, or t
  misc_feature (220)..(220): n is a, c, g, or t
  misc_feature (224)..(224): n is a, c, g, or t
catggttttaaaaccgggtgtaccttacgttgggtgtcctgcaggttactataccttgagtttaaagtcgacttcctcttacatttctcccctgctttgnatctgctttgtgcttggctgctgagagagcagcacaggctaagacagtgtattcctcccaggtctctcgcccttctcatcgtccgtctgtccgtcagtccgtccgtccttccctccntcncacnttaaattctttccttctggttcttccaccgggccattttccacatctgcatcagaagagatgcctcccatgttagtatctgataatatcagtctctccttatcagaggagagaccttttatttttaagatgactacagacctatttttagataagttttcagtacaattttgaactacaacttttttaacaaaaca

SEQ ID NO: 602500 - DNA, 938 bp, Homo sapiens
gcttggctgtgattccgtcctgcgcggttgtatctctggcgtaacgtccttttatctccgaccgccttctctcctacctaagtgcgtgccgccacccgatgagtaacatcacgcatgtgcacatggcccctatgagtcctcccttgaggccccagcaatgtactcctcttacgggtgttggtgcacatcttacaaggccctgcactaaatgattcatccagcgttctaaggctgggataattgactgaaatcactgatgccactcaggtcattctctatagcatacggcctaacttatacgcgggctggctgcccagtgattgccgttgcatcggtgctagtagatgccgaggcaatgacatttcgaagggagaccaattaacatcagatctggcaaggttccgacgaaatgctcgtgattcaggccctaatggatttcccctcggaggctttgaacattacaccaaccaccagctggtcatgtcccatgttgacagtgccggttcaaggccagttgcatattagtggaccaggcactgagtagctggtggaggatcgatgcggagtcagcacagatgaaagaggaggaaggatgtgaacactcttaagtatatctggaaagacggtctggcccctgggaggtggtcccaagggttcctagagaacaaagtgaaaacttggtgttgatgaagatggtgacgaggatgatgaggacggctcatgcttgcccaccgacgatgctcagaatcggcgatcccgctttctgcataacacggcggcttgtagatccaattagtagttccaccggtacgcggaaccgttatgggcaaattcacctattgggcccggccaggagatattttctcacaggacagctcaacccgctatggtgacaagccacccttcaccgtgccgtgaacaaaaacaagcgcgcgaaa

SEQ ID NO: 602501 - DNA, 281 bp, Homo sapiens
tgaccagatatgcagagaacccttgtaatacttgtgagtctagtgccgacccagcatcagttcaccccgcaggctgcgcttctgggtccctgctcaggtagaaggagaagatgttctggtccagcagcttctggtgcatcaggttgtcgaagaggggcagcacgttgttgacggagatgcgggggtaggccatgccctggatgccatcgaacttgtgcttgcgatgaaggtgatgcctggctgcttggttgggctccccaaagacctgcctctccactttg

SEQ ID NO: 602502 - DNA, 858 bp, Homo sapiens
  misc_feature (858)..(858): n is a, c, g, or t
gagcgggttccgggcggagaccgcttgtgctggaactcggagttgtaacgctccactgactgatacagcgaccggccgaccatggcgcccggagatgggcctgctgggccgacgctcgtactggatggttgtcgcctcggtggacgcctgtgacttgctcctgtctgctcataccctggtggcctgcctggctgcaggagtcctcccgtgtaggctgacttgttgctctagaacacaatacaaacacctagtgaacgacgtgctctgaagaaccgtctcactgatacttatggatgcaaacatctaaacaacgagcttgctcttggagctagccccaggtatagcatagagcgctctttgcacatgccgggcttgccctttggtaacacttgacgcgtctgcagcagcgtggtggcacgtttcgttgagcgtgcaacattctgacggcggcgttgactcatcacccattgtcggctcagtccggcggtgaacgccttccttccctggcgctgttggccattcctgcattgccgtgtcgtgctggctgcgagagatggacacgcatggcagccgcgaatgcccggacacggacgtgacggacgacacggcccatgccgtagcagcggcgagggacgaaggccggattacgcgcatgcacgcgtacaccgtgacgaacgccgcgtaggacttcgacgggaaccataagaacacttgcactgtacaacattcatggacaacacacaccgtttatttcgggcccctcgtttgttcaacatgccatgccaccacagccccgggtaattgcctgagacatttttcgaaccaaacctacactttacaaaagtgccggcttcccan

SEQ ID NO: 602503 - DNA, 121 bp, Homo sapiens
cagtgtattatgtgtgtctccattggtgtgctgtagtacatacccagaggaaagaattagaaatataaagtatattattttaaaaaattagctataattcccaacacctaacatctactgc

SEQ ID NO: 602504 - DNA, 347 bp, Homo sapiens
cttcaatgttgccatgcacatcctcaacaatggaaggtttgtcatagctgcggccctggcaggtaccatgacaggcatcattgctaatgcggtgagtaccctgcccgagtacataagtaacccacacagaagtctcactgacccccttgccatgtgtccctgatcactatcaagctctccctacactataaacttctcccctaccagcagcccgactcgctagcttatgtatccatccagcgtagactgaactctggttgtatgccacactgatccacagcgggatgtgcggaccctcttccaagtagatcatgccacttcgtacccattacgcggagcttcacgct

SEQ ID NO: 602505 - DNA, 485 bp, Homo sapiens
gtatcttcagttttcaaccaaaacagtttcaacccagtcacacaccaacacagtaatcaacatttttcaacacatcagcaaacaggcttcacaaacatcaaccaggcaagcaaagtcatttctcataccatctagtcacaatgtggtttgtagttttcaagcctcaagtcactcatcaagcagtccaagcacaatttcaaaacattcatgcaacttcatcacaagtcaaaaaagctcacacggtttctcaatcaccagcatgccaagcaaaaaagtgtcttcgctgtctgcactgtcagccagccaagcatggattgcaagcaatggggggttcaggggcagcagtcaagctcaaggttcaagttcattcatggcaagcaacaattttctatcacacatttcagtgtcagcctcaactgtacagtgtttcatcacccagtctacaatcagtgcacaatcaatgtccttggccttgccatatgcaa

SEQ ID NO: 602506 - DNA, 296 bp, Homo sapiens
aatcaagcatagtagaagtagctccgtagtgaaatctaatgcgggatgccctattacccagataatacttgtataattttaggagtgacaaaactcagatccagcttgtgagaagcacttggttgaaacagctccagagcccccaactctggcctactgtggagaccataaaggatcttcataggacacaccccaagatgaagtcataggcgcgttcgccttaactccctgtacccaaggtttggctaacctatgctcatttagcatgaacactacactacgtgcttgtagctggc

SEQ ID NO: 602507 - DNA, 133 bp, Homo sapiens
aaagggtgcatagtcgatttccagagttatccccccaggtatcgtaacacgataaatattttctcataaccccatgttttgaaccaatcagtaacttttaaggtttcgtttgttctaaatgtaagatttcaga

SEQ ID NO: 602508 - DNA, 227 bp, Homo sapiens
ggtcccgcggttatgtttacgaatatactgcattcaatcacgctgctatggaattcactgcattcaattgggattcattgcgccacgatgtatggaatccactgcgttcaatttaaatccattgcaccacactgcatggaatccactgcattctctcgagatccattgggccacgctgcatcgaatccactgcattcaatcgggatccacgtaagacataaccgcgg

SEQ ID NO: 602509 - DNA, 630 bp, Homo sapiens
tggacggagagagagaaaaagcaaagaaaagaagaaagaaattactggccttaagttcccatttgggcagtgctgcaggaagctgacggctattgtgaagctccaatctagcactggcccttagcatggggacttagctgtctttctcttgtcctcagcacccgtcatgtggcttgagcgagcagtccttttctgtggggtgctccggacctcttttggaaagctggggtggggaaatggcgttcatgtgtcagttatctatcttcatgggcttctccagaccttttctccactctgcactgggcggtgtgagatgacacgaatggacgtgaatgggctcttgtaactgcttgggctgtgccagtagggagctctggtaggagggagcacggtcacagtctccccttgtcaggaagcctcatccacagggtcttgtcccagggagcaccccctctcctcccagtatcaggccagaggtgactatcactataaatagcccggaccctgtcctatcccttgggcttcctatacatgccacagttttgtaaattgtcccttaccaaatctcctcaatcaccaattcgagtgtctctggcgggtcctgacacagagccatataagggcttgtgg

SEQ ID NO: 602510 - DNA, 334 bp, Homo sapiens
gggggggcccccccccccctttttttcctttggatggaaccgaagggacccttgggggggggggttttttttttaaaaaaccccaaaaagggggccctcccaataaatattccccccccctttccgggttttgggggggggctttttaaaaccccgttggaaaaaaatactatggggggggccctttccccccccccccatgggggaaggaaaattttttttttggtttttccaaaaaaaaagtttttggaagggttcccccccccccttggggccccaaaaccaagggttttttttcccaaaaaaaaaaaaaaaataaaaaaaccttttttta

SEQ ID NO: 602511 - DNA, 406 bp, Homo sapiens
cctcatcgagtgccagttaccccccaaacactcaccttgggaatatatgaactgcaagcagataacacagttaaagatacctgctgcccaacctgactagagccagtctctgggacccacctagtgattccataggttgtcctctgaccctcactcacacattatgacacacatgcactcatatgtgtatgtgtgtgtgtgtgtgtgcgtgcatgcacacataaaagttgattagtaaatatgtagcaagtaatctaaaatacatgaaatgaattaaacctgtaaaatatgttttattttgagacggtgtcacgaagcccaggctggctttgaacttgctatgtgcctttggttggccttgaacttggtcgacgcggccgcgaatttagtagtagtaggcggccga

SEQ ID NO: 602512 - DNA, 305 bp, Homo sapiens
gaggtgactctacggatcctaaacggtctgttaccttcttcgctgtgttatactgagctcgctgtattgggacctgggcatgcctgtagacgtatccatgcacaggcgcgccgtgttgatctacctcatacgggtcttgcataaacgagcgaagcttgtgtatttcaacgtaactgatgcgtttcacagagataggttcgatccatggtctcgtctcgcaggtgcgcaaactggctttgcaacgcttgtaccacctgtgcattggatatgggcatgaaacggatcctggcttgaaaacacttgga

SEQ ID NO: 602513 - DNA, 182 bp, Homo sapiens
gtttcacgaaaagaagcctacaagaagtacatcattgattacatgaaatcaatcaaatgggaaacttgaagaacatgagaccagaacagagtataacctttatatgacatggagctgcagacacaaatcaagcacatccttgacaaatttcaacaaactagccagttctttattgtgtagaa

SEQ ID NO: 602514 - DNA, 357 bp, Homo sapiens
ggggcatgggtctgtagtgagggttagtagccggggccacttgagtcgtgaaggcctctgttcccactgcttctctgttagcttcagcagggcgtgttggccgagcggggcgccatcaggactgtgtccaccatggtgtggtcttgctttttcccggcattgggctggtggcggaacttggtcctggtggagcttgtgtacccgggagatctggcttgtagacctcgttcaggttctcctccaacttctggcgcagctgggcgcactcccgaggtgtcaggcttcaggaggttctcgggtcaaaggggggccaggcgcaaggacagcccgtagggcaccagctctgtgggggttgat

SEQ ID NO: 602515 - DNA, 929 bp, Homo sapiens
gagagcgcgagacgccagcctaaagagagcccggaggccatgcgtggagagggccgctgacgtgcgcgcgctcttgccatcgagctccacaaagacatgactaccaacgcgggccccttgcacccaatactggcctcagcacctaagactgacaactttgtacctcatgaccgcgccccagctggcatatactggtcgtggccgcttctatgtcacaggggtcttagtcgtgaccacatggctgttgtcaggtcggtgctgcggtagtcccaattgtggacttggcggcgagtgtccctgatgctggtttgcagtgtgtgggttcattcacctggttgatcgaggggctggtccggtctctactacgaatgacctgcttggaggaacccacgccttcgttatctcaactctgaaaagagtatgccaatgggtagacaggcgatacatcctgggtgacaacttcacagtgtgcatgaaaccaatcacagcttgccatgttgggtgaccactcagtcctgtgggatggtgattcgcctttctccggcagatcccctccgttcattacaacagttgtggacgctgaggggacagaaactattggggggatgtgcgtctaacttccgtggatagagcaaccgctaaggagttccagtacggggagctggagcagcctctctagatacggttgagtgtgtcttcatgaatgcctgtggtgcgggtgctggagtcctatgctaatgtgggagcacttcatcatggcgaaatgctgtgcaggtcaaaaaggagtagacagaataggtggtgcacgcccaccgcggagggcactcccgcaaaaatttgccccatgggaaaattttgcaccccgggcaagaaaagggggcgtggcacaaacggggggttgtgagtaaaaaacggctggagtatagcaa

SEQ ID NO: 602516 - DNA, 233 bp, Homo sapiens
aaaattgaaacgtcatgtttagatggagaaaacagaagagttctgatcaatacagacattggattgcccaatggcttaacgcttgacccgttctctaaactgctcttctgggcagatgcaggaaccaaaaactggagtgtacactacctatggaactggacggcgtgtcagtcaaaacaacctcaagcacccctcagcatctaggcattagaccacttctaccaaaaacttga

SEQ ID NO: 602517 - DNA, 753 bp, Homo sapiens
  misc_feature (414)..(414): n is a, c, g, or t
  misc_feature (532)..(532): n is a, c, g, or t
  misc_feature (548)..(548): n is a, c, g, or t
caggagttttagaccagcctgagtaacatagggataccccatctctattaataaaaattttaaaaaatttgttctaaaaaaagaagaaatataaatcctcactgagagattagttatttgtggattttaaataaccattacaagaaagtctcccagagataaccactgtttaacatttcagggaatgctgtaggtactctctgggctggtacagatgtgtgttatgcatatatataattttacttagaatttgattatttttcacccaacaggaagttggaaatagcttttcgtgtcaaatctacatctgtatctttttaagtggctacaagctgttttattgcgaataattatttatttaaccaatccccttttggtggacacttagattatttcctgtttttcgcaactaanaacattcctgtgatacatcttttagtattcatctttggatagttgtccagcaatgagttctgcttctgatggacataacagagaatgtatcctcattaccaaacaagggaatcttccnctctcttggcaacccnttttatgtttacagccattagttttttaatttacctaatctactagcttttaaggctgagagactgctccccattgcagattagcgtatagtcagatgggctacagtttttctcctcttaacattttcttgttgatttcacttgacatttcgggggaccagaggttccagtagtcatctgcttcagacctctgtgaaggttggag

SEQ ID NO: 602518 - DNA, 1448 bp, Homo sapiens
  misc_feature (1448)..(1448): n is a, c, g, or t
gggaatcagtgactgagggggcctgcctgagcgcgaggtgtcggtgcccaccttcagctgggaggagattcagaagcataacctgcacaccgaaatctgatggtcattgaccgcaaggtttacaacatcaccaaagtggtccatccatgacaccactgggggggccaagacgaggtcatcgaggacaacatacgctggagaagactgcaaacggagtgccattccgacgccattacgaaacactgacctggagattacgatgaggcaacgttctttgaacatccccatgactgacttgggtgaaactgggacacccggggagggcacgccccaagaaccaggtagccatcggacaacgaaacttcacaacgagtcacgtagagcgaacattcccgagagcgccctgaaggcaaaaggacgggcatgacgggaacgatgagaaccctgcaatcaaagaagcaaaaagcacggatgatatcctttccatcacatacccatcccatatgggcacacacaatacagatacgacaccctgaggacgcacgccgattttagcaaaatcgaggattatccaacataaggtagtcacaacagcactaactgggacgaccaaacatggtggattaagtgaaaaaaacagtaagacacacagttaacagttcaccagccggagaccgcctatatcgaccacagcgtaaggacgtaacaagcatcatttagcgggaggaacccagaagggcataggggacattgggccatgtggcgaggcccaatacagacacataatctggagcgcgcaaacacatatgacacattgggtccatcagacaaggacaaagagaagccagcaacacaagattacgaaacacactcaagacacaaattgacatcaccacactcaaacaaatcttcaggagtcaaccaattagagacaaccaaacatataaacaacaagcagagatttccgcactatcatagccacacacacatatagcatataggcaaaataccaaattcagaacacaaacatataccaccaggtcagaaccacacacatggacaccacacaagatcacattacactcaatttacattaacccaacaagaagggataacaaccaccgaaattatttagacaacacaattttgactaggcaaacaagtagattattatagatccattagtcaggacacagacaacgtagagagaccaccacaaatacagcacagatataccagcagacaagaagcacaaacaaaatcagccttacaacatctacaacccttcgacccctaacaacacaatcaacacaagcacaccagaaaaatacacatatacattcacaatcgatatcacggcacgcgcacagataagagaccaaatccaccacacagtgattattattatcaaaaagcaccagcaacatcatcatccacatagcaaccan

SEQ ID NO: 602519 - DNA, 141 bp, Homo sapiens
ctaacggctaacataacggcgggccacctattcttgcccttaatgggaagcgccacactagcaatatcacccataacccttccctctacacttatcatctccacaatcctatttctatggactatcctagaattggcggtc

SEQ ID NO: 602520 - DNA, 150 bp, Homo sapiens
tgttctatagctctatcgcttgtcaacgatgtgctttgaagctgttagtgtatcacaattgatgtttgtgttctgtttgattttaaacagagaaacaataacagggggtaatagctccttatatcttctcttctttttttattttccata

SEQ ID NO: 602521 - DNA, 521 bp, Homo sapiens
acagaaggggtggtatgtagagcacatgatggttatcgaagtggattggaaggttgaggaccatgtattcggcagctatgctgttgtctcttattctaacgtggaaatctgttttgtaacttgtagtaataaggtagaaattaaaaagaaaaagtattttcctgtacttgcttggctgcaaggtcaggaacacatagttccttagcggatccttggtaacgctatctgaaaaaccacatcgctgagaaatgagttctggagactctcttaacagtctgttgtccctaggaaggataagagcaagaaacagcaaatgcttttattaccttctcttttccctttaccatttctcactattcaagttttgttaagttcttgatttcccttcagtgcagctgcaaggtcaccagctattcttgcctcgtgagacctgtcacagtttgactagctgcctttgttctgcttctgtaagccctcttgcctgccccgcgagtttggtgccatcatagtcccaccatgcc

SEQ ID NO: 602522 - DNA, 1221 bp, Homo sapiens
  misc_feature (350)..(350): n is a, c, g, or t
  misc_feature (589)..(589): n is a, c, g, or t
  misc_feature (878)..(878): n is a, c, g, or t
cacaggtgtcgtgaaaactacccctaaaagccaaatatgggaaatggaaaagactctatatcaactattgtcgtacattggctcacgtagattcgggcaagctccaccgatctatctgggccagtactgatctataatatgcggtggcatctgatcagacaagaacctattgcaataaattgtgagaaggaggctgctgatgatggtgaaagggtctccttcaagtatgcctgggtcttggattaatactgaaacagtctgagcgtgtaacgttggttatcaccatttgcatactctcctggatgagaaactttgagcaccagtcgaagttactatgttgcactagtcanttgattggcccctagggatcatcagcagtacttttagtcaacataaccatgattgacagaggatatctccagtgctgacgtgtagctgtacctgcattgtctgcatgctgggtgttaggtggaattttgaagtctgagtatcatcctaagacatgaggcagaaccccgagaagtcaatgccctatctgggctataacacactgggtgtgataacaacgttaattgtcggtagctaacanaaatggcattccacttgagccaccctatcagccaggaagcagatatgaggaaattgttaaggacagtcagcacttacattacgacaaattgggtacaagcccgaccacagtagcatatgtgccaatttctaggttggaatggtgacaacgatgctggagccaagtgctaacatgccttgtgttcaagggatgggaaagtcacccgtaagggatggcaatgccagtggaaccacgctgattgaagctcttggactggattctaacaacaaactcgtcccaactgaccaangccttgcgcctggctctccaggatgtcttccacaaatggcgggaatggcgactggtccctggtggccatgggcaactgtgtttctcaaacccggattcggtggtcccccttttggtccacgaaccacggttcacacgggaagataaaactgtccgaaaggtccccatgaacatctatgtgacacttcccggggaccaacggtgaccatggagcaaacatctttacaagatctgtgacaaccgatgcgggagaacatgcccagagtgaacgtactcccgtggttcatttacacgcgacccggcgcatagtattagagacaacagttgtagaagaaacaattaca

SEQ ID NO: 602523 - DNA, 237 bp, Homo sapiens
aaggggggggggggcccccccttttttttggcccccctcctggtttttttgggggggcaaaagaaaaaaagggggttggtcggggcgtgggggcaaccggtttttttttccccccccccggccccccccaaattttggttttttttttcccccctttttccccggtttggggggggggcccccttgggggggaaccccaatttaattttggaaatttaacccccttcccttttgcca

SEQ ID NO: 602524 - DNA, 119 bp, Homo sapiens
gcaccgggactccagcctggagaacagaatgagaccccctctcaaaggaatctagaaaatgaccatttggttcttcactcatatcttctatactgatcacatttgctctccagaggtct

SEQ ID NO: 602525 - DNA, 154 bp, Homo sapiens
tgtgcgtgtcgacgctgagaggatccccaccacagtcactatctatcaacctagccatggccatccccttaggaccgggcgcatgtggttataggctttcgctctaagattaactaatgccctagcccacttcttaccacaaggcacacctaca

SEQ ID NO: 602526 - DNA, 897 bp, Homo sapiens
ggtaatagcttttctttttacttcagaaatccacacattagagaattcaccaaagtaatcctctttagaagggcatcttgaattatattatccatccgtatttatggagatggtgaagtagttgaaccgttgattggtgattctgaaacataataactatgtcaacaatcaattcagcgtatttctggttgtgtattcaattttgggaaatttcatcttccttgtgattttcatttaatcattttttacatttcttcaagttcaagcaggtagtggcatgtgcatgtgtaacaagggccaatctgagcaattgtgcacttatatgtggcacatttttccctttaagattctggaaaaggcaccccattggtgacttttctcaaaattgcagaccacactatcagacacccacccgataccgcttcttttcacacttacataaaacacacacttcaacaccttctccaccacccttttgggggcaccccacacaccgggggggtctttttcccccaaaaaaacccccccccccccgttttttttttcttctctttcccccccacaaaaaaccactaacccccccaccaccgtcttcttttcactactatcattcagtcatctcctccctcccccccccccacaacacaaacccgcgcgcgggtgcgcacaacccaacaaacaacagtcgctggggccactcccccccccctccagccccccccacccgtcccacgaacaagcagccgtgtttgttctttattaactcacacccacagcgcctcgccccctcgtcacaacaaccacaccacactcgctctttttcttccttttggtgcggcggcgcgcccacaccaccaccatccttggtgccctcacacacccgcgaccgtctgttga

SEQ ID NO: 602527 - DNA, 104 bp, Homo sapiens
tccggttgcgacgactgctggcatcatctctcctcctgccggctcacctgcagcagcggcttgaccttggtgaagagccgccaccactgccagttcctgcagct

SEQ ID NO: 602528 - DNA, 403 bp, Homo sapiens
  misc_feature (48)..(48): n is a, c, g, or t
  misc_feature (381)..(381): n is a, c, g, or t
aggttcgaggagactctcaataactaggtatcttccttcaatacctantttattgagagtttttaacatgaatggatgttgaattttctgataaaccttttttgcacctattgagataatcatgtggtttttctctttagttctgtttatgtgatgaatcatatttattgatttgcatatgttgaaccaaccttgagtcctgggaattaagcctacttgatcatggtgcataagctttttgatgcgctgctcgatttgatttgcagtattttgttgaggatttttgcatcagtgttcatcaatgatattggcctgaagttttctttttttgttttatctctgccaggttttgctatcaggatgaggctggcctcatagatngcattagggagagtcttcgtcg

SEQ ID NO: 602529 - DNA, 638 bp, Homo sapiens
gcgtctctcggggggcgggtctaattacccgagccttgtttgttgtacgccccctcgttcctcccctggtgacagccccctcccccgcttgttgttgaccccccctagaaggaagccacccgggtgctggattcctcccttctcgggctttttgccctttggtgccccggggccgggatgaaccctatttttctccacccgggagaccacctttgtcccccttggcgctcattttgggggcacccaccctataaggaccgaccgagtgtgtcgccacaagaacgcagcgttggtcccgtccgcggatattcgcgcggagagattttcttagccacacacgtgcccctcctcgacgtgcccctctttccggtccacagaggggagttgaccaaaatgtgttgtgcgaaagtcttcacttctcccgccggggcgcgtgttttgcctacaatcacgacgcgcgtctctcttccctataagaaagccggggaggctaccccacaggcctcaaagggcacattgtgggtacccgccccaaggggccccccccgccccccgtttttaagggggcccctggaacccaaaggagtttttttagggcccccccccgttttcaaaaaaaaaggtttttaattggccca

SEQ ID NO: 602530 - DNA, 182 bp, Homo sapiens
ggagtctatgggtggattgttgttgttgttgtttgaattgaggaaaacaaatgaattgatagccaaagtgagacaatttcagcaatctgtaagcagtatgtatgtttagttggggtaatgaagtatttcagtttgtgaatagatgactgtttttacttcctcaccctgaattcgttttgtaa

SEQ ID NO: 602531 - DNA, 343 bp, Homo sapiens
  misc_feature (7)..(7): n is a, c, g, or t
  misc_feature (67)..(67): n is a, c, g, or t
  misc_feature (71)..(71): n is a, c, g, or t
  misc_feature (73)..(73): n is a, c, g, or t
  misc_feature (75)..(75): n is a, c, g, or t
  misc_feature (87)..(87): n is a, c, g, or t
  misc_feature (89)..(89): n is a, c, g, or t
  misc_feature (96)..(96): n is a, c, g, or t
  misc_feature (161)..(161): n is a, c, g, or t
  misc_feature (164)..(164): n is a, c, g, or t
  misc_feature (169)..(169): n is a, c, g, or t
  misc_feature (174)..(176): n is a, c, g, or t
  misc_feature (180)..(180): n is a, c, g, or t
  misc_feature (245)..(246): n is a, c, g, or t
  misc_feature (251)..(251): n is a, c, g, or t
  misc_feature (315)..(315): n is a, c, g, or t
gggaganggggggacgggcttctccctgcatcaatcaacaggcagaggtgggaggcctttgcgagcngctntntncggaggagcggntnggcgctnagagcccggggggtccgcctgccccggcccccgctgcctggttcttcgggctttggcccaaaccncgnttctnggtcnnnaccnccccctccctcccccaccccctcacacacccacccacccaatccctccctacactcccccaaccnnaaccncacaacccccccccctccccccctcctcctcccctcctccccaccccccctccactccctcccngcccgtgcccacgccccgccaaacaacg

SEQ ID NO: 602532 - DNA, 719 bp, Homo sapiens
  misc_feature (196)..(196): n is a, c, g, or t
  misc_feature (201)..(201): n is a, c, g, or t
  misc_feature (232)..(232): n is a, c, g, or t
  misc_feature (235)..(235): n is a, c, g, or t
  misc_feature (251)..(251): n is a, c, g, or t
  misc_feature (260)..(261): n is a, c, g, or t
  misc_feature (301)..(301): n is a, c, g, or t
  misc_feature (379)..(379): n is a, c, g, or t
  misc_feature (388)..(388): n is a, c, g, or t
  misc_feature (407)..(407): n is a, c, g, or t
  misc_feature (416)..(416): n is a, c, g, or t
  misc_feature (630)..(630): n is a, c, g, or t
  misc_feature (715)..(715): n is a, c, g, or t
ccctgattccgatttggttggtactccagcgatgatggcatatttgtttttttcttgctgtgttgccccggctggtctcttacgtcctggcctcgggccgtcctcgccgccttggcttttcccaagtgctggaattaccggcatgagcccccctgcctggcccagaaaccatgctgttattactctagctagcagnaaacnaaaatcattttctggagaattagactatttnacnaggcacatgcttatcngtacgtgcnntacctcttctagtgttctgctgtgttgatattagtgaccnagatctgcatagtttgagaaccctctatttcaaggattaggaggtagaaagcttatgagaaagaaatctggcctggtnaatgcaccntcgtgggctttttgaaagntgggactcnttctttgtctttcagtggtttattataatctattaaaatttacttatgacctgagacaaagccattttactatttaggctcagtttaacattgttaaacctgtctactattcagagtgtaccaaggtgcttttatttcttaagagttctgttgtatttcatccataaaaatgattgaagcagggtcaggaaccagtggctcatgcctgtaagtntagcactttgggaggccaaggtggaaggattgcttgaggccaggagtttgagaccagcctaggcaacacagcgagaccccatctntacg

SEQ ID NO: 602533 - DNA, 614 bp, Homo sapiens
  misc_feature (460)..(461): n is a, c, g, or t
  misc_feature (540)..(540): n is a, c, g, or t
  misc_feature (569)..(569): n is a, c, g, or t
  misc_feature (591)..(591): n is a, c, g, or t
cagcttcgaaatcttcagagatccacactttattgcatgagcttcagtagctaatcagtcgtataagagataatcgctccactcatcgaagtcatcattttatccaccgagatcttctgccaactatctttcgaatcaactttaatagtttctacacacatccttctttccccttagaccctttgcactacattcgaaaacctgacttaaaaaagataagagggagaccccctaagatgaggcatgctgtgtctgaaatgccttttatgcacagacttaggtctcctctttctaagactggattctatccatcttatggcatgccttactctccttcaccccttacagctgctcccataggattagcctactatggaatgtatcctcccactctatatccacctcgtccatctccttctttcaccacgccacttccacctcctttctatatgcatgctgnncatttacttctcaatcctgccaaataccataagaaaaagcataagctacttcgacaggaggcctttcttacaaccagcnagactccccttctttccatgagtacctancccagtgttcctcctgagatgncctatggttggatggttgagcac

SEQ ID NO: 602534 - DNA, 1801 bp, Homo sapiens
gggttggacctggctttgccgggggtctgtcatgtcaggaagattgttcatctttggcgtgagcgagcgagctagaggaggctgatcttattatgttgaacagcgtggcgtgtttgttcgttcggtgaatgcgcagctgctagtggtattgttgtagctctgagcgctgctcactcttcgtagtgagtgacataccatggtgtgtgacccccccatcgctgatgatatttggtcgaggggccgtctttcctgctggggatggttctgcccgacaccgctcggcggcgtggtgaagaatcgagttgtgctgctggatcctgctgtgtctatggaagttgagttgtcccacgtgtgttggcgctcgtgttgtgttcgtgtgtattagtctcgcttgtatgatgtgctgctcaccctcctttgtttttgctccctccgcccactatgtgctctttttgtgcggcgctggcgttcctcctgcctctgttattgttgctccgcgtcctggtcttgttggtgatttgggggccctgtgtgttcgcccatctcgcccgctctagtgtgtggggagtgagctacctctacgcggggataacgtcattcatggcttttctgcgtataccgcgtggcccgctgtgttggctgtttagccccgcagagtgtggtgtgtgatgacgatgtcaaggttgtttgtgagcggcgccgtttgcgggaagataacgtgtgtagtggcccatgtacaacattgaggccgagactgtggtgtgtttagttgtcgtttttgtgattgtgggtgccaccccccacttggatcccgactatgttattgatggggtgtcagtttcttgttgtgttctcgccatcagaatcttcacttgtgggggggtggagcaagatagaataaggatttgtgaggttgtagatctaagttcgtttgttgttatatgagccgtgacgtgtgcccggttgtccacctgcgtctcgtttgtgtggttgttggggcgtttgtaggagtcgttacggagtgtgaagtgccccgccgcagtggggggggccccccctccgttcctttggggggttcgggcgtgtgtgataagattatggggagggtgatgggcccacctcgttttttctctggtgtctcggcaccctgcttcgtatgatgttcacgtctatgaggatatatgtggtagagatacacagacagtgtccacggtagatctgggattgtctctcttatggaataattggtacgcagagcgtctgcctacaatagattattttggggagtgtgttgtgtggtgtgtgtgtgtgcgtgtgtgtggtggtgggttgtggtgtgtgtttaaaatatgttttgtgtgttataaaagttttgtttatgttgcagatattactctaagtctcttatgtccgcatgttatagcgtgcgtccacaccgcgtgctgatagagagtggcaccaagtgtctcagagtgggtgtgtggagagtattatttctattagaaagagtgttatgacctgtgcgggggtcgttatttgcactaagactttgattatgccacgcacttattgtcatatactaagaggccactgatgcaccacgagggcactatcgatgtcatgatgatgttccacgacacgtgtgtgcatgcaccccttatataaggaaaacgccttgtaacccctgtgaggcacggcactgtcccccttctctccctaccccttatcgtccctatatccctgggaaccccccatttgctgggtatttcatctatggcccaccattcatattaatggcatc

SEQ ID NO: 602535 - DNA, 950 bp, Homo sapiens
  misc_feature (834)..(834): n is a, c, g, or t
cttaaagatcttagacatgtgttcacatgttagaaattctactgtgggggctctactgatatgtgcatatatgaggtatgctggtgtgagagaggtgaggagagcatcactttcctttcagtaagcttatgtcggtttctctgtcattctgagctagatgtgatgttcagatgagaactagaggggaagtgttacagacacataatgagatagttaggtcgatactgcgtgtgagaaccaggaagtacattctggaagattggtgttacggagcctggtgccgtgtggtgagctcacagtcgtagtagtcacgcagcaacttttggagaggctcgggggtcacggcatgacacactttgaatggagtgtcagagtacgcagcagtggcctaacgttggtgaaaccgctgtcgtctacttagaaattacgacaagaatccgccttgacgcatctagtggtatacgagctaatagataatcacgtaacaatggtgatcgcattggcgtttgccattgctgaacaagaacgaacgtattagctccatccgaacgaccgggtctgccgtcgactgaatcaaccccagtgcactgcccttagtcgatagctgtgctttcacaaaaacgtcagcagtgagttagtgttggatgctagagaactaaggaagcgaaggaaatacagtatttgacagttctatctgtagcttgagactatatggtaataagttaagacttttggtggtgagaagtcacagagtattatttgtgaccactctcatttgcaaacttgtgacaattccagtgggcgtcaagagtgagatcttggaatctcctagtngaagcgccttttaaagaaagctgataccaaaacgataaagtttaacatctatgtctattggactcatactctagaaaccacgttttaactaaattgtattgccggtggaaatcccg

SEQ ID NO: 602536 - DNA, 149 bp, Homo sapiens
ccggaatgctgtagaaggttggttcatatgaatagataaattaagagtggttatgttagggtcgcacggtgggactgctattattcatcctatgtgggtaattgaggagtatgctaagattttgcgtagctgtgtttgatttaatccac

SEQ ID NO: 602537 - DNA, 315 bp, Homo sapiens
cagttattttgaaattttcagggttatgatggatgttgcaggaattatttttatatatgcccagaacccccagaggacatgactactgaaggctgtgctggcagggtcccaggtaagggtttagcaaattgtcccagcttcattggctgagctttcatccctgttgccctactttgagctgcccttttggtcatataataatgatttagtagagctcttttttggttcccccccccggtttttggatcagaactgaaatgtttgattttataaatttgaataggggcccaaaatagagttccctattcccccata

SEQ ID NO: 602538 - DNA, 115 bp, Homo sapiens
tacaggcagcacattaatggaagatagatggtagcgtggccaccgtgcggcctcccgcatcgctcaccccgtccaaacactcgacccaccacttcattttcaccggcggctgctc

SEQ ID NO: 602539 - DNA, 125 bp, Homo sapiens
tagaggaccttagcggcctgccttttttgtatttcagtagagatagggtttgcatgtaggccaggctggtctcgacatcctgacctcaggtgatccctgccacctcggctacccaaaagtggctg

SEQ ID NO: 602540 - DNA, 721 bp, Homo sapiens
cgcccgggcgcggccgggcccgtggcctgggggcggggcgggaagacggcggccgggagtgtattcagttccgcctccaatcgcccattcccctcttcccctcccagccccctccatcccatcggaagaggaaggaacaaaaggtcccggagccaccccggatcgtgacaggggcgggacctgggccacttggaggttcgatagagaggtgttacctagcgtggttgctgccttgtggtaagaacatgtcgtccatcttgccattcacgccgcagttgtgaagagactgctgggatggaagaagtcagctggctgggtctggaggagcaggcggaggacgagcagaatgggcacggaagaaacagtggtgtgcagaaagcagtgacacagtctggtgcaagacgctaacagacaacaggacgattagatgagcttgagaaagccatcaccactcaaacactgtaaatactaactgtgttaccagtaccacgcacttgctctgacaatatggggactgagtacaccaaatacgatagatcagctggggataccacagggctttacagctactctgaaacaaaccagggtcacttgaatggtcgtctccgaggtaatcccacttcgcaaagggattgccacgctgttatattattgccgatcatggggctgggcatgaactacagcatcatcatgaaactcaacgaaactcgacaaccgcgat

SEQ ID NO: 602541 - DNA, 892 bp, Homo sapiens
  misc_feature (627)..(627): n is a, c, g, or t
gggcctggagcttccggtaccggccgaggtgtgggtcgcctccagagatcctgtgccttcaaagccctacgagtccatactttaaaacaaattgaagaaagtaaggctaaggggaactagagagtcgcctgcaacaagtggagtggatttgaaaagcccaagctagttctggaacagtatcctacgaggccgcatattgcagtatgtatgtgcttatacaatccataacactgatgaatgactttgaaaataaagtcgttgcatgatctaggatgtggttgtggagtacttagcaatcggaactgcaatgttaggagcagggttgtgtgtgggattttgacatagatgaagacgcatggggaaatatttaataggaatgcagaagagttttgagttaacaaatatgtgacatggttcaatgtgatgtgtgcttattatctaacagaatgtccaagtcattcgatacagtaattatgaatcctcccttgggggaccaaaaataataaagggacagatatggcttttctaaagactggttggaatgggaagaacagcagtatattccttaacaaattctcaatagagaacatgttccaaagaaggtggggcaaggcgaaatccggatgnattttttgcgggactggtataacggcggccttacaagggtttttccaacgaaaacacgggcgtggaggggcgcaatcgggtgcttttaaaacggacgcataaggttttttaaaaaaaaaaaaaaagtggtgcggggggggcgaaaataaaaaaaggggggagggagaagagaaattacagcatggtgtaaccagccgggcacattgttttgcttccctctttttgtgccgttaataataagaataataaaaaaaggaacaaagaa

SEQ ID NO: 602542 - DNA, 90 bp, Homo sapiens
gggggggggggcccccttccccttttttgggggatggggggggtccccccccgggcccccttttttccttttttgtttttgggggcccca

SEQ ID NO: 602543 - DNA, 1114 bp, Homo sapiens
tctggcgatgacctgtgagatcccagttgtggtgcgacagtgtctctcctgtaccccgtgcctgtgctcctggatgattcgctaagacgactaggttcgtgccttggcagcgtgcttagtgcctacactggatgtcagagacatgaggctgctgtgcccgaaggtaaccctctgcgtctgagaaagaggggttgtcattggagactcagaggagaaggcgtggagctcagctcgtgcttcttgaatgcccagggatggtcgtggatgcctggtggtgcccaatggagcctcatgaatccatctgccaagtgcagcaccaggtaacccagagagctcgaaatgtggcatggacagactgaagcagcacggagcagccagcagccgtgtgtggaaggctatagccaggaggctgaccgtcatcttctcgcgggcagactacgtgtaggtaccatgaagtgacctctcaggtagacaacttggcagaaaagcggcctcagtgaggaacttcaaacagatgtctgggcctctccagggttcaggggaagccccgggcttggggctcgaggccttgggcagctgcctttgggatgaatactagcgctaaagaactttggacgaagaaggtggctggacacagtatgtcctggctaggagaaggcctctaggactctaccaaaagctgagtgacagtatccaagaccaatcctatagcaagccagtctctacattgggcgactcttggccagcagcgcatggcaggttgctcttgtgagagtgaaccagttgagatggcctgactagctggcctgtctgtgccctgggtggcagacatgggtcaccaaggcaagaactgggtacgcaacaccagagagcgaatggagcaacccacacttgtagccaagcaaacgagccccgagaggcccacatcaaaaaatcccacaaagacagcaggtaggaagccaagagaacaggaggagcaccagacgcgacagcaagtaggagaagacagaaccgatggaacaaacggatgagaccgatagagaaacgatcagaatgcgagtaaagaacatacacatcgtcgcccgccgcgtcgtcccgctgtgcgaaaaaaaga

SEQ ID NO: 602544 - DNA, 338 bp, Homo sapiens
gctcctccggtgtacactagggttatgttattcagacttggcaccatgatctaccagagtttacaatgcaaaatgagaaaagagaggatgtactataaataatgttgtccatgtgtttgtgtggagcgtgagtggagcatgtagattttgagattaaatctcttgatgaacagtgtgtggttggtaaaatttccaagcactggactggaattttgagagaggcatttacagacgctgataactttggaatccagttccctttagaccttgatgttcaaatgaaagctgtaatgattggtgcctgtttcctcattgacttcatgttttttgaaagcact

SEQ ID NO: 602545 - DNA, 548 bp, Homo sapiens
cgcaccatcgccatggcccacggtgctgctcgattggctcggctactagaccaaacaaaccagcgcctcgtcgagcaaatcatctttgacggcatccgtcgaccagcgtcactggcacctgtttctagggttactaggaaccacgctagatgacccatgaccataaacgccgatacgtcgactgccaagtcaagtcaaggtcctcggaacaacccatgtctggacacacgcccgcgaccaccctgtgcggtgccgactttatctggcacgacatagggcctagaaaaccttattgccgacaatacgccacggttcgaaataacgacctggtgcggctaagatttatgagcatcgagccagcgcacggggtgccaataacgcagatcgaaggcgatgatcgccataaaccaggtcggcctgggcaagttccagtatggtggatgtcccagcgaagccgtgatgtaggcggccgtagaccgctccgtgcgcctgaaggaaaccgtggtgtactatggttgggcaacgaacccgatgaacgtcaatgtggc

SEQ ID NO: 602546 - DNA, 580 bp, Homo sapiens
  misc_feature (428)..(428): n is a, c, g, or t
  misc_feature (462)..(462): n is a, c, g, or t
caaagttgagttttaactgtgctaaagccactcaagcaaaaaaagttgataaacacacgtctgcggttcctttacaacccccacgataaaaaaattatttgtgggaaaaaaatgttttcttacattagatgtaacaatattgtctgggcgcggtggatcacacctatgatcccagcactttgggagcctgaggcgggtggatcacttgagctcaggagatcaagaccagcctggtcaacatggtgaaaccctgactctgctaaagaaaaatccaaaagttagccgggcatggtggcaggcacctgtagtcctagctactcaggagggtgaggcaggagaatcactgaacctggtaggtataatgaaggacgcttcatcatacctacctttagcaataacgatgtgagtttgagaagcatttctgagcnaacttgctgagtacacagtggctctctgcctggncattactgtggacattttgtctgtatcttactagagcactacaaggtcctgaagatggtggtaggtatgggtaggacgggtaggtatgataaaggacgggtaggtatgatgaaggacg

SEQ ID NO: 602547 - DNA, 352 bp, Homo sapiens
aactttccgtcaactaacactgtgcctcctctgtggaaatgcaccaaacccttgctcataggctaacacatactaaccttcccaagatctctacaatgcaagtagaattactgccctcatataaatagataagcaaactaaggctcggagaagttcaggtactatcaagatcacacaactagcaagtgcagaaactgtggtacctatgcatggtcatagttactgtttttataatagttatttaacttccttggaggccaaaagcttggcaatagctagagtctggggcctgagtgaagtggcaagagaggatattagggtgccaggaaagaggaagggtgttcttaaacca

SEQ ID NO: 602548 - DNA, 361 bp, Homo sapiens
  misc_feature (36)..(36): n is a, c, g, or t
  misc_feature (66)..(66): n is a, c, g, or t
  misc_feature (327)..(327): n is a, c, g, or t
aaactatgtagggaccatgtgggattcatacatggnctggcaccctgtccctgttttgggaatgtnagtaggacagtggttctctaccctcaaaatgactgttggtctggtctgttcatgttcagaaggtagccataggcttcatcttagagctggaaccctttgaatgagtggtaggctccctttcctgtttgtatctttgggttcacataaagtatagacctactttagaactcaaattggtggcggaactagctccttaaaacgcagctggttagcacattgcctcatcctaacaggcctctgcttcccctatgtccccttcgnttatattagctgccctgtgcccattctatcatgt

SEQ ID NO: 602549 - DNA, 398 bp, Homo sapiens
agggaggacgacttatcaactacgagatgagtaagcggccatctgcatagcggtacaaggaccagctcttgaaagagacagtgctccagccactgctgcagccacagatcatgtcagcatgagtagtcgtgctgaagggaaaacacagaatgctatcttaatgaccatgccaacattattgaatagccgagagtccctaaacccactctctgctgccttatcaatgctaaaccttatttgtcttcatcaagagtagttcaaaatatgcaactaatttaataattttgaatgatggttttatctatagcaatctgtagtaatatgtatattatctattgggatttgtgtaataaaaaatctaagggaacaaaattttataactacaagcacttaagtac

SEQ ID NO: 602550 - DNA, 266 bp, Homo sapiens
ggtcggaccctttgtaaatgaaggagatataaggtaattccaggagaagcaaatgctaagggaatttgtttgttaccactagactgcagccacaagaaatgctccgaggagtcctaaacctgaaaacagaggatgacatttaccatcatgaaaacacacaagagtgtaagattcactagtaaagcaatcacacaaagaggagaaagggctaatatggtagcacgacagaaattctccaacccccagtatttaggggaaaaaaaaaa

SEQ ID NO: 602551 - DNA, 1074 bp, Homo sapiens
tctgcttccaaagtctcaaacaagcagcccatagagttagatgatagtcaagttgactgggtctgtccagtgctagacgtacagtaagcatgcgcgcatctggtgcttgattaggtctgctggtataaagtagcatgaagagtccatccacgccaggttacgtccatgtgataggagaacgagcagtgcactatatctagtattcgaagaaccagtgtagccatcaagctggtgcagatgactaatagtcgtagtgctaatcaacgatagtgcgatgccattgaccagagggatcctgaatagctcacagggaaaaccagaaataccgggtatatgtcgtgataccagttctgccagggttcgaaggcatacattgtcaacgcggcggatggaaagtggtctacagtgcaatcatgtcagttcaagtagagaaccatgtgcgagaggagaaaattaccatcgcttgtgactagttaaaagcagagggttgggaatcagtggataagattacgtatcatacgggggtcttagaaaacatgcagagctcgaaggaaagctaggtcactgaggttatctatggtccacaggaaggttggtagattgctggtgataacactgtcattataggctctgtcgaaatcagtgatcgcaataaggtggagaaaagcgtgacagtgaaaatgtgtgtcacttgtggcagattacagtggactggtccgttagtaatgggtggaaacgaagtaacaagttgacgcgttgcgcaggaatttggtaaagggattagggcagacgcggggcatcttggagagcccagggagaacatcatggacacacgggggtgcaaaactacaggagggggggtgacacaaagagggccagcgcacaaaagaaaggcaggggaccggaggagcacaacaagaagaaaaacaatactcccggcgaggattaaaaagcccgataaaaaagaaggccccaaagtagggaacagaaacacactcgaacgcgacatttagcaagcagcgcgaggagacggcgaccagaaggagagaaacgaacgacacggggtagacggtg

SEQ ID NO: 602552 - DNA, 93 bp, Homo sapiens
tcaagcttctaacgatgtacggggacatgttcatgccctgattttatatacttgtatctatcaataaacattgtgatacttgaaaaaaaaaaa

SEQ ID NO: 602553 - DNA, 190 bp, Homo sapiens
ctgacagaattgggacacttctctgcatgtgggcacgagccctgcggtagcttcacacagaagacatcgacgcttgggggtaacccacccatgtcaatgtgtctgtagtcatgcggaggtgacggcacctgtactgagcctgcctggtgtacccaattgtcgggtacccgagctccgaaattcgtaaatc

SEQ ID NO: 602554 - DNA, 148 bp, Homo sapiens
  misc_feature (57)..(57): n is a, c, g, or t
atgctgcgcgatggttccataatgtgcgcgtagggcctgccggcctagtgtgcgtanacgaataagcttggtatttttctctctactactcgctgaacgtcatgctatgttcatgcgttaactttcagtgagtagtagagagaaaaat

SEQ ID NO: 602555 - DNA, 495 bp, Homo sapiens
tcagtgatctgaggttaaaaccagactatggaggattcatcaacagaccaggaagcaacagcctgggctccagaattgaccagtagtccgtgcacagacgaggagaggtcccatgaaacttcggcgcagtctgggaaccgagctctttttgtaacaagttgtttgtcaggaggcccggtcatgaaagcccttcctgactgggctcaaggaatacaaaaaggacaacttgtttttgccattgtctgttgtttttcaataactagttctccgaaacagcactggatgaatgcctcaaggggctcacacaactcgttccaggacttagtgaccattgtttctgtccctgttcaatagagttcaaatttaatatttaaattttgctccacaatgtgccatattatctgtatccaacctgtcattgggcatttaggttgattccatgtctttactattgtgaataatgctgcaataaacatttacgtgcttgtgtcttta

SEQ ID NO: 602556 - DNA, 797 bp, Homo sapiens
  misc_feature (43)..(43): n is a, c, g, or t
  misc_feature (95)..(96): n is a, c, g, or t
  misc_feature (162)..(163): n is a, c, g, or t
  misc_feature (215)..(215): n is a, c, g, or t
  misc_feature (250)..(250): n is a, c, g, or t
  misc_feature (483)..(483): n is a, c, g, or t
  misc_feature (691)..(691): n is a, c, g, or t
  misc_feature (762)..(762): n is a, c, g, or t
  misc_feature (792)..(792): n is a, c, g, or t
gagctcccagagggcctgagacgagcaatgaaggactgtgcanagcagatgcaggtgctctggcccaggtccagaactcagagcagctgctcganncctgcaaaggaccgtgagccaggcccagaagcgggtgcagctgcagatggtgagtacctggggccnntagggcaggagggcgaggagtccagcaggaatcagttgcacatggtggaagngggcacgtgggaagtcaaggaacctgtcctgtccncagctgctcaggccacaccctggaaccggtgccaggtaggtaagagggttttggggcagctggtgccgtggccagaacagggcccctgcagccacacagagctgtttgatcttgagctgatcccagactcccagcctctgcctcaccatctataaaactgacataatgggccctagtttgcagagtcatgaggattaaaatcaaatctgactgggattacaggcgtacacctngagcccggcctcctgttttttttttttttaagaaatggtgtgttgctctgtcgctcaggctggccaggctggagtgcagtggtgcaatcagagctcactgaagcctcaactttctgggctcaagcaatcctgcagcctcaccctcctgagtagctgggactacaggctcacaccaccatgcccagctaatttgtaaatttttttgtangagtcggggtctcactatgttgcccagggttgggtctcaaactcctgggcctcaagtgaccctccccccantgggcctccatggacttttttcaaaaaaantaaag

SEQ ID NO: 602557 - DNA, 730 bp, Homo sapiens
  misc_feature (43)..(43): n is a, c, g, or t
  misc_feature (95)..(96): n is a, c, g, or t
  misc_feature (162)..(163): n is a, c, g, or t
  misc_feature (215)..(215): n is a, c, g, or t
  misc_feature (250)..(250): n is a, c, g, or t
gagctcccagagggcctgagacgagcaatgaaggactgtgcanagcagatgcaggtgctctggcccaggtccagaactcagagcagctgctcganncctgcaaaggaccgtgagccaggcccagaagcgggtgcagctgcagatggtgagtacctggggccnntagggcaggagggcgaggagtccagcaggaatcagttgcacatggtggaagngggcacgtgggaagtcaaggaacctgtcctgtccncagctgctcaggccacaccctggaaccggtgccaggtaggtaagagggttttggggcagctggtgccgtggccagaacagggcccctgcagccacacagagctgtttgatcttgagctgatcccagactcccagcctctgcctcaccatctataaaactgacataatgggccctagtttgcagagtcatgaggattaaaatcaaatctgactgggcgaggtgactcatacctgtaatcctagcactttgggaggcctaggcggttggatcacctgaggtcaggagttcgagcctggccaacacagggaaaccccatctctactaagaatacaaaaattagccgggcatggtggtgggcgcctataatcccagctacttggctgggcaggataatcgcttgaacccaggggacagaggttgtagtgagccgagatcacgccattgcacttcagcctgggtgaaagcaaaactgtctcaaag

SEQ ID NO: 602558 - DNA, 289 bp, Homo sapiens
gcacgaggatgaccagacttcaggggaagataatcttgctcaatatccttttctgctccccttcctgctgagagtcactttgattggcaataaaatatctcacatttaccatcttcaatttgttcttgcaacctcattcctcctggatgccagacaagaactcaggtgccatgagtatgggtgcaaaaggctatcacactgtccctccactgagctgttaacacttaagctatccatggacagcaaagctaaaagggcactgtaagagtccttctggggtttcagaagt

SEQ ID NO: 602559 - DNA, 444 bp, Homo sapiens
  misc_feature (432)..(432): n is a, c, g, or t
tctcaggggacggattacatatatacacacacacacacacacacacacacacacacacacacacacaccacgcacatatgtggggccaggcacagtggctcacacctgtaatctcagtttttgggaggctgaggcaggaggactgcttgagcccaagagtttgagaccagcctacgcaacatagtgaggcccagtctctactaataatttaaaaattagccaggcgtggtggtgcacacctgtggtcccagctactcagaaggctgaggatggaggatcgcttgagcccatgaggcagagtctgcagtgacgcatgatcgtgccactgcattccagcctgagcaacagagagacactccatctcaacgaacaaatatatacatgtatgtggggagtatattggatatatcacattgtacctcatatattacnttatatactaca

SEQ ID NO: 602560 - DNA, 328 bp, Homo sapiens
actctgtgtatatttgaatatacttgtgcaaaagagtcgtttgttgtgattaactctgcacacatctttctgtcctgaaaactctcattcttttctttattttatgtgctttacaaatgacatggaacactttgtaattactcagtaaatctgtgctatcgtatgaaaaaaagttcaacattcaaatctggtttttatttaatcatgtgtacctgtgtttgtctttgttttctgtttttgttttcgttgttcttgttacaacatagattctagcttttgagtgggtttttgtgcttacaagccaagtgcttggctgcctggtcgacgc

SEQ ID NO: 602561 - DNA, 304 bp, Homo sapiens
acataccctccagcgcagcttggcctcagtgtcccccgcagtccctgcattcttgtcaactcctccaacttgctgatcagcctcccccacggcctgcagctcctgtcctccccacaaacactgtgtcctcggctgagcctggccccgcatgttagtgcatcgccatctcctggtgactacgaacactccagcgcatatggcttcagtgtcccctacagtccctgagatcttgaacactcctccaactgcagatcagcctcccccacggcctgcagctcctgtcctccccacaaacgctgtgtcc

SEQ ID NO: 602562 - DNA, 252 bp, Homo sapiens
agacttgggggttcctggtgtgtgaggggtcctgggatagctaggggttttccaggagttgtcctttgttgtttgtcgtgaagaattatactttgtgtgtgtgtgggttgtcccatgtgtatgcgtgtagtgtgacagtatatgacccccagtgtgtgcatatgtttgtgtggttgtctctgagtgatatccacctctctctccccctctgtctctctgcagagatatgtgtggcgtcactgtactcttgtg

SEQ ID NO: 602563 - DNA, 333 bp, Homo sapiens
ctgcaggtcgactctagaggatccccgacaaacaaatggtgcatttatatgaagtcttggttttaagtcagtatcaaattctttatcccaaatttgaccatttggataaactggtggtacattatttaatgcagttaaaggaccataagtattaaatatattagtatagttaattcctgttttacctccaattggatctgttggtagcaatacattatcatttgttacaggaaggttaaagttaatattctgaatccaatctccttctggatatcttcctgtatcttgatgtgctatatatgtaaatctctcaggttgtttctcctgttgtag

SEQ ID NO: 602564 - DNA, 1268 bp, Homo sapiens
ggcccaatcctttgcagcacgaatgagcggtcagcgtagtgccatatgcacactgcaccctggggctgacagacttgtgccccctagccttcatgcatgcccaatgcactggcatgctttgcatgcccctgccccaccatgccccttgaccgctcttctttttgttctctcctcgtgtggatgactgctctgctgctgagtacgtgtgacgctttttgcttgcttgggatgtgctctactgcatggacttttttttggttgcacccatcaccatgctacagtgtgcttgcagtgcattgtgtgcacaccagtgtgcaccatgcagtgtgctcttgtgcctcatcgccttcagcacagccactatcccatcccattcctttcacctcaccccaaaactgtgtgcatcccccttccaccattcttccatacaccccagtcacagcattgccacatgcacaccatgtgcacatccatcttgcagcagccacatgccatgcccctgctcccatgtggtgcccccatgtgtcattgttgtcaggcaagtgccccagttgggtgtgttggcccactttggctggtttctaaccaacccccgtggctccatccccaagtcttggcccccccaagtgaaaccttacacctttgtgggccagaggtactagggttaggtcaccttcttgtgccttttcaacaaggttcaccttttccccatttgccgtttatcaatgttcgcaagttgcctttgcaagttttcccccccaaccgatggcgccacgcggtgtgggcccatggtggcaacacatttgcacacggtgttggccaacttttccatgcatttggccaattacccccttttggcccaatgtggacactttacaccaatcgccactgtttgggagttatgtggccccgttagctctaccaatgatgcccccccaatgagtcaatctcgcagccaattggccctttttttccgccccccaaaggggcccgcagtgtgactgacaggacacccacaacgctttaacatcgtgtggcagttccagcaccagtggtgccaatggcgcatccccttggaattagagaacgccgttagagggcatacccctttggttgggacccacccgtttcctggacagcgtccatttggcaaggcccccactgagccgccccgtttcacaagtgggaacaattgttggctcgtttccaacagacactggcattgaccacatcaatgcaaccagtacctagcagaggtgttcccttac

SEQ ID NO: 602565 - DNA, 825 bp, Homo sapiens
gaagatatccaggaaagggggcttggacactggccaaggagaccccttcgtgctgtggacacagctctcttcactctttgctcatggcatgacacagcggagaccgcctccaacaacgaatttggggctacgaagaggaatagcgaaaaagcaaatctgtttcaactgatgggaaccctatagctatagaacttgggggctatctcctatgcccctggacaggacagttggctggggacaggagaagtgctcaatcttcatgagacaaaggggcccgatagggccagcaagcacaaaggcttgaactggcgaaggtcaggaatggcccatatttttcggcaaggtggtcccttaaaccaaattacaggtcacgagaagtgtctagaggccagtatcccaaaagctcttccacgtcacgtgttctttccacccattctccctgtgcatcttgagcagttatccaactaggatctggcaagtggatactgcggtgccaatcccctgagaaaagactgagccaggaactacaagctcccaccagattcctcccagcctggacctaattctagagaggggctctctcattcacggactgtgtctggaacttgagcaggcttctgcacccttgcgtaggctctttgcattgacacgcatcaggtggggcgattcagagcctggagtaagtgcgccagaatactaccgagagccaaagtacgagcctggaaagcccaaaaccgacgagcctctactgcatgccaggagtacatcctggggacagtggtcacacccagagaagtgggactcatggaccaatggaactaagcc

SEQ ID NO: 602566 - DNA, 293 bp, Homo sapiens
gaagccctggaggctgcctgaatttgtgccaataagtacatgatgaaaagttgcggcgaggatggctttcatatccaagtgcggctccaccccttccacgttatgcacatcaacaagacgtcctgtgctgggctgacaggctccaaacaggtatatgaggtgcctttgaaagcccagggcactttggccagggttcacattggtcacgggaatccggggcccatcgggaccaaggttcaagacaaggggcattttatttgggcctcacaggcaaaggcaaaggttcctggcac

SEQ ID NO: 602567 - DNA, 1037 bp, Homo sapiens
  misc_feature (375)..(375): n is a, c, g, or t
  misc_feature (674)..(674): n is a, c, g, or t
tccacgtcataagtttatggacaagacatatctcagtatggcatatgagtcctagcttggactccactttccagaaggctgccaccctcttaaaagtgctctgtcaatatctgtctaaagtggagggaacgtgaaacatccttagtgtttacaaccagtggggtgtctatactagcaaggaagggtgtagcaaagtgcatactccaaagttacaagatcgacattcttatagccgtagttaagcgaccgagttgggttgtaccagtgtgaaacagagtggcgagaatttctttccgcagggccgctccgtcgataggtgggctccatagggaccactgagaaggttcgggtgaacccgtccggagtgctcgtggncccagacaaataccgccgtgcgtggacaagtcatcgtgcgataagagcggcgccagagagagaaagtggcaggcacgagaagtgaaagagtgggcgagacaccttcaacgctagagaaaccttgtctgtgatatctcggcccgaggttcccccggcgcgggaacatcgaggcaagaacccataggcggggtgtcgcgaggagtgggggcacaggtaaagctgggtggacacccggggcgagtttcctggccgtcctaccagtgctgcgaagtgttaggcccatggcgcgcgcgaagccncgagtgggtcctcgttcggcgcgcatgcgcggtagtttgcagtttgacaattggttgggcccagactgttgacagggtcgtaacgaagtttccgacagatatctccatctcaaggcattacaggagacacaagaaagacttctaagcgcaaatgccagttgatgagttttcaccccgcggcgtcacgcagccctgttgggaaaccacttcagtggccgcggctgacagggggggaatacctaccccccagggggtcccaaccgcggggggatccccgtttgtgtcagaggacttgacattgaggtataacaggccgtgcagaacacggatggaatgtttccacatcctaagggaaacacgaca

SEQ ID NO: 602568 - DNA, 247 bp, Homo sapiens
tctagaggatcccgctgctgctactatacacggggtgatgatctcactgatgcttgaaccatgctcttggacttcctagcctctggacccaagagccaaataaacttctgttcattataaatatgcccagtcttgtgatatacttgttaaatgcagcgagcaaaatgaacttgacgacacacagatcatatgttgtttcagagtagttgaaatgtagctacaacgaatgaacttgcaaattggtgtg

SEQ ID NO: 602569 - DNA, 108 bp, Homo sapiens
gagggactcaggtagttgggggctcagagaagaggtgatgggaactgatggcactgggacttaggcaaacaaccaatgactggccaaacctggtggatgccaggtctc

SEQ ID NO: 602570 - DNA, 104 bp, Homo sapiens
tttatatcgcctagttctagagcagcctccaccacgttggagtcttacaatttcggtctataagttgaagttcgtcttaatcattaactttcggatagctagcc

SEQ ID NO: 602571 - DNA, 322 bp, Homo sapiens
cccccccctctttttcccaaagtttcctttttggggggggggggttcccaaaaaaattttaaaaagggggtttttccccccccccaaaacccagccaggggatttgcccattttgggtttaaaagtttttgcccctttcccccccaaaaaacccaaaaaaggcccccctatttttatgggaacgcccggaatattttttgcggcccaattttttccaggaggggggcccccctttttttattgtaaggggcccggggccccccttttttttgggtacccctttcccccccctaaaaaagggaattaaaaaaatttttgggta

SEQ ID NO: 602572 - DNA, 367 bp, Homo sapiens
cagaaactggaggagacaggctaatataatacggactctccctgacgatcctgtctgtgctcaccccatggaatccatcttgccaggaccaaagccacctctgtccacaacacccggccccctcggaagcctccatcggtccccgccgcggacccgtgtagccgcctcgatcatcgcctcctctgccaccacgacgatcatccccgtagttaccccccatgtgagagccacctggatcccccatcgtgggccatctggtttaggggccttacactggttgcatacattcctccaagagaagttcatattctcacaggtgggattaggacactatccagtcaccagctcgctgctgtcctccaccgcc

SEQ ID NO: 602573 - DNA, 1580 bp, Homo sapiens
cgcagggcgcaggcgcgctgttggtggtgcgcgcctgctgcgcgttgtccgctcgtctgggtgggcgcgtctctgcgcctcggccccgtgtttgttgcccgctcccgatcttgagtggagctcctccccgggggcgccagttgtttctacttgcttctcgctggtgtctttttagtgccgtttagggctcccgcggggggctgccgggtgtatcacccaggtgttgtccaccagccaggggttagcgccggtctttgagttgccccccctttgatgggcgccttactttttaggggggtggcccgacccttgtttgggtcgacccccatcggtgttgtgtgtacaccactaattagaattgccacactgggctctggtgtggtatcctcccgggttctccccggataatgttcccccccgcggtggtagtattttttgggtgcgcgagctcctcccacccgtgcggttttctcctctcccggcaggattcgccccgccttctggggggcgccccgggggatttgtgtgagttgccccggggcgtggtaagtgcctcggcttgagaaattggccacgcttgtgtagtcacccccatccaccgacttgtggagaccctcaagtgtgttgtcccccgggtacttgtcccaccggcgggttgatgaccccccctcttctcctcggtgtaatattttgataaaacagaagatggtgtattataaaaaaaatattgcgccggcgggaagagaaaacctcttcgtaatagaatatgtaaaaaagggcccccaactcgtggagaagggcccacccgcacttctcgcagcatgtgagttgtcactctctgaatatattatatatctcgctcatcccaccggctgatgttgtgtggtggagtgccgcactactgtgtcacagatagacactcctgtgttgtgggccaccgccccaacacacccacagacccacagtgtggcacacccctctctcacccacacacacctctggcgagaataaatatgagagagacccacacgagaactctctgagtgtgctctcactctgagagagtttgatattttctcacacccctcttgtcccgcgcacacataaatacccacataatagtttccacagagagggctcttgtgagaaaaaatagtatcgtgggtgattatctctcacacccacacactattgacacacactctctcacactattctctatattgtgtgtgaccacatctgagaagagagaggagagagaaaacccacacatataattccacagagagaatatacctctcaatatttctctccacgtatagagagaggtgcactccacggtgttgtcttctcggaaaaattcttccttcgagaaataaatgagatatttaccacgaaagtccacaaaagaataatatttaactcttcttcacccaagaagaaagtattcgggaccacattatattggaatgctattcacatttgtatagaaatgtccacccacaaagaatgttttatattaaatgtcccgaaatatttacccaaattttccagcctttaagaaaaccttgattttccca

SEQ ID NO: 602574 - DNA, 279 bp, Homo sapiens
tttttttttatttaaaaaactttattttgctttaaaaaaacaattatcaattcatgaagattaaccaaaatacaaaccccatcaaagtttattacaataactttcataaaatagcattaaaaaaagttaatattttaatgtaaaatcacaatgtaaaataaaactttgtttagtgactaaataaagctagataataacttcttcacagggaaaaatacttgagggaaaaacatggtatacatgtgtaagcaggaattaatatcagcttagttcctcatt

SEQ ID NO: 602575 - DNA, 177 bp, Homo sapiens
tgcaaatatgtgtggaataattcatccacattcctgtcttttttccccgtactgccgtcttatgtagatactgagaatattaaacctgtactcttttcattagctacataagcacccattatgtatgtccagctgtataatatgggttggagggttaggtctgcaataatcatgtta

SEQ ID NO: 602576 - DNA, 1114 bp, Homo sapiens
  misc_feature (311)..(311): n is a, c, g, or t
aagatctggaagaagctaccacagcgtcccctctgaatgctgaggagcatagcagagtgaatgcaagatgtcgttagtataactttgtttattcgctatgcgttataattggtaatccaaattaaacgcaatagcatcactaatatttcaccaagagtaaatgcatatatttgcatcttgcagttcataatttgtaggtgtgtctcaaactcagtctaatgatttctatataatgttctagttaatccagcgtccagcacatcaggtcaccttctggaaggaaagctggaactagatcacatttcggtttnctgagacagcgctgggacccgcgagctgtggtaaatgtagacagcattcgtgtcattagggctggttttcccttatgtgatggattccctgggatcacttgagcataacgtacgctgggagcatattctaagccacacgtaaatataaataggccacaggtacggacagagccgcagaggccgtttctagaaaatcaaaaaatactccgagaggtgtgaaaggtttttcatgaacgaggtctatataaactttgtgtaatgcttattacaaacgatggatggtgcgcaagagttccgaaggcctccgatttcttgcaaagagtctgaactgctcctcgggaccattgggacgagggaattttaaacacacccctgcacactcggtcgcgactttctaccacagcacggaaacagccttggcaaaaccattccccaattggagccgggccagcggcgcaccgcaaaattcggccgttgccatcttctaagacagggccctaaggtttaaaaccggacattttcttaatcttaagagactcggccatgcaagcgcgaataacacatttggcgccacaacacgcaattttcaaacttttggggagggaaaggttggggatgcaagaggacttcgcaacaaacccaaaattattcggggcgacgaacaggcaactcaggcaaaggtttttcgccagaaggtttggcggaaacaaaccgttgggcgaaaggaaaccaaggaataagcttcaacggggggaaagcggcgcaaacagcaaacaagacacttacggacgcacacgcatcag

SEQ ID NO: 602577 - DNA, 846 bp, Homo sapiens
  misc_feature (18)..(18): n is a, c, g, or t
  misc_feature (63)..(63): n is a, c, g, or t
  misc_feature (105)..(105): n is a, c, g, or t
  misc_feature (114)..(114): n is a, c, g, or t
  misc_feature (116)..(116): n is a, c, g, or t
  misc_feature (136)..(137): n is a, c, g, or t
  misc_feature (147)..(147): n is a, c, g, or t
  misc_feature (163)..(164): n is a, c, g, or t
  misc_feature (167)..(168): n is a, c, g, or t
  misc_feature (172)..(172): n is a, c, g, or t
  misc_feature (202)..(202): n is a, c, g, or t
  misc_feature (204)..(204): n is a, c, g, or t
  misc_feature (282)..(282): n is a, c, g, or t
  misc_feature (289)..(289): n is a, c, g, or t
  misc_feature (304)..(304): n is a, c, g, or t
  misc_feature (321)..(321): n is a, c, g, or t
  misc_feature (348)..(348): n is a, c, g, or t
  misc_feature (362)..(362): n is a, c, g, or t
  misc_feature (379)..(379): n is a, c, g, or t
  misc_feature (384)..(385): n is a, c, g, or t
  misc_feature (420)..(420): n is a, c, g, or t
  misc_feature (447)..(447): n is a, c, g, or t
  misc_feature (449)..(449): n is a, c, g, or t
  misc_feature (460)..(460): n is a, c, g, or t
  misc_feature (476)..(476): n is a, c, g, or t
  misc_feature (485)..(485): n is a, c, g, or t
  misc_feature (490)..(490): n is a, c, g, or t
  misc_feature (512)..(512): n is a, c, g, or t
  misc_feature (528)..(528): n is a, c, g, or t
  misc_feature (580)..(580): n is a, c, g, or t
  misc_feature (700)..(700): n is a, c, g, or t
  misc_feature (705)..(705): n is a, c, g, or t
  misc_feature (749)..(749): n is a, c, g, or t
  misc_feature (801)..(801): n is a, c, g, or t
gggggtaaacaaataagnaattgtgaccaccaaattcttattacattcaagataaaagttttnttcacaccacaaaaagataatcacaacaaaatatacactaanttaaaaaananaagattatagtgacataaanngttatattcnctttttaggggggtannggnntttngtttgggtctacataaatttctattcatgngngaataacaaatattaaaatacagtgatagtttgcatttcttctatagaatgaacatagacataaccctgaagcttttngtttacngggggtttccatgangccacaaactaaactanttatcaaacacatcagttatttccagnctcaaatagatacncattcaaccaataaacnggganngaggcatttcatgttctctttcattttgctataangcattttttcttttgcctaaatgcaangngggaaattgtnttttttctccttttanttggcctcngaggntgccctatctaattcatggganatacgaaatttcgggngtttatcttcttccttacttttggggtctacaaccagcatatcttcatggcngtgaaattcatggctgtggaattcacggctgactttggaaagttcctgactatcaatcacatcggaatgctcattgctctcatcattagctttccgcttatataatctggactgcttgtngctgngggtttcagcactctggtcatccagctgactcgtttcataactntccttcccacggctgtcccaatcagaaggcgcgttcaggtcctgggcaacgnggatggccttgtatgcaccattcaactcctcgctttccatgtgtg

SEQ ID NO: 602578 - DNA, 441 bp, Homo sapiens
  misc_feature (76)..(76): n is a, c, g, or t
  misc_feature (262)..(262): n is a, c, g, or t
  misc_feature (282)..(282): n is a, c, g, or t
  misc_feature (362)..(362): n is a, c, g, or t
  misc_feature (386)..(386): n is a, c, g, or t
  misc_feature (419)..(419): n is a, c, g, or t
  misc_feature (425)..(425): n is a, c, g, or t
attgaaaatattattctggagacttgtagccaggaaaaattgtaggattcagtccaaattgtaaaaaatataaaanttgaaaaatcctggacaaggctacaatctaataacaagtctattatagtttttcttgagacataatttttctctttccaattccccaattttgttagagacaaaatcatagtaggaccaatttatttgtaaaattacgttttagtttaatgatagttagcttgattatttgcataaagtgcagcangaattatctggccgtatagnttttaaaaaaatttttgcttggctgggaaactttgttcataaggattctaagatttagacctttccaaaaggcttggagncccagccaagggttttatttgtgncctgcaggataccggtaatgaattgggtggacngccgcnctttttcgagggtccc

SEQ ID NO: 602579 - DNA, 161 bp, Homo sapiens
  misc_feature (23)..(23): n is a, c, g, or t
taatgtcggtacctaaagcaacnccgactgcatgtgatgagggttctgagcttgtacttgttgggcagctctgcctacctctacttcacacctcagctgcaaacaccacacagcacaccccacaccacacacatacaccacatacacaaataccacaccag

SEQ ID NO: 602580 - DNA, 1118 bp, Homo sapiens
  misc_feature (786)..(786): n is a, c, g, or t
acatatcatggcgagtgtcgcaaacgataaagcagcccatgactcgcctaatgcgcccgagtgacagaaggaggagaaatagcaggcattgctcgtcagagaggttgctatacccataagcactcatttacatagttgcccctgtatatgaactagcatgtggacacatgcgtggtgtggttgtggaaatacactggatatgttaagcgaaaagatagtataggtatgagtcagaagaatctgtgagcgtgagtctgcctagatgttactagactacatgtgatgaatgacatattccgagagtgtcgtgtatcatactctattatgccactgtgcgtactgtgagtacacttaataatagacctcggatggtgcacttactcctaacttattatcactgggcatgtgatataagtagaccgtgatggtggggcagagcactcgagaaaacagaacaaaccagggggtagcggaacgactggtctcatgtctctacaattagtaaatacacacacgaatgcaagagcagcgacattctgtaactctcgaaataactgcgtattctcgagttagcatgtagcaagctatactgtggaccatttgattgggcccgtaattgctattatgcatggagctaacaccgctgaatttgcatcagtacgttgtcgtgacagactagataagtaaaagtggtctaagagacgctcacacgacagtggttgagtaacttgcaatgaggcacaatcactcgggagcgtactgcgaactccttcgtaaatactacangaggtatacagctttggtcgtcaccaccacttgatcagagagaaagtgcgttattagcaagaaagagcaagacgcgttgcaggaaccctgtcccgttcacatcaccggatgatcgtgggataggattataatcaagtacaccaatgcagtctaacactgttaaataaggaagccggtccaaacaactgcaaacattagcgtcgaggggcaaggcaagcagacttgttgattttcttcactatggaacattgggctcaagacaacgacaatcggggagttgaacaaagcttttacaaagcagacgatgcgtttaaatggtccactctatggaa

SEQ ID NO: 602581 - DNA, 130 bp, Homo sapiens
tcatagtacctatgaccataattagcaatatacttttagaggtgggcaagctgcatgacactatacagacaatgaactattatcaaaacaaaatgtataatttcttaattggaataataacttaagcgtt

SEQ ID NO: 602582 - DNA, 355 bp, Homo sapiens
  misc_feature (99)..(99): n is a, c, g, or t
  misc_feature (122)..(122): n is a, c, g, or t
  misc_feature (174)..(175): n is a, c, g, or t
  misc_feature (177)..(177): n is a, c, g, or t
  misc_feature (180)..(180): n is a, c, g, or t
  misc_feature (223)..(223): n is a, c, g, or t
ctttttccccatttaaaagcgggggcgggttcctaccccctgtttgtgttcataccccccccttagatagaagagctggaaggaggcattgtccacttncccccccagggagcaggacttgnggttgaggtgagtcatggccctcttgctggcaatggggtgggaggagtaccnncnccnagtcctctcactccctccagcctggaatgtgaagtgactcccncaacccctttggccatggcaggcaccttttggactgggctgccactgcttgggcagagtaaaaggtgccaggaggagcatgggtgtggaagtcctgtcagccaagaaataaaagtttacctcagagctgcaa

SEQ ID NO: 602583 - DNA, 606 bp, Homo sapiens
  misc_feature (4)..(4): n is a, c, g, or t
  misc_feature (21)..(21): n is a, c, g, or t
  misc_feature (25)..(25): n is a, c, g, or t
  misc_feature (51)..(52): n is a, c, g, or t
  misc_feature (60)..(60): n is a, c, g, or t
  misc_feature (66)..(66): n is a, c, g, or t
  misc_feature (76)..(76): n is a, c, g, or t
  misc_feature (117)..(117): n is a, c, g, or t
  misc_feature (119)..(119): n is a, c, g, or t
agtnacacaagagcgacgcancgcnagagcgtcaacccaccagaaagccanntagctagnctacangagccatagngaaggcccccgggaagtcgggcaaatggccggggagaaacnancagagacgggagagcttacaagcccccaggatatgagccgccaggaaacgagcggacggaaccagggcagcgtgagcacgaccggcaagcgcaagcgcgaggcgccggagagcgcagcgagccacagcggagccgagccaaggcccagcccagacaaggagagctgaagaacagacaagcgagacgcgtaacgacaaacgccaagcctggccacgcgaaacagatcaaagaacggacagcgagcgacaggggaccacagagagccaacacagaagccagcgcaaagcaagcggacggaagagagctctgtacggaacccaaggagaacgggccgcaacgagacgcgaagacgacacggcagagggccgacagccccaaagaacacgcatgccacagcaggagacaagaaccagtgaagacgacaccgacacatcaagctccagacgaacacaagcacgaacgcgggcacaagaaggcacagcccccc

SEQ ID NO: 602584 - DNA, 115 bp, Homo sapiens
  misc_feature (9)..(9): n is a, c, g, or t
gggaaaagntctcccttgttttaaatttcatgtcccgctgggttgttatagccttggtttttggggtgtgtttagttctttggttcctggtccttttttatcatttaggtggttg

SEQ ID NO: 602585 - DNA, 467 bp, Homo sapiens
gatactcatagacagccgccaataacgaagaaaggcgttatctcgaggaaaggatacactgcagtggaatatagtgaagactcccaacaaagtacatccctggaacaaagattatcttggacgacattaatacgagaggaagaaagggcaccctgaatagcttatctaccaagacgctaactaatgagtaaataatatggtcactagcctgataaattacaaaaccgaaatgtcccatgacttggctcatagtgtaccaacctataaatagatctcatacaccagaaatacagatcatgaatgactgacagactataaagtggaaacctcatcataaggccatttcagtcaaagtcctggaacattaaccagttcctccatcgctgtacccattataaaagaacacagattcttactgaactatatgcaatacaaaccacattgccacaaataaagcatattcacaa

SEQ ID NO: 602586 - DNA, 366 bp, Homo sapiens
  misc_feature (106)..(106): n is a, c, g, or t
  misc_feature (144)..(144): n is a, c, g, or t
  misc_feature (259)..(259): n is a, c, g, or t
gggggatcccaaagagtgggtaagaggagggggaatttgatccacaggccttccccagtgctgagggtgttggacaagagaatggtgctttgaaccccaatactcngtggccaaaggtggccgtggaggagcagacctgtaagnggggtttgcaacatgaattgtcctaaaggaatctatttccagagcttcaaactccatgtcattcctaaaactgcctgcaaacctgctttgggttcaggacccgatcacccctctntccactaaaaaaaaagaaagagaacaaccccccatctcagtaggatgcagtgccccgaggtggggcggatgggaggacaagattaaaacctccagggcaccaaacaa

SEQ ID NO: 602587 - DNA, 194 bp, Homo sapiens
agcctcagcagcatgacgaaaacctgtttctactaaaaatacaaaaaactagccgggtgtgaatggtgtgcacttatactcccagttgcttgggaggctgaggaaggaggacgacctgggcccaagaagttgaggctacagtgggccgagatcatgccattgcactccagcttgggtgacgggaatgagaccct

SEQ ID NO: 602588 - DNA, 403 bp, Homo sapiens
  misc_feature (7)..(7): n is a, c, g, or t
ccccggncttggttcctgcacttcgatgccctcgttctcgtctagagggatggcctggcgctcctccaccggctggattttggcagatggcacatactccaggggtccgcggatgagccagtggtccccagcctggtgtgagaccttctcctcatcctccccctcctccaggggctgcagggccctcagcagcagcccctgctgctccgacagcacatacacatcctggatgccttgttccagctgctctcctggctggaggaaaaaagacttctctcccttgaccacgcgcttctgccccagctgattcttgccatccggtccgacagggacgagaatcacgcagtagttgtgggggcccagggtggtgatgggcacaacccccagcacctcctcgtggaca

SEQ ID NO: 602589 - DNA, 106 bp, Homo sapiens
gtatgttatcgcccacacatgcccagtcttaggtggtaggctaagtctgaagtcatatttcattctttaagattgtcatatgcattattggtgtggggataaatca

SEQ ID NO: 602590 - DNA, 714 bp, Homo sapiens
tgtcacaggtgattcttattttgggacgagatttttcgtccatcactttactttgagcctatcagtgtcattgaatgggagatcgttctcttgaagacagcatacaatgggtctgcttatttattcaattttctacctctgtgccttttaggtggggtggaaaggcatctggaaacagaggaaaacattccatttagaagaaaatctcaatgtgtccttgggttgtgagttttcagatctctcttgtttgaaaatgagaagaccaaatctggatttttctatgttctcctggctccagagaaatagccatggttttcccggaaatgatgaggcaatagaaatctataggcccattcctataagtgccacctcagccatgctaatccacctggtaggccctgggttcttcaggacattgagaaatatgaaacttttctaaaacagagggagccttcttggattacgatctcatccatcaggggagcaaggtcagtgtctaagctccagtacactgtaagaattctaggtaaaatctctactgataaaccttcatatctctctgtctaacgtaatgatccttctctgggggcctggaatatatctattataaaactttcttgggaaaagttactatttttattcgtatcctattaagttaacaaggtttattttaaaatgtaaaggttagggaaaggggggggtaagggaaggtgg

SEQ ID NO: 602591 - DNA, 133 bp, Homo sapiens
cctgggagtgcttttataaattatttcccttgtagattatatttttaatttatctctgtgacttgtcaggaagaggggagagagagagagatgctgttgcgcacatgacaaaataaaataaaatggatgattc

SEQ ID NO: 602592 - DNA, 116 bp, Homo sapiens
ctggatttgtcggggctgacatgaaaacgagcgctgctggtttgagagtcgggtgtgattgtgattagtgcgtcggctaatcgcgctgcgtgtatgcgacaattcttcgtccgact

SEQ ID NO: 602593 - DNA, 241 bp, Homo sapiens
  misc_feature (3)..(3): n is a, c, g, or t
  misc_feature (103)..(103): n is a, c, g, or t
  misc_feature (161)..(161): n is a, c, g, or t
  misc_feature (201)..(201): n is a, c, g, or t
  misc_feature (212)..(212): n is a, c, g, or t
ccntctccctccaccacccccagtcgtcagctccttccctcaattatttttgttaagttgtgtggattatttttaacccatttatcctgtttgtgcatagggnttttaaggagaaacagcacagttcagcgagccaatctttttggggtgtgtggggagcnagggagggaggacatggagaaaagttctttaaaccaatanccaactattgnacatgtgtgaaatcctgtatcatttatga

SEQ ID NO: 602594 - DNA, 298 bp, Homo sapiens
cgggaacaaggggccccggctggggggtgggctcctgagctcttcaaaaaccaggctgctttcaggaacattgctgtggattcccagggcctattccgctaaaagcaaaatgggtggactcaatactcatgtgaatgtcaaggaaaagatttatgcagttagatcagttgttccccaccaaaacaataatgaaatagtcctggggctcccccagtttgtttttaatgtggataaaaccgggccagcctttgtggatggcagggccattcaagtttttaaaaaatggaatatggcagga

SEQ ID NO: 602595 - DNA, 1030 bp, Homo sapiens
tgtctgccgaaccgtctgttgagtcgtcgctgcctgctgcctgctgccactgacactgatacctcgacggtatcaggagccagctgttgttctgcccgactgcctcgctgcctgtgtgggaggaagcgagagggaagcctggattgcgggtttgtcgcctgctgctcgcccacctgctggaagagcctgagccccgtgccagtctggtctgcttgccacctgcatctgtagcctgttaccctgctgggcctgccgacagcctgcccggccggtgtgcagagtgctgctgctgccaattggcgttcttggatgcctggattcaaaatggtgattgacgctatcaaacatgccagttctcacaacaggaatgaacctggtcccagatcgggttactttgtttgatgaaatgccatcaaattgaggacaacagttgtggtgtcacttggtcacaagagcccaagatggatgaattgcagtttgttcccggaggtgaacaaagtgtttgcttgaaaggaactggaagagaggagaagcgtgtttgcaatcgtacctttctgatgataccttggttctgatgaagcacgattccggatgaatagacgtggtcaggaataagccttcgatgtacggcctatggggactgtcatccgacatcacgccatgccctgactgtgaaggtacggcaaacgtatcgaatgtgctgcccaatgtcatgatcatgttgtaaggggattacttgggaaactgcaatcaaagagggattcaggttaaaccgaagaagaccattagacagggtatttaagccagtctgaggagggagcgaatataattgggcggggaagtgaacagcgagcgagcgcaactgtggtggaggagtatacctattagttgtgtagactaatggacattagtagagcggcaagaggagaagaacatcaaaaggatatcagttgcggcgagacacaatagacagagcaacacagtagattagtaaggtgcgtctctttttttgttcgtttgattagagtgc

SEQ ID NO: 602596 - DNA, 2088 bp, Homo sapiens
actagctgggcgcagtagtgcgcacctgtaatcccagctactcgagaggctgaagcaagagaatcgcttgatcccgggaggcagaggttgtgtgtggtgagctgagatcgcgccactgcactccagcctgggcaacagagcaagattccgtctcataaaacaaaaaaaaattatgagatttttaatgtgtggcccaattcctcttcttgcagtgtggcccagggaagagaaaagattggacaccccagcataaagccttcctcccattctgcagtggcgtgggatcagggaacagaaactcattttcatcctactgttgtggggaaccattcagtacttcctacagggcaggaggacgccaacatgcgaccaccttcctcccctcgccgacctccgactcccgcccagcccaggcgccccccaggctcctggaggttgctccgcgttgctgttgctgcaggtgaagggacacaggttgaggcccctccttgtaggacttctgagcctcacccccgagccctcgtaagatacctgtggagctgatctcaaagaaatctccacatctaattcagaaccatcatctcaccagaacacaacggccttgctcctgcctgggtgctgtaccatgatggcaccacaatggtccaagtgaccaccacctttgctggaacggctgcatgcacacagcactgggcacaaccacgtctgcaagtgcccatgactgttcaccatgtcagccctcagcacggcagcagggggcagcagcaccatgaatatcctccagccaactgaccctgccgcacccccagagggcacgatgcccattcccagcctccctgagcacaaccgctgtcctgatgctctgaaagggatgatatttggctttttactactggcctgggggccagaagcaggggctcacgcctagagtcccagcactctgggaggctgactgggcgaatatcttgagaccacgtgttcaggaccagcctcggcaacacaacaagatgctgtctctataaaaaacacaaaacctagttgagcatggtggcttacgtctgtaatcccagcactttgggaggccaaggagggtggatcacctgaacgcaggagttcaaaaccagcctggctaataacggcgaaactccatctcaactaaaaatacaaaaattagccagacgtggtggcgcgtgcctgtaattccagccactcgggagactgaagcaggacaatcgcttgcacccgggaggcggaggttgcagtgagccgagattctgccactgcactccagcctgggtgacagagtgagactcaacaacaacaacaaaagactgcctctggagtcaataccaggcttttggcctttcctcctccatctcctcagcaactgcctctggtgtgaataccaggcttttggcctttcctcctcaaatcgcctcagcaactgcctgtggaatgaatacgaagcttttggcctttcctcctccatctcctcagcgactgcctctggactgataaatcaggcttttggcctttcctcctccaactcctcagcgactgcctctgaagtgaatatcaggcttttgacccttcctccatctcctcagcgactgcctctggagtgaataccaggcttttggcctttccttctccatctcctcagcagtttttcttgcgaaggtccggtctgctggactctaggagacggccacatcacggaaagcactgtggtcctgtctgctaccatggcttcctgaagctatatgttcatttaagatgtctcaagaaaacgggcaaaatagggccgagtgccatggctcccgcctataatcccagctctttgggaggctgaggtgggcggatcacgtgaggctgggagttcaagaccagcctgaccaacatgaagaaaccccatctctactaaaaatacaaaaattagccaggcgtggtggcacatgcctgtattcccagctactcaggaggctgaggcagaagaatcccttgaacccaggaggcagaggttgcggtgagccgagatcacgccattgcactccagcctgggcaacaagagcgaaactctgtctcaag

SEQ ID NO: 602597 - DNA, 702 bp, Homo sapiens
ggttttactgggatgataggacggatgagtggattcgtcaccaccatgttcctgtgactcttctctccacccttcttagggcgggaggagtggcattatatctctagatgactgtgtcccagaggcagatgccacgtctgcgtctgccttactagggggacaggagacgaggaagccactcagtcctttatcacgcattcagagagttcaactgatccattccccgaccatcattcagatctagtagcctctggagcctcgactgggcggggtgcgggatcggcgagcgccagggcgtgtgcgtagaggaggacccaggggcaaataggcgggaacgggaggcggaacggcctgagcgtcccacactcgacaacgcaggcgtcccttatgcgactgctagggtcgagggcagtggtgcgaggtcccagttcgcgtggctttccgggctgccccacccgacgccttttgatgcaaggcggtagggagtgtgggtcgctcgttgtgcctgtgcgtcacccgtctcctggcgctctgaggtgctcctagtggcattggccggggcttgactggtgtgatctctgagtgagagagctggaaccgggggtgtgcactgtcactgggactctcccttgcatccgccctctgttaccttgcatcgctcatgtactgtgaagctcctgcctcttcgtgccgccttactca

SEQ ID NO: 602598 - DNA, 400 bp, Homo sapiens
taccctacctctgcaagacatcatgcattatgactccataccacccacaaaaattttttccaccccaacacttcactattgtgttcgattgctcttattaatataagatgacaggaatgtcaggcctctgagcccaagactgcaggtatacatccagatggcctgaggcagccgaaaagtacagaagaggtgaggcagccagctcctgtctgaactgattgaccaaccttatgactatgcattgtgacttgttcgtgccctgacccaactgatcgatcgaccttgagaaattcttctggacaatgagtcttatgagctccccacaatgcaccttgggacgctcttgtctgctgacaatcgataaccacctttaactgtaactatcgactgcttaccccag

SEQ ID NO: 602599 - DNA, 299 bp, Homo sapiens
aggacgtcccccactctcctttaggatggccgtggcgctgatcttggcctacctctctctgacggggagactctctcggtatttatggcagcacgaagaactcccccagagcccctggtatcgagcgaaggacctggtcaatgtgatcgaggacgtgctcacagacacgggcatgagactatgctgaccatattgaaggcgttctccttgtgctgacagctaactctacagctacctgacaactgggaccgttagctccaccttcagtcagctgcgcctacagatcgatcatgtgaccc

SEQ ID NO: 602600 - DNA, 692 bp, Homo sapiens
gggatttctttaaatgggggcttctcctgggatgcgtatcgcccccgtggatgcgccagaaaggagttttcccgtggaaaaccacccatttgtttggtgaaaaagggggtgtacagtaaagtgcttgctatggtgtggttcgaaatggacccaccttcctcggtgaaggttctcccgcttctgcggagcccgcaccacggttcccgtgatctattgaaaactctctggtcacacaatggcgtggcttcgttgttgggacccccgtttgaaggacccacaacactgtgcgtgcgaagtttcaaaccccattgttcgccgccacctataagctgaagaccacacgttataaatattccccgcccgctcaataccacgctgtgttcacatatggtttctcctctccccctcacattaattacgtgcttacttgtgcagtaccactcttgggctatcattcaacccgacctctgtaaaaggttatatatagcactcgtaccccactctcaacactgtctatgcactcaacaagtatttgtggagtatcctcatttattccacctatagtatgacaggtacgaataaagacatttaaaaggatttcagttttcctcataagacaatatgcgataaatttggtcccctttcttataaaaatcaaactttattaagactcaccatacaacaataacaca

SEQ ID NO: 602601 - DNA, 843 bp, Homo sapiens
  misc_feature (116)..(116): n is a, c, g, or t
  misc_feature (129)..(129): n is a, c, g, or t
  misc_feature (168)..(168): n is a, c, g, or t
  misc_feature (172)..(172): n is a, c, g, or t
  misc_feature (187)..(187): n is a, c, g, or t
  misc_feature (190)..(190): n is a, c, g, or t
  misc_feature (206)..(206): n is a, c, g, or t
  misc_feature (209)..(209): n is a, c, g, or t
  misc_feature (215)..(215): n is a, c, g, or t
  misc_feature (225)..(225): n is a, c, g, or t
  misc_feature (232)..(232): n is a, c, g, or t
  misc_feature (235)..(235): n is a, c, g, or t
  misc_feature (238)..(238): n is a, c, g, or t
  misc_feature (242)..(242): n is a, c, g, or t
  misc_feature (257)..(257): n is a, c, g, or t
  misc_feature (260)..(261): n is a, c, g, or t
  misc_feature (264)..(264): n is a, c, g, or t
  misc_feature (272)..(272): n is a, c, g, or t
  misc_feature (288)..(289): n is a, c, g, or t
  misc_feature (312)..(312): n is a, c, g, or t
  misc_feature (322)..(322): n is a, c, g, or t
agaattcaagcctctgttgttaaatgatttgctgatggtgctgtctccacggttggatcacactcgtgcagtcaattatttcagcaaggttaaacagctaccactggtgaaaccgnatttgcgttcagntcagaaccataacaacaaatctgtgaatgaatcattgancaanctttttattacagangangattatcaggctctgngancatcantagatgcttntgacaanttnganaaantctcgcttgctcagngtnnggnaaaacatnaactcattgagttcannagagttgctgcttatctcttcanaggcaacaancgctggaaacagagtgtacgagctgtgcacagaaagacagcctttacaaggtatgcaatgcagtatgcttctgaatctagggatactgatagtttgggctgaagaactcctgcagtggttttgcaggaagaaaaaagagagtgcttggagcttgtctgtttacctgttacgatcttttaaggccagatgtcgtcctagaaactgcatggaggcgcaatatcatggatttgccatgccctatttcatccaggtcatgaaggagtacttgacaaggtggctacattagatggttcagaatcactgagaacaagaagaaagaacaagctacagagacacaaccagtgtttatggtcgagccccagtgtgatgctggcagcaggagccagtgttgccgtccctccccaggcaactttggtttatggttataccgcaccagcggtatggacggccacaaggctggtttgggtccggcatgtggaatgaaagggtggatcctgtagtcacctattttcggacctgaa

SEQ ID NO: 602602 - DNA, 235 bp, Homo sapiens
tgcaacaaccgcctccagcagcctgcagtggtccagcctttttcctcttgccccaggttggtcctcctcaacctgcagggtaacccgtttttccaagcggtgggcattttggagcaaatggttgaaatgcttccttcagttagcagcgtcctcacctaagaggccctgccccctacccttgccctttaaatttttgggactgaataaagaatggggggccctttcagggttccca

SEQ ID NO: 602603 - DNA, 659 bp, Homo sapiens
  misc_feature (24)..(24): n is a, c, g, or t
  misc_feature (143)..(143): n is a, c, g, or t
  misc_feature (597)..(597): n is a, c, g, or t
tcaaacggaaagatactctaagancaaaaatttctcctgaattttttttttaaaataaggattctattaactttactcagtgggcaaggaaattttccaagagacaaaatcgttgtacctagtattcagaatggagatacacntggagatgtgtatctagtattcagaatggagatacacagaatggagatttgtaacaaccaacttcacaagttttaaactgacatatttctagttgtctaccactacttgttgctaacagaatcagtgctgttagtacaccagcagtctagcttaaatgctgggagtagattcaaatgatctctctacagctgaatctcattctctatgctgttattaaatattttgtattttgcaacatttttatatatttgcccctggaagactggctcaagctctgtaggtgttatgctaaaatgttttaacagcctcctgccttcatcctctcatccttcgtgatctaccacacaatatactaaacaactatctgctttgtgtgcatttaaattgtcttaaattaatccatcttattgtagttgcttaactagtatagcaagcactttagcactcattcantttttttcacaaagtttcttatattttctgtcgacgcggccaagaatttagtagtagtaggc

SEQ ID NO: 602604 - DNA, 102 bp, Homo sapiens
cgccctgtgtgaatggggagggggcacagtgtgcctgccctcttcctgatacctgaaggcagtggggcctgggagagaatcagagcgaggttgtgcgaggag

SEQ ID NO: 602605 - DNA, 413 bp, Homo sapiens
ctatagcaggagaatcacatgatctgaggaccattcataacagcgtgataaataacctactctggggagtcttccactcaagtaatgcatggagcaaacaaacaggattaaactaggtttggttccttcagccctctcaaagcatagggctgagcctgcaggcttccttgggctatctctgtgtgtgtcgcttagtaaacactatagcatctgtaaagatccagtgtccatggaaccattcccacatgccgtgactctggactatatcagttattggaacgcagggttcctctgcctgctaacaagcccacgtggaccagtctgaatgtctttcctttacacctatgtttctaagtagtcaaacttcaagacacaatctaaacaagtatctgttgcagtgtgcttccggggca

SEQ ID NO: 602606 - DNA, 282 bp, Homo sapiens
ctcagatgctatgggtgtcatcccccaacagcagacgcttacgacgggcaggattacatcgcctgaacgaaggactgcgctctttgacgcgggggacattggggctcagatcaaccagcgcaagtgggagacggccattgaaggcggagcaggtggaagaggctaccttggagggcccggtgccgtggagttggctccgcagaataccgtggagaaacgggaagggagaacgcttgcagcgacagggaacggccccccaaagaacggcataattgatctcaa

SEQ ID NO: 602607 - DNA, 469 bp, Homo sapiens
gcaaagccaaatgtagccacaagatgaatagggtaatgtgctgtaactatgaagatagccaggagtaagaagtcagttcactacgtttgttctcttgtccccacctcaccattcttttctaaaattgtcttgttttattaatgaaagcactaggaaaggagaagaaaaaaagaagtgggactttctttttattttttccatttcagcattcctctaacccattccccacactcagttccatcagatgaaaataaccatttctctcatgagaaccaaactaaagaaagttgatataacagtggaagtagtgtggtccttggactgatccaaaataaagtcttctcggtgggcacagtgggatatgcctgtaatcccagctactgaggaggctgatgcgggaggatcactggagcccaggagtttgagaccagcctgggcaacatagcaagaccgcatttccaaaaaaaaa

SEQ ID NO: 602608 - DNA, 172 bp, Homo sapiens
ggcgcacagtgtctcttactgctgcgcttgggatcggtcctgcggggcactgggtcatcctcagggtcggggcgcttgtcgttccggtcagctcagccgggatgctcgttctgaccattcagctcacattacaggcaccgggtgaaggtgggactggtatccaacccacagt

SEQ ID NO: 602609 - DNA, 130 bp, Homo sapiens
aaccccggcccccctttttttccccccccaaaggggttttttggaagcccaaggtccgggtggggccccagggcccaggccctttcttcccttggtttttggggcctttcccgccctttttttttttcca

SEQ ID NO: 602610 - DNA, 207 bp, Homo sapiens
tagtgttcattattctcatacaaaatactcgtgataaatttgggatccagttgataacgcgtagtgatctccttctgaagtgcagtccgcaaacttttactatcataaggtttttctcttgcttggtgttttagttcaatgatgatccagtaggttctcacatatcagtatccgggaatatctggggtaccgcagctcgcaattcgt

SEQ ID NO: 602611 - DNA, 1384 bp, Homo sapiens
tataaaccaaaaaagataccttcatatactcatctgtaggcctttaaaaactgaaaaaccagttcaactaaatttggacatgatggtctggaagctagtagtatataattttcttttagcatagctaaaacagagtgtaataatggattacatatagtctacaagcagaagattatggggtgtaatatgagtagggtggcaaatatacaaagggtaaaatgagtatccaggacttgcagaaagataaatccagtgacattaaatgggccacccagtaagtagcaatacagtggtgtgaaaaagtgaggacttcagaaccacatcctatcgtgccaaacatacaaacagcaggcattgatatcctcaatacaccttacaaatatcaaacgtgactacaagacttccatcacaagtgtcaatcgaacaatcgtggacgatgcgcatggacagagatacaataaaggaaaaagcgtgacagacaatcaaagtaggccaaacacacaaatgtccccagaaacataatgagggtctcaacgggagagtaccacacgtggtatagggctaccaatcaatatcccaaaacaaaacaaggacggaagaacacggggtgtcccatggaacattatacagacacaaaatcccgtgataggacaggcagtggaccgaagcccaaaaacacgaaacccctaacagggaggatcccatcacatgaagcgaaaaaaacccgtcgaacaagaaaacagacttgtggcagcaatcaaacacagagaacaagaagacaaggtagggataatggagagaaactacagtatataccagaaaacaacaaaagctacgggcacaagaagaatctaaaccccacgatgagtgatccgtgggaccacaggcgggattaacaacgaacgaaacagtccgccaaagcagcagtaagtacaaacaggggcaagaaacccttcacagtgcacacaaacaatgctcaacaaacaaagtgaagacgacatcccaaagaaaagcgacaacgcgaaggataaaagcagatgtgaaaaaccgcaaaataaaagcaatgactacgctcctatgaaacacaactacacaaggaagagcaaaaaggttaacgaaaaagaaacgatcacacccagacacaaaaggtgtcaggggacaaagaaacaacacgggagcgggagaaccaccatgacaattagacaccagagtgcacgcaaacacaaggaggacaactgtaaagaggatggggcaccgtagacgagacgcgagcagcaacacagatcagaccccaagaccaacgaagacctacgcacaaccatacgaacgcggccaacatgagcagcaacgacaaccagaacaacgagaaataacgagacgaaac

SEQ ID NO: 602612 - DNA, 118 bp, Homo sapiens
  misc_feature (49)..(49): n is a, c, g, or t
tccccagctcagctaggcggggcagacaaggacaaaagactttgggccnctgtaatgtttgtggttagaattggacacacagtggagacccttttttgaaaggcttctggcggaggga

SEQ ID NO: 602613 - DNA, 348 bp, Homo sapiens
aaatttttcccccttcccttttttttcaaaggggcgccaaaaaaaaaggcgggttttttttttttaaaaaaaggggggccccaaaaaaaaaaatagggggcccattccttgctttaaggaaaaaaggccccatttttttctttcgggggttaatcccggggccctttttgggggccccagggggcccccccctttggaaaaaacgggggggcccttttttttaaacccccaaaacccttgtttaaaagggaacccccccctttaagggccttcccccaaattttttgggttaaaaatttggaaaaacccggtttttaaaaaaggtttggggtccaatttcccgcccct

SEQ ID NO: 602614 - DNA, 307 bp, Homo sapiens
  misc_feature (50)..(50): n is a, c, g, or t
ccctttaattgccttgtttcagctctttctgctgctcccccactgtgganggggcagctatgcaggagcacagatagccagagcatttgggtgcatttgaggctacaggcttggtactgtgtgtctcctgctggtacttctgacctagcctagccctctgggatcgctgacccttccttttctaccttccttccttccacgggattcttactgagaaaaccgtctggattttacccctcaagtaaaagagatttagttaggcactcgtttttcagaagagctgagagccacctaccagagcattcct

SEQ ID NO: 602615 - DNA, 126 bp, Homo sapiens
cgattggagttagaattattaaagtttggtgttgtcagaagaaaaattgatttactttcagttaaaaaatatatatatatatgggtaatattattatttttgggacacaaagtctcattttgtagg

SEQ ID NO: 602616 - DNA, 510 bp, Homo sapiens
agtcgtattgggatacacctggcggctgctgttcatgtcccctaatctgtcctttctagactggactatatcctaggacactttacacggccactgctccaaaagcatcaagtgttaagtcagaaaggaatgtaacctccattcgcacatccgtgataacaccagcaactctgccggcaggttctttccacgggagcagagagagatcacagacagagagaaacacttgctttctccactgatagatgacaaagcaactctatcacgtagttgagtaccaagatataagctggggtcaagctctagataacaagagcggccttctctgttctcctggtcaacttgttttttaaaagcctttaatatccagtagttctgcttagagtcttgtcatattcgaacttggcatctccaaagatttctgaaatgttactcgaacaattaggaaatacagatttagaaggcctcttgggagatgccaagattgactcatcgggggatcctcgagag

SEQ ID NO: 602617 - DNA, 398 bp, Homo sapiens
atcagcacgcgctaacaattaggtgcatgagtaggctgcctgcagtaaatgttccgctggttaggcgtcggccagggctattgtgttgaatgagtaggctgatggtttcgataataactagtatggggatccggggtgtcggtgtgccttctggtacgaagtgggctagggcatttttaatcttagagcgaaagcctatcatcactgcgcccgctcataaggggatggccatggctaggtttatagatggtcgggtggtcggtgtacatcagtgaggcacggagtccgaggaggctcagttgtggcaataatcaatgattaaggatactagtataagagatcaggtccgtcctttagtcgttgatatggtcatcactggtggccgaggttagttggat

SEQ ID NO: 602618 - DNA, 294 bp, Homo sapiens
aggaggtgcactgttgctgcgcgctgcctgaccctgggctcgctggggcacaaggtctacagcctgctgttcgcagatcagctgtctacgaggtggacgcaacggaggactttccaaactgtgagacacacgagaagatacactgtatggttgtgatgggatggagcatgtactcccctgcttagcagcacagttcgtaccccaggaccctcgagcatcaagctactggaggtcactacgggtccgaagcagacctgtcggcgcacgtgttcaatgaccggctgtgtgttggga

SEQ ID NO: 602619 - DNA, 619 bp, Homo sapiens
gagactctcggtgggtatagatggtgtgctgtgttcaaaaacggggaaccgctggttgtataaggagagagatttctggaaaacgagtacataggcctggtcctcttgcatggagaaaatggagaaacatatgcgatcgtatattttccagaagagggctagcaatctggattcaaaaacaattcctgggatgtgctaattttaggtgatctcgtccaggtacttggttttccttggctgttagcatttgaagtttgcgcgtaaaagtatttaatggggctacacatgctgtttgtgggaaagtctgtaataaacagcgctaaagtaataacactttttcgcctaccggccaatcccaattttcccaagtctaccgtattttggcccccccccctttcggccaaatttaaaaggcagggggggtataacttcaattcccggaaataagggggtcttttccccattaaattacggttagcattggggggcaaactatcccaattttagtcacaccgtaatagagcccccccttctcgtttaagcacttagagggtttttccttaacacaaaattttttcccgaagggagggaagaaagaaagaccctggtctggtttggc

SEQ ID NO: 602620 - DNA, 792 bp, Homo sapiens
tcataacccctttattacaaagtcaggccccttataaaagtttatggggcctcaggggaaaaaactcaagtgtttccaaaaataaaaaacacagaaaaaaagggagtatagtgcatcccaggggtccgcgccaaagaaggggggggcgcccaagtataaaagcatctctcaaaagagcagccggaggcgggggcaggcgggggtgcaaagagatccggggcaccacaggcacggggggggggccgccggcacaccttcgcggggccccggggggggggggcacgacaacaagcatcccaagggctctcgtggtgccaggtgggggaaccccagagggccgggccaaagacgccgaagtgccgggggagaatacaccctggtggggcggggccgtaaatggggccctacggggagaagcggcagggagagacacccccgaaaatggggggctacaggggggtggccacggggggttcaccctccatagaagccgcagaaagtcaatagaggcgggccattaacaaggggaaagatcctcgctccaagaatgccaccaacaaggggagatctcccgtcgggagatcccagaagagagcgcaggtgctacccagaggggcccagaggcgggggggtccaactttctccctctgggcacacccccttgtacaaatggaccaactcggggaatgaacacccgtagagacaccaaaggacaacgcaggggggcggaaaggcctctgagaagagaccctggtacgcaagacggcgggaacgggcaccaccacaacttga

SEQ ID NO: 602621 - DNA, 1076 bp, Homo sapiens
  misc_feature (181)..(181): n is a, c, g, or t
  misc_feature (627)..(627): n is a, c, g, or t
gcctcctactcctcattgtacccattctaattcgcaatggcattccttaatgcttaccgaacgacaaattcgtatggctatatacaactatctcaaaggccccaacgttgtaggcccctacgggtctactacaagcccttctgtctgacgtccataaaactacttcacctaaagacgcccnctaaaacccgtcaccatctacgcatcagcctcgtacatcactcgcccctggccttagtctctcactcatcgctcttctatctatgtaatcccccgctcccacatacccacacccccgtggtcagacctcgaagctagcgcctcgctagtttagttgctaggccacctactagcctaagccgtttactcaagtcgctctgatcagggtgagtcatcaaagctcgaaagctatcgccctgaatcggtcgcatctgcgagcagtatagccaagacaatctcatattgaagtcaccctagaccatcattgctactatcaacattcactaataagtggctcctataatcctctcaacccttatcacaatataagaatcacctctgattactcctgccaacatgacccttggccataattctgcatttatctgcatagtatctgagaccagnctgaagccccttcgaccttggtcgaaggggagtccgaagctagtctcaggctatcaacatctgaatacggcgagaatatccccgattgcgttaagaccaagtcatacacctcctattatacaatcttccttatcaactcatcctaggcattactgtctttgacactgtttcccatacccagtacaagctccagacattcccccttcaaagcttaagacaaaaattcctgtttgccctggtccgagaaactgtgtccccaccttacccgggtcccccaaaaggtgcttggcttcaccactttggtggagcagagctggacaacgtatgataatatatgacgaccaggttaaccaattgtgctctacaacaccgtttttctgacaaacagggatagacctctccggctcatctcatcagcggcgcataaattttagacacacgggatctca

SEQ ID NO: 602622 - DNA, 1416 bp, Homo sapiens
  misc_feature (383)..(383): n is a, c, g, or t
  misc_feature (452)..(452): n is a, c, g, or t
  misc_feature (1184)..(1184): n is a, c, g, or t
  misc_feature (1415)..(1415): n is a, c, g, or t
gcttcgtacattagttaatacccatcatactcggaggctttgatgtacctttctaggtaacgaccagcatctacaacgattctcgtcacagcccaatgctcttgtgtaataatccttcgtatcagtactagagtagcacatcagtaagtcggagtgccttagggccacccatgagctacattccccgtacagtaactcggtgccctcgcgcatatggcgtcgccgccagacatataacaacgtaagctttcgtgactcttacctcatcctatctgctctctgagtccttgctcgtcatctgtgcttatagttggtaggcctggacgccagcgacacgacggttgataccacgtctgacccttcccttgaactagcgcgaactnacaagaatagaaaacaccacaacaaaaagtaacaaagagaaataatatatcaaccaggaatacatcaantataacaacatataaaagaagagaatggctgctgtcgtggtatttgggcgtaagagcgataggagactccggaacttataccgttgggcctacttccaatacaggggtatcttctggcaacgcttttgggctgtttgattgaaaaggtgccgtgtgtaaaacgctcctggggtgagtacgccacacttattgccttgaggagcacgggaataaattactttaattctccctgggggcaccactcgactatatatagagggcgtgccgacttctggtcccacgagggcgtgaaattccttgcgcctgaaccatttggccctgtgcttcattaatgggaaaggcctagcataaaggggtccgaaagttccaagactcaggtcacagggggtattgcccaccaacgctttgatcgggatgtcagatctcccccacgtgttttataggaaggcaatgtccttgtaaggcaatctatacaaaggagggatagtaccccctctccgcgaggcagaaaccgtgttgctcattcactcacgatactaaataatctagcagttatcctaatataatgtgctagtacacagtcgacccaccactagtgatggactttacacccgggaatgtcatgtatcatctatatattaggtatgattgaatgatgtgcatgagcgaaaaaaacagaggcttacatgggcagtccaactacaaaatacgacagaacgacgagatagtacnagagacaagtcgtgatgtcatcacaaagtcatagtacgtcctcactttcgacgagataatatgtggggcgtaccctttttcttcttcctctcaattctttctctagtcttctttctgtctgttgtatcatctgttcatcttgctccaagaaataacataacataacgaacaacagactaaaaaccaagaagaagagagaactaaaaaggcaagcgagagaaaagcagaaana

SEQ ID NO: 602623 - DNA, 277 bp, Homo sapiens
aacaataacacagaagaatatgtcaacaaattattccagcaagctgagaacctgagaattcctgcacggaatacaagagagtcgcctctccagtttcagcaaccgctaggtatctattttatttcctggtttttacatgtacaggtaatatatatattgaaacaagaaatataaataccacatggggagaaccccaaccaaagaaatctgaaatatatagtaaatgcttcatttaccgttttcgtccatttgggtatgctgggccccagggtaccga

SEQ ID NO: 602624 - DNA, 125 bp, Homo sapiens
gggtcgacacggccgtgtattactgtgcggcaacctcatctacggttcctgtagtccgccaatcatacggtcctgcgggacgttttgatatctggggccaagggacaatggtcaccgtctcttca

SEQ ID NO: 602625 - DNA, 267 bp, Homo sapiens
  misc_feature (16)..(16): n is a, c, g, or t
  misc_feature (78)..(78): n is a, c, g, or t
aatgtaccgtaagtantgtctatatggagtgtacagcatgagatgacacatgtggtctacctaaggaataaacgatanatgtataaaggggcgaagagagatactagggtgggagtaaaagctcatcatgaagtgactatgagctactcttaggaatgatgtttgtgaccagagaaaggggcatttagatggaaggagctcaaggctgtgcaggagcatagtactgggtacgttgacctcagggtacgagctgaatacgaatctggt

SEQ ID NO: 602626 - DNA, 171 bp, Homo sapiens
tagtacgcccgcagtcgttgaagagctcggaaatgagctcgcttgtgctgcggcgcgtgtaggggttggggtaggcgacgatggcggtgatggcggtcacggcgatgacctccagcaccgggtacttgcccagcctggtggttttacgccgttcacttaatgccgctagcg

SEQ ID NO: 602627 - DNA, 892 bp, Homo sapiens
atatcatactaacattgaacatgtcactgctaggaatagtagtatatggcacacagctcatatccaccctacgatgcctccaaaaggaataatacgatcggctggttcatcgataggtactctcataatcccttcatggacccactgcccttcttagcctggtatcgtgcctatgagcatcacttgagtacttcgcacgactctgcagtaagccgccggtggggctagccctactagtctcaatctccaacacatatggcctagactacgtacataacctaaacctactccaatgctaaaactaatcgtcccaacaattatattataccactgacatgactttccaaaaaaacacataattgaatcaacacaaacacccacagcctaattattagcatcatccctctactatttgttaacacaaatcaacaacaactatttagcttggttccccaagcactttttccctccgacccgcctaacaaccccccctcctaaatactaacgaactgactcctaccctcacaacccatgggaagccaagccagtatccaagcgacccactatcgcggaacgacgcatccaccactctatacggaatcccccacagactccataactaagaacagtcgacagcccacggacaacgaaaagcagaactacagaggaaaccacagacaataccaaactgcgacacagaccgaggggcacaagcgaagcagaacgaggaccacactccaatgcacacccagaaggcacatgccgaacgacaggagggtgaagcgcacacaccaggccaaaacggaagcgccacggcagcaacgacccgcgcgcacaacgagaacaaaccatgaaaccaacggccagagccagcggaaccgaggacccgccc

SEQ ID NO: 602628 - DNA, 1782 bp, Homo sapiens
  misc_feature (824)..(824): n is a, c, g, or t
  misc_feature (1299)..(1299): n is a, c, g, or t
  misc_feature (1427)..(1427): n is a, c, g, or t
  misc_feature (1524)..(1524): n is a, c, g, or t
  misc_feature (1527)..(1527): n is a, c, g, or t
tggttatttaaagtaaagacggggcttcacctgttagccaggatggtcttcaattcttccgtgaccttcggtgattctgcccgccttcggccttcccaaagtgtgcgtgggatttacaggcgtgtgagccaccggcgcccagccccattttatttttatacttataaagtgccgtgccaaggagcagcctcaaagcccgagaagaacagaacgtggaggcttcagcggggaacacttctccctgtgtgcgtgcgagcgctgtggtgtgtgtacaccacttttatagagggcccccgaggtgtcttcccactgtggccaagcgaggcacttgggggccactatttgagccacccaaaccccaacgagcacaccccactcgagcccacaagcaaaccccaatgtgggctctccaacccgagccccaaagctctctgtggtcccctctcccacacatgagcgtctaaagagatattccacccaccgtgcagagtctctctctccagagtctccccccagaggaaacacccaaagagtctgttgggcgcggcgtgtgggctcctcctctctccctttcttttatcgaagccggcacaaggcccagagtcccccctatgtgcgcccgtcggcacacgcgccccagcgcccctttgtgcacggcggcactcccaaggggcacacacctcgggtggttatcactcgttgcatgttgtgtggcgcccaaaccccctattaaatttccccaacatatgtggggggcggtgacgtcccaccccgaggtgggagggccccccttggtggtaaaggcccccccccttttttcgccnaccccacaaaatttcccgcatcttctcttcgggccgaggggacacagcacgcccaggcgggccctcctgtggggggctctcccctgtggcgcccttccaacgcgggctgtgcggtctctccaagcccacatggcaccccctcctcccccggcggccgcggggggtctccccccacatcccttgtggcccatttcttcgtggcacagtgaaacagtagtcccccggccatattaacctagcagccgtggggcaccggggcaggaaaacaagctctaaataacttacacagcgcggcggggccccctcgaaaccctttccaaccgagaacatccgccccagcgcgttggtgcgcgccccgtggagatcatctcttcggccccccaaggactttcgccacaaccatactccccccccccacaccacggccacagtcgggtcggtgcttccccacaaacaagttctactccccattgancacagccccctggcgtcaactctacaagcgcggcaccagcttatcaagaaccttcgtgcgaacaactcccaacccaccgggagaccgaagacatgcacacgcgctctcccctccagacgcacaagagnggagtaacacgactcagcgcactgcgcaacatatcatccctgccgcgcaccacacgtcaaaggccgcccgagcacaccacgctcggcgttgctcacntcntccaaccagaaacaccgcccctctctgtggggacagcgtatgctatacagtaacaacacacacccacccatgcgtgccaagacaggccagcacatcacagactcgaacactcacagcacgtaacgacagtacagtctactagcgcagacaggccacccatcacccgcaaccgacctccgcacagcgtcataccgcagcgcgcacagtacagcatttgcagactcgcgtcgcaaacaacaccaactacactgcagg

SEQ ID NO: 602629 - DNA, 870 bp, Homo sapiens
  misc_feature (9)..(9): n is a, c, g, or t
  misc_feature (763)..(763): n is a, c, g, or t
  misc_feature (773)..(773): n is a, c, g, or t
  misc_feature (777)..(777): n is a, c, g, or t
  misc_feature (858)..(858): n is a, c, g, or t
gccgtcgtntgagtcgtcgctgcgctgccgctgccactgccactgccacctcgcggatcagtgagccagcgttgttcgcccgacgcctcgctgccggtgggaggaagcgagagggaagcctgcttgcgggtttgtctgccgctgctcgcccacctgcctggaagagcctgatgcccctggcccagtctggtctgcttgccacctgctcgtagcctgttaccctgctgggcctgccacagcctgcctggcctgggagaaggctgctgctgccaatggcttctggagccgattcaaaaggtgatgacctatcaacaagccattctcaaacagaagaacctgtcccaatcggttaattgttgatgaagccatcaatgaggacaacagtgtggtgtccttgtcccagcccaagatggatgaattgcagttgttccgaggtgacacagtgttgctgaaaggaaagaagagacgagaagctgtttgcatcgtcctttctgatgatacttgttctgatgagaagattcggatgaatagagttgttcggaataaccttcgtgtacgcctaggggatgtcatcagcatccagccatgccctgatgtgaagtacggcaaacgtatccatgtgctgcccattgatgacacagtggaaggcattactggtaatctcttcgagggtataccttatgccgtacttcctggaagcgtatgaccatccggaaagggactttttcttgtcgtggtgggatgcgtgctgtggagttcaaantggtggaaanaaancctaacccttattgcattgttgctccagacacagtgatccactgcgaaggggagcctatcaaacgagaggatgagggagantccttgaatgaa

SEQ ID NO: 602630 - DNA, 130 bp, Homo sapiens
  misc_feature (43)..(43): n is a, c, g, or t
  misc_feature (117)..(117): n is a, c, g, or t
aattttatttttcaagtaagattttcgaataaacgtccccccnaagtatggctgtactttggggacagaggaaaccccctttctgcctgtgccctccacggagcagcagcacccttncagaggcagccca

SEQ ID NO: 602631 - DNA, 634 bp, Homo sapiens
gctagcccgggagagggtgtgccagggctgcctgggagggcaaaggacatgatcagactcttctcaaaagaagacagttggccgggcgcagtgtctcacacctgtaatcccagcactttgggaggccgaggcgggcagatcgcttgaggtcaggagtttgagacgagcctggccaacatggtgaaaccctgtctccactaaaagtacaaaaattagctgggcgtggtgggtgtgtgcctgtagtcccagctactcgaggaggctgaggcaggaagaatccagcctgggcgacagagcaaggctaacatcactgatcattagagaaatgcaaatcaaaaccacaatgagataccatctcatgccaatcagaatgatgattattaaaaagtcaagaaacaacagctgcgggtgaggctgtggagaaataggaacgcttttacattgctggtgggaatgtaaattagttcaaccacggtggaagacatgtggtgattcctcaaagacctagaaacagaaataccatgtgtcctgcaattccattactgggtatatacccaaaggaatagacctcattctgttataaggatatgtgcacacgtatgttcactgcagcactactcacaatagcaaagat

SEQ ID NO: 602632 - DNA, 284 bp, Homo sapiens
tcatgtcggtcgcatcatcgattattgagctgtacgcactctttaaatgaatggttgcttccaagccaagatcctagctgtctatgcatctgtgacctcgtttaagtcaactgagctgtcatttcgggaccttagcagatgtgtcctggattcttctccgtctcgtgacatggaccattagcacccattgccctctgatatggggttccccatggggatccctctagacgtctgaccttgcagggcactgcaatgctatggcacttggcctgtctgtttataca

SEQ ID NO: 602633 - DNA, 414 bp, Homo sapiens
  misc_feature (27)..(27): n is a, c, g, or t
  misc_feature (114)..(114): n is a, c, g, or t
  misc_feature (145)..(145): n is a, c, g, or t
  misc_feature (176)..(176): n is a, c, g, or t
  misc_feature (180)..(180): n is a, c, g, or t
  misc_feature (227)..(227): n is a, c, g, or t
  misc_feature (250)..(250): n is a, c, g, or t
  misc_feature (308)..(308): n is a, c, g, or t
  misc_feature (365)..(365): n is a, c, g, or t
  misc_feature (412)..(412): n is a, c, g, or t
ccctgctcagggggtctctggatcctnggctcatctccacaggggagaacacacaggcagcaggggccatggggcccctctcagcccctccctgccctcagcacatcacctggnaggggctcctgctcacagcatcacttttggncttctgggacctgcccaccactgcccaagtnatanttggggccaagccacccaaagtttccgaggggaaggatgttcttctncttgtccacaatttgccccagantcttactggctacatctggtacaaagggcaaatgacgggcctctaccattgcattgcntcatatgtggtacacggtcaaattatatttgggcctgcctacagtgggcgggagacngtatattccggtgcgtccctgctggtccaggatgtcacacagggggntg

SEQ ID NO: 602634 - DNA, 979 bp, Homo sapiens
gcgaagttgagagcctcatcagagcggcgggaggccttccagaagtcagcagctggcctgggcgggagcgattctgtgcgctggagaagcttactgcgctagaggagcgggagaaggagcgcacagagagaacgagggaggaggaggagcgggggaaacagccgccgtgctcccgagagcccacagccaagtgtgcctccaggggacctggtgggcggactacgacagcttctgacatcagcctgggactggagagccagcacgtgcaccactcatccaacacaagcggacccagctgttacactggagtctgcacagatggagagtcctcaagcccctgctgggacataaggcagagacttgagcacgagagcttccccgaaggtgccgggacctggccgtcaggggactgaagccaaggtgggccccgggggagagaggcagatccggactcggggacccgtgcccatcttgtcggaaatgtccccagagcaggtctaccgagtcagccatgctgcaccctgacgctcgaggcccagagccatctgcccaggagcagatggaggggatgctgtgccgaagcaggagattggaggcttcgggaagaaggggtgccaacaggtcctggcagaacgtgtactgtgtctgcggcgtgggaggcctcggcttttacaaggatgccaaggcagcaagtgcggagtgcataccacgggagaagtgctgtcagctggcagggcccgggcaggggcgcttgataacgaagagccgaacatggtttcaaggtggcttccgggatggaaagatattattccgggccagattgggggaaaatgagctcgggataagggggtaaaagaccctgcaagcgcgtctgggctggaggcaaaaacgtgggcgacacggggtaacggacgaaatacaggacaaggtggggagtggacaacaaggagcagagaaaacttaaaggggggggacataa

SEQ ID NO: 602635 - DNA, 163 bp, Homo sapiens
  misc_feature (32)..(32): n is a, c, g, or t
gtaccgagattagagacagagagacgcagaanaagaaagagagaggcagacagagaaagacggagacaggcagagagacagagaaacagagagaaagagagaaagacagagagagcgagagagggagagagagagggagagagaaagaagggcgtgtcgttgg

SEQ ID NO: 602636 - DNA, 516 bp, Homo sapiens
cgcagagagaacatgacacgagataaccaagcatagtataggggggactaacctctattcactttgcataatgaatcaactcaaagtacctatgcgcggggagccgtacctcttacccccgaggccaggcgagctacctaataacagctctgacagcacacccagctatgtagcacaatagttataagatttataggtcgaggcgacagatctaccgagcactgtgatagatgtgtgctcaagatagagattatctcaactgtaaattgcccacataacaccttaatacgcttgtacattaactgctattcaaagaggaacagatctgtgtacactaggaaaagaccttgatgaagagcacaaatgtacacctatagtcgcctacagttgcaccattcagaaaggctgagctcaacatcactcactggccccaacattgactgaactcttacaccaatgtcccatctctactctatagagactaagttagataagacaagatagcctcctcctcgt

SEQ ID NO: 602637 - DNA, 132 bp, Homo sapiens
cctgcccagtataagcacaggtcagaaagcagcgccttgctcaaaagctcagaagggtcaaaaagctccagcccagaaggcacctgcttccaaaggcatctggcaggaaagcataagttgcatcgataaaca

SEQ ID NO: 602638 - DNA, 153 bp, Homo sapiens
gacaccaataccaagtaagtgatggttcttaactataacatggaaattgtataaaaattaaaatagaatgtagaactagtaggataacattgaaaaactgactacttatagttggctttctttttttttgtttacatagaaggtccaggtatg

SEQ ID NO: 602639 - DNA, 1432 bp, Homo sapiens
tggctgaatgtgctgtgctgtgctgtgctgtgctgtgctgtgcatgcagcatgctgtgtggtgcttgctgtgtgctgtgtctgtgtggctcctgtgtgcctggtgtgctgtgctgtgctgccattctatgattgccctgtgtgtgcctgtgtgtgtgtgatgtgcctgtgtgtgatgtgtgtgtgccacctgtgtgtgtgtgctggcatgtggttgacctactgtgtgcaactgtgtcctgtgatgttcttgatgtgacactttgttgatgccttgatgtgatgtcttgcattgcattgtgatgtccctgactgcctgtgatgtccctgatgctcctgcaacgatgtgatggcctgcctcctgtggcccctgctgctctccccctgtgtgatgcttcctgtgtgctccttgtgtgtcctgttgttctgtggaatgccccctgtgcatggcccaagaggtgacgcgacggatgtgatgccctggtgacttgtgtcagagggtgttgaaccctgtgtgtgtgactgtgctgcgcatttgagtgacccctgtgaggcttgggacagcttattcaaaggcttcgagatcatgtggacgatgcgacgtgaacgacagcttgagcaagcgtaagaggacgctacaatgaacgagggtagcagagagcatgatgcaatagtgagtccaggctccgagggacaatgcttgggccgagtgattcatgtccaattgacggagagagataggacgtgcgttgaatgccacagttaacaatcatattgtatgagaaattgttggagagataatgggtagaaaacactagagagaaaagagcttttgagagacatcaactttttagtgagctagatggttcaggatcgaagccggtgtttacacatacgttgtgttgagaaaagttataggtgtggcgatcaccaagaagggggttataggcagtaatataaggagatttactacagaaggagacggatgtcaggtgagtgactattcctttgagtgcattagaatgaggtccttagtatagagggaaaggcaactaaggttgatcacagagaaggaacacacagagcaccaacggcgagttaaggacgaaacaagaaccggaggagtaacaaccggagccacggtaccggaagcacagagacagccataatagaaaatgagttcagggtctctgagatatgtaaggagagtttcacaaagtaagcccaggggtcatcaacagtaaaaaggggctcggtgataaacgacaaaatcttggattgaccaataataaacaattgttattacaagggaggaacgagagaaaataagatatatagaagagtaatcgtatacaacgaacacaccatgagtcataaagtacaacgaaagattacaagatataagaaaaggacagaatatgatgtaataggcg

SEQ ID NO: 602640 - DNA, 106 bp, Homo sapiens
ttcattttctacactaaagaataaattgaagtaaatattaaagaattatctgtataaatggcattgagaagaagtggctttaccaacatttttttaacgtatttca

SEQ ID NO: 602641 - DNA, 215 bp, Homo sapiens
ttgtgtgcgactttttcgtgcttttacccagtgaacgactttcctgacggcagcctggccacgggctggtgacagcgccccggcgctctcctcctgacctggcgcctttctacaatcacaattcgccccgcgtatgcgcggtgctgttaaggaagccgacatgcagctcaaagacgcccagttgttccgccaacaagccttcatcgatggagctt

SEQ ID NO: 602642 - DNA, 499 bp, Homo sapiens
  misc_feature (8)..(8): n is a, c, g, or t
aattatanatctctaagtgacagtcacattcctagctgtcaagctgtcgttggggcaaaattttctttaccccatgttaccaaaatgctgttttctccccagcactagagaggtactcactaaatcatgacctactgacaagaaacctattagttccataaagagaatgatgtactctccccatagcaccactgtctccattgggatccagctggagtcagactaatatttcagcattatttctataaacagaagggacacgtagagccagatgcttgcttttctttttaagaaggataaatgcttaacaccaaaatcacaagcaacaaaataaaaaagagatatgttgaatttcatcaaagttaaaaatgttgtgtttcaaaatacatcaagaacatgaaaagatatccacaaaactggaaaaaaaatttttgtggatcacatatctaataagagacttatacctggaatataaaaagatcactcagaaaacaatagt

SEQ ID NO: 602643 - DNA, 474 bp, Homo sapiens
aacgaggaagctcgttcgcttttcgagttcggcgtccaatccctcctgggtgtgaccggtcaaccaccggataatctcgtcgacctcgtctttggtgcgcccctttttcttggccttagccacatagtgcggatagacgctggcgacggctatcgaatagacacgatgctttttcacggtgcctccggacagaacagcattagacccgctggtcgcttggttgctcatagaccctcccatgaaccgttgcatttgctgtgctgactggatgctgctgctgaccattttggaagcaccagatcaacgcaatgccggaccgcatcctgacggctgacatagccggattggttcgcgatccaagcgtcgatgcgcgcaatcatctctgaggtcatacgtatcgtgatgcgttcatgcaaagcgggttggatccgtttcagtagctgatgccacccagtttacgtacctgcgacgcgg

SEQ ID NO: 602644 - DNA, 404 bp, Homo sapiens
  misc_feature (64)..(64): n is a, c, g, or t
  misc_feature (72)..(72): n is a, c, g, or t
  misc_feature (271)..(271): n is a, c, g, or t
  misc_feature (303)..(303): n is a, c, g, or t
  misc_feature (314)..(314): n is a, c, g, or t
  misc_feature (327)..(327): n is a, c, g, or t
cttcctcagccctcccaagtagctgggactaatagcgcctgccaccatgcccagctaaattttntgtatttntggtagagacgggggtttcaccatattagccctggatggtctcaatctccatgaccttgtggtctgcctgcctcagcctcccaaagtgctgggattacaggtgtgagccactgcgcctggccatctcccatttcatttctaattgagcttatttggatcttctctcttcttggttaatctcaccaatggtctatcaatnttgtttacctttcaaagaatcagctttttgtntcatttacttntgtactttttttntcatttatatttacttctgctctgatctttgttatgtcttttcttctgctgggtttggacttggtttgttctggttc

SEQ ID NO: 602645 - DNA, 242 bp, Homo sapiens
atctagaggatcctaagcatcctaacagtctcctgcctaattcctccctgaccgtcctcctgcctaactcctccctaatcagtcctcctgccctaactcctccctaatcagtcctcctgccctaactatctccctgatccgtcctcctgccctaactcctccctaaccagtcctcctgcccgtaactcctccctgacccgtcctccagcgctaactactccctaaccagtcctcctgcccta

SEQ ID NO: 602646 - DNA, 362 bp, Homo sapiens
  misc_feature (44)..(44): n is a, c, g, or t
  misc_feature (129)..(129): n is a, c, g, or t
  misc_feature (153)..(153): n is a, c, g, or t
ccccgcccccttcccgcgtctccgctccctccctgcgcaggaanacatggcggcgggaagggagtgagccgcccgggccccgccgcgccctcagatggagaaattagcatacaaagaaactgacttgtnagaagtcagagcaaggtatttgtngatccagggataaatcccaaacttcttaacccctagaccggtttttagtccattgactatgcagcctaatggtaagtatctttttaccctatcgttggaggtaagagggattaagagacctagcaaggacttgctttaaggattcctcacgattaattagactactcgttatccttttctttatagccatgatgtcattttttgtcatt

SEQ ID NO: 602647 - DNA, 544 bp, Homo sapiens
  misc_feature (16)..(16): n is a, c, g, or t
aatatcacacggggtntgtcgggatttgtaaaggccccacggctggtgcgggctacggattacttgcgcgcgaccttgtagcgcaggcaatcctggtaaaagctttgacgaatcgcctcgggcttgagccttgagcggctgtcataggtctgctcggtgatgcccatggccatcatgcgcatccacgatttgctgaacttgagggtctggatcttctgccgggccgcgtatagcgaaacgccggataactttagctcctgggccctggcggccgtgcctgcgccccaactgcacatgtacttgtcaccctcgcgcaattccctggcctgcgcgacagtcgcgccgccggccagggagcaggcaatcagcatcattcccacagagcgcatttgcatcctcacctaaccacctgaaaataaaagtgattttggcgaggattttgttacaaaggggccattaaattgccttactgcgcaaagcgactcgcggatgcttcctatcaaggcttgagttcgaacagcgccggcatcggtggccactgcga

SEQ ID NO: 602648 - DNA, 143 bp, Homo sapiens
caggcatgcaagcattgtggtgtattccatgcctgcgtatgatccatatcaaaccatagagaattacacctttgtgtcacgtgtatcatgagacaaacatggatttgaagaggctaagacatcttacaaatgcacgaagcttg

SEQ ID NO: 602649 - DNA, 385 bp, Homo sapiens
cagtggctcgcgcctgtaatcccaaggtgctgggactcaggcatgagccactgtgcctgaccttacagcagtattttttaaaaatcaaaattaatgcaaaaatccatgatgaggccaggcttggtggctcatgcctgtgattccagcactttgggaggatcccttgagcccaggtgtttgagaccagtttgggtaacatgggaagagcttgtctatacaaacaaaaatttaaaaacaatgagctgggcatgggactcacacttctagccccagctactcgggctgaggtgggaggatggcttgagcccaggagttcaaggatgcagtgtgctttgattgcactactgcgcttcaccctgagcaacagagtgagaccccatctctt

SEQ ID NO: 602650 - DNA, 184 bp, Homo sapiens
gtgtcatgtctggtggcccatgaatctatccttgcactacacacatccccattttatatgttaccatttctctatttataattaataatcttggctgggcatggttggctcacacctgtaatcccagaacttagaggctgcagtggtgggatcagtgtgttgatatcccctttatcattttttg

SEQ ID NO: 602651 - DNA, 415 bp, Homo sapiens
  misc_feature (5)..(5): n is a, c, g, or t
  misc_feature (325)..(325): n is a, c, g, or t
  misc_feature (356)..(356): n is a, c, g, or t
tcagntggtgtgctctcaggttcggtcaatcctcctgcctcagcctcccaagtagctggtactagggcacgcaccaccatgcctggctaatttttgtatattttttggtagagactgggtttcgccatgttgcccgggctgttctcaaacccctgggctcaagtgatccacccaccttggcctcccaaggtgctgggattacaggtgtgagccactgtgcccagcctctctgagcttttaatactgtgggttccagcgtcttctgggccccctgggtcccattcttcctctttgtttctcagcgtcttgatgggcatgccatctntgggtccactaaaactttctcagggattatnaatattattttcacttgtgggtctctggggtgagatcgcagggctttgggaatgggtga

SEQ ID NO: 602652 - DNA, 1238 bp, Homo sapiens
tgtttaacacccgtctctttgccgttaatagaggtgggaaaaacccccttgcatcggcagaaattttgctaatggaaccataggttttcataacaccaggaggtatcaaccagctagccaataactagtatcggtttcattctcgaaccaacaattaccagggagtgcgtcccgaaagaaagcatcgggttaccccattgaaacccacagtgggtgttggcgtcctcctccctgtgtcaaagagtacctggcgtgttgcttgcctggagggccttccaaagcttacaaaagttggtggagccatgtcaaccgttgcgagtctgcttactcgcttggaaattaataaggcataccaatatttccgtgctcggataacccttccagcaaggccgggcctggactcgccacctcctagccgatctccgctcagagcttgcgttaatctttctgatggtctcaccctggtaggttcatgcgtgccaagttgggtctgaagaccgctcggaaggtgggaaaattcgaagcggccttttccggccctttatggcggcccccatcaggtcttccctgttgaccaggcaagggaattaacagcacgtgcaagctggaccattcaaccgggtttcaattacccggccgcccgagcttgacctggccacccaattcagtggcatgaaaccggcctgttcctgcttctcagtggccacccctgcttggtgaagaggggcccacgcaatcatgccaaaaggctccccgccacccaggccgagccctctggacaaccatagcctattggcgttctagctgccacggagtaaagaaactgctgcgtagcggcagcctggtacattgacattccaggcaaggacctacggctggaagtggatccaacgaagcccaagggctaccatgccaacttcgtgcctcgggccacagcccctacaatttggagcctggacacgcgagtacagcaaggtcctggccctgtacaagccaagcagaacaccgggcgcctcaggcgggcgcctgatgcgtgcagtgcgcagcgaggcgactggaggccgctgcccatcgtgtacaacgtgggccagcaagcacaaggtggagcagctgtccaacatgatcggcgcttcctgcaagatgcagcatgaggtcccgcccgccacgcccagcccggcaggcccggcaccccaccccgccccgccccgctgccttgataatgcgggggtattaaggaa

SEQ ID NO: 602653 - DNA, 799 bp, Homo sapiens
  misc_feature (531)..(531): n is a, c, g, or t
  misc_feature (545)..(545): n is a, c, g, or t
  misc_feature (656)..(656): n is a, c, g, or t
gaggacttcattaactgcagttactgagaactcataagacgaagctaaaatccctcttcggatccacagtcaaccgccctgaacacatcctgcaaaaagcccagagaaaggagcgccatggattactacagaaaatatgcaggctatctttctggtcacattgtcggtgtttctgcatgttctccattccgctcctgatgtgcaggattgcccagaatgcacgctacaggaaaacccattcttctcccagccgggtgccccaatacttcagtgcatgggctgctgcttctctagagcatatcccactccactaaggtccaagaagacgatgttggtccaaaagaacgtcacctcagagtccacttgctgtgtagctaaatcatataacagggtcacagtaatggggggtttcaaagtggagaaccacacggcgtgccactgcagtacttgttattatcacaaatcttaaatgttttaccaagtgctgtcttgatgactgctgattttctggaatggaaaattaagttgttnagtgttgatggctntgtgagataaaactctccttttccttaccataccactttgacacgcttcaaggatatactgcagctttactgccttcctccttatcctacagtacaatcagcagtctagtncttttcatttggaatgaatacagcatttagcttgttccactgcaaatacaagccttttaaatcatcattcccccaacccccccccccccccaacccccaccccccacccccccccacacacttctgtcccccccccaaacccc

SEQ ID NO: 602654 - DNA, 260 bp, Homo sapiens
cgaaagactaaacagatatatattttatttcatctgctaaatgccagagagcaagttaaacacacattccacttttttcaaaggccctcgtagtctcgggggaaggacaaactccatttccacatcactggttaaagtttcttcctcttcttcttcctgtgcttcctcctcctcttcctcctaatcttcatcagagctgaaggtgccatcagggaggctgtaaacacggatgacctgcttgttggggcccttgaggatga

SEQ ID NO: 602655 - DNA, 715 bp, Homo sapiens
  misc_feature (430)..(430): n is a, c, g, or t
  misc_feature (455)..(455): n is a, c, g, or t
  misc_feature (466)..(466): n is a, c, g, or t
  misc_feature (490)..(490): n is a, c, g, or t
  misc_feature (528)..(529): n is a, c, g, or t
  misc_feature (568)..(569): n is a, c, g, or t
  misc_feature (622)..(622): n is a, c, g, or t
  misc_feature (673)..(674): n is a, c, g, or t
  misc_feature (704)..(704): n is a, c, g, or t
gcggtctatcaattttgttgatcttttcaaaacaccagctcctggattcattaattttttgaagggtttattgtgtctctatttccttcagttctgctctgattttagttatttcttgccttctgctagcttttgaatgtgtttgctcttgcttttctagttcttttaattgtgatgttagggtgtcaattttggatctttcctgctttctcttgtgggcatttagtgctataaatttccctctaaacactgctttgaatgtgtcccagagattctggtatgttgtgtctttgttctcattggtttcaaagaacatctttatttctgccttcatttcgttatgtacccagtagtcattcaggagcaggttgttcagtttccatgtagttgagcggttctgagtgagattctgaatcctgagttctagttngattgcactgtggtatgagagatangtcgttataanttctatttctttacatttgctgangagagctttactttcaagtatgtggtcaatttttgtanngtgtgtgtggtacttgaatgtataatctggtgatttggnngtgagaagtcctgagatgctaatatggctggctggtgccagctgagttcaatncttggtattccttgttgacttcttgctcgttgatctggctatggttgccanntggtggttaaggcttccattatttatggtntggggctggct

SEQ ID NO: 602656 - DNA, 458 bp, Homo sapiens
  misc_feature (1)..(1): n is a, c, g, or t
  misc_feature (108)..(108): n is a, c, g, or t
  misc_feature (167)..(167): n is a, c, g, or t
  misc_feature (169)..(169): n is a, c, g, or t
  misc_feature (171)..(171): n is a, c, g, or t
  misc_feature (225)..(225): n is a, c, g, or t
  misc_feature (248)..(248): n is a, c, g, or t
  misc_feature (316)..(316): n is a, c, g, or t
  misc_feature (322)..(322): n is a, c, g, or t
  misc_feature (376)..(376): n is a, c, g, or t
  misc_feature (428)..(428): n is a, c, g, or t
ntgagcagcgtcgctggtgctgagcggggccgatgggaaccagactcgactctgcgtacaggaggtagaaacacttcctcctgggctgacggagccgcctgccaccgnccacccggacagaaactcctcatcatccgcagcgccccagccactgagctgctggacanananacacttggaggaggcaccgcacgctgcagctcctggccccaccgccgtcagccnagcctcgggcccgcgggtccccngggctccagcctcccagatggtgcaagtggtccccgcagagcctgggcctggtgttatgacccctcangcctgnctccatccagattgtccagactctacccgcagtccagctggtgcacacgttttnaggagaggcagtgattcccctcccgccccgcacagagaccccgactcactgncagccggggcgggagcaggggtgccgcatg

SEQ ID NO: 602657 - DNA, 102 bp, Homo sapiens
aaatcttgagtctcggtgcgttttttcgttgtagcgcaccggtcgccgcgtaatcggtgtcaaacggcttgccacagtacatagcgcaccaccacggcctgg

SEQ ID NO: 602658 - DNA, 196 bp, Homo sapiens
tgtatcaagaaagcaacacattacactatatttataacagaattactaaatagttaactaaaatgtcaatatatcccaataacattatcagatgactatacgaggtctccctatagaccataccacgcgagaatcaaagacttatggcttcaaacgttaaacgtttacaaataaaaccctaattaccttaaccttc

SEQ ID NO: 602659 - DNA, 354 bp, Homo sapiens
aggcactgtattgttttccacgggggctgcagcatctttcttacatccccaccagccaggcaccagggtttgaatttctccacatcatgggcaacacctgttactatctgatttttttcataatggcccccgtgataattcattgtggtttttattggcatttctctaatgactagttatgatgagcatccttcatgtgcttgttgggcatttgctgtcttctctggaaaaatgtccattcaagtcctttgcccatttttgaattgggttgttgattaacaaagttattaggatattaaaaatacccccatcccttccaagtaagattaatcccagcaattcaaggatggctca

SEQ ID NO: 602660 - DNA, 885 bp, Homo sapiens
ggcgcgagcggcggctggggagctgctgctgacggggcccgggctggaggagcgagtgccgggcgggctgggtgggcatgctgcctgccgcggcttttcaccctgccgctgctgcactacttggaagtgagccggctgcggggagcttgctgcgcgccgggggcctggcctggctgcagggcctgcctgcagctgcacagcctcgtgctgctggcgcaacgcgctggggccctggcctgatgccccgatggctctgggcctggctgcctgcccttcgggtgctcgacgctgtcgggcaacgctgctggagagctgctgcctgcggggccaatggcctgggccccccgcgagccggcgggcttcctgcagctgcagagcctcaacctcagcggcaacctggctgcgcgagctgccagccgactggctggccgctgtgccccggcctgcagagactcagactcacctggcaattgcctagactcctttcccgcacgagctctttcgccccggcgcgctgccctgctcagtgaactggcggtgctgacaactgcctccgagaactcagacccgaatcgccccactggctcgctcaagacgttggacctctcgaacaaccagtgagcgagatcctgcagagcttgtggaatgccccaagctcaagggagatccaatttccgtggggcaacaagctgagggacaagcgcctgagaaagatggtcagggctgcagaccagatcatcgtggagtactgcgcgttggaggacgtgtggcgggaggcaggggcgggcgagggtcggaaaggagagagcgggaaagaggggaacgaacagaggaaataaaatgcaacaaaaatgaaatcaaaatataaacaaaaaaaacataaaa

SEQ ID NO: 602661 - DNA, 314 bp, Homo sapiens
cccattgagcccactggatgctacttacagtgcaagaagactttaaaaaataatcactgcacaatcatgtaaagggtggggttatgctgtgatgttgtttttcctcaataatgtgtttcttgactgttcaagaacatattacagtttccacggcaaatttgttttcaaaatgccgatttgcgaaacgaattgctggctttcatcgtttctcatatacctcttcatatgtttctctgacgttgcaagtttgtaatgtttctcttgtcattgacactagtcgactgaataacagatacccatggttatcaattgtt

SEQ ID NO: 602662 - DNA, 801 bp, Homo sapiens
gggacgctatgggacaccgtgagtccaaggcgctgctcctgccttgaagccacgcgctccacgccgtggccctcccattttctgcgtcctcagcgggctgagctgcagagagccttccctggacctattcccgtcctgtgcattcacattggcatcctggttgggggggaagaaaaacaagcgtgccttagcagcagcccccgtttccagaatgtgctgcctgttcccccaaagcctgctttgtcccgcgggagggacggctgcctttgaacctgctttatttgtctcactgggttatctaatgaggacacaaaacacctaacctaaggtacacatcccatctgtgcggtgggttcactcctgagtcttgcaaaaatcccaaggaaaccttggtggtcttgcttgcccatcctttcctcagcacatgtggaaccccgggaaggccccgtttgcactgaccagaggctcaacacccctcttggggttttcccatggttcttttttcaaaccttcaactttcctcttccaaccccatttgtgtcctctggacctcattctttaaccctttggttcgtaaagaaccttttagcctccaagtgaaacttgagggcacgaaggccccctggttggctgggtctgtgttgacagggcaaccaaaccatcttccccagcttcaattggtctcttgcaccttgagccaccaagggtttgatgcggggacttccgaagccatggactgcccaggtccctccttttggctcccttcaaaagacgcaaaacatttccacacaaagactggcc

SEQ ID NO: 602663 - DNA, 998 bp, Homo sapiens
  misc_feature (6)..(6): n is a, c, g, or t
  misc_feature (96)..(98): n is a, c, g, or t
  misc_feature (118)..(118): n is a, c, g, or t
  misc_feature (141)..(141): n is a, c, g, or t
  misc_feature (153)..(153): n is a, c, g, or t
  misc_feature (163)..(163): n is a, c, g, or t
  misc_feature (175)..(177): n is a, c, g, or t
  misc_feature (206)..(206): n is a, c, g, or t
  misc_feature (208)..(208): n is a, c, g, or t
  misc_feature (219)..(219): n is a, c, g, or t
  misc_feature (232)..(232): n is a, c, g, or t
  misc_feature (246)..(246): n is a, c, g, or t
  misc_feature (316)..(316): n is a, c, g, or t
  misc_feature (318)..(318): n is a, c, g, or t
  misc_feature (321)..(321): n is a, c, g, or t
  misc_feature (341)..(341): n is a, c, g, or t
  misc_feature (361)..(361): n is a, c, g, or t
  misc_feature (370)..(371): n is a, c, g, or t
  misc_feature (380)..(380): n is a, c, g, or t
  misc_feature (384)..(384): n is a, c, g, or t
  misc_feature (386)..(387): n is a, c, g, or t
  misc_feature (426)..(426): n is a, c, g, or t
  misc_feature (441)..(441): n is a, c, g, or t
  misc_feature (641)..(641): n is a, c, g, or t
  misc_feature (643)..(643): n is a, c, g, or t
  misc_feature (650)..(650): n is a, c, g, or t
  misc_feature (690)..(690): n is a, c, g, or t
  misc_feature (908)..(908): n is a, c, g, or t
  misc_feature (911)..(911): n is a, c, g, or t
  misc_feature (931)..(931): n is a, c, g, or t
  misc_feature (997)..(997): n is a, c, g, or t
aaaccngggccaatctatgatctaagaggaagtcaggaaaggcttggaagagagatccaaaggccggcctggcaaggggaatcccacatgagaatnnntggaagaaagcaggccccangaagcaaggtcatcttgcctgcntctctgtaagtnaatccttcanaggttgcttttnnntctcttgactgcttgggcaagagggtaangnccctggttgcnggatttgccagtntagtcatccatgtnaatagaccagatcatggctcctcccaggtttaaattctttaagaactgaaccttggtctccatactcttntnttnttctttttttacccactggntccccttgactgcgtagggnacctgctgnncctggggcntcgngnncttggctcctttcagggactggcagatctcataataggncagggagcctgaagngtctgtgatgggtccagcagctccagggccagaggcaggggcccccacggtggtttctgcagaggccagtgtgaaggagtgcccatatgtggggatgcccatgaccaccttctctgatggcattcccttatgtatccagtaccccacagcatattccacattgtagtaggagcttggccctctgtcctgccaccccttgntnagagggntgttgtggccagtgataaggggcttttcccaagacccatngaagtcaaaggacaggaggttgatgaaatccagatcttttgccagtttctcaacttgatagctgttatcaatcatttgcctccctgcagatacgcccgcagtcaagagaagcctttccttggtggattttgtgaagtccttctgaaaggcttctgctaactcatgaatcagcacagtgaaatgagtgttttctttctgatctgggtagatcagcttanatncagtccatcaaagttatggntcctcagaaacaggattatggagttaatgaattccaagcgtgatgtagatgatccaccataggggng

SEQ ID NO: 602664 - DNA, 107 bp, Homo sapiens
acggccgtgtattactgtgcgaaaggcggggttccggatattgtagtagtaccagctgctatccgttttgactactggggccagggaaccctggtcaccgtctcctc

SEQ ID NO: 602665 - DNA, 547 bp, Homo sapiens
  misc_feature (97)..(97): n is a, c, g, or t
agctgtcctgctatcatctaaggatcctttgcctccttcagtgagactgattcattcatggacaggcctggggctctggggtggtggagcagatgcnagaacaaggacgcagctccaggctgcatccctgcaccagtagctggggattgggagcagggagtgcaggctccctcagtgagctccaggctggagtagggccaacccaaccccaaaggcgggggggtgactccgtgaaagtgtgagtcccatccattgcctaaggtaccactctacgatagccaagtcgtaggacacacgaagactttctataggagggttctctgcctccaattctaggccctgtcccagagaggaagcagcacacaattggtgacggggtatgtatcaggcagcatccacacaacaaccctgtgaggtaggttgcgttgtcccattatacacatggggactgcggcgccagcagaggtgaagtttcttgcccaggtcctgcagcaagaacacgagctgggattcaagcccaggtctgccgggctccaaagcccatgtg

SEQ ID NO: 602666 - DNA, 836 bp, Homo sapiens
ggaacaaatggcaatgtgagtaggttacatttctgtgttataatgcgtaaagatattgaaaatataatgaaataaaagcatcttaggttataccatctttatatgctatgcgtttcaatatttaagatttaaagtgatttttggtcacagtgttttgtgataaaatttttttagaatgaagttgaattctaagacttgaaacaacctgatcactgaagccaactttgtcccagcacattccttaagtcctaatgggaaaaaaaaaaaaaaaaatggaattggtggaaaactttgggggtgtaaccaattggttggtgacccctacaaattattcaatagggtagtcagagggagcttcacacagattccagtcttaatgtggcccttgctggggggccataatataaccatacatggtgtgtcctggataaccaaggtcattttctccaaagagactacggttagctggccatggtgtagagcagttctaaaatggtcagcctcgggtgtcgacatggtatatcaattcttggagcccgctgtttcaccacattcattatctcacctcatagacaatcaggtggggctgatttggaaatgcgcggtcctgagtgtccacctttctaggtggccatttttgggattcacgagcggaataacggtgcttccgtggagattaacgcctcagggggaatactggtaaaccttgggggataaggttcagtggaagtatcttgaaaacgtaattttggcaaattcaacttcagtagagaaacaatagagtgggcaaaattaaatccaaacgtgacaggggaccacatcaagcagcggatcga

SEQ ID NO: 602667 - DNA, 443 bp, Homo sapiens
atctgcgctggagaagggagttatggaagaataaggctggaggagcaggggagcccgatccttcccaggcctgaaagggagtttggagttgggctttgagggcagtggaaagtcatcagagcagtggtcctcaggggaaatggaggatggaggtagggggtgccctcaggggacattcagcatttaagtttggagacatttgaagttgccacaacttaggtgagtgtttttggtgcctagtgtgaatagaggccgggatgctgctaaaccctacaaggcacatgacagcctgcttctccccaaactgaatagtttagccccaaatgtgaatagcgccaagggtgagaaactctggatgttttgttttgttttgagacagagtcttactctgttgtccaccctaggggacagagtgagtaagactccatctcaaaaaaatgaaa

SEQ ID NO: 602668 - DNA, 205 bp, Homo sapiens
gtaagacggatgtttgagtggggagggagagggggatggtgccagtctgatatcctgagtaagaagggggctgggtatctgggaaagggcttcaaaggaacagtgggttttaattgctgactctcattttatgagaaggcttatgtcagtgccccagtgtgtggtgcctccaatctcttgtctcgtgggctctgccatagtgggt

SEQ ID NO: 602669 - DNA, 503 bp, Homo sapiens
tttttggtagagatagggtcttgcaaaagatttccatgttgaactccacctcctggccccacgcaagggttccttattactgaaaaacgggaggtgggcccttttttaaaccaaaggggcctttaaaaagatggccggggctacggctttggaagggctccccccattggcaggagccccaggtgaacacccacttgcccctgatttggccctttcgcggcactacccttggggactgggggggggccccactggggtcccctttcttagaagcctttcggcccgctaataatactaagaaaaaggtttttttaaaaggaaaaatttctcctttaaaacacaagggagaaaataagactaaggggtcacgacagaaaaaaaagttttttgcccaccccattaaaaattttttttttttgccaaaatccacctttagggggggccaattgggccgggtccgcaccccactcccgtatgttctggtgctcctggggcgcccggcc

SEQ ID NO: 602670 - DNA, 1813 bp, Homo sapiens
gatcttgtggaggagtgcacagtcaatgcctgttcaagattaatcattttccctgtgcctatgactgaggctgtttctcacatcctgcccctggtttgcctgtcccaaggatttcgtctgaagggcgggacattccccctgcctcttcgcaccacagccagagcctgccattaggaccaatgaaagcaaagtacctcatcccctcagtgactaagaatcgcagtatttaagaggtagcaggaatgggctgagagtggtgtttgctttctccaccagaagggcacactttcatctaatttggggtatcactgagctgaagacaaagagaagggggagaaaacctagcagaccaccatgtgctatgggaagtgtgcacgatgcatcggacattctctggtggggctcgccctcctgtgcatcgcggctaatattttgctttactttcccaatggggaaacaaagtatgcctccgaaaaccacctcagccgcttcgtgtggttcttttctggcatcgtaggaggtggcctgctgatgctcctgccagcatttgtcttcattgggctggaacaggatgactgctgtggctgctgtggccatgaaaactgtggcaaacgatgtgcgatgctttcttctgtattggctgctctcattggaattgcaggatctggctactgtgtcattgtggcagcccttggcttagcagaaggaccactatgtcttgattccctcggccagtggaactacacctttgccagcaccgagggccagtaccttctggatacctccacatggtccgagtgcactgaacccaagcacattgtggaatggaatgtatctctgttttctatcctcttggctcttggtggaattgaattcatcttgtgtcttattcaagtaataaatggagtgcttggaggcatatgtggcttttgctgctctcaccaacagcaatatgactgctaaaagaaccaacccaggacagagccacaatcttcctctatttcattgtaatttatatatttcacttgtattcatttgtaaaactttgtattagtgtaacatactccccacagtctacttttacaaacgcctgtaaagactggcatcttcacaggatgtcagtgtttaaatttagtaaacttcattcccgtccagtccactcttgtctacgtactccatcaccaaggaatgaggaaacaaaccaccctctgggggtagtttacagactgagtgacagtactcagtatatctgagataaactctataatgttttggataaaaataacattccaatcactattgtatatatgtgcatgtattttttaaattaaagatgtctagttgctttttataagaccaagaaggagaaaatccgacaacctggaaagatttttgttttcactgcttgtatgatgtttcccattcatacacctataaatctctaacaagaggccctttgaactgccttgtgttctgtgagaaacaaatatttacttagagtggaaggactgattgagaatgttccaatccaaatgaatgcatcacaacttacaatgctgctcattgttgtgagtactatgagattcaaatttttctaacatatggaaagccttttgtcctccaaagatgagtactagggatcatgtgtttaaaaaaagaaaggctacgatgactgggcaagaagaaagatgggaaactgaataaagcagttgatcagcatcattggaacatggggacgagtgacggcaggaggaccacgaggaaataccctcaaaactaacttgtttacaacaaaataaagtattcactacca

SEQ ID NO: 602671 - DNA, 1161 bp, Homo sapiens
gatcttgtggaggagtgcacagtcaatgcctgttcaagattaatcattttccctgtgcctatgactgaggctgtttctcacatcctgcccctggtttgcctgtcccaaggatttcgtctgaagggcgggacattccccctgcctcttcgcaccacagccagagcctgccattaggaccaatgaaagcaaagtacctcatcccctcagtgactaagaatcgcagtatttaagaggtagcaggaatgggctgagagtggtgtttgctttctccaccagaagggcacactttcatctaatttggggtatcactgagctgaagacaaagagaagggggagaaaacctagcagaccaccatgtgctatgggaagtgtgcacgatgcatcggacattctctggtggggctcgccctcctgtgcatcgcggctaatattttgctttactttcccaatggggaaacaaagtatgcctccgaaaaccacctcagccgcttcgtgtggttcttttctggcatcgtaggaggtggcctgctgatgctcctgccagcatttgtcttcattgggctggaacaggatgactgctgtggctgctgtggccatgaaaactgtggcaaacgatgtgcgatgctttcttctgtattggctgctctcattggaattgcaggatctggctactgtgtcattgtggcagcccttggcttagcagaaggaccactatgtcttgattccctcggccagtggaactacacctttgccagcaccgagggccagtaccttctggatacctccacatggtccgagtgcactgaacccaagcacattgtggaatggaatgtatctctgttttctatcctcttggctcttggtggaattgaattcatcttgtgtcttattcaagtaataaatggagtgcttggaggcatatgtggcttttgctgctctcaccaacagcaatatgactgctaaaagaaccaacccaggacagagccacaatcttcctctatttcattgtaatttatatatttcacttgtattcatttgtaaaactttgtattagtgtaacatactccccacagtctacttttacaaacgcctgtaaagactggcatcttcacaggatgtcagtgtttaaatttagtaaacttcttttttgtttgtttattt

SEQ ID NO: 602672 - DNA, 234 bp, Homo sapiens
agaagctcacgctggtggcgctactactctgggctgataggtgccatgtggttcgtgaccgtgacctcgacggtggacaccaccctcaatgagcctgagccagcagatcgagaacatcggagcccagaggaggcggaaagaacccgcgccgacctggcgtgacctcaagatgtgccactctgactggaagagtggagagtactggattgagcccaaccaagggtgcaatctgtg

SEQ ID NO: 602673 - DNA, 1811 bp, Homo sapiens
gatcttgtggaggagtgcacagtcaatgcctgttcaagattaatcattttccctgtgcctatgactgaggctgtttctcacatcctgcccctggtttgcctgtcccaaggatttcgtctgaagggcgggacattccccctgcctcttcgcaccacagccagagcctgccattaggaccaatgaaagcaaagtacctcatcccctcagtgactaagaatcgcagtatttaagaggtagcaggaatgggctgagagtggtgtttgctttctccaccagaagggcacactttcatctaatttggggtatcactgagctgaagacaaagagaagggggagaaaacctagcagaccaccatgtgctatgggaagtgtgcacgatgcatcggacattctctggtggggctcgccctcctgtgcatcgcggctaatattttgctttactttcccaatggggaaacaaagtatgcctccgaaaaccacctcagccgcttcgtgtggttcttttctggcatcgtaggaggtggcctgctgatgctcctgccagcatttgtcttcattgggctggaacaggatgactgctgtggctgctgtggccatgaaaactgtggcaaacgatgtgcgatgctttcttctgtattggctgctctcattggaattgcaggatctggctactgtgtcattgtggcagcccttggcttagcagaaggaccactatgtcttgattccctcggccagtggaactacacctttgccagcaccgagggccagtaccttctggatacctccacatggtccgagtgcactgaacccaagcacattgtggaatggaatgtatctctgttttctatcctcttggctcttggtggaattgaattcatcttgtgtcttattcaagtaataaatggagtgcttggaggcatatgtggcttttgctgctctcaccaacagcaatatgactgctaaaagaaccaacccaggacagagccacaatcttcctctatttcattgtaatttatatatttcacttgtattcatttgtaaaactttgtattagtgtaacatactccccacagtctacttttacaaacgcctgtaaagactggcatcttcacaggatgtcagtgtttaaatttagtaaacttcttttttgtttgtttatttgtttttgtttttttttaaggaatgaggaaacaaaccaccctctgggggtagtttacagactgagtgacagtactcagtatatctgagataaactctataatgttttggataaaaataacattccaatcactattgtatatatgtgcatgtattttttaaattaaagatgtctagttgctttttataagaccaagaaggagaaaatccgacaacctggaaagatttttgttttcactgcttgtatgatgtttcccattcatacacctataaatctctaacaagaggccctttgaactgccttgtgttctgtgagaaacaaatatttacttagagtggaaggactgattgagaatgttccaatccaaatgaatgcatcacaacttacaatgctgctcattgttgtgagtactatgagattcaaatttttctaacatatggaaagccttttgtcctccaaagatgagtactagggatcatgtgtttaaaaaaagaaaggctacgatgactgggcaagaagaaagatgggaacttaattaaaccgtttgtcagcctcctttggaccttggggccaatgtccgccagaaggcccccaagaaatatcctccaaaattacttgtgtttcccccaaatatagtgttttcccccccaaa

SEQ ID NO: 602674 - DNA, 529 bp, Homo sapiens
  misc_feature (171)..(172): n is a, c, g, or t
  misc_feature (194)..(194): n is a, c, g, or t
cgccccgcgccgcggctggcagggtgtgcgtgagtttggtggcggccggctgtgcagagacgccatgtaccggctcatgtcagcagtgactgcccgggctgccgcccccgggggcttggcctcaagctgcggacgacgcggggtccatcagtcgcgcctggtgctgccgcnnctctcggcccacgtgcttgggngctccgggggggcgcccctcggtgctggtggctggggctggcgctcggggtgaacgctggcagcgtggcgctgagtgggcgctggcccctgggcgcctagtccccgcgctgtgccccccctgtaccccttgagcgccgtcagcctttcttgggcctgatgccctgccctacagggcaggcaggttcccccttccggcccccccgggttgggggatccattcccggccaagaacccccgtgctgccgcccttgcttccaggtgcttcgccagagccatcgagagcagccgcgacctgctgcacaggatcaaggatgaggtgggcgcaccgggcata

SEQ ID NO: 602675 - DNA, 723 bp, Homo sapiens
  misc_feature (270)..(270): n is a, c, g, or t
gttccggggaagaactgctaaaacatgagagcaaggcagcagaccttactgtatgagaagcaatgctcctcaaaccttctgcgtgctgacatagaccttcccagaagcaaaactgtaggcggcgacctgagcgctggaagccgaaggggaagaggaaggagacgctgaagccaggcggccggcgacaaaggcggcggactcgcggcggagcgctctgcctcgggccgggagcacaacccacggccctactccagctgaagtcccgtcgancggcttctaggaataaagtttacgttctcctgaggcctgcaccccccatgtcccatccaggaggtacatctcggtgtcctccatctgccaaattcctttcgagacccgagaactaatccagctttcaggccagcataatggaaggagtcgactgcgtaaacggcgtaggcaataaatcagcgtgccgcggtaagcgtgcgacgaaggaagctgggagtgtgttgagctgaaccctcccgagcgtggatgtcccgggagtcctcccgttttgagcgatctgcagattctccgctgttgtcttcgcccctggcctttgtgaccccttgggaatttagattcctctatcgaggcttcccttcaagcgcctgggtgcatttctaccactcaccttttactactctgctggtgtcacgttgcgggtagtatggggatatggaggactttttgccctca

SEQ ID NO: 602676 - DNA, 1441 bp, Homo sapiens
  misc_feature (17)..(17): n is a, c, g, or t
gacgtccactctagacnatcccctgtattggtggggctcgccctcctgtgcatcgcggctaatattttgctttactttcccaatggggaaacaaagtatgcctccgaaaaccacctcagccgcttcgtgtggttcttttctggcatcgtaggaggtggcctgctgatgctcctgccagcatttgtcttcattgggctggaacaggatgactgctgtggctgctgtggccatgaaaactgtggcaaacgatgtgcgatgctttcttctgtattggctgctctcattggaattgcaggatctggctactgtgtcattgtggcagcccttggcttagcagaaggaccactatgtcttgattccctcggccagtggaactacacctttgccagcaccgagggccagtaccttctggatacctccacatggtccgagtgcactgaacccaagcacattgtggaatggaatgtatctctgttttctatcctcttggctcttggtggaattgaattcatcttgtgtcttattcaagtaataaatggagtgcttggaggcatatgtggcttttgctgctctcaccaacagcaatatgactgctaaaagaaccaacccaggacagagccacaatcttcctctatttcattgtaatttatatatttcacttgtattcatttgtaaaactttgtattagtgtaacatactccccacagtctacttttacaaacgcctgtaaagactggcatcttcacaggatgtcagtgtttaaatttagtaaacttcttttttgtttgtttatttgtttttgtttttttttaaggaatgaggaaacaaaccaccctctgggggtagtttacagactgagtgacagtactcagtatatctgagataaactctataatgttttggataaaaataacattccaatcactattgtatatatgtgcatgtattttttaaattaaagatgtctagttgctttttataagaccaagaaggagaaaatccgacaacctggaaagatttttgttttcactgcttgtatgatgtttcccattcatacacctataaatctctaacaagaggccctttgaactgccttgtgttctgtgagaaacaaatatttacttagagtggaaggactgattgagaatgttccaatccaaatgaatgcatcacaacttacaatgctgctcattgttgtgagtactatgagattcaaatttttctaacatatggaaagccttttgtcctccaaagatgagtactagggatcatgtgtttaaaaaaagaaaggctacgatgactgggcaagaagaaagatgggaaactgaataaagcagttgatcagcatcattggaacatggggacgagtgacggcaggaggaccacgaggaaataccctcaaaactaacttgtttacaacaaaataaagtattcactacca

SEQ ID NO: 602677 - DNA, 177 bp, Homo sapiens
  misc_feature (20)..(20): n is a, c, g, or t
  misc_feature (22)..(22): n is a, c, g, or t
  misc_feature (77)..(77): n is a, c, g, or t
  misc_feature (97)..(97): n is a, c, g, or t
cgcggccgcgcgactacggntncgagaagacgacagaagggtacggccgagaagacgacagaaggggtggctcacanttgtggtcagcacgggaggntgaggcgggtggactgcttgagcccaggaatttgagaccagcccaggcaatatagggagaccttgtctctactcctccat

SEQ ID NO: 602678 - DNA, 340 bp, Homo sapiens
agggaaattaggggaattacctgcgatcacacagctggtcagtgtggaaagtggggcaccccagatgctttgtgtccttaattgtggaaagtcatcctggtggggggaaatctccagcatttttttcctaaaaaggtaggttggactgtgaaggacagccataaaccagagaaaattcttaccctctcttcctttgaaaaatcttgaagtgggccaggtgcggtggtgcacacctgtaatcccagcaccttgggaaaggtgaggcgggcagatcacctgaggccagaaattcaagaccagcctggccaacagggagaaaccccatctctactaaaaatac

SEQ ID NO: 602679 - DNA, 1490 bp, Homo sapiens
tcttcagatgggatgttgtagtctgagaatgcggcatcctccagctgtttgccagcaaatatcagacgctgctggtctggtggggctcgccctcctgtgcatcgcggctaatattttgctttactttcccaatggggaaacaaagtatgcctccgaaaaccacctcagccgcttcgtgtggttcttttctggcatcgtaggaggtggcctgctgatgctcctgccagcatttgtcttcattgggctggaacaggatgactgctgtggctgctgtggccatgaaaactgtggcaaacgatgtgcgatgctttcttctgtattggctgctctcattggaattgcaggatctggctactgtgtcattgtggcagcccttggcttagcagaaggaccactatgtcttgattccctcggccagtggaactacacctttgccagcaccgagggccagtaccttctggatacctccacatggtccgagtgcactgaacccaagcacattgtggaatggaatgtatctctgttttctatcctcttggctcttggtggaattgaattcatcttgtgtcttattcaagtaataaatggagtgcttggaggcatatgtggcttttgctgctctcaccaacagcaatatgactgctaaaagaaccaacccaggacagagccacaatcttcctctatttcattgtaatttatatatttcacttgtattcatttgtaaaactttgtattagtgtaacatactccccacagtctacttttacaaacgcctgtaaagactggcatcttcacaggatgtcagtgtttaaatttagtaaacttcttttttgtttgtttatttgtttttgtttttttttaaggaatgaggaaacaaaccaccctctgggggtagtttacagactgagtgacagtactcagtatatctgagataaactctataatgttttggataaaaataacattccaatcactattgtatatatgtgcatgtattttttaaattaaagatgtctagttgctttttataagaccaagaaggagaaaatccgacaacctggaaagatttttgttttcactgcttgtatgatgtttcccattcatacacctataaatctctaacaagaggccctttgaactgccttgtgttctgtgagaaacaaatatttacttagagtggaaggactgattgagaatgttccaatccaaatgaatgcatcacaacttacaatgctgctcattgttgtgagtactatgagattcaaatttttctaacatatggaaagccttttgtcctccaaagatgagtactagggatcatgtgtttaaaaaaagaaaggctacgatgactgggcaagaagaaagatgggaaactgaataaagcagttgatcagcatcattggaacatggggacgagtgacggcaggaggaccacgaggaaataccctcaaaactaacttgtttacaacaaaataaagtattcactacca

SEQ ID NO: 602680 - DNA, 517 bp, Homo sapiens
  misc_feature (365)..(365): n is a, c, g, or t
gcgcccggggtggggttccatcgggcccattgtgggttgccccagggttgggtaccacaaaaaggtgggcgccggcccgggttttagtttggagaagttcagggtggccggtatttacaagaaggtggcccggaccatgggcatttttgtggatccaaggagggggaacaagtccacggagtccctgcagaccaaggtgcaggggttgaaggagtaccgctccaaatttatctttttccccaggaagccctcggcccccaaaaagggagacagttttgttgaagaattgaaattggccccccagttgaccggaccggtcatgcccgtccggaaggtttataagaaggagaaagctcgagtcatcnctgaggaagaaaagaatttcaaagccttcgttagtttccgtatggcccgggccaacgcccggtttttgggcataggggcaaaaaaagccaaggaagccgcagaacaggatgttgaaaaaaaaaaataaagccctcttgggggcttggaatta

SEQ ID NO: 602681 - DNA, 1670 bp, Homo sapiens
gatcttgtggaggagtgcacagtcaatgcctgttcaagattaatcattttccctgtgcctatgactgaggctgtttctcacatcctgcccctggtttgcctgtcccaaggatttcgtctgaagggcgggacattccccctgcctcttcgcaccacagccagagcctgccattaggaccaatgaaagcaaagtacctcatcccctcagtgactaagaatcgcagtatttaagaggtagcaggaatgggctgagagtggtgtttgctttctccaccagaagggcacactttcatctaatttggggtatcactgagctgaagacaaagtatgcctccgaaaaccacctcagccgcttcgtgtggttcttttctggcatcgtaggaggtggcctgctgatgctcctgccagcatttgtcttcattgggctggaacaggatgactgctgtggctgctgtggccatgaaaactgtggcaaacgatgtgcgatgctttcttctgtattggctgctctcattggaattgcaggatctggctactgtgtcattgtggcagcccttggcttagcagaaggaccactatgtcttgattccctcggccagtggaactacacctttgccagcaccgagggccagtaccttctggatacctccacatggtccgagtgcactgaacccaagcacattgtggaatggaatgtatctctgttttctatcctcttggctcttggtggaattgaattcatcttgtgtcttattcaagtaataaatggagtgcttggaggcatatgtggcttttgctgctctcaccaacagcaatatgactgctaaaagaaccaacccaggacagagccacaatcttcctctatttcattgtaatttatatatttcacttgtattcatttgtaaaactttgtattagtgtaacatactccccacagtctacttttacaaacgcctgtaaagactggcatcttcacaggatgtcagtgtttaaatttagtaaacttcttttttgtttgtttatttgtttttgtttttttttaaggaatgaggaaacaaaccaccctctgggggtagtttacagactgagtgacagtactcagtatatctgagataaactctataatgttttggataaaaataacattccaatcactattgtatatatgtgcatgtattttttaaattaaagatgtctagttgctttttataagaccaagaaggagaaaatccgacaacctggaaagatttttgttttcactgcttgtatgatgtttcccattcatacacctataaatctctaacaagaggccctttgaactgccttgtgttctgtgagaaacaaatatttacttagagtggaaggactgattgagaatgttccaatccaaatgaatgcatcacaacttacaatgctgctcattgttgtgagtactatgagattcaaatttttctaacatatggaaagccttttgtcctccaaagatgagtactagggatcatgtgtttaaaaaaagaaaggctacgatgactgggcaagaagaaagatgggaaactgaataaagcagttgatcagcatcattggaacatggggacgagtgacggcaggaggaccacgaggaaataccctcaaaactaacttgtttacaacaaaataaagtattcactacca

SEQ ID NO: 602682 - DNA, 99 bp, Homo sapiens
  misc_feature (6)..(6): n is a, c, g, or t
  misc_feature (28)..(28): n is a, c, g, or t
  misc_feature (69)..(69): n is a, c, g, or t
  misc_feature (73)..(73): n is a, c, g, or t
tcagcnttttcagaaagagcatttgggnaatattcaacgcataaggagactgtgcttggggccatccantctntccagcttctcaaagtgtttccgggc

SEQ ID NO: 602683 - DNA, 1753 bp, Homo sapiens
gatcttgtggaggagtgcacagtcaatgcctgttcaagattaatcattttccctgtgcctatgactgaggctgtttctcacatcctgcccctggtttgcctgtcccaaggatttcgtctgaagggcgggacattccccctgcctcttcgcaccacagccagagcctgccattaggaccaatgaaagcaaagtacctcatcccctcagtgactaagaatcgcagtatttaagaggtagcaggaatgggctgagagtggtgtttgctttctccaccagaagggcacactttcatctaatttggggtatcactgagctgaagacaaagagaagggggagaaaacctagcagaccaccatgtgctatgggaagtgtgcacgatgcatcggacattctctggtggggctcgccctcctgtgcatcgcggctaatattttgctttactttcccaatggggaaacaaagtatgcctccgaaaaccacctcagccgcttcgtgtggttcttttctggcatcgtaggaggtggcctgctgatgctcctgccagcatttgtcttcattgggctggaacaggatgactgctgtggctgctgtggccatggaattgcaggatctggctactgtgtcattgtggcagcccttggcttagcagaaggaccactatgtcttgattccctcggccagtggaactacacctttgccagcaccgagggccagtaccttctggatacctccacatggtccgagtgcactgaacccaagcacattgtggaatggaatgtatctctgttttctatcctcttggctcttggtggaattgaattcatcttgtgtcttattcaagtaataaatggagtgcttggaggcatatgtggcttttgctgctctcaccaacagcaatatgactgctaaaagaaccaacccaggacagagccacaatcttcctctatttcattgtaatttatatatttcacttgtattcatttgtaaaactttgtattagtgtaacatactccccacagtctacttttacaaacgcctgtaaagactggcatcttcacaggatgtcagtgtttaaatttagtaaacttcttttttgtttgtttatttgtttttgtttttttttaaggaatgaggaaacaaaccaccctctgggggtagtttacagactgagtgacagtactcagtatatctgagataaactctataatgttttggataaaaataacattccaatcactattgtatatatgtgcatgtattttttaaattaaagatgtctagttgctttttataagaccaagaaggagaaaatccgacaacctggaaagatttttgttttcactgcttgtatgatgtttcccattcatacacctataaatctctaacaagaggccctttgaactgccttgtgttctgtgagaaacaaatatttacttagagtggaaggactgattgagaatgttccaatccaaatgaatgcatcacaacttacaatgctgctcattgttgtgagtactatgagattcaaatttttctaacatatggaaagccttttgtcctccaaagatgagtactagggatcatgtgtttaaaaaaagaaaggctacgatgactgggcaagaagaaagatgggaaactgaataaagcagttgatcagcatcattggaacatggggacgagtgacggcaggaggaccacgaggaaataccctcaaaactaacttgtttacaacaaaataaagtattcactacca

SEQ ID NO: 602684 - DNA, 496 bp, Homo sapiens
tccgtatgcagaatgagtgaatgcttacggagaggtgggggcttggatgtcgtccagttcgtctgcaaagatgataggcacccccttcttgatgaaggtggcctggtcctcaatgggtaagcttgcccttccgcttcttgcgctagagaatcatggcaatgatgccagcaatgagcaggatggctgcgaccaccacggccggaatgactgtgtgcaggtagacatcatcctcactgctcttctcagggtccctgtcaggcacttctgtgggcggcgcctctgagggcactctcctgggtggtaccacagggataaactgtaggtgccgacaagtgccagagcccgtcacagtgatgcttgtggccttaaagtcaggctctagggcgttggagaaggcaggccgaggttaaccatcatcctcagcgatccggcggctcagcccagcgatctgctccttggggcagagcccaaaggacagtgtgttgttgcccatcca

SEQ ID NO: 602685 - DNA, 866 bp, Homo sapiens
gggagctaccgagcggtgccaggcaggtgtgtgcgtccgtcggtctttccgtacccacagcctaattattagcatcatccctctactatttttttaaccaaatcaacaacaacctatttagctgttccccaaaccttttcctccgagcccactaagaagcccgcctcctaatactaactacctgactcctacccctcacaatcatggcaagccaaggcccacttatccagtgaaccacttatcacgaaaaaaatctacctctctatactaatctccctacaaatctccttaattataaccattcacaagcacagaactaatcatatttatatcttcttcgaaacacaatttatccccacctggggtatcatcacccgatgaggcaaccagccagaagcctgaacgctggcacagtacttcctattctacaccctagataggctcccttccccttaatcatcgcacataattttacactctacaacacccttaggctcactaatacattctactatcactctcactgccaagaatatcaaatcctgagcaacaattagtatgattagttacagaatagcttttataggtaagatacctctttaggattcaatttattacttccttaagcctatgttggaagccccattgttggtcatagtaagtggcgagacatttaaaattagggggtattggataatacagcttaaatatttttaatctgaaaacatagttaccttctgaaaatcctatgggattatataaaggtcattgttggaaagactaaagggatggtactaaagcatagctcggtaagatcatacatcggaggcggagtttaagccggaatcatattggaaacaggaggc

SEQ ID NO: 602686 - DNA, 1661 bp, Homo sapiens
gatcttgtggaggagtgcacagtcaatgcctgttcaagattaatcattttccctgtgcctatgactgaggctgtttctcacatcctgcccctggtttgcctgtcccaaggatttcgtctgaagggcgggacattccccctgcctcttcgcaccacagccagagcctgccattaggaccaatgaaagcaaagtacctcatcccctcagtgactaagaatcgcagtatttaagaggtagcaggaatgggctgagagtggtgtttgctttctccaccagaagggcacactttcatctaatttggggtatcactgagctgaagacaaagagaagggggagaaaacctagcagaccaccatgtgctatgggaagtgtgcacgatgcatcggacattctctggtggggctcgccctcctgtgcatcgcggctaatattttgctttactttcccaatggggaaacaaagtatgcctccgaaaaccacctcagccgcttcgtgtggttcttttctggcatcgtaggaggtggcctgctgatgctcctgccagcatttgtcttcattgggctggaacaggatgactgctgtggctgctgtggccatgaaaactgtggcaaacgatgtgcggtaccttctggatacctccacatggtccgagtgcactgaacccaagcacattgtggaatggaatgtatctctgttttctatcctcttggctcttggtggaattgaattcatcttgtgtcttattcaagtaataaatggagtgcttggaggcatatgtggcttttgctgctctcaccaacagcaatatgactgctaaaagaaccaacccaggacagagccacaatcttcctctatttcattgtaatttatatatttcacttgtattcatttgtaaaactttgtattagtgtaacatactccccacagtctacttttacaaacgcctgtaaagactggcatcttcacaggatgtcagtgtttaaatttagtaaacttcttttttgtttgtttatttgtttttgtttttttttaaggaatgaggaaacaaaccaccctctgggggtagtttacagactgagtgacagtactcagtatatctgagataaactctataatgttttggataaaaataacattccaatcactattgtatatatgtgcatgtattttttaaattaaagatgtctagttgctttttataagaccaagaaggagaaaatccgacaacctggaaagatttttgttttcactgcttgtatgatgtttcccattcatacacctataaatctctaacaagaggccctttgaactgccttgtgttctgtgagaaacaaatatttacttagagtggaaggactgattgagaatgttccaatccaaatgaatgcatcacaacttacaatgctgctcattgttgtgagtactatgagattcaaatttttctaacatatggaaagccttttgtcctccaaagatgagtactagggatcatgtgtttaaaaaaagaaaggctacgatgactgggcaagaagaaagatgggaaactgaataaagcagttgatcagcatcattggaacatggggacgagtgacggcaggaggaccacgaggaaataccctcaaaactaacttgtttacaacaaaataaagtattcactacca

SEQ ID NO: 602687 - DNA, 273 bp, Homo sapiens
gtaccgccatatactccctcagcctctccgagtcagccgagacacaggctactcgtcaccacgcctggtcatatatttgtattcctcgtagcgaccggttttcaccactgttaaccaggatgatctcgctctcctgacctcatgatccgcccgcctcggcctcccaaagtgctggacttacaggcgtaagccacagacgctcacgccagaaagtctactatcattacctgactggttctccaaggacccgtgaacaaatctccggagataccg

SEQ ID NO: 602688 - DNA, 1187 bp, Homo sapiens
  misc_feature (17)..(18): n is a, c, g, or t
tcgactcaccggatctnnggagtagtccaatggaattgcaggatctggctactgtgtcattgtggcagcccttggcttagcagaaggaccactatgtcttgattccctcggccagtggaactacacctttgccagcaccgagggccagtaccttctggatacctccacatggtccgagtgcactgaacccaagcacattgtggaatggaatgtatctctgttttctatcctcttggctcttggtggaattgaattcatcttgtgtcttattcaagtaataaatggagtgcttggaggcatatgtggcttttgctgctctcaccaacagcaatatgactgctaaaagaaccaacccaggacagagccacaatcttcctctatttcattgtaatttatatatttcacttgtattcatttgtaaaactttgtattagtgtaacatactccccacagtctacttttacaaacgcctgtaaagactggcatcttcacaggatgtcagtgtttaaatttagtaaacttcttttttgtttgtttatttgtttttgtttttttttaaggaatgaggaaacaaaccaccctctgggggtagtttacagactgagtgacagtactcagtatatctgagataaactctataatgttttggataaaaataacattccaatcactattgtatatatgtgcatgtattttttaaattaaagatgtctagttgctttttataagaccaagaaggagaaaatccgacaacctggaaagatttttgttttcactgcttgtatgatgtttcccattcatacacctataaatctctaacaagaggccctttgaactgccttgtgttctgtgagaaacaaatatttacttagagtggaaggactgattgagaatgttccaatccaaatgaatgcatcacaacttacaatgctgctcattgttgtgagtactatgagattcaaatttttctaacatatggaaagccttttgtcctccaaagatgagtactagggatcatgtgtttaaaaaaagaaaggctacgatgactgggcaagaagaaagatgggaaactgaataaagcagttgatcagcatcattggaacatggggacgagtgacggcaggaggaccacgaggaaataccctcaaaactaacttgtttacaacaaaataaagtattcactacca

SEQ ID NO: 602689 - DNA, 1650 bp, Homo sapiens
gatcttgtggaggagtgcacagtcaatgcctgttcaagattaatcattttccctgtgcctatgactgaggctgtttctcacatcctgcccctggtttgcctgtcccaaggatttcgtctgaagggcgggacattccccctgcctcttcgcaccacagccagagcctgccattaggaccaatgaaagcaaagtacctcatcccctcagtgactaagaatcgcagtatttaagaggtagcaggaatgggctgagagtggtgtttgctttctccaccagaagggcacactttcatctaatttggggtatcactgagctgaagacaaagagaagggggagaaaacctagcagaccaccatgtgctatgggaagtgtgcacgatgcatcggacattctctggtggggctcgccctcctgtgcatcgcggctaatattttgctttactttcccaatggggaaacaaagtatgcctccgaaaaccacctcagccgcttcgtgtggttcttttctggcatcgtaggaggtggcctgctgatgctcctgccagcatttgtcttcattgggctggaacaggatgactgctgtggctgctgtggccatgaaaactgtggcaaacgatgtgcgatgctttcttctgtattggctgctctcattgcaagcacattgtggaatggaatgtatctctgttttctatcctcttggctcttggtggaattgaattcatcttgtgtcttattcaagtaataaatggagtgcttggaggcatatgtggcttttgctgctctcaccaacagcaatatgactgctaaaagaaccaacccaggacagagccacaatcttcctctatttcattgtaatttatatatttcacttgtattcatttgtaaaactttgtattagtgtaacatactccccacagtctacttttacaaacgcctgtaaagactggcatcttcacaggatgtcagtgtttaaatttagtaaacttcttttttgtttgtttatttgtttttgtttttttttaaggaatgaggaaacaaaccaccctctgggggtagtttacagactgagtgacagtactcagtatatctgagataaactctataatgttttggataaaaataacattccaatcactattgtatatatgtgcatgtattttttaaattaaagatgtctagttgctttttataagaccaagaaggagaaaatccgacaacctggaaagatttttgttttcactgcttgtatgatgtttcccattcatacacctataaatctctaacaagaggccctttgaactgccttgtgttctgtgagaaacaaatatttacttagagtggaaggactgattgagaatgttccaatccaaatgaatgcatcacaacttacaatgctgctcattgttgtgagtactatgagattcaaatttttctaacatatggaaagccttttgtcctccaaagatgagtactagggatcatgtgtttaaaaaaagaaaggctacgatgactgggcaagaagaaagatgggaaactgaataaagcagttgatcagcatcattggaacatggggacgagtgacggcaggaggaccacgaggaaataccctcaaaactaacttgtttacaacaaaataaagtattcactacca

SEQ ID NO: 602690 - DNA, 316 bp, Homo sapiens
tagcccaacacccttttggaaaggggtctcccattagaaatggggaaacccttgggggagggtggggcccctagggggattttttcctttcaggggcgagagggacagatggggaataatttgaatccgggtaaaatttctttaaacgggtttttagggcgcgggtttatggaaaaaccagggccagtttatgtttgtgggtttgggaaaaaatatttgggttgggggaaaatttgtgggggggggggtaagttggggggattttttaattttttttgggcatttgggacaggggcaaaaaatggggcccctttta

SEQ ID NO: 602691 - DNA, 864 bp, Homo sapiens
taaaatttcaatctggaatcacaaaagcgggggattctggcaaagggtccttgtgccctccccattcaatctccctgtggttctgtggctccccctgttgtgtgcgccaataagcgcctttatacctctgtgagagcacaccaaaccccaacacagagaactgtggagagacaccagagcaccccttcgcctgtgccgtggtgttcttctctcccgcaaaacccccgcttttcagcaagtaggcgcgagaggcgcacagagagcggagagacgagagagaggcggaggaggccacgagaggcccccacgtcctctacagagggcgccatccgcgcgcgagatgagagccccgtgccacccacagagtggcgacctaagaaccacccctataccacagacgacagcaggctacatttccaataactccccaccccagacacaaccacctacatatgcagctatctcaaaccaactcatcaaaatcacactgcagatcatatccatcacacacaaatcatacacaccagacgctctttacaacactatactctggtcaatcaggaacacgaaaacaagaaaaaaaacaccccaaagaccaaaaccaaacaccaaaaacacaacgacagaaaacacacaaaacaaccagagaagcacacagccacacaccgagcaacaacgcagagagacacacagatcaacgaacacacagaacaaccagcccgacgagcggccgggacggggggatagtggagcaacgagtcacaagaaagaagggcgagggcaggagaaacgaggatggagcgacgctgtcacatcgaaacacgagaacggaagaggcacgccgaggcgaacgagcgagaggag

SEQ ID NO: 602692 - DNA, 432 bp, Homo sapiens
  misc_feature (198)..(198): n is a, c, g, or t
  misc_feature (286)..(286): n is a, c, g, or t
  misc_feature (405)..(405): n is a, c, g, or t
  misc_feature (407)..(407): n is a, c, g, or t
ctgagacttgggaggagcacggggctcctgtgctaggtgagcacttgctatgtgcggatgctttgcgtaggtgcacgcatttgatcctcacagatgctgcaggaaggcaagcagcatcactgccattttgtcgtggccaagggacatgtgcgtgtccccatccagcccctgcctcgaggtttgcttggctgaccagtncccatccagctctctgctccgcaagccactgggaaacccatcagcccagccccacacagggccagcttctccggctgcccttcccaanggcgacgcctgtgactgtgtctgcctcccaacaggggtcaccacccacccacgtccacccgaaccccagcatgagggttccgcccccttcccccactgacagacacaacggggtgaacntnggagccattccttgtttccacccag

SEQ ID NO: 602693 - DNA, 105 bp, Homo sapiens
acttcagaagaagtctacatgttatatctctagccaagtaaaaagtcaaggtcacattctcgcactgccagatagcaagaacattgcttggtattgcactgggtc

SEQ ID NO: 602694 - DNA, 658 bp, Homo sapiens
  misc_feature (52)..(52): n is a, c, g, or t
  misc_feature (71)..(71): n is a, c, g, or t
  misc_feature (193)..(193): n is a, c, g, or t
  misc_feature (212)..(212): n is a, c, g, or t
  misc_feature (632)..(632): n is a, c, g, or t
gcgcttttgtgcaggaaaggccaaataggcattttatgctcttggtaatttnggctttcacaatttatctntaaatccttgagcaatctgtatactaattaagcagatttctgacatttattcttacactaaatggatcaactctaggatttaggcatgttaacttctgttgtgttttgaatctctccagagnttgcatgtagatagcattnatttctgtgcccttaaacccatttagaaaataactacaaagtaaaaatgtagaggaaatagaaatgtattttttcatgaacattttgatacaaatttcatcatttaatgattcaccaatttcttgcattaatttgaatttaagcatttaattcaaagagaggggagcatccattattgatacatgtgggcttttaaaaactccatcctttataaatagtcaaggtttgggccacacaaagtatatttttatcatggaaaaatttcaactcctcaagccgtaatgttgaacagaattggagtattttctttataatttcttgaacaggcaaatgaaagcttattatagaatgcatgtattttctttaatctttggaacatcagcaccagtatattggctggcagctattgtattaaaaaanttaaagtatattttcactatcataaa

SEQ ID NO: 602695 - DNA, 656 bp, Homo sapiens
  misc_feature (69)..(69): n is a, c, g, or t
  misc_feature (191)..(191): n is a, c, g, or t
  misc_feature (210)..(210): n is a, c, g, or t
  misc_feature (630)..(630): n is a, c, g, or t
gcaatctcttaattgtatacagattgctcaaggatttaaatccttgagcaatctgtatacatttatctntaaatccttgagcaatctgtatactaattaagcagatttctgacatttattcttacactaaatggatcaactctaggatttaggcatgttaacttctgttgtgttttgaatctctccagagnttgcatgtagatagcattnatttctgtgcccttaaacccatttagaaaataactacaaagtaaaaatgtagaggaaatagaaatgtattttttcatgaacattttgatacaaatttcatcatttaatgattcaccaatttcttgcattaatttgaatttaagcatttaattcaaagagaggggagcatccattattgatacatgtgggcttttaaaaactccatcctttataaatagtcaaggtttgggccacacaaagtatatttttatcatggaaaaatttcaactcctcaagccgtaatgttgaacagaattggagtattttctttataatttcttgaacaggcaaatgaaagcttattatagaatgcatgtattttctttaatctttggaacatcagcaccagtatattggctggcagctattgtattaaaaaanttaaagtatattttcactatcataaa

SEQ ID NO: 602696 - DNA, 1183 bp, Homo sapiens
ctatggtgcaagaatgtcccacggtgttccacgtccccggtgcctctcatggagtctcatgaaccgtgacagcagcttcaaccttgtccagcagtgatttcctgtagcctctgcggcagccatgaacctagccagagccaggacacctgccattccaacagcagtgaacctggctgacatctcgaacggccagctgcagcatgcggccaatgaacttgtgccagacccagaacagcggtggcaccttctggatgtgaacctggctgaacactcgcactcccactagccccagctgtgaacctagacagggtgccagaaccccagactgacttggcagactctgagtctcacaggctctggacacaacaccaactgctgcaaacatatccctccagctccagaacaccacaggctccagacctctggcaaacctggtgggtcctcaggtactgcaacattgaccaaagaatcctggtgaacttactagaccggtctcacaggaaccgaacgacaagcacttgggccacccgctgatgaccatacaccagatgtactaggacatggacatcacaggcaatatgatctgggctgcaaaagcatcaaccaagaacgccacggggatggcgccacatatgacatgacgctacggaagccgcttgatcaccgcaagcgcaagcaacaacatcaacacaaacacaggatccaattatgcaacacggaagaccacaatgaggaccacaagaaacgcgcaacccagcacgagacactggcaccaccagaaaggccacaaatactaagcgcagtgaaccaccattcagttgaaaacccaggtggagcatcaccccaattctacccgcaataatcgtcaccttatccattaaagaaacaaatagcagaagacacaaaagggacgatacctcgtaattacaacgacaacggagacgcgccagtatgttagaatcacaccgttactgccaaaagaacacacaacggggaaaattactacaaggaccagcgaaagagcgaacttaaatcacgacagggatttgcacagcgtatgtcacatagtgagcaatataatatagagaaagaacaaacaccacacgatagtagccgcacgtataataaaattaaggcgacttaagggcgcaccgaatgacaaatacacgaaagagcagcgcag

SEQ ID NO: 602697 - DNA, 136 bp, Homo sapiens
cacgaacatcatgaactagtcagacacttctctcatttgaaacgcaataaaggcgacaaagaaagaattcccaagtcaatgcagacaactttcctaaaactcagggtgagaaaaatagcagggctattatctcctc

SEQ ID NO: 602698 - DNA, 3947 bp, Homo sapiens
  misc_feature (452)..(452): n is a, c, g, or t
gttttgttcgcttggaaatctccctttctgcttgctcttctgtttgcggtatctacttgaaatcttaccgaagtgatgtatattcttgaaacttctgtgggtttctaagtgacacttgagcatgctccagtagctagagccggttttgttcgccagcagatggcctgattcgacctctccaaaaatagacattttaactctctgaactcctgtttaaggaaggatgtaattcgctttgctctctcctcattttcaaggttcaaagggaagctgcgaggattccaaggtcccaccgccctcacagccaatgaggggcctgggagggaggagcttggtgcagcttgagcttctgagagaatcattcccggtagatgcagcggagtctgagctctgctgcatctgtcacagcagaacaaaattaaaaacacaacagtggaagagaaacgctgcanactatgggacgctgtaggactttctaaaacatttgctggggatttctgtgaagcatgatcttttaaacgaattcttttggaagccggtttgggtaactgggaaaatgacacatatgctaaatgcagcagctgatcgagtgaaatggaccagatcgagtgctgctaagagggctgcctgcctggtggctgcggcatatgctctgaaaaccctctatcccatcattggcaagcgtttaaagcaatctggccacgggaagaaaaaagcagcagcttaccctgctgcagagaacacagaaatactgcattgcaccgagaccatttgtgaaaaaccttcgcctggagtgaatgcagatttcttcaaacagctactagaacttcggaaaattttgtttccaaaacttgtgaccactgaaacagggtggctctgcctgcactcagtggctctaatctcaagaacctttctttctatctatgtggctggtctggatggaaaaatcgtgaaaagcattgtggaaaagaagcctcggactttcatcatcaaattaatcaagtggcttatgattgccatccctgctaccttcgtcaacagtgcaataaggtacctggaatgcaaattggctttggccttcagaactcgcctagtagaccacgcctatgaaacctattttacaaatcagacttattataaagtgatcaatatggatgggaggctggcaaaccctgaccaatctcttacggaggatattatgatgttctcccaatctgtggctcacttgtattccaatctgaccaaacctattttagatgtaatgctgacctcctatacactcattcaaactgctacatccagaggagcaagcccaattgggcccaccctactagcaggacttgtggtgtatgccactgctaaagtgttaaaagcctgttctcccaaatttggcaaactggtggcagaggaagcacatagaaaaggctatttgcggtatgtgcactcgagaattatagccaatgtagaagaaattgccttttacagaggacataaggtagaaatgaaacaacttcagaaaagttacaaagctttagcagatcagatgaacctcattttatccaaacgtttgtggtacatcatgatagaacagttcctgatgaagtatgtttggagcagcagtggactaattatggtggctatacctattatcactgcaactggctttgcagatggtgaggatggccaaaagcaagttatggttagtgaacggacagaagcctttaccactgctcgaaatttactggcctctggagctgatgctattgaaaggattatgtcttcatacaaagaggtcactgaattagcaggctacactgctcgagtgtacaatatgttttgggtctttgatgaagtaaaaagaggcatttataagagaactgctgtcattcaagaatctgaaagccatagcaagaatggagctaaggtagaattacctctcagtgacacattggcaattaaaggaaaagttattgatgtggatcacggaattatttgtgaaaatgttcccataattacaccagcaggagaagtggtggcttccaggctaaacttcaaagtagaagaaggaatgcatcttttgataactggtcccaatggttgtgggaaaagttctctcttcagaattctaagtgggctctggcctgtgtatgaaggagtcctctataaaccacctcctcaacatatgttttatattccacaaaggccatatatgtctcttggaagtcttcgggatcaagtcatttaccctgattcagtggatgatatgcatgataaaggttatacagaccaagatctggaacgtatcctacacaatgtccatctctatcacatagttcaaagagaaggaggatgggatgctgttatggactggaaagatgtcctgtcaggaggggaaaagcaaagaatgggcatggctcgtatgttttatcataaaccaaaatatgccttgctggatgaatgtaccagtgctgtcagcattgatgtcgaaggaaagatatttcaggctgcaaaaggggctggaatttccttactgtctataacacacagaccttctctttggaaataccacacacatttattacagtttgatggtgaaggaggttggcgctttgaacaattggatactgctatccgtttgacattgagtgaagaaaaacaaaagctagaatctcagctagctggaattcccaaaatgcagcagagactcaatgaactatgtaaaattttgggagaagactcagtgctgaaaacaattaaaaatgaagatgagacatcttaatttgttttgacatattttaaaaagttaattattagataaaggctcaaagacattctgttatactgcatgaagtatgttaagctaagcacagagaaaaaaaggcagcaagacatgttttataagattttagcattaaggaagtatatgatctgacttttcagaagaaaataaacaaatgcattatgtaaggtcagtcattatgacttatactaattcctagtgaaggcctaatgcacttgtaaaacaggattttctaggtgaattcctgatgaataccagatttactatgtatatgtggtgtgtctgaagttcttaacaaacatgggcaatattctggaaatgaaacaagttataactgagcaccatttgggttgataccaagtgcataagattcaaactttgagtgacatttagtccatttatggttgatattaggtttaatacctagaattcaaattgattattgctagtggccaactaaacctgtacaaaatagctgacagttttataactaatttcaatataaaaattgttttaatggcatttgttgaaagaaaaaagcatggctaaaatgtatcaaatgccatatttttaaattttggactttaagcatcttaatgagggcatataacaaattaattttagtacaatcttaaatatttttaataaatcctttcattttaaaaagagaattgccaatacagaaaaggagtatccaaacaatgtctcaacctgataatttccttagcagaattacctattgcaacttctgttcagaaatacacagcttgtttttttgcccaaggatgagtctacattttaagaactgcaatggtataaaggaacttaaggattctgagaatcatagtaataacatacattggaatagtactttataatttacaatccccatttacatcatttcaccttaatgttgaggacaatgttttgaaacaaatactatttttcctactttgcttttgagaaaattgacactcagacttgccctaatcatgcactttacttaaggaaagatcgagaaatcaaatgaagttctcctgactctctggtttagtgctcttttgttattatcctttaaatcaaactgggctataatagcaataaaagttagacgaagtgtagaaaataaaataaatttcataatgtt

SEQ ID NO: 602699 - DNA, 4049 bp, Homo sapiens
  misc_feature (452)..(452): n is a, c, g, or t
  misc_feature (2481)..(2481): n is a, c, g, or t
gttttgttcgcttggaaatctccctttctgcttgctcttctgtttgcggtatctacttgaaatcttaccgaagtgatgtatattcttgaaacttctgtgggtttctaagtgacacttgagcatgctccagtagctagagccggttttgttcgccagcagatggcctgattcgacctctccaaaaatagacattttaactctctgaactcctgtttaaggaaggatgtaattcgctttgctctctcctcattttcaaggttcaaagggaagctgcgaggattccaaggtcccaccgccctcacagccaatgaggggcctgggagggaggagcttggtgcagcttgagcttctgagagaatcattcccggtagatgcagcggagtctgagctctgctgcatctgtcacagcagaacaaaattaaaaacacaacagtggaagagaaacgctgcanactatgggacgctgtaggactttctaaaacatttgctggggatttctgtgaagcatgatcttttaaacgaattcttttggaagccggtttgggtaactgggaaaatgacacatatgctaaatgcagcagctgatcgagtgaaatggaccagatcgagtgctgctaagagggctgcctgcctggtggctgcggcatatgctctgaaaaccctctatcccatcattggcaagcgtttaaagcaatctggccacgggaagaaaaaagcagcagcttaccctgctgcagagaacacagaaatactgcattgcaccgagaccatttgtgaaaaaccttcgcctggagtgaatgcagatttcttcaaacagctactagaacttcggaaaattttgtttccaaaacttgtgaccactgaaacagggtggctctgcctgcactcagtggctctaatctcaagaacctttctttctatctatgtggctggtctggatggaaaaatcgtgaaaagcattgtggaaaagaagcctcggactttcatcatcaaattaatcaagtggcttatgattgccatccctgctaccttcgtcaacagtgcaataaggtacctggaatgcaaattggctttggccttcagaactcgcctagtagaccacgcctatgaaacctattttacaaatcagacttattataaagtgatcaatatggatgggaggctggcaaaccctgaccaatctcttacggaggatattatgatgttctcccaatctgtggctcacttgtattccaatctgaccaaacctattttagatgtaatgctgacctcctatacactcattcaaactgctacatccagaggagcaagcccaattgggcccaccctactagcaggacttgtggtgtatgccactgctaaagtgttaaaagcctgttctcccaaatttggcaaactggtggcagaggaagcacatagaaaaggctatttgcggtatgtgcactcgagaattatagccaatgtagaagaaattgccttttacagaggacataaggtagaaatgaaacaacttcagaaaagttacaaagctttagcagatcagatgaacctcattttatccaaacgtttgtggtacatcatgatagaacagttcctgatgaagtatgtttggagcagcagtggactaattatggtggctatacctattatcactgcaactggctttgcagatggtgaggatggccaaaagcaagttatggttagtgaacggacagaagcctttaccactgctcgaaatttactggcctctggagctgatgctattgaaaggattatgtcttcatacaaagaggtcactgaattagcaggctacactgctcgagtgtacaatatgttttgggtctttgatgaagtaaaaagaggcatttataagagaactgctgtcattcaagaatctgaaagccatagcaagaatggagctaaggtagaattacctctcagtgacacattggcaattaaaggaaaagttattgatgtggatcacggaattatttgtgaaaatgttcccataattacaccagcaggagaagtggtggcttccaggctaaacttcaaagtagaagaaggaatgcatcttttgataactggtcccaatggttgtgggaaaagttctctcttcagaattctaagtgggctctggcctgtgtatgaaggagtcctctataaaccacctcctcaacatatgttttatattccacaaaggccatatatgtctcttggaagtcttcgggatcaagtcatttaccctgattcagtggatgatatgcatgataaaggttatacagaccaagatctggaacgtatcctacacaatgtccatctctatcacatagttcaaagagaaggaggatgggatgctgttatggactggaaagatgtcctgtcaggaggggaaaagcaaagaatgggcatggctcgtatgttttatcataagccccacctaccttttatacctttgacttgctgaaggaattgggttanttgtcccgtagaatgttgcctattctggatttacctcattgctaccttatcaggaccaaaatatgccttgctggatgaatgtaccagtgctgtcagcattgatgtcgaaggaaagatatttcaggctgcaaaaggggctggaatttccttactgtctataacacacagaccttctctttggaaataccacacacatttattacagtttgatggtgaaggaggttggcgctttgaacaattggatactgctatccgtttgacattgagtgaagaaaaacaaaagctagaatctcagctagctggaattcccaaaatgcagcagagactcaatgaactatgtaaaattttgggagaagactcagtgctgaaaacaattaaaaatgaagatgagacatcttaatttgttttgacatattttaaaaagttaattattagataaaggctcaaagacattctgttatactgcatgaagtatgttaagctaagcacagagaaaaaaaggcagcaagacatgttttataagattttagcattaaggaagtatatgatctgacttttcagaagaaaataaacaaatgcattatgtaaggtcagtcattatgacttatactaattcctagtgaaggcctaatgcacttgtaaaacaggattttctaggtgaattcctgatgaataccagatttactatgtatatgtggtgtgtctgaagttcttaacaaacatgggcaatattctggaaatgaaacaagttataactgagcaccatttgggttgataccaagtgcataagattcaaactttgagtgacatttagtccatttatggttgatattaggtttaatacctagaattcaaattgattattgctagtggccaactaaacctgtacaaaatagctgacagttttataactaatttcaatataaaaattgttttaatggcatttgttgaaagaaaaaagcatggctaaaatgtatcaaatgccatatttttaaattttggactttaagcatcttaatgagggcatataacaaattaattttagtacaatcttaaatatttttaataaatcctttcattttaaaaagagaattgccaatacagaaaaggagtatccaaacaatgtctcaacctgataatttccttagcagaattacctattgcaacttctgttcagaaatacacagcttgtttttttgcccaaggatgagtctacattttaagaactgcaatggtataaaggaacttaaggattctgagaatcatagtaataacatacattggaatagtactttataatttacaatccccatttacatcatttcaccttaatgttgaggacaatgttttgaaacaaatactatttttcctactttgcttttgagaaaattgacactcagacttgccctaatcatgcactttacttaaggaaagatcgagaaatcaaatgaagttctcctgactctctggtttagtgctcttttgttattatcctttaaatcaaactgggctataatagcaataaaagttagacgaagtgtagaaaataaaataaatttcataatgtt

SEQ ID NO: 602700 - DNA, 173 bp, Homo sapiens
acattagtgttgaaatatagaaaaatggttccatgcgctagtatttttgttgtacgctgactggaaaatgggcccaaattttttcgaggttattaaaccctgtttcgagcacatggttcgcaggttcttggtaaaacaaggcaatataacgcgaacgagtcgagtgtaagcca

SEQ ID NO: 602701 - DNA, 2977 bp, Homo sapiens
  misc_feature (452)..(452): n is a, c, g, or t
  misc_feature (2481)..(2481): n is a, c, g, or t
gttttgttcgcttggaaatctccctttctgcttgctcttctgtttgcggtatctacttgaaatcttaccgaagtgatgtatattcttgaaacttctgtgggtttctaagtgacacttgagcatgctccagtagctagagccggttttgttcgccagcagatggcctgattcgacctctccaaaaatagacattttaactctctgaactcctgtttaaggaaggatgtaattcgctttgctctctcctcattttcaaggttcaaagggaagctgcgaggattccaaggtcccaccgccctcacagccaatgaggggcctgggagggaggagcttggtgcagcttgagcttctgagagaatcattcccggtagatgcagcggagtctgagctctgctgcatctgtcacagcagaacaaaattaaaaacacaacagtggaagagaaacgctgcanactatgggacgctgtaggactttctaaaacatttgctggggatttctgtgaagcatgatcttttaaacgaattcttttggaagccggtttgggtaactgggaaaatgacacatatgctaaatgcagcagctgatcgagtgaaatggaccagatcgagtgctgctaagagggctgcctgcctggtggctgcggcatatgctctgaaaaccctctatcccatcattggcaagcgtttaaagcaatctggccacgggaagaaaaaagcagcagcttaccctgctgcagagaacacagaaatactgcattgcaccgagaccatttgtgaaaaaccttcgcctggagtgaatgcagatttcttcaaacagctactagaacttcggaaaattttgtttccaaaacttgtgaccactgaaacagggtggctctgcctgcactcagtggctctaatctcaagaacctttctttctatctatgtggctggtctggatggaaaaatcgtgaaaagcattgtggaaaagaagcctcggactttcatcatcaaattaatcaagtggcttatgattgccatccctgctaccttcgtcaacagtgcaataaggtacctggaatgcaaattggctttggccttcagaactcgcctagtagaccacgcctatgaaacctattttacaaatcagacttattataaagtgatcaatatggatgggaggctggcaaaccctgaccaatctcttacggaggatattatgatgttctcccaatctgtggctcacttgtattccaatctgaccaaacctattttagatgtaatgctgacctcctatacactcattcaaactgctacatccagaggagcaagcccaattgggcccaccctactagcaggacttgtggtgtatgccactgctaaagtgttaaaagcctgttctcccaaatttggcaaactggtggcagaggaagcacatagaaaaggctatttgcggtatgtgcactcgagaattatagccaatgtagaagaaattgccttttacagaggacataaggtagaaatgaaacaacttcagaaaagttacaaagctttagcagatcagatgaacctcattttatccaaacgtttgtggtacatcatgatagaacagttcctgatgaagtatgtttggagcagcagtggactaattatggtggctatacctattatcactgcaactggctttgcagatggtgaggatggccaaaagcaagttatggttagtgaacggacagaagcctttaccactgctcgaaatttactggcctctggagctgatgctattgaaaggattatgtcttcatacaaagaggtcactgaattagcaggctacactgctcgagtgtacaatatgttttgggtctttgatgaagtaaaaagaggcatttataagagaactgctgtcattcaagaatctgaaagccatagcaagaatggagctaaggtagaattacctctcagtgacacattggcaattaaaggaaaagttattgatgtggatcacggaattatttgtgaaaatgttcccataattacaccagcaggagaagtggtggcttccaggctaaacttcaaagtagaagaaggaatgcatcttttgataactggtcccaatggttgtgggaaaagttctctcttcagaattctaagtgggctctggcctgtgtatgaaggagtcctctataaaccacctcctcaacatatgttttatattccacaaaggccatatatgtctcttggaagtcttcgggatcaagtcatttaccctgattcagtggatgatatgcatgataaaggttatacagaccaagatctggaacgtatcctacacaatgtccatctctatcacatagttcaaagagaaggaggatgggatgctgttatggactggaaagatgtcctgtcaggaggggaaaagcaaagaatgggcatggctcgtatgttttatcataagccccacctaccttttatacctttgacttgctgaaggaattgggttanttgtcccgtagaatgttgcctattctggatttacctcattgctaccttatcaggaccaaaatatgccttgctggatgaatgtaccagtgctgtcagcattgatgtcgaaggaaagatatttcaggctgcaaaaggggctggaatttccttactgtctataacacacagaccttctctttggaaataccacacacatttattacagtttgatggtgaaggaggttggcgctttgaacaattggatactgctatccgtttgacattgagtgaagaaaaacaaaagctagaatctcagctagctggaattcccaaaatgcagcagagactcaatgaactatgtaaaattttgggagaagactcagtgctgaaaacaattaaaaatgaagatgagacatcttaatttgttttgacatattttaaaaagttaattcatcagcacgcagggcctctgccaaatcacccaacaacgatgaccagccgccgcccactgtcgccc

SEQ ID NO: 602702 - DNA, 629 bp, Homo sapiens
  misc_feature (115)..(116): n is a, c, g, or t
tcctttccgggagacttagtgtgttattccggaagttggatccaatgtgtttattttacgatgcatttgggcaggaatatgccttgggaggaattgaaactagatgttccttatnnttgtttgtctactttgtgactcagtgcctttactacaataatcatgacggagatcagcaagatctggttactatcttaatatgatacctacagagctctcggaatcccaaggctttatgaaacatcaaaatgtgaaaaggatgatgaaggcttcactaagtagtgaaaatatttatacattaccacaaagtcaattgacactcaaattaaaacaactatttgccgggcgtggtggctcacattgtaatcccagtacttgggaaggccaaagcgggtggatcacctgagatcaggagtttgagaccagcctggccaatatggcgaaaccccatctgtactaaaaacataaaaaattagccgagtgttgtggcatgcacttgtagtcccagctactcaggtggctgaggcatgagaattacttgaacccaggaggcggaggttgtggtgagctgaaattgcgccactgccctctagcatgggtgccagagtgagactctgtctcaaaaacaatta

SEQ ID NO: 602703 - DNA, 165 bp, Homo sapiens
tacgtgattatagaggatccctgtgatggttcgtgttgtaggtggatgtggacttgatgagttcttagtgaaaaatgatccttgcagtgccaaaggaaggagaaacatggaactgcgtgagaagttcattttagcatgatggtgccagccagggttatggctgct

SEQ ID NO: 602704 - DNA, 205 bp, Homo sapiens
atgtttgatttttttttattatttcataagaaaactccgttaattttcccttcctttccttgtaaataagcctgtcttcccatctggattttttgtgggcatacatattctcctgattaactacttttccagttttaatcctgtattatttcttctcctttgttttgtgtaaaaggggaaaaaaataaaaaaagctggattctta

SEQ ID NO: 602705 - DNA, 640 bp, Homo sapiens
gcggagtacatagcccccgaggtgatcttccgccaggctatgggaagccagtggactggtgggcgcatgggcgtcgtcctctatgagtttctaggtgggctgcgtgcctttctttggagatacccccgaggaactcttcggtcaggtggtcagcgatagatgatcatgtggccatgagggagatgagtgcccttccagcagacgcccatgacctcatcatcatggttgctccggcatagcccgctggaccgtctgggcactggtggtgcactcacgaggtgaagcagctacccctttttgctggcctggactgggctagggcttctccgacacaaagccgagttcgtgcgccaggtcgaagccgaggattgataccagctactttgacgcacgtacggaaggttaccgacatctggtgctccgagggtacgaggagaccaatgatcgaacgaatcgtccacatgatgatcccccagttctcctcctgctcccaccggttcaggcaaggtctacaggcatgttctgagttcctggcactgtccagcccattcctaccttcgctgaaaggagcttccagtgaaagaccgggaggaggggtgggaccggcgagcgaggtgggcctaatggcgtgggtagattg

SEQ ID NO: 602706 - DNA, 417 bp, Homo sapiens
  misc_feature (410)..(410): n is a, c, g, or t
  misc_feature (413)..(413): n is a, c, g, or t
gagatggagtctggctctgtcgcccagcctggagtgcggtggtgtgatcttggctcactgcaagctccacttcctgggttcacgccattctcctgcctcagcctcccaagtagctgggactataggcacctgccaccatgctcagctaattttttgtatttttgtagagaggaagtttcactgtgttagccgggatgatctcaatctcctgacctcatgatccacccgtctcagcctcccagagtgctgcgattataggcatgagccactctgcacagcctagacttcaagcttttagaatagcgtatctctctctctctctctctctctctctctttctctgcccccctcccctccctttttgtataatttaataaagaaatggtcgcgcttctgtttttaaaaaaatnttnatcc

SEQ ID NO: 602707 - DNA, 758 bp, Homo sapiens
  misc_feature (36)..(36): n is a, c, g, or t
  misc_feature (159)..(159): n is a, c, g, or t
  misc_feature (172)..(172): n is a, c, g, or t
  misc_feature (176)..(176): n is a, c, g, or t
  misc_feature (180)..(180): n is a, c, g, or t
  misc_feature (204)..(205): n is a, c, g, or t
  misc_feature (208)..(208): n is a, c, g, or t
  misc_feature (221)..(221): n is a, c, g, or t
  misc_feature (228)..(228): n is a, c, g, or t
  misc_feature (232)..(233): n is a, c, g, or t
  misc_feature (236)..(236): n is a, c, g, or t
  misc_feature (241)..(241): n is a, c, g, or t
  misc_feature (245)..(246): n is a, c, g, or t
  misc_feature (248)..(248): n is a, c, g, or t
  misc_feature (277)..(277): n is a, c, g, or t
  misc_feature (284)..(284): n is a, c, g, or t
  misc_feature (296)..(296): n is a, c, g, or t
  misc_feature (314)..(314): n is a, c, g, or t
  misc_feature (324)..(324): n is a, c, g, or t
  misc_feature (337)..(337): n is a, c, g, or t
  misc_feature (339)..(339): n is a, c, g, or t
  misc_feature (343)..(343): n is a, c, g, or t
  misc_feature (353)..(353): n is a, c, g, or t
  misc_feature (355)..(355): n is a, c, g, or t
  misc_feature (365)..(365): n is a, c, g, or t
  misc_feature (368)..(369): n is a, c, g, or t
  misc_feature (376)..(376): n is a, c, g, or t
  misc_feature (394)..(394): n is a, c, g, or t
  misc_feature (398)..(399): n is a, c, g, or t
  misc_feature (404)..(404): n is a, c, g, or t
  misc_feature (406)..(406): n is a, c, g, or t
  misc_feature (413)..(413): n is a, c, g, or t
  misc_feature (420)..(420): n is a, c, g, or t
  misc_feature (426)..(428): n is a, c, g, or t
  misc_feature (450)..(451): n is a, c, g, or t
  misc_feature (473)..(473): n is a, c, g, or t
  misc_feature (478)..(478): n is a, c, g, or t
  misc_feature (509)..(510): n is a, c, g, or t
  misc_feature (518)..(518): n is a, c, g, or t
  misc_feature (547)..(547): n is a, c, g, or t
  misc_feature (555)..(555): n is a, c, g, or t
  misc_feature (562)..(562): n is a, c, g, or t
agcgggaactgtgtaggggtagattttcgctgcagntgttccccgagcctgttagacgcagcgcgccgggagactgagagaggaaaggatagaggaagtgctgccctaggctgcatgagtcgaagcaagcgtgtttccttcccgccaggcaagtgcccnttagaaaccgggncccngacncacttcctggcctgcattcccatnnccntctcccggggcgnaggtgangacnntcnttggnttcnntntggttctgtcagtgagccccttccttggncatgaanctcgtgaggaanaacatcgagaaggacaantgcgggccangtgaccctggtcncncganggagcctgangnacatgtggcncannttacaanctcgtgcaggtgggcganagcnntgcgncncctccancatccgnaaggtnnnagacagagtcctccacgggcanncgtgggcagcaaccgggtccgnactancctcactctctgcgtggaggccatcgacttnngactctcnagcctgcagctgcgggttgaggggaccancatccaangacgaantgagtatggtcgaatgatgggggggctgtagcgacaccatcgtagcttggagcccattcgtcacgtttcaccgtgggtcaacgaaagcaggtgggatatttgttggtacttggaagccatcaggcagggctggtaccaacctggagggttaatttggggtggggcttgccggaggctgccattttggtgtcccccg

SEQ ID NO: 602708 - DNA, 319 bp, Homo sapiens
  misc_feature (54)..(54): n is a, c, g, or t
  misc_feature (63)..(63): n is a, c, g, or t
  misc_feature (96)..(96): n is a, c, g, or t
  misc_feature (134)..(134): n is a, c, g, or t
  misc_feature (156)..(156): n is a, c, g, or t
  misc_feature (177)..(177): n is a, c, g, or t
  misc_feature (217)..(217): n is a, c, g, or t
  misc_feature (312)..(312): n is a, c, g, or t
  misc_feature (315)..(315): n is a, c, g, or t
aggctggggttgggagcctctctgggcctggaggtgggggtgggggcagccaantccagccantcttcacctggctcccttgtctgggcctgcacnagagctgccaccctcttctttctccccagccttctcanttccgcctctccagaaactggncctccaccctcactctgccantgtccacctcctgacctgtccatctgagatctccagctgnccccaattggcctctctctctttctctgcccccctcccctccctttttgtataatttaataaagaaatggtcgcgcttctgtttttaaaaaaatnttnatcc

SEQ ID NO: 602709 - DNA, 382 bp, Homo sapiens
agagtatccccgccctgtctctgcttccccgatgagaacttcaaactgaagcacatacgggcctggctggtgttgagcatggccgacgcattgctaagacaccaacggctcccagtttcttcatcacgtacagtcaagacagcctggctatattgtcagcatgtggtgtttggcaaagttctagagggcatggaggtagtgcggaaggtggagagcaccccgacagacagtccgggataaaccccttaaggatgttactcttcgcagactgctgcaagatcgaggtggagaagccctacacgatacacagacatcatgcaggttcctttgcagaaacaaagtcagggttcttcaagtcacatagggaagcgcagaggagatg

SEQ ID NO: 602710 - DNA, 167 bp, Homo sapiens
cgatccctgttgtcgaaaaacaacggcatgatccttcctggtcatcccttctccaatagcagaacttcattcaccgtggataataagggcagcacatatgataggtggatagatctcgtttgtttgtgcattctgtctgtccactatgaatctcgcccctctgatat

SEQ ID NO: 602711 - DNA, 1399 bp, Homo sapiens
taaaaggtggcttcttttaaatggaaacaaacccaaaaaatgtccagccaggctccaagtgtgtgtgtgcagttccacaaagcctgtgggaggaaacacagacacagaacacgcacaagcgttctcgaggacacagtctcagaagtttacacccaagacacgaaggctgtggaacttgtgcccgccgaggggggaattttcttctcgtggggagagtggcaacgtgggcgccggggcgcccaccggggctgtggcgccacagaggcgcgcagaagagcgcacacggggcttcttctcttctccactctctgtgcgcccagagagcgtgtgcctgtgagcacagagatcttgtgtgtgtctcccaccaatttttcacgatgatgagaatatatctcacaccttctctctcacctttctcgagagatctctataagagagagatgtctctccgcggagagcacttgagcgcattctccgagagagaagagagtatctccctatctctctctgtcgcagagtctcaccagagagtgtgacactctccacagagagtcgtcttttctccccgctgtgtcacacacacacactatagaagacactgttgtggcgacaaccccctggtggcgtggtgacccgttgtgcgggcccccccccccagaagagaagagcacctccttgactgagaaattgttactctcctcatcagcaggggttgttggtagtcccacaccagaagagggaaaacctgatctctagcaggacgaagagggccaccaacatcataatgctcggcggaggtatcatcttttacatccttcacacacaggacgagggtgtcggggagctcctccaggtggcgctggagacgaagttctcccacatctcccgcaacaacagcagcctcctcatcacacggcggacgaacaaccacaactagctgcgggcggacaattccccccgcaacaccaacaacccgctggtggcggaacgacagacggcccccgccgacagagaaaacaaagaaggaagcttgcttcccgggggggagagaacgcgccgcctaataaataatcccacccgcctagttgggcggccagataggtcgaatcgacggaagggcagacggatcatctcgaagaaaagccaatccattccccccccccccttcttttgcttgaacaaacagccggcacgtatgaattgacgcgaagcaggaagaaaactcagaaggaagagaagagcgcaaaccaacaaagagtggtacggcacggcgcaccccccccccatgaacatgacggcacgatcaaccagcccaccaacgaaaagcagagccggacaacaacacacgcgacgggccctaacattgggctcgttcacacccctcccctccgagtggagt

SEQ ID NO: 602712 - DNA, 225 bp, Homo sapiens
ccggaaatagaatgatcagtactgggcgggtagacctaggattgtgggggcaatgaatgaagcgaacagagacaacatagtgacatagtgagatcccatttctacacaaaagaaaaaaaaaatcccattttacaattaaccttcattagtctttcttcatggttatgaaaagcagtggtcctaccttattttagcgttttttttattaccttcatagatgctaat

SEQ ID NO: 602713 - DNA, 1080 bp, Homo sapiens
tgtacagttacccagcacgtgtacctcctcctcctcctatgctcgggctgtagtgccctcgaaacgtcagcgtgtatcaggaaacacttcacgaaggggcaaaagtggcttcaattctaagagtggacagcggggatcttccaagtctggacagttgacaaggagatgaccttcaggccattaacgaaggagctgacccagataaaacaaaccagtggattctctcctggaaaacctggaaaaaattgaaaaggaacagagcaaacaagcagtagagatgacgaatgactaagtcacgaacgaggagcagagcagcagctccgtgcaagacacacgatgagcactaatgtgaacgactggagtctgacgggcgggtgcagatgactctgctgaggagggggacctacctggatgatgactgactacactgaaagatcggggggatgaccagctggagtttcgatcaaggcactgcactgaaacaagaggctgagcgaaggagagtattgacagagacagcgccaatggcccaggcactgactcttaaagcacaatagtggccgtctagcaaatcttatcccattattccctttacctagagcacttgttctacagatcaaatttctcaccagtatcctctccccatagtatcttcagcagaatgctcactgttctcacccatccttgttccttcccatgtccattaacctccttattggccccggcgccctcagttccccatttccactttcgcattttgacgctcctaagtaggtaacggatacagtctagaaccctgtaacctcttcggctcttcacagcctcggacacccccccttttactcgaacccttaacaccacttaccaaacgcgaatctactcaccgacctactatccccatcacaaggtcacacccacgcacacaaaccaccctgagtatacatacacaccacactaccatcgcccatatccctcactatccaatacacttcataccacaatccttcttccatcacccaacacctcacaataaagcaacatatctccgtaatacccaaaacctacctcttatacaatccc

SEQ ID NO: 602714 - DNA, 975 bp, Homo sapiens
tgccacggtaaaatacagggcttgaaggtcgctttgccggtgtcactcactgtatccggtgtactgaagtcacatcaggcgtaacagtaattacgcggagagatgtaaagtgaaatatttctttatgggcattcttttatggtcatcgttggagccggtactttgccctgatgatctaaaagcaaactgtgcacatgaaaaacaggagccatcaggctcctgtattgcatttctgacgaacggtgtttattccgcgtttacgtgacatatgtttgctgctggtgggtagtaaaaccgttcggcacagggaaatcgtttaatccctctgatggcctgacgaatacggtcgcggttatcaatcagtgcaaagagaacatgcgtatcaccatagtcgcaaagccaatccccggggagagtaaaaacctatcggaatcggacaacggagcttctggcacatatcccagagaatccacatggccgacatatggttccgggcagatatcgccaagaacaaacatcgaaggcctacggtatctcaaaacaatccagcccgcttcatgcaaggccctattaaaccaaaacatcacgaggagggcaagactgtccggcacatgtgcgcgcacgcacggagaatggcctccagacgcgaaatcgaagacaaccagcacagggaacagaggccgtatcgctactagctactaaatacgagccaggtgcctgacaagaacttggtgcaaaccaaaaagcgaatacgcacgaccgcaagtgagtaatgaaaggaaaaactcacggcaacggagcccggtctgcatagaaaggaaaaaaacgaaaaagaaaaacggagaacaaaaaacagaaaacaccaccacaccacagacaaaacgagagaaaaaacatacaaacacaaacaaaaggaaagacacaaccaacacgaacaagacaaacagcaaacacacacaacaacacaaacacaca

SEQ ID NO: 602715 - DNA, 1951 bp, Homo sapiens
  misc_feature (11)..(11): n is a, c, g, or t
  misc_feature (69)..(69): n is a, c, g, or t
  misc_feature (675)..(675): n is a, c, g, or t
  misc_feature (696)..(696): n is a, c, g, or t
  misc_feature (1804)..(1804): n is a, c, g, or t
  misc_feature (1950)..(1951): n is a, c, g, or t
cgcatctgacntccagggagattcagggaggcaaggtatgggaaaagattggggacacctattaccctntaatatgacttgatactcaaattactcgactggttcagtacataaggtagttgtatagcaccaatagcgaccgagacagactcaaaactggacatggtggtaacacactatgcgaaatgatcttctatacttaccatcttcgacttagagggtctggtggctatagcacattcatcgcgagcttacttcgttacatatctgagacactgagtgttacgcatctgaactccgagaagaacagagatagaacacaccgtgagtggagcccgagactgatgcgtcttacctcatagtatgtgtgcctcgctagatgattccacagacatggttactcctatgttttggcacatagagtgcgcaaaggggggtgaggcactcgcacaatatgttttgcattctcgaattcttatatacttgacttgattgccgggttgtcaccggggcaggtgttgtgtcttacacaagtgtcacagttgtccattgtgagggggaacatagattgcagtcaccctctggagaggtcaatacttgccggacgtataagagataaactgcttcatatgtcaccctgagtgcgcgagcgtgtgcacacttgacagtgggagncatgacctacattgcagcgcnaagactggcgaagtcttgtcaatatgggcggtgtcatccgagcttcacacttacttacaccaaactcgtttgtccatggaagtcgctacacctacctgcgagtggtttacatactcttaaagtcagcgcaatgtattagcctattcgcgttagtttgggagaaggaaccgaggctggggaacccaagacggagcagttgtaaaggcactgggaccgttatccatccccatatggttccctctgcgggagcagaacacaaatatgataatacaaaaaagaaaagaccccgccctttcttttaaatttcccccccaaacggggaatttaacaaaaaagggcacccgaaaagttaattacacgggggttaacctttttggcaactgcgggcccccttagtggggaaaattaaccaaccacagtgaaaccttggggcccaaggcacacaacgttttaacccaggaatttggcagccatttggttattttgccaactggaaagaccacggtaacgcggggaatacaaaagtaccgccgggaaaggaacaatttccccactttgtgaacgggaatattgttattctccacatatccagaagcagtccgcatagaatgagtagagaatatatatcgattataacgcttcatttttcaaaaaattggtcgccccccccagcacagttggttggtaagagggggcgcgcgggaaaatggaagcaccgccattgttatatgccagtgtgctagacaagcctctggaatagcacacgaggtgtgtgtgtgtaagcccaccacgaaacaagagcgcccacgtcattggtggtagtacctcaggtagcacacggcccctaacttatagagcgagaaagagcacgaaagtgtggggcaccaccaaatgacgtgtcagccggggaacacccagggtagaagaaacagacaaaaatatcgggaaaagggacgcacgccaggaggtacgcaaatgatagagcacgattgatcgaagagacgacaactcgagtagaaggtagcagaaagacacaagcgagtagaaacaccaagaatcctacatagaaaagaagcgacaacaatctatactatcagttggacataanagacagcagaagaagagtggaataatacgtaacgactccgcgtagtaactaactgaggacacacagaggtgagagtaggaagtataacagacagacgaaggatgagcgaaagagacaaaagtacaaaatagccgtatataattcann

SEQ ID NO: 602716 - DNA, 369 bp, Homo sapiens
cagagacgctccctcacttcgtagatgggatcgcggccgggaagaggcgctcctcacttcctaggtgggatggcggccgggcagagacgctcctcactttccagactgggcagccaggcagaggggctcctcacatcccagacgatgggcggtcaggcagagacgctcctcacttcccagacggggtggcggccgggcagaggctgcaatctcggcactttgggaggccaaggcaggcggctgggaggtggaggttgtagcgagccgagatcacgccactgcactccagcctgggcaccattgagcactgagttaacgagactctgtctgcaatcccggcacctcgggaggctgaggctggtggatcac

SEQ ID NO: 602717 - DNA, 1227 bp, Homo sapiens
gatcttgtggaggagtgcacagtcaatgcctgttcaagattaatcattttccctgtgcctatgactgaggctgtttctcacatcctgcccctggtttgcctgtcccaaggatttcgtctgaagggcgggacattccccctgcctcttcgcaccacagccagagcctgccattaggaccaatgaaagcaaagtacctcatcccctcagtgactaagaatcgcagtatttaagaggtagcaggaatgggctgagagtggtgtttgctttctccaccagaagggcacactttcatctaatttggggtatcactgagctgaagacaaagagaagggggagaaaacctagcagaccaccatgtgctatgggaagtgtgcacgatgcatcggacattctctggtggggctcgccctcctgtgcatcgcggctaatattttgctttactttcccaatggggaaacaaagtatgcctccgaaaaccacctcagccgcttcgtgtggttcttttctggcatcgtaggaggtggcctgctgatgctcctgccagcatttgtcttcattgggctggaacaggatgactgctgtggctgctgtggccatgaaaactgtggcaaacgatgtgcgatgctttcttctgtattggctgctctcattggaattgcaggatctggctactgtgtcattgtggcagcccttggcttagcagaaggaccactatgtcttgattccctcggccagtggaactacacctttgccagcaccgagggccagtaccttctggatacctccacatggtccgagtgcactgaacccaagcacattgtggaatggaatgtatctctgttttctatcctcttggctcttggtggaattgaattcatcttgtgtcttattcaagtaataaatggagtgcttggaggcatatgtggcttttgctgctctcaccaacagcaatatgactgctaaaagaaccaacccaggacagagccacaatcttcctctatttcattgtaatttatatatttcacttgtattcatttgtaaaactttgtattagtgtaacatactccccacagtctacttttacaaacgcctgtaaagactggcatcttcacaggatgtcagtgtttaaatttagtaaacttcttttttgtttgtttatttgtttttgtttttttttaagaatgaggaaacaaaccaccctcaccctatgcataaattttcgtcccc

SEQ ID NO: 602718 - DNA, 114 bp, Homo sapiens
tggtcagactcaagctctatcatgagtagctcctgcacattctccagcctcctttcctgctcttaccctgagttgtttttaggtccttgaacctgccacattctctcccatcgc

SEQ ID NO: 602719 - DNA, 495 bp, Homo sapiens
tcacttacgtctgaacacctcaaaatcatccatgagaatgggaattaacttcctccaaactcctgtaaatgttgttagtttgacctcctcccatgaatcaagaatgttcttcattggcatctaggatggtgcatcctttccagaaagttctcaatttactttgctcagatccaagagaggaataattatttctggcagctacagcctttagaagtgtatttcttaaagaataagacttgaaagttgaaattactccttgatccacgggctgcagaagggatgctgtgtttccagacatgaaagcaacattgatctcctcgtacatcttcatcagagctcttgggtaaacaggtgaattggtcaatgagcagtagtattttgaaaggaatgtttttctcagtagcaggcttcaacaatgggtttaaaatattcagcaaaccatgctactaacagatgtactatcaactacggggttcaaggtgatcttctgcacga

SEQ ID NO: 602720 - DNA, 1229 bp, Homo sapiens
gatcttgtggaggagtgcacagtcaatgcctgttcaagattaatcattttccctgtgcctatgactgaggctgtttctcacatcctgcccctggtttgcctgtcccaaggatttcgtctgaagggcgggacattccccctgcctcttcgcaccacagccagagcctgccattaggaccaatgaaagcaaagtacctcatcccctcagtgactaagaatcgcagtatttaagaggtagcaggaatgggctgagagtggtgtttgctttctccaccagaagggcacactttcatctaatttggggtatcactgagctgaagacaaagagaagggggagaaaacctagcagaccaccatgtgctatgggaagtgtgcacgatgcatcggacattctctggtggggctcgccctcctgtgcatcgcggctaatattttgctttactttcccaatggggaaacaaagtatgcctccgaaaaccacctcagccgcttcgtgtggttcttttctggcatcgtaggaggtggcctgctgatgctcctgccagcatttgtcttcattgggctggaacaggatgactgctgtggctgctgtggccatgaaaactgtggcaaacgatgtgcgatgctttcttctgtattggctgctctcattggaattgcaggatctggctactgtgtcattgtggcagcccttggcttagcagaaggaccactatgtcttgattccctcggccagtggaactacacctttgccagcaccgagggccagtaccttctggatacctccacatggtccgagtgcactgaacccaagcacattgtggaatggaatgtatctctgttttctatcctcttggctcttggtggaattgaattcatcttgtgtcttattcaagtaataaatggagtgcttggaggcatatgtggcttttgctgctctcaccaacagcaatatgactgctaaaagaaccaacccaggacagagccacaatcttcctctatttcattgtaatttatatatttcacttgtattcatttgtaaaactttgtattagtgtaacatactccccacagtctacttttacaaacgcctgtaaagactggcatcttcacaggatgtcagtgtttaaatttagtaaacttcttttttgtttgtttatttgtttttgttttttttttaaggaatgaggaaacaaaaacaaataaacaaacgaaaaagaagtttactaa

SEQ ID NO: 602721 - DNA, 214 bp, Homo sapiens
gttcagaaaaaatggtaataaactcgggcaggtgtggtggcttacaccggtaatcctagcacttggggaggctgaggcaagtggatggcctgagctcaggagtggacgaccagccggggcaacatagtgaaaccctatctctacaaaaaatacaaaaattagccaggcatgatggcacgcgccggtaatcccagcacttaatagactcgggggc

SEQ ID NO: 602722 - DNA, 104 bp, Homo sapiens
tcccctacctacactgccctgaaatgctgtcacctgggttactgacggactgggtagcttagttgagtagataatcttttgttgtttcctccttgtaatataca

SEQ ID NO: 602723 - DNA, 2515 bp, Homo sapiens
ttagctgtcagtaacaagcttcctcgagtctcacagtcacaggattgtcttagttctttgcagttggctctatgtacacaagaacatgctgcccatagacacagcgctcccttcaggatctaattcactgcctctgctctcgctgcagagacagaaaaaaaagtgatgtctgctctttgtttgctgttatattcccaactagtatacataagtaatagccaaccattcaatgcatcaggcactatgctaaacccatatgactcaaatattaagcaataggcttaagatcacctactcaggaaataacaggcttcaaaccttgagtcgctctgtgcaaaagctcctacttttaacctgtattccacacttgctgtttggttggattttctgcaattccttcctaataaggagtcataaaaatgcctaagcagtaagtatggagaatcactagcaatctttgaacagcagctcatgaaaagcctttcgttgtgaaagaaaaccaggaagcacttgtttcctggggatatgatttaggagaaaaaaatgcatttgtttgtagcagtgaaagttcttgtttctatatcctcctaaaatatatatattattgaattaatgaaagtccagctttgatcctatctttgagagggttattttatgtcttatatttttcaaaccatttactcctctggtgccagatctgttaactttcttttaaaaataagacaaaaacctaatgaaaactgaaagcccattgctaccatgaaaaactttgctgaaaataaaaggaaactttctgtaattttgggggaaggttaaaatgaaaatctagttttccttatcaggcaagtatagcaagattaataatttctttggcaaatttccaagaaaataagggaatgggaaaccttcaatatggagcttctttcaagcagtacggttggggaagggcagagaagtatcctctagggattgctgtcatgcagcttacctttagccttgaatttcatacaaggcagagttcaaagtaagtgattacttgtactaaatgtactcacttagtacgttttggggacaggcataaagagccagtgaccaaaatggctgaagtgatttggcagggaatgatactctcctctgatttggggtagtaaatacaccaggtttcccagctgagtcactgtagggatggcttcttcccagatactacagggaagatctgttacctttgtttataagacaaaagacactttcaaagggcaggccttttcatgtagaagagtcaggtccataactcggtagcatttaatttgaaaggttacccacattgagctcataccagtgtgaaacttccatggcattatcttttaaatccctaagattaaaaccccacacaaatgcactcaaagcaacccaacatcagtatcctgcagtttctatgggccctttctgcagcctttactcatggaagacaagggatctgggtttgtttaggaaacattttgtgagcattgtccaagccctaagtatggttggcctaagctttgctgaagctaagatcagtctgtttatgtttgcttaaaataggaacttaaaggactaaaatgtcatcgttatttatcctgattatagcctaatggtattttattttctctacagcaatatgactgctaaaagaaccaacccaggacagagccacaatcttcctctatttcattgtaatttatatatttcacttgtattcatttgtaaaactttgtattagtgtaacatactccccacagtctacttttacaaacgcctgtaaagactggcatcttcacaggatgtcagtgtttaaatttagtaaacttcttttttgtttgtttatttgtttttgtttttttttaaggaatgaggaaacaaaccaccctctgggggtagtttacagactgagtgacagtactcagtatatctgagataaactctataatgttttggataaaaataacattccaatcactattgtatatatgtgcatgtattttttaaattaaagatgtctagttgctttttataagaccaagaaggagaaaatccgacaacctggaaagatttttgttttcactgcttgtatgatgtttcccattcatacacctataaatctctaacaagaggccctttgaactgccttgtgttctgtgagaaacaaatatttacttagagtggaaggactgattgagaatgttccaatccaaatgaatgcatcacaacttacaatgctgctcattgttgtgagtactatgagattcaaatttttctaacatatggaaagccttttgtcctccaaagatgagtactagggatcatgtgtttaaaaaaagaaaggctacgatgactgggcaagaagaaagatgggaaactgaataaagcagttgatcagcatcattggaacatggggacgagtgacggcaggaggaccacgaggaaataccctcaaaactaacttgtttacaacaaaataaagtattcactacca

SEQ ID NO: 602724 - DNA, 249 bp, Homo sapiens
ttagaggatccccagtctctcctagcctgaacgaaccaatatacatcttccatgtattgattgatgccttatgtctccctaaaatatgtcacaccaagttgttacccaaccactttgggcccatgttctcaggatctcctaaatgctgtgtcatgggccattggccactcatatttggctcagaataaatctcttcaaatattttacatagtataactctttttcattgacagagacttactagttcct

SEQ ID NO: 602725 - DNA, 1448 bp, Homo sapiens
gatcttgtggaggagtgcacagtcaatgcctgttcaagattaatcattttccctgtgcctatgactgaggctgtttctcacatcctgcccctggtttgcctgtcccaaggatttcgtctgaagggcgggacattccccctgcctcttcgcaccacagccagagcctgccattaggaccaatgaaagcaaagtacctcatcccctcagtgactaagaatcgcagtatttaagaggtagcaggaatgggctgagagtggtgtttgctttctccaccagaagggcacactttcatctaatttggggtatcactgagctgaagacaaagagaagggggagaaaacccaagcacattgtggaatggaatgtatctctgttttctatcctcttggctcttggtggaattgaattcatcttgtgtcttattcaagtaataaatggagtgcttggaggcatatgtggcttttgctgctctcaccaacagcaatatgactgctaaaagaaccaacccaggacagagccacaatcttcctctatttcattgtaatttatatatttcacttgtattcatttgtaaaactttgtattagtgtaacatactccccacagtctacttttacaaacgcctgtaaagactggcatcttcacaggatgtcagtgtttaaatttagtaaacttcttttttgtttgtttatttgtgtaacatactccccacagtctacttttacaaacgcctgtaaagactggcatcttcacaggatgtcagtgtttaaatttagtaaacttcttttttgtttgtttatttgtttttgtttttttttaaggaatgaggaaacaaaccaccctctgggggtagtttacagactgagtgacagtactcagtatatctgagataaactctataatgttttggataaaaataacattccaatcactattgtatatatgtgcatgtattttttaaattaaagatgtctagttgctttttataagaccaagaaggagaaaatccgacaacctggaaagatttttgttttcactgcttgtatgatgtttcccattcatacacctataaatctctaacaagaggccctttgaactgccttgtgttctgtgagaaacaaatatttacttagagtggaaggactgattgagaatgttccaatccaaatgaatgcatcacaacttacaatgctgctcattgttgtgagtactatgagattcaaatttttctaacatatggaaagccttttgtcctccaaagatgagtactagggatcatgtgtttaaaaaaagaaaggctacgatgactgggcaagaagaaagatgggaaactgaataaagcagttgatcagcatcattggaacatggggacgagtgacggcaggaggaccacgaggaaataccctcaaaactaacttgtttacaacaaaataaagtattcactacca

SEQ ID NO: 602726 - DNA, 158 bp, Homo sapiens
  misc_feature (135)..(135): n is a, c, g, or t
cgatgcatgatacgcctcgcgctcgagtccctccggaccgtagcgcagccttaccacaccgccggcgcgtgctgaacgcctggaccacgactactggcgctaacacgcgcctgacgcggcagacttgcgacgacnactcacccggggactcctctacg

SEQ ID NO: 602727 - DNA, 245 bp, Homo sapiens
cccacttgttgaaaaggtcaagccctttttgggtaatccatctgcatttgtgactgctgcccctgtggttggtgccaccacagatggtcctgctggtgatgcaaccccaggtaaggttgaatccaaggaagaatcggaggagtcggacgaggatatgggatttggtttctttgattattcaccaaaaagcaaccaacttagccagttttatttgcaaaacaaggaaataaaggcttagttcttta

SEQ ID NO: 602728 - DNA, 205 bp, Homo sapiens
atcactgctttgaaccccatctggcacataagcagaataggcacgtacatctacatggagggaaaaaaaacccacctggtttaccaagacagttgtgggtcctgcaactggcgggggtaggaaagaaaataaaaaggcttttctatttccacttaatgagatttaaataaaacaacaatttccggttgcttttttaatttgtttt

SEQ ID NO: 602729 - DNA, 1150 bp, Homo sapiens
  misc_feature (1003)..(1004): n is a, c, g, or t
  misc_feature (1013)..(1013): n is a, c, g, or t
  misc_feature (1019)..(1019): n is a, c, g, or t
  misc_feature (1021)..(1021): n is a, c, g, or t
  misc_feature (1027)..(1027): n is a, c, g, or t
  misc_feature (1030)..(1030): n is a, c, g, or t
  misc_feature (1042)..(1042): n is a, c, g, or t
  misc_feature (1048)..(1048): n is a, c, g, or t
  misc_feature (1050)..(1050): n is a, c, g, or t
  misc_feature (1060)..(1060): n is a, c, g, or t
  misc_feature (1063)..(1063): n is a, c, g, or t
  misc_feature (1075)..(1077): n is a, c, g, or t
  misc_feature (1080)..(1081): n is a, c, g, or t
  misc_feature (1092)..(1092): n is a, c, g, or t
gatcttgtggaggagtgcacagtcaatgcctgttcaagattaatcattttccctgtgcctatgactgaggctgtttctcacatcctgcccctggtttgcctgtcccaaggatttcgtctgaagggcgggacattccccctgcctcttcgcaccacagccagagcctgccattaggaccaatgaaagcaaagtacctcatcccctcagtgactaagaatcgcagtatttaagaggtagcaggaatgggctgagagtggtgtttgctttctccaccagaagggcacactttcatctaatttggggtatcactgagctgaagacaaagagaagggggagaaaacctagcagaccaccatgtgctatgggaagtgtgcacgatgcatcggacattctctggtggggctcgccctcctgtgcatcgcggctaatattttgctttactttcccaatggggaaacaaagtatgcctccgaaaaccacctcagccgcttcgtgtggttcttttctggcatcgtaggaggtggcctgctgatgctcctgccagcatttgtcttcattgggctggaacaggatgactgctgtggctgctgtggccatgaaaactgtggcaaacgatgtgcgatgctttcttctgtattggctgctctcattggaattgcaggatctggctactgtgtcattgtggcagcccttggcttagcagaaggaccactatgtcttgattccctcggccagtggaactacacctttgccagcaccgagggccagtaccttctggatacctccacatggtccgagtgcactgaacccaagcacattgtggaatggaatgtatctctgttttctatcctcttggctcttggtggaattgaattcatcttgtgtcttattcaagtaataaatggagtgcttggaggcatatgtggcttttgctgctctcaccaaagaattgagtgttaaagaacaaccaggagagcaaattctctattcatggatttttttnnctggtcttngaatgntngggaanccnggctttaagcgnaaggtncngggggggaanaanctggggtggggnnnggnnaaaccgggtangggggcttgaatagggaaacaattgttagtttaggaccgggtatcgggagatagatcg

SEQ ID NO: 602730 - DNA, 929 bp, Homo sapiens
cgaccagccaaatgtcaagattctttatctctcctgacatgaagttcatactcgactgggcacagtggctcaagccctgtaatcccagcactttgggaggccgaggcaggtggattacctgaggtcagaagttcgagaccagccaggccaacatggtgaaaccctgtctctactaaaaatacaaaaattagccaggcgtggtggcgcaggcctgtgatactggctactagggaggctgaagcaggagaatcgcttgaacccaggaggcagaggttgcagtgagccgagattgtgccattgcactcctgcctgggcaacaagagccaaactctgtctcaaaaaaccaaaaaaagcctgggctcggtggctcacacctgtaatcccagcactttgggaggccgagggggatggatcacctgaggtcaggagttcaagctggtcaagagactagactggccaaaatggtgaaactccatctctattaaaaaaaaaaaaaaaaaaaaaaaaaaaaaacaacaaaaaaatacacaaacataaaaaacacaaaaaaaaagggggggggggcccaaaaatatccccccggggggccccccctttttgcccccccccctttttttttgaaagggggccccatataggggggctgtaatatataaagcgaccacgcgccgggccgcggtctttttaacaaccggtggcgtggtgggagaacaaccggcttccgttgtgctgtcttgtgagaggaccccccctattctgcgggcgggggggcacaatttggtcgggacagcacccccctagcaggagtatttgcggctccggggcgacacaattatcaccctcgcggggtcttggggggtggaaccccaccgcgtttatctcgcgtgcgcggaagaatttgcctcccggagtttttgtgacaatccccg

SEQ ID NO: 602731 - DNA, 163 bp, Homo sapiens
  misc_feature (13)..(13): n is a, c, g, or t
gggggggtttttntgtttttttcccaaaaaaaaggaaaagagggggggggggggtttttccccccccccctcccgggcccccccaaaaaccaggggggtttttttaccccggggggggggcctccccccttgtttttttttttttttttaaaatcccctttga

SEQ ID NO: 602732 - DNA, 711 bp, Homo sapiens
agttagccggattaaccaattttcaccaccaggaaaccaagcttatgacccatgatttaccgaatttcgagcttcggttaccccaaccgttaatttaagccgccttttgggggtagtttacagactgagtgacagtactcagtatatctgagataaactctataatgttttggataaaaataacattccaatcactattgtatatatgtgcatgtattttttaaattaaagatgtctagttgctttttataagaccaagaaggagaaaatccgacaacctggaaagatttttgttttcactgcttgtatgatgtttcccattcatacacctataaatctctaacaagaggccctttgaactgccttgtgttctgtgagaaacaaatatttacttagagtggaaggactgattgagaatgttccaatccaaatgaatgcatcacaacttacaatgctgctcattgttgtgagtactatgagattcaaatttttctaacatatggaaagccttttgtcctccaaagatgagtactagggatcatgtgtttaaaaaaagaaaggctacgatgactgggcaagaagaaagatgggaaactgaataaagcagttgatcagcatcattggaacatggggacgagtgacggcaggaggaccacgaggaaataccctcaaaactaacttgtttacaacaaaataaagtattcactacca

SEQ ID NO: 602733 - DNA, 83 bp, Homo sapiens
  misc_feature (30)..(30): n is a, c, g, or t
  misc_feature (54)..(54): n is a, c, g, or t
cagtctggtctctgatgtagtgcgtcccanaacacaggggactgatctcaaganctcatcacatcctgaaatgcttcatggga

SEQ ID NO: 602734 - DNA, 361 bp, Homo sapiens
  misc_feature (13)..(13): n is a, c, g, or t
  misc_feature (19)..(19): n is a, c, g, or t
cggtctagaggancccggngtgttcatgaaacaaatatttacttagagtggaaggactgattgagaatgttccaatccaaatgaatgcatcacaacttacaatgctgctcattgttgtgagtactatgagattcaaatttttctaacatatggaaagccttttgtcctccaaagatgagtactagggatcatgtgtttaaaaaaagaaaggctacgatgactgggcaagaagaaagatgggaaactgaataaagcagttgatcagcatcattggaacatggggacgagtgacggcaggaggaccacgaggaaataccctcaaaactaacttgtttacaacaaaataaagtattcactacca

SEQ ID NO: 602735 - DNA, 869 bp, Homo sapiens
  misc_feature (9)..(9): n is a, c, g, or t
  misc_feature (70)..(70): n is a, c, g, or t
  misc_feature (84)..(84): n is a, c, g, or t
  misc_feature (105)..(105): n is a, c, g, or t
  misc_feature (110)..(110): n is a, c, g, or t
  misc_feature (113)..(113): n is a, c, g, or t
  misc_feature (134)..(134): n is a, c, g, or t
  misc_feature (140)..(141): n is a, c, g, or t
  misc_feature (157)..(157): n is a, c, g, or t
  misc_feature (162)..(162): n is a, c, g, or t
  misc_feature (168)..(168): n is a, c, g, or t
  misc_feature (172)..(172): n is a, c, g, or t
  misc_feature (180)..(180): n is a, c, g, or t
  misc_feature (183)..(183): n is a, c, g, or t
  misc_feature (186)..(186): n is a, c, g, or t
  misc_feature (196)..(196): n is a, c, g, or t
  misc_feature (198)..(198): n is a, c, g, or t
  misc_feature (222)..(222): n is a, c, g, or t
  misc_feature (224)..(224): n is a, c, g, or t
  misc_feature (226)..(226): n is a, c, g, or t
  misc_feature (235)..(235): n is a, c, g, or t
  misc_feature (258)..(258): n is a, c, g, or t
  misc_feature (276)..(276): n is a, c, g, or t
  misc_feature (290)..(290): n is a, c, g, or t
  misc_feature (302)..(302): n is a, c, g, or t
  misc_feature (357)..(357): n is a, c, g, or t
  misc_feature (364)..(364): n is a, c, g, or t
  misc_feature (372)..(372): n is a, c, g, or t
  misc_feature (383)..(384): n is a, c, g, or t
  misc_feature (389)..(389): n is a, c, g, or t
  misc_feature (396)..(396): n is a, c, g, or t
ccgggaagnccgagatgggaggaccgttttcctatgtgtacttcttctgcacggtacctgagatcctggngcacaacatagttntgcttcatggcgaacttcagnagagnttntacatacatttggcctcatanccccannggctcctttgaagcancattntctatngtgngttggtgnggnaanttccaccagntngtttaacaacttgttatttggttntncnacacaagancttgtatgaagatgagaacagcnatatgttcccaaaggccntgagttctggaccntaccccccacgntggtgtaagcagaggaggaatttggttcactttactcccaggcaaacaccccccntgccacntagggggnaacaccccccnnttggnccacttnctgttctcagaaccagcagaatcagtgcctagcctgtgcccagcaaatagttggcactcaataaagatttgcagaatttaatacagatcttttcagctgttcttagggcattataaatggaaatcataacgtggttctaggttatcaaaccatggagtgatgtggagctaggattgtgagtgacctgcaggccattatcagtgcctcatctgtgcagaagtggcagcagagagggaccatccaaatacctaagagaaaacagacctagtcaggatatgaatttgtttcagctgttcccaaaggcctgggagctttttgaaaagaaagaaaaaagtgtgttggcttttttttttttagaaagttagaattgtttttaccaagagtctatgtggggcttgattcacccttcatccattggctgaactatggactgcccatgtgaactacactcaaaccataccttttgacaaaaa

SEQ ID NO: 602736 - DNA, 1096 bp, Homo sapiens
  misc_feature (949)..(950): n is a, c, g, or t
  misc_feature (959)..(959): n is a, c, g, or t
  misc_feature (965)..(965): n is a, c, g, or t
  misc_feature (967)..(967): n is a, c, g, or t
  misc_feature (973)..(973): n is a, c, g, or t
  misc_feature (976)..(976): n is a, c, g, or t
  misc_feature (988)..(988): n is a, c, g, or t
  misc_feature (994)..(994): n is a, c, g, or t
  misc_feature (996)..(996): n is a, c, g, or t
  misc_feature (1006)..(1006): n is a, c, g, or t
  misc_feature (1009)..(1009): n is a, c, g, or t
  misc_feature (1021)..(1023): n is a, c, g, or t
  misc_feature (1026)..(1027): n is a, c, g, or t
  misc_feature (1038)..(1038): n is a, c, g, or t
gatcttgtggaggagtgcacagtcaatgcctgttcaagattaatcattttccctgtgcctatgactgaggctgtttctcacatcctgcccctggtttgcctgtcccaaggatttcgtctgaagggcgggacattccccctgcctcttcgcaccacagccagagcctgccattaggaccaatgaaagcaaagtacctcatcccctcagtgactaagaatcgcagtatttaagaggtagcaggaatgggctgagagtggtgtttgctttctccaccagaagggcacactttcatctaatttggggtatcactgagctgaagacaaagagaagggggagaaaacctagcagaccaccatgtgctatgggaagtgtgcacgatgcatcggacattctctggtggggctcgccctcctgtgcatcgcggctaatattttgctttactttcccaatggggaaacaaagtatgcctccgaaaaccacctcagccgcttcgtgtggttcttttctggcatcgtaggaggtggcctgctgatgctcctgccagcatttgtcttcattgggctggaacaggatgactgctgtggctgctgtggccatggaattgcaggatctggctactgtgtcattgtggcagcccttggcttagcagaaggaccactatgtcttgattccctcggccagtggaactacacctttgccagcaccgagggccagtaccttctggatacctccacatggtccgagtgcactgaacccaagcacattgtggaatggaatgtatctctgttttctatcctcttggctcttggtggaattgaattcatcttgtgtcttattcaagtaataaatggagtgcttggaggcatatgtggcttttgctgctctcaccaaagaattgagtgttaaagaacaaccaggagagcaaattctctattcatggatttttttnnctggtcttngaatgntngggaanccnggctttaagcgnaaggtncngggggggaanaanctggggtggggnnnggnnaaaccgggtangggggcttgaatagggaaacaattgttagtttaggaccgggtatcgggagatagatcg

SEQ ID NO: 602737 - DNA, 86 bp, Homo sapiens
ttcaagcttctaacgatgtacggggacatgtgggcaaagccttcaatcagggcaagattttcaagtgaacatctcttgccatcacc

SEQ ID NO: 602738 - DNA, 477 bp, Homo sapiens
aagaacattttaaacggccccttggaagtagaagaagaagaagaaggctggaaggcagaagggacacccaactgcccactggagaaaaatttaaccctgattatttgatgggaaagaataaagcccagggtaggtctcacttggttcatcctgtgcacaggtgggatgggcttgaaatctaatttctggtagtgagccctaccttcagcctttccaaatgctgtttcagaagaagggggtacaaacttctcctaacaatttttgggaaagccaaggagagagtttatattactcatcaacaatagcacctcgtaaagattgtggttaaatacttctatttctttctttattttattttatttatttatttctgagacggagtctctctctgtcacccaggctggagtgtggtggcacaatcttggcttactgcaacctccgcctctcgagttcaagtgatcctccttgcctcagcct

SEQ ID NO: 602739 - DNA, 113 bp, Homo sapiens
aatgttgacctgacagaattccagaccaacctgggggcctacccccgcataccacttccagtcttggccaaataatgcccctgtcaatcttttgctgggaaagcctaccatga

SEQ ID NO: 602740 - DNA, 2439 bp, Homo sapiens
  misc_feature (19)..(19): n is a, c, g, or t
  misc_feature (69)..(69): n is a, c, g, or t
  misc_feature (86)..(86): n is a, c, g, or t
cttgctcacgtggcagatngcgtgacactttcaaggccttcagtaagaagatggacgacagcgtcctgnagctcagcactgtggcntcagagctggtgcgtaaacatgtggggggcttccgcaaggaattccagaagctgggcagtgccttccaggccatcagtcattccttccagatggacccccccttttgctctgaggccctcaacagtgccatttctcacacgggccgtacctatgaagccatcggggagatgtttgctgagcagcccaagaatgacctcttccagatgctggacacactgtctctctaccagggcctgctctccaacttccctgacatcatccatctacaaaaaggcgccttcgccaaggtgaaggagagccaacgcatgagtgacgagggccgcatggtgcaggacgaggcagacggcattcgcaggcgctgccgcgtggtgggtttcgccctgcaggccgagatgaaccacttccaccagcgccgtgagctcgacttcaagcacatgatgcagaactacttgcgccagcagatcctcttctaccagcgggtgggccagcagctggagaagaccctgcgcatgtatgacaacctctgaccgcgtgtgcctgggccccctccttcccctgggcctggtcactgcagtgtaccccactttcccgacctccctataccagcagtgactgggggaggggtcagcggtgggggagataagcggcctgtcctgcctcctgggagaaggagctttcaaggagtcatgggtgcccctgggaaattccccactccttagaagtggggcacagcaggggtgagaatagagtcaggagccctcgaggccaaggcctgggctgccggtcagtcagtgaaggtcaggccagggtctcagcctcccctagagcctattttgcttgctcacctggccactgctgccttatccattcagcagacaccgaggcctgctgcacccttgggtcggatgctgggcacccagggctgtgacatgcctgctcttcaggagtcctcagtgaaggtcggggtcagacacagacagagtcaatgcagtatgactgatgtttaagtgagggatttctggaagctcatagaagggaccacagcattccactggtcagggaagactccatagagtaggcaacatttgggcagtgttttgaagaatgacaagggcctgccagacagtacatgggggagaaggactttcaggggagaggaacagcatgggcaaagttatggaggcatgcaaacatctccctcttctctcccttactttccaagcaagttaggtacgctttccatggggattctggcctgtgtggtaggaagggatctcccttgctcccatgttgctggctgtccgtacatcaccctgtcccctgcaggagggggctacaggccatctccctcctgtaggcctctgactcccctccacttttgggccctcagcttatctcgggcaggggaccattgcagcatcctcccctcctcggactcaaggtgctgaggtataagccctgggccccagatccctggtgacaccttcctggagaagactctcaaaagtgactgtatatttgagttcaccagcaataactccccacactcgaagcaggtccaaacccaggatctcagggtccttgggctctgtggcactgtcttcccaagatccttcctgttgcacaatgggaaacctaagaggaaaaagacaggggcctgcttgcccagccatgcgagggattccatgcccacctgccctctgtctgcctcgctggaatgtgggcccctgctccccgtcaggttgtgctgtctctgacctatgtttacatccccgaggggtttctgcctcctccccacccaggtcagggtgtggtccagcagcttgctgtggggtgctgacatgtgtcaccactgccccccttgcccccgggggggtcatggtctcctcctggatgctgctccttgaatcttttttcttgataaaccttttacaattaagataacacaagcatgactttttctgtttggatcccagaaaggcggagggcaggagaaggatagagccctaattgctcctgagagccattggatgagattctgaggtcgtggtgggcacaaattttccacagaacctcaaaagttcaggggagggctatgctggtggaaggtgccagcaggcaggaggagctagaggcggctgtggacccctgggtggatccatccctccctagaacgcactcttgtctctaaaacaggtggagtgctgcccaggggactggctgtactgccttgtgatctggggctgagggttgtatgaggaagggacaggacgctgtgccctaggacaattaatagatggtggctcactctccccaaggagccatgccatgcccttgcccttgaaaagccca

SEQ ID NO: 602741 - DNA, 960 bp, Homo sapiens
gtcgcagctctgatgcgctgcatgcatgctgtatatctcggtcactcgcctgaggttcctgctgtcatggtgccagtctgaatgagaagaggactctcccgtaagacatatgactgaccatactcctcgcataatgttctacttcaaaggcgcactgggtcctgtactccgcggagaaaaaagcgttccacgacgagagtaggctaacatgacagtgatccgtgctactcaattggcgactgtatgccatgaagatattgtgcgttggatcgaggagctggcatccttctagaataatcttggaaccctatccatgtagtctgtaaggtgggaaacagcatcttgctagatgaatcggatgacggagaatgccaaccacacttgtctctatcctatctcgtactgtggtatcgccaagaacatgctgggcagaatatatgagacacatagtgcacctctcgcgaacaagggttgaccaaggcaactccgattgggtctccagtcctagttggtccccctattcttgggaactctaattgaatactcgggggtagttggatcatagtttgacttgctaattcattaggatgggacctttctgtcgtgaactgagttgataatactaaggaggggctggggcgcatgtggatccgagaaagattctgaaaagacttttggaccgatggttttgcacagcgtagagtgatgcaagtgttgaagagacgattgcatcttcttgtggtaagctgggattgggccatggcatgcattctcatgtgaattgctatgggaaggacagtaagtgctgctgcatctggttcgagggaagatgggtaggcgcaagtggccaatgagacgggaaaggtagtgtattgtcttacataaggcaaatagaaggattggagggaattggtggatggtgcatgagacaacttgcaaattccatagaaggaataattc

SEQ ID NO: 602742 - DNA, 2025 bp, Homo sapiens
  misc_feature (19)..(19): n is a, c, g, or t
  misc_feature (69)..(69): n is a, c, g, or t
  misc_feature (86)..(86): n is a, c, g, or t
cttgctcacgtggcagatngcgtgacactttcaaggccttcagtaagaagatggacgacagcgtcctgnagctcagcactgtggcntcagagctggtgcgtaaacatgtggggggcttccgcaaggaattccagaagctgggcagtgccttccaggccatcagtcattccttccagatggacccccccttttgctctgaggccctcaacagtgccatttctcacacgggccgtacctatgaagccatcggggagatgtttgctgagcagcccaagaatgacctcttccagatgctggacacactgtctctctaccagggcctgctctccaacttccctgacatcatccatctacaaaaaggcgccttcgccaaggtgaaggagagccaacgcatgagtgacgagggccgcatggtgcaggacgaggcagacggcattcgcaggcgctgccgcgtggtgggtttcgccctgcaggccgagatgaaccacttccaccagcgccgtgagctcgacttcaagcacatgatgcagaactacttgcgccagcagatcctcttctaccagcgggtgggccagcagctggagaagaccctgcgcatgtatgacaacctctgaccgcgtgtgcctgggccccctccttcccctgggcctggtcactgcagtgtaccccactttcccgacctccctataccagcagtgactgggggaggggtcagcggtgggggagataagcggcctgtcctgcctcctgggagaaggagctttcaaggagtcatgggtgcccctgggaaattccccactccttagaagtggggcacagcaggggtgagaatagagtcaggagccctcgaggccaaggcctgggctgccggtcagtcagtgaaggtcaggccagggtctcagcctcccctagagcctattttgcttgctcacctggccactgctgccttatccattcagcagacaccgaggcctgctgcacccttgggtcggatgctgggcacccagggctgtgacatgcctgctcttcaggagtcctcagtgaaggtcggggtcagacacagacagagtcaatgcagtatgactgatgtttaagtgagggatttctggaagctcatagaagggaccacagcattccactggtcagggaagactccatagagtaggcaacatttgggcagtgttttgaagaatgacaagggcctgccagacagtacatgggggagaaggactttcaggggagaggaacagcatgggcaaagttatggaggcatgcaaacatctccctcttctctcccttactttccaagcaagttaggtacgctttccatggggattctggcctgtgtggtaggaagggatctcccttgctcccatgttgctggctgtccgtacatcaccctgtcccctgcaggagggggctacaggccatctccctcctgtaggcctctgactcccctccacttttgggccctcagcttatctcgggcaggggaccattgcagcatcctcccctcctcggactcaaggtgctgaggtataagccctgggccccagatccctggtgacaccttcctggagaagactctcaaaagtgactgtatatttgagttcaccagcaataactccccacactcgaagcaggtccaaacccaggatctcagggtccttgggctctgtggcactgtcttcccaagatccttcctgttgcacaatgggaaacctaagaggaaaaagacaggggcctgcttgcccagccatgcgagggattccatgcccacctgccctctgtctgcctcgctggaatgtgggcccctgctccccgtcaggttgtgctgtctctgacctatgtttacatccccgaggggtttctgcctcctccccacccaggtcagggtgtggtccagcagcttgctgtggggtgctgacatgtgtcaccactgccccccttgcccccgggggggtcatggtctcctcctggatgctgctccttgaatcttttttcttgataaaccttttacaatta

SEQ ID NO: 602743 - DNA, 579 bp, Homo sapiens
gttattggatgcacatagacaaacggctgctcgctaaccgaaattacggatttgtgcacagggtgtgggcattacacctaccacaagggttgactgctgatgcccatgcctgttatacagttcatgggtatcattcttatgacaacctgaaatggtctgaaacgctatgatgtaaccctgtggcagtttgacgagcggccaccagttactacacctgttcgtgaaagcatttcactgtattgttcacctagcttaacttatgtcctaaggcttgcaactgagacatagcggtcatctacggcttttgtagcgattcgtgcgagtgtgtaacaagctgggctggagaaattggcaaggtgaatggtttgtagatgttacaacgcgcggatatctttttatatgaggtaactgtgcaatgttgacaccactagggaactgttgtattaatgcatgccatagcgtagacgcttgggcggctgttcatcatggatcttgagcagcatcttgtgagtctgaacatgatggcgtcatggtaaggacacacctatgggggcaagacacggcttgaggccttcagcc

SEQ ID NO: 602744 - DNA, 303 bp, Homo sapiens
  misc_feature (48)..(48): n is a, c, g, or t
  misc_feature (97)..(98): n is a, c, g, or t
taaattatgatttcctgctataaactccatttttaataaaatggcaanggacattggaaaatgaatgtgaacctatatgcaatttttcttcattttnnttaaaaggccacccgaaagcttttggcaatgggggttgcataatttgaaaatcttttaggtctattataaacaaaaggccattagcatcacagcaagttaacaggcctgagttcaaacaaatagtgacatatcaatggaaaaacatagacagtatttgtgatattataaaatatttatttttggctgtgtccatggtttcctagc

SEQ ID NO: 602745 - DNA, 224 bp, Homo sapiens
accgtgaaacccaggatgatttcaatctcccgacctcgtgatctgcccgtcttggccgcccaaagtgaaaacaagtacaaaaaaaatccctaactctgagctctatctctgattcctcttcctccttcccctcttcctcctcttcctctcctcctgtttggctacattctcctaagtggggcaccgacctcaaattcgaaaacatggacatagcgtgttccctg

SEQ ID NO: 602746 - DNA, 250 bp, Homo sapiens
aacactgcacgcttattttttattaaaaaataaaaataaaataaaggccaggcgcgatggctcacacctataatcccagcactttggggggccaaggcggggggatcacaaggccaggagttcaagcaattccccccacctaagcctcccaaagtgctgggactaaaggcatgagccaccatgcctgagccaaagtggtatatatatataatagaatacttcttagcaataaagaactactgatatgtgc

SEQ ID NO: 602747 - DNA, 1462 bp, Homo sapiens
ggcactgagggcggcctggtcgtcgtctgcggctggctggtggcaggatgaggagcccgggttgagtgcgccagtacccgggtccgggtccgcatttcgccttccggcattcggtttccctcgggcccagtattgcccaggacaccgcccccaagaccctcctgaatcccttcgcaagacccgggactccgggccagccccggcattctgcaggcacggcaatgatgactgactggcgctagaagcaaagaccatttcagggcagaaacgccctagtagaagtaccaagactggacggatagaccgggcgagatacactaccattgactcgggcttccgagacgtatggcacacaacataacactcccagcaattgtaaccccgaagcgatccatccttgctacccaaggcaccattacgcaccattccacttctgggacgcgcggaacatacgcccaatgggtggagcaccaacaacgcaccgcccacggcacccaaccttaccgcgtccgccatttcagggtccaacacgtggaaccacaacaggacagacacaccgagaacaacaataggccacacccaatgaggtacaaccccccggaccaacacaaccgaccaccgaaaaagatgggcacacaaagaacaccctggaactgctggagcaccggacatagaaccaacagtaaccaaagggccctggaagctaccaagaccgagacaacacagcacgcccccccagcaacactaaaccctacaaggcgaacaaaccagcaacgcggacccaaaggacaagcgaaaaccaggcccacaggcggcagcacaacccccacacccacatgtcccacaaaaaaaggagttccccaacacaagagtataacgaaagagcccgggaggaccctaagtagcaatcccaaccaaacacccacaacacacaacaagagcacccccgcacaaatgggacaccggagcaaacaaaagcacaaagagaaacaccaattccacacacatagcagcacatagagaaagaacacaacatgaaccccaaagtacggggagccaaacgagcacaaaacgacaatccaaagacacgacaaaagcagaatcccccaacacctgtgtcgtacaaatgcaacatccgaacgccgacacaactcctgccaaccacgcacattaacatcggcacaaccctcactgataaacactataacaaccccatgaaaatagcatacaacaaacaaccccggaaagacatgtgaatgtagacccccgtacgctatgtagaacccaacagaaccgcacaaaaacaacaagaaatcactcaaccacagtacaatcactgagcgaatccaccacacacagcgcaataaaagaacaacaattgtacacacattacgagaacagtacgacatgcacaagatacaccgaacgatcagcaacatcggaacaaagaccacaccacagt

SEQ ID NO: 602748 - DNA, 982 bp, Homo sapiens
  misc_feature (2)..(2): n is a, c, g, or t
  misc_feature (98)..(98): n is a, c, g, or t
  misc_feature (139)..(139): n is a, c, g, or t
  misc_feature (182)..(182): n is a, c, g, or t
  misc_feature (184)..(184): n is a, c, g, or t
  misc_feature (297)..(297): n is a, c, g, or t
  misc_feature (336)..(336): n is a, c, g, or t
  misc_feature (340)..(340): n is a, c, g, or t
  misc_feature (344)..(344): n is a, c, g, or t
  misc_feature (365)..(365): n is a, c, g, or t
  misc_feature (392)..(392): n is a, c, g, or t
  misc_feature (396)..(396): n is a, c, g, or t
  misc_feature (410)..(410): n is a, c, g, or t
  misc_feature (413)..(413): n is a, c, g, or t
  misc_feature (416)..(416): n is a, c, g, or t
  misc_feature (425)..(425): n is a, c, g, or t
  misc_feature (427)..(427): n is a, c, g, or t
  misc_feature (429)..(430): n is a, c, g, or t
  misc_feature (438)..(438): n is a, c, g, or t
  misc_feature (525)..(525): n is a, c, g, or t
  misc_feature (548)..(548): n is a, c, g, or t
  misc_feature (550)..(550): n is a, c, g, or t
  misc_feature (555)..(556): n is a, c, g, or t
  misc_feature (573)..(573): n is a, c, g, or t
  misc_feature (596)..(596): n is a, c, g, or t
  misc_feature (611)..(612): n is a, c, g, or t
  misc_feature (615)..(615): n is a, c, g, or t
  misc_feature (629)..(629): n is a, c, g, or t
  misc_feature (752)..(752): n is a, c, g, or t
  misc_feature (804)..(804): n is a, c, g, or t
  misc_feature (814)..(814): n is a, c, g, or t
  misc_feature (825)..(825): n is a, c, g, or t
  misc_feature (827)..(827): n is a, c, g, or t
  misc_feature (839)..(839): n is a, c, g, or t
  misc_feature (843)..(843): n is a, c, g, or t
  misc_feature (865)..(865): n is a, c, g, or t
  misc_feature (892)..(892): n is a, c, g, or t
  misc_feature (908)..(908): n is a, c, g, or t
  misc_feature (950)..(950): n is a, c, g, or t
  misc_feature (963)..(963): n is a, c, g, or t
tntaaagtacacaaaaactattgtgcaaattgtaagtcacaaggattttttttaattaaaacttttgttttccaagggtccaagttttgatgtcaganatctacacccaatatacaaaaacaatgttaaatgggaaganatagtgacatttttcactatatattttccgcaatgtacttttntnttgccactgtgtatatcatccactatataacagaataaaagagaaatactgttaacaaaagtgaatgttctaataatttttctacccaactacctccacatccccaaaaaacncctataaattaacaggacaacatttgtccacctgtgaanaatngtcnctaattttctaattcaataangcccacattatatcctcataacataanggtnctttactgatgacntangcngtctttttntngnngttatctnagattcttaatatcccttctttacaatatatatttcatcttcagttttttttctaaacaaagtgcagtgtatcttagagtctacagngaacacattggtatacaattttnanatctnnacaagagactgcaggcnaactaaagttcaaagcataatgnaatgcctagatacanncanttgttaaactttcnaaacaaaaatgcaaaaacaaattgtagctatgcttcaaagcaattaaattaaggaggattccaattctttgggccctcttagcaatatacagtcgttcaattccaaatattcacaatagtgtnaaaatgatagttctagatatatttaatcactacatccacgatgttgactggnaagactaggnataataaaggngnttactctagaanaagntgacaatatttgtaataatacnaactcattttacatctccatgtctgtnccgaatgtttatttcnttccgcctccatattcttgaaaccagtgcttagaagaatcanattgaaagttggntcagtataacaacaaaagt

SEQ ID NO: 602749 - DNA, 949 bp, Homo sapiens
attaatcccctggaccaacccgtcatctactctaccatctttgctagtgcacactcatcacagcgctaagctcgcactgattatgtgttagctgagctaggcgcctatgaaactaaatcatggctagcttttattcgcagtatctaacctaacaataagataaagccctcgtaccacagaagctgccatcaagtatttcctcacgcaaggctatcgtgtccataatccttctaagtagtctataccgtcttcaacaatatactctaccgagacaatgtaaccataatcgcaatactaccaaatcacatatctcaatcattattaatcataatggctataggcaataataactaggacataggcacccccttgtcacgttcgtgcagctcccgagatggttacacgcacaggtcgaaccccgtctgcacatccggacctgcactgcttcctcatcattggagcaaagaactaggcgctcgctcatctgcagatcatatgaccaaaatctctccgctcactaaacagtaaggccgttcttcctcgactcatcgtctaatcttatcgcatcgataggcaatggccagttgagggttggatttagagaccgaaatccgcaagtataactgctaacatatcgttgagctataacttcctctaattgaacccgacaattaggacttgatcataattaatgacagtttcactacgcgttatcaaaaccgcttaaacattaaacccaatccttagatcttcaacgtaatttcattactttatcccttaaacgtacttacacggggatttcctaactcacttcaaacttttagatcttcccaagcaaccaacgaacccttacttaacttaatcatcagcaacacttgaaaatcaaagctacaacatggaacctaaacaaccctataatattcccaatcacacaccttccacctccata

SEQ ID NO: 602750 - DNA, 641 bp, Homo sapiens
cgcggtggctcacgcctgtaatcccagctctcagggaggctaagaggcgggaggatagcttgagcccaggagttcgagacctgcctggggcaatatagcgagaccccgctctccaggaaaaaggaaaaaaaagaaaaccaaaggacaaaaaaaaaaaaaaaaaaaaaaaaaaaaatgtgtgtgggggcgcccgggcctgggaaaaggtttttaaaacacccctggtgtggggcgccggggggccccatgtggggtcaggtggaacaccggggcccaaaaggggggttccccaagaggaaaccccgggcgccgagaacaagagggggcggggtttcccacccaaataaaaaaacgcgccggcggggcgacagcacgagcgggtgtttgcgacacacaccccaaaggtgggggtctaggagagcactacgagggggtctccaacacacaggcgggggcgaccaaaggaggaggatcgaatgaataaaaaattaacgcgccgcgccggggggaggaaaccctgagaccacagcagcacacgagccacacagacacggaaaccatgaagaagcaagtacagaacacgcacacagacattcagcaacaaccgaaacgacgcaagcagacagcagacaacacacgac

SEQ ID NO: 602751 - DNA, 913 bp, Homo sapiens
gatatgagatggagtctatgcactggtaggtgtagggtcgtgtctgctgacgctggcgcgactcatccggcgagtccttgcagtctctggcggtagtgcggtcaagccgtgagctattcccgtgcgagaggtggggatcgagcgcgctccaggggcaggactgtgaggagggtgctatcgaggaaatcagcttgaaccacagtcgctgtacctctgcacccctggaaagtcgtcgcatgtagggggtccggcatgggcgtcctggcacttgacgcttacctcgtccgtagtctggtgggcctctgtagtgctcacgtgcctttggactgctggggagtcccagagtctcgcaagtcccctctaccagttgcctgttcctagtgtgggggggtaccgatcgaaatcggtggggcagtgggcgtgactcgagcagacttccgaacgagaggccgcgtgcgggactccccgatgttttggaggcgtaccagaagcgccaccaggtgattgcctgacggaggcgagtagcccaagccgcgccgaataggccttcgcaactgagtgcattggcgctggtttctagaatgtaacgccaatttcgtagcccgggctgtagtttcggccctgtaaacagtagcacccttcacgcgcagacgggtcgactgcagactagagtggggctttgagacgcgctccggattggcaacacgctccccgttcattgtttcttgttgctagtccctttattcgaagagttttccatcggctctccaggaggatcctcgctcgaaggcgtccgactcgggcgacgtgtgagccttgccaagtacagggccagggtggcgatttgggcttccgcgggtacctgaaaccccatttcttgactgccccaacgaggatgtcggggctgacaacg

SEQ ID NO: 602752 - DNA, 1343 bp, Homo sapiens
cgctgggtgagtcgttgtattcctagtcgcttgcgggttgtgtctgtttcagtcacattgttgtttgtgctgctcattttggtggtgttggactggtgtgttggtttgtacgacgcgccccttctttgttttcctgctctctgcgtcctctctcgtggtggtatgtgtgcttcgtgttttgtagcgttcgttttttgttttggtgtgtggtgtgaattttgtcgttctcctgtttgtgcctctcgcagatgtgtgtggtggttgctttgctggttcgctggtcgtggagggttgtttctgcggaaataatagtgggggggagagaacgggggcgttttttttgtgtgcgcgcccgccgcgccgggtgtgttgggttgggtatgtgtgtgcttgtttttggtgggaggttgttctctgttgggttggtgtcgccccctcttccgtcggtgtggtggtttgctcccctcgcgcgagggtgtggtgggttggtcccgatcgccgtgtgttttctcttttgacgtgaggatagaggtgtggtgtcccctcccttcgtgtgaggggtctgcgcacactgtgtggtgtatatatgttggtgagtgtgttcggtttggtgcgggtgatggggcgcgctctccttttttttttgacgcgtgctctcgttgggcttggtatgtgtgtgtgtctcgcctctcgcgtctgtgtgatacgagacagtggttttgctcacccaggggtcttcccactcccgcctactggttgtctctctccgcacgcacactcactctctctccagcatagaagtatgtctctctctctggtgagaagatagaaaaagagaaaaaacaggaggggcgtgtggaaaaaaaacacctctttagcacccccccgcgcgttctgtggtgtgttctctcgctgttccccacacacaatatataatagtggtgtggtgtccctctgtgtctcgtgtgtgtcgccaccgctcctcccctactttttattttctttgtttgttgttttgtggagaaagaaaaacctctcttttctctatcctcccggatttctggggcgccacagagaccccctgttctcccccctttcttttctttctccctctaatatctcctctgcgcgcgcgctcttcttttctttcttgtttttttgttatatactaccagcggtttttttgcggcccccccccccaccgagagagagaagaaaccaccccctttttgtggagagagaggagagagaaaaaatgtgtccccacacaaagagagagagaaaaatcccacaccattggtgcgccacccccctgtgtttttaaaaaatttttttaaaaatta

SEQ ID NO: 602753 - DNA, 646 bp, Homo sapiens
  misc_feature (125)..(125): n is a, c, g, or t
  misc_feature (127)..(127): n is a, c, g, or t
  misc_feature (131)..(131): n is a, c, g, or t
  misc_feature (167)..(167): n is a, c, g, or t
  misc_feature (189)..(189): n is a, c, g, or t
  misc_feature (213)..(213): n is a, c, g, or t
  misc_feature (246)..(246): n is a, c, g, or t
  misc_feature (249)..(249): n is a, c, g, or t
  misc_feature (294)..(294): n is a, c, g, or t
  misc_feature (296)..(296): n is a, c, g, or t
ggagccttatcagctggggttgagggaagactggatctagagtgctgctcctgaacttggtctctgagccatggttcccatagacactcaggtccctccagctacaaggtgggcaccatggcggngnagtntgactgccactactgcagggatcccttgcaggggangaagtatgtgcaaaaggatggncaccactgctgcctgaaatgcttngacaagttctgtgccaacacctgtgtggaatgncgnaagcccatcggtgcggactccaaggaggtgcactataagaaccgntnctggcatgacacctgcttccggcgtgttgccaaaggtggcccttcaccccctgtgcccaatgagaccttgtgtggccaagggacaaacaaggatccgtgtgcaacaaagtgtgcaaccaactcggggagggactccccccaatgtggcacagggggggttgcttttccacagggcccattttgtgtgggccagggagaatcaaaaacgtggacgtcccaagggcggaccggtctggcacaacagacgtgcttcacctgtagtaacgtgcaaggcagtcatcgggacgtgaagctttcttccctaaaggggaggacttctacgtgcgtgactgtgcattgagaccaagtgt

SEQ ID NO: 602754 - DNA, 1164 bp, Homo sapiens
ccggccggagcctcgccgacttcccgcgacccctgaagcgccccgtagagcagtcgagatgggtgagtcaagtgaagacatagaccaagatgttcagcacatatatgctagtggagagatggatcttcatgacatcagagtttaggatgttgacactctccctccgtcctgaccgctaatccacccagagcgtgaatttaactacagtgtggggtttaaacgatttaaatgagtccttaaatgcactggtaagaccgaagatttagatgctctcatggcagatctaggtagcagacgataagtgaggctgagcagaggacaatccaggcacagaaagagtccttgcagaatcaacatcatatcgagcagtctctacaagcatcaattttcagtggtgcagcctctcttgtgttatggaacaaatgttgctgccactggtatcaggcaatatgaggatgacttaccagctccagcagccgatcctgtgattagaccttccactgccatcgacagcatccgtgaaccgtctctcatcaggaagaggaagaagcccaagccaaggctgatacagattaaggctggcgctggaaaaacttgaaaggaggccaagggttaaagaagctcggtcagtcaagggtggcaacatgaatgataccaaggactaaacgtcactgattggtggatgagcgagaggtggccgagattgttctggagaacattattagagagaacgtcattgtgactggcaatgtagactggtggtctatgaaaatctaaccgggaaagtaacgaatgagacggttcttaaagaccataacacaggtagttaagagagtagtaacgtggacatgaacgacgcaactcaaatctttccctggaagagaagggaaaatgcggaaaaaaacaggaaaaacagggaagccaccagcacaacaaaccaagcaacaaacgagaacgagccagaaccaggaccaccagaaaaagcagcgggcacacgcagtagctccaagcaacaccatagagaaaaagcaaaacaaaaaagaagaaagagcatcgaagacgaacaccaaaagcaacagaggagagcagaagcacaggaagagaagaacagaacaagcgaagcagccccgtagccaatccccctcgccaagaccacaaagagct

SEQ ID NO: 602755 - DNA, 131 bp, Homo sapiens
aggcaaggtagaggaggaacccgcaaagacttgctctcactggacgttcaagggcatggccgccatgggtctttatagaagggggtggtgcagtgtagccccggacaggcttttttttttattttttttat

SEQ ID NO: 602756 - DNA, 146 bp, Homo sapiens
ggtcatctcatagcacggatccccccagttcctgcttcttgaaatcgtatagtccatctcttctacttcgagatggtccagactctcttagactttgtcgattacgtcatctcccgctaacatggatccttctctggcactcttca

SEQ ID NO: 602757 - DNA, 214 bp, Homo sapiens
gcataacacatagctctgactcttacctcctctctcctactcctgctcgcatctgctatagtggaggccggagcaggacaaggttgacaagtcttaccctccttagcagggaacctactccaccctcgagcctccgtagacctaccatcttctctacacctagcaggtgtctcctcatcttaggggcatcaattcatcacacatatcatataaa

SEQ ID NO: 602758 - DNA, 195 bp, Homo sapiens
ggcccggggaagggccctttaaaaaaaccccccaagggtttttttttggggttggggccaaaaaaaactttttttttcccccctttgggggggggggggaattttttttggggggccccggggggacccggggtttttttaaatccaaggtgttccctttcccggtttaaaaaaaaggccgggttttttccccca

SEQ ID NO: 602759 - DNA, 370 bp, Homo sapiens
cagtggattggataaagaaagtatggtacatacattataccatggaatagtatgcagccataaaaccaaaacaaaatcatgccctttacagcagcacagcagtggtcagcaacctttctgacaccagggactggtttcagtttcctggaatataacttttccatggttgaggtgggatgcggggatggttttgggatgaaactgttccacctcagataatcaggcattagaatctcttaaggagcatgcaatctagatcccttgcatgcacagttcacaatatggtttgcgttcctatgagaatctaatgccactactgatttgacaggaggtggagctcagcagtaatgctcacttacctgctcctcac

SEQ ID NO: 602760 - DNA, 706 bp, Homo sapiens
  misc_feature (395)..(395): n is a, c, g, or t
gatgactgggcaatcgagctcatcaaggtgatgtcactccatcgggaacgagctagccaacagcgtctgggaggagagcagtcaggggtcggacgaaaccgatcggtagactccacgaagggaagagaaggaacggtggatccgtgccaagtacgagcagaagctcttcctgtgccccgtctgcacctgctagcggacgctgtccctgggtccagctacctgttgggggccagcgccgacgaaggacctgcggacggtcatcctgctgatggtgactacggcatccacgggtagcgaggtgtaacgatcactctgacgtggtgaggtgagcacggcctgcactggagctgctttctggtctgaccgcaacggggcaatgtggtcctggtcgcagnctcctgagtctggatacggaggtggatcgtcacggcgccgagtatgcccacgggaacacagcgctggcctacgcccggctgggcctccatgcgcaggagtgcatcgacgtgctgcctgcagtacgggctgacccgacgagctgcttcgatgctcatggcgaccccaagctgtccaggagaaacaataaccggaacaacagcagtgggagggtgcccacgcatcatctgaggaacagccgtgcccgctgctcgcgcactgggacgcggtagctcgccgtattctcgctcaggaagtcagcagcacgtgagtc

SEQ ID NO: 602761 - DNA, 202 bp, Homo sapiens
cggcaacttgaactgacgggtccgcttgaattgacgtgtccgggtctgtgcttttgctaaagccttgttagaaaactaattcacttgttcgtttgacggtggaacgttgtcgctactgtatccgacgatcgaaccgtcctcatttctggacccgtctaattctaagcttgccgcttaacatgctgtcatacctcactctcag

SEQ ID NO: 602762 - DNA, 232 bp, Homo sapiens
  misc_feature (54)..(55): n is a, c, g, or t
  misc_feature (67)..(70): n is a, c, g, or t
  misc_feature (75)..(75): n is a, c, g, or t
  misc_feature (86)..(86): n is a, c, g, or t
  misc_feature (93)..(94): n is a, c, g, or t
  misc_feature (107)..(107): n is a, c, g, or t
  misc_feature (109)..(109): n is a, c, g, or t
  misc_feature (112)..(113): n is a, c, g, or t
  misc_feature (115)..(115): n is a, c, g, or t
  misc_feature (122)..(122): n is a, c, g, or t
  misc_feature (130)..(130): n is a, c, g, or t
  misc_feature (134)..(134): n is a, c, g, or t
  misc_feature (163)..(163): n is a, c, g, or t
atgagctcccgttaattgcagcagcggtgagacgagctctgtatgagcagctcnnaggaattcccannnnttggngctcaggtggntcccaannacctcccttgtgncncannangataatnatcaaaangaanagaaccctctccagcctgctgacccaaanccaaccacacaatggtttgtctcaatctgacccagcggctgaaccctctcgtgtggtcggccatgggta

SEQ ID NO: 602763 - DNA, 424 bp, Homo sapiens
  misc_feature (48)..(48): n is a, c, g, or t
  misc_feature (157)..(157): n is a, c, g, or t
  misc_feature (305)..(305): n is a, c, g, or t
  misc_feature (311)..(311): n is a, c, g, or t
  misc_feature (316)..(316): n is a, c, g, or t
  misc_feature (330)..(330): n is a, c, g, or t
  misc_feature (349)..(349): n is a, c, g, or t
  misc_feature (378)..(378): n is a, c, g, or t
  misc_feature (419)..(421): n is a, c, g, or t
ggtcccaagaacaatttaaagatcactctttgatttgaaagaccaccnattatcattttactaaattcttatatatacttgtgccttttccaactttaagttctcttaagaaaaacatccactgtagctttataaaataccttagtatcagctaggnccaagtctccaggcaggactatcaaaatggactccttcttcctatcagctctagaaccccagaggacttcccagtaggccagctgagcacttaccaggagcatctccctgccttccacagtctcgcctgtctgtctctgccttggtgncctggntcccncctaggagcttttncctcagcttgaatacagtncctggtcatcaaagctgtaagttctcagntgctgcctgcactcatcacctcttcctacaaataaacattnnnaaa

SEQ ID NO: 602764 - DNA, 197 bp, Homo sapiens
ttttcccccccctgggggggggggggggcccggccccctgaagttttttctccccgggccaattttttttcccccccccccccccccaaagggggggggggaagtcccctttttaaagaaatttccccccccttttccttgtttttttttaattttaggggccctaaaaaattggggggttttttttggcttcccca

SEQ ID NO: 602765 - DNA, 492 bp, Homo sapiens
  misc_feature (295)..(295): n is a, c, g, or t
  misc_feature (309)..(309): n is a, c, g, or t
  misc_feature (314)..(314): n is a, c, g, or t
  misc_feature (334)..(334): n is a, c, g, or t
  misc_feature (342)..(342): n is a, c, g, or t
  misc_feature (348)..(348): n is a, c, g, or t
  misc_feature (354)..(354): n is a, c, g, or t
  misc_feature (404)..(404): n is a, c, g, or t
  misc_feature (462)..(462): n is a, c, g, or t
  misc_feature (478)..(478): n is a, c, g, or t
caagcagagctgacaagcaacgtcttaaaaacaggcgtggtgcgctgctgcgtgggacagtgcaacaatgccatccctgttgacaccgtccttaccatgaagaagctgccatcacctatagcaacaggaaggaaaacaaggggggctacctctgcactcctgtgcggagcagcgcatcgggcccctggcgttcctgacagcctcccggagcaggtgcgcgccatggagcgcactgtggagaacatcgtactgcccggcatgaggccctgctcttcctcgcttctgaggacaaggngcacgttcttcgantgcanagcagcttggcgaggacccngcgtgaanaaagcnagcgangggggcttctggtcctgagactctggttcaccacaggactttctgagganacaccagcccttgacctgcattcttcactcctacagacagcagctcacttgctccctntgatgattggcaggantggggtgtctttgt

SEQ ID NO: 602766 - DNA, 222 bp, Homo sapiens
gtgatgctctatcacagctatctggagttggtcaaagaatgacatatccacaagtttaatgtcacaaatttttccagaaaatggatcaccacaaacatcaggtcttttagaggccaggcgtgatggctcacttctgtaatcctagcactttgggattacaggcgtgagccactgtgcccggcctaattaatttatcttttttttttttttttttttggagtt

SEQ ID NO: 602767 - DNA, 560 bp, Homo sapiens
catcccgaccagccctgcactaaatacctttaaagctagtgggaaatccactacctgctgctttaatgttttgataccggcgtaaaattcctctggcgtaatttgtccagccaccaagctacgcgattagggtttttacgtggtcaaccgttcgtaaattaaaaccagaaatacacgccttaaccaatttcgtttgtaccccattgtttgctgaaacgattacagcggttaacgtcacgtaacaagtcaatggcaggccgagtgattgcccaatatgttcaactgtttcttcaatccgaaagattctgccccaccaaggagtaacaagcggccggcatcggtccggacatcgataatatcggcttcgctatagcttggattcgtcatatttgttgccatcaaattcgttcaccatcacttgaacagcgccaagtactgtccttcattcatttaattatacaaaatgcggttattgacgacgacaatattcgtgttacgtcaatagccttttatcagtatacattaaagcacccaatttattggggctttgacttaatgct

SEQ ID NO: 602768 - DNA, 757 bp, Homo sapiens
tggagacgaagtctctctcttgtcacccaggcttggagtgtgcaatgggcattgactcccggcttcactgtgaaactttccgcctcccaggtttcaagcgattctccgtgcctcagcctccgtgagttagcgtgggatttacgggcacctgtgccaccacgcccagctaattttgggtttttttagttagagcacggggttttccaccagtgcgtggccgaggcgtggctcctcgagcctccgtggacctcgagggtgatccccccttccttcggcctcccaagaggtgcgtggggattcacgggcgttgaggccactgtgggccggggcgcttattaagaacatttttaattccaccccaagagatttgtgcccccttgtgcacgccaggttcccttcctcttcaccccccaggcccctgggcaaaggcttgtgttggcttgggccactatcaatcaatttggggccttatccggggtatttcatatgcaagtggaatcatatgggcatagaatttcatgtgactaacaccactatttaaggcataatattttggaaggttcttccatgttggtggggtatatctatagttaatttctttttctcactgacttggttacccacgctgttttgatgtttcgcaattgggttaattccattctccccggttgctgggacattttggcactgctcatggcagggggctacctcatgattaaactggtatgggactgttcttgcacacaaacacaaacag

SEQ ID NO: 602769 - DNA, 895 bp, Homo sapiens
  misc_feature (727)..(727): n is a, c, g, or t
cgaactcctatttgagcaataacgcatatgataacatgtgtcgaaaccaaacatcacagtttgggcaggcgacgtcctgccactggtgtccagcacgggtgaggcgcgatcccgggctacaggagcgttccacttagagcctacgcggtctcaatacaggaattattagatatagcgttcgttggactcccccaaagacattggaaagccacgcagacttcataggcgagctgatcctgcgggaatagagaaattacatcttactccgtgagcttgcgagtagatgttaatgctttgtcctcacttgggccgccttcacaacgagatcacgagtacgcccttcgatggcacagcgtggaggaatggcatccactctgagcggtgagtggatcctaccacgcagagtgagtggattaccccgagagttacatcttacacgccgaagcacagcagaccgaggccagaaatgatacccaagtgatcttcagaagctgtcacgactctccctcagtctgctttgaccctgagtgaagtcgttccaaactctagcggccatgtccattgtggctcattgcacgccgaacgggatcgcctgggcgtggcgcgcgaaatctgcggtgtgagcgcactcctcgggtctcccaggcccggccgcccgtcgttgctctccggatcgctggctggccggactcatgcggatatgagtgccctgtgatgccatggaatntctgcccgagggttgcacacgacggtcgtgccctggtatggcgccgcggtgcaccggggccacgtgttgggggcctcttcgtgactgggctgcgcgcgctgtcagtcagcgtggcgccccatcgggtaggcgctgggcattccgttctttgcgcggccttagtgcact

SEQ ID NO: 602770 - DNA, 141 bp, Homo sapiens
tcctcccaaacctgtgccaacaagaccctggcttctaacctccctggttcttattaattcgaacagcatacccccgattccgctgcaaaccaggggatccctcctagaagtctgacccttgcaggcacttcaaagcttgtg

SEQ ID NO: 602771 - DNA, 396 bp, Homo sapiens
acgtcaactattccctctgcatctgaataggcatgcttcaaggcaacgcttgctttccttagactgtgcatgtccgcttatttgaagtctttgtccctggatgtagacattccatactcatatgttgacagtatgcagggaagcttctcgtgttagttgcacacaatgcagtgccgttctttgggcactgatacggtagtttacaagcacaggtgccctcaatgcatttatgccatggctggcagaatccattaatcgcaggtcatgtcagtatatttatctggtaagcactttttctccaccagatcttcctgagatgtataagtgaccttgccaaaccttaagtgcaagcacagacatatcagaacagcatgcactagcttcatgttgctcgtg

SEQ ID NO: 602772 - DNA, 807 bp, Homo sapiens
  misc_feature (173)..(173): n is a, c, g, or t
  misc_feature (460)..(460): n is a, c, g, or t
  misc_feature (466)..(466): n is a, c, g, or t
tccgggatgactatgagaagtccaaggctcgggtgcagccactgagacggcgaatcccgccgccgctcttcctctgacacagctgcctacccagcaggcaccactgcggtgggcactcctggcaacggcaccccctgctcccaggacacaagcttctccagcagccgacaagntaccccatcttcctttggccagttcacacctcagtcctcccaaggaaccccctacacgtctcggggcagcaccccctactctcaggactctgcctactccagcagcaccacttcaacctccttcaagccccggcggtcagagaacagctaccaagatgccttttcccgccgccacttctctgcatcttcagcctccacaaccgcctccacggccatcgccgccaccactgcagccattgcactccggctgccgggagtgcaatggctgcccggattgcaatggctgnccggantgcaatggctggccggagtgcaatggctggccggagtgcaatggctggccggagtgcaatggctggccggagtgcaatggctggccggagtgcaatggctggagtgcagtggaatgatcatggctcactgcagccttgaccacccaggctcaagcagttccacctcagcctcttgagtagctggaaccatgggtgcacaccaccatgcttggctgattttttttatttgtagagatgaggccttgcaatgttgcctgggctggtctcaaactcctgggctcaagcaatcccccccaccttgcctcccaaagtgttgggattacaacatgagccattgcata

SEQ ID NO: 602773 - DNA, 948 bp, Homo sapiens
  misc_feature (570)..(570): n is a, c, g, or t
agctcagggtgttgaagtgccatcaaaagactcttgccaagagaataggccaatttaactgaagataaaagagaggacaaaaataccacagcgagctagaaagtaaaagaagtgtctgaatcaatggaattatgtgctgcgtgtcagaagtgatggaacaaggagttaccagaaataggaagagacaccacctcctgttgaaccagaagaagaacgaagatactgaggatgctggattggatgattgggaagctatggccagtgatgaggagacagaaaaaagtagaaggaaacacacgttcatatagaagtaagagaaaaccctgacgaggaggaggaggaggaaacgaaggagggagaagacgatgaagaaagtgaaagaacgaggaggaaggaggagggacgaaagtgaaggcacgtgaaggtgatgaggaacgatgcccaggtgtcagatgagaaggattcagggatgacattagataaaaagccaagtaaagaaatgagctcagattctgaatatgactctgatgatgatcggactaaagaagaaagggcttatgacaaagcaanacggaggattgagaacggcgacttgaacatagtaaaaatgtaaagcactggatataggctaagagccctattatctgcgtaacttgaggccatgtggacacagggaagacgaagacattctaagaataaggctccggtaaacaccatgttcatgaaggggaaccagggggaatcacacgaagacattggggtgaccaatgttactctggtaagcttgtaatggacagaccaaccattagtcaagacattggtttaaaacaagattcgggtgcaagaacagccacatatagagacacccgggcgatttccatagtgatattaaaaatccattttacgccgcataaagtagaatatattaggtgggccaacatggtgtta

SEQ ID NO: 602774 - DNA, 759 bp, Homo sapiens
tgtgtgccacagtggtgactgcacagatcaacccatcacttaggtattaagcccagtatgcattagctattttttctaatgttctccctcccccgacctcaccccccaacaggccccagtgtgtgttgttcccctccctgtgtccatgtgttctcattgttcagctcccacttataaatgagaacatgcggtgtttgtttttctgttcctgcgttagtttgctgaggataatggcttccagctccatccttgtccctgcaaaggacatgatctcattcctttttatggctgcatcacttacagttttcaagatttatccagtgttgtaacatgtatcagtactttattcctttttgtggccaaataatattccattgtatgattataccacattttgtctatccattcatccattgatagacactttggattgtttccactctttgtggctatcatgaataatgctgctgtgcgatgtttgtatacacactctctcgtgaacatgttttcacgttctcttggatatatacctaggagtggaatattgggtcatatggtaatcgctgtgttgggacaagagccagccgaacgtggtatgtccgcaagagttgcctgcaactccttgttagcagttccccagtagccaggttcactggagggtcacaagtttactccacgatccttgccagcatttcgatgtctacgtgtccttcgagcaatcgccagcctacagttgtgaaatggtatctccactatctg

SEQ ID NO: 602775 - DNA, 1095 bp, Homo sapiens
  misc_feature (173)..(173): n is a, c, g, or t
  misc_feature (748)..(748): n is a, c, g, or t
  misc_feature (754)..(754): n is a, c, g, or t
tccgggatgactatgagaagtccaaggctcgggtgcagccactgagacggcgaatcccgccgccgctcttcctctgacacagctgcctacccagcaggcaccactgcggtgggcactcctggcaacggcaccccctgctcccaggacacaagcttctccagcagccgacaagntaccccatcttcctttggccagttcacacctcagtcctcccaaggaaccccctacacgtctcggggcagcaccccctactctcaggactctgcctactccagcaggtacagagcagaccccgcctggggccccgcccgcaaagtctgggagctgccactgggaagaagatgcccagagtctgtctccaagagggagttggaaataatttgtcctagtttctctgtggattcagtcaacaaattgctgtcctcggggaacacactagctaggaacccaacatatagctcttcttttggagggcagcatagaggggctttgggccctgggacccagtacgctgtggtttggtcatagagagctgagtccagctaactcccctgcttcttctccagcaccacttcaacctccttcaagccccggcggtcagagaacagctaccaagatgccttttcccgccgccacttctctgcatcttcagcctccacaaccgcctccacggccatcgccgccaccactgcagccattgcactccggctgccgggagtgcaatggctgcccggattgcaatggctgnccggantgcaatggctggccggagtgcaatggctggccggagtgcaatggctggccggagtgcaatggctggccggagtgcaatggctggccggagtgcaatggctggagtgcagtggaatgatcatggctcactgcagccttgaccacccaggctcaagcagttccacctcagcctcttgagtagctggaaccatgggtgcacaccaccatgcttggctgattttttttatttgtagagatgaggccttgcaatgttgcctgggctggtctcaaactcctgggctcaagcaatcccccccaccttgcctcccaaagtgttgggattacaacatgagccattgcata

SEQ ID NO: 602776 - DNA, 115 bp, Homo sapiens
ctctagagtgatcccctggcctcacccgtagctgtacctcacccgtagctgttcctcacccgtagctgttcctcacccgtagctgtacctcacccgtagctgtacctcacccgta

SEQ ID NO: 602777 - DNA, 499 bp, Homo sapiens
gacgctgtagagttagtcaaggtcatcacaccaaagattttaccaggcagctccgaatcctgccatgccacggtaactgccatgatagccagaaagttgttgtatgggggcaccgtcgctcacagccgagaccatttaaaagaataacatctcttcaggccacgtaccctatggacctctcacgagaccctctgagcaactggactatctttccaaagtccaggtattccaggttgaatacaaagacttccccaaaaacaacaagaacgaatttgtatctcttatcaattgctcctctcagccacctctgatcagccatggtatcggcaaggatgtggagtcctgccatgatatggctgcgctgaacatcttaaagttgctgtctgagttggaccaacaaagtacagagatgccaagaacaggaaacggaccaatgtctgtgtgtgggaggtgctgaaccttttctggccatgaaccattataaaatcccaacgggtac

SEQ ID NO: 602778 - DNA, 752 bp, Homo sapiens
  misc_feature (173)..(173): n is a, c, g, or t
  misc_feature (460)..(460): n is a, c, g, or t
  misc_feature (466)..(466): n is a, c, g, or t
  misc_feature (492)..(492): n is a, c, g, or t
  misc_feature (510)..(510): n is a, c, g, or t
  misc_feature (676)..(677): n is a, c, g, or t
  misc_feature (684)..(686): n is a, c, g, or t
tccgggatgactatgagaagtccaaggctcgggtgcagccactgagacggcgaatcccgccgccgctcttcctctgacacagctgcctacccagcaggcaccactgcggtgggcactcctggcaacggcaccccctgctcccaggacacaagcttctccagcagccgacaagntaccccatcttcctttggccagttcacacctcagtcctcccaaggaaccccctacacgtctcggggcagcaccccctactctcaggactctgcctactccagcagcaccacttcaacctccttcaagccccggcggtcagagaacagctaccaagatgccttttcccgccgccacttctctgcatcttcagcctccacaaccgcctccacggccatcgccgccaccactgcagccattgcactccggctgccgggagtgcaatggctgcccggattgcaatggctgnccggantgcaatggctggccggagtcatgctntgttgccaggctggagtncagtggcaggatctcggctcactgcagtcctcccggttcaagctattctcctgccttaacctcccaagtagctcggactacaggcgcgcgccaccacgcccggctaatttttgtactgttagtagagacgaggtttcaccatgttggccaggtgtctcgatctccnnacctcgnnntccaccctcctcggccttccaaagtgctaaggattacaggtgtgagccattgcactccgtaaggat

SEQ ID NO: 602779 - DNA, 123 bp, Homo sapiens
tgtagatagtggttgttgtgatagcataacctgttattggtttcttccaaaacaggtgaatacacagaaaaggcaacagaggacagataaaagacccatcagtatcaggagcctggtcccatg

SEQ ID NO: 602780 - DNA, 837 bp, Homo sapiens
  misc_feature (173)..(173): n is a, c, g, or t
  misc_feature (460)..(460): n is a, c, g, or t
  misc_feature (466)..(466): n is a, c, g, or t
  misc_feature (577)..(577): n is a, c, g, or t
  misc_feature (595)..(595): n is a, c, g, or t
  misc_feature (761)..(762): n is a, c, g, or t
  misc_feature (769)..(771): n is a, c, g, or t
tccgggatgactatgagaagtccaaggctcgggtgcagccactgagacggcgaatcccgccgccgctcttcctctgacacagctgcctacccagcaggcaccactgcggtgggcactcctggcaacggcaccccctgctcccaggacacaagcttctccagcagccgacaagntaccccatcttcctttggccagttcacacctcagtcctcccaaggaaccccctacacgtctcggggcagcaccccctactctcaggactctgcctactccagcagcaccacttcaacctccttcaagccccggcggtcagagaacagctaccaagatgccttttcccgccgccacttctctgcatcttcagcctccacaaccgcctccacggccatcgccgccaccactgcagccattgcactccggctgccgggagtgcaatggctgcccggattgcaatggctgnccggantgcaatggctggccggagtgcaatggctggccggagtgcaatggctggccggagtgcaatggctggccggagtgcaatggctggccggagtgcaatggctgggtcatgctntgttgccaggctggagtncagtggcaggatctcggctcactgcagtcctcccggttcaagctattctcctgccttaacctcccaagtagctcggactacaggcgcgcgccaccacgcccggctaatttttgtactgttagtagagacgaggtttcaccatgttggccaggtgtctcgatctccnnacctcgnnntccaccctcctcggccttccaaagtgctaaggattacaggtgtgagccattgcactccgtaaggat

SEQ ID NO: 602781 - DNA, 230 bp, Homo sapiens
cgaccttacttagggaggaagagtgtgctatagtatatgaaagctccaccctgtttgtatctgtcttaactctataaattatggactctgagacttagtctaattacaattgaaacgattctggaagcattgtaattgcaggttgaacgtattcaaaagtaactattgaacatttggcattttaacattatttttcttaaaaaattgtcaaacattggaccatacattct

SEQ ID NO: 602782 - DNA, 626 bp, Homo sapiens
  misc_feature (173)..(173): n is a, c, g, or t
  misc_feature (460)..(460): n is a, c, g, or t
  misc_feature (466)..(466): n is a, c, g, or t
tccgggatgactatgagaagtccaaggctcgggtgcagccactgagacggcgaatcccgccgccgctcttcctctgacacagctgcctacccagcaggcaccactgcggtgggcactcctggcaacggcaccccctgctcccaggacacaagcttctccagcagccgacaagntaccccatcttcctttggccagttcacacctcagtcctcccaaggaaccccctacacgtctcggggcagcaccccctactctcaggactctgcctactccagcagcaccacttcaacctccttcaagccccggcggtcagagaacagctaccaagatgccttttcccgccgccacttctctgcatcttcagcctccacaaccgcctccacggccatcgccgccaccactgcagccattgcactccggctgccgggagtgcaatggctgcccggattgcaatggctgnccggantgcaatggctggccggagtgcaatggctggccggagtgcaatggctggccggagtgcaatggctggccggagtgcaatggctggccggagtgcaatggctggccggagtgcaatggctgggcttggactgggcctagagagctttgttatttttattttt

SEQ ID NO: 602783 - DNA, 157 bp, Homo sapiens
tgctggggatacagggagtgagccactggcacccggccccttctactcacttgggattcaatttggctaggtttcatggctttagcttcccttggcacaccccaaccccagcttttaaaggtaattcttttttttttttcccaatttttcaacataa

SEQ ID NO: 602784 - DNA, 649 bp, Homo sapiens
  misc_feature (173)..(173): n is a, c, g, or t
  misc_feature (460)..(460): n is a, c, g, or t
  misc_feature (466)..(466): n is a, c, g, or t
tccgggatgactatgagaagtccaaggctcgggtgcagccactgagacggcgaatcccgccgccgctcttcctctgacacagctgcctacccagcaggcaccactgcggtgggcactcctggcaacggcaccccctgctcccaggacacaagcttctccagcagccgacaagntaccccatcttcctttggccagttcacacctcagtcctcccaaggaaccccctacacgtctcggggcagcaccccctactctcaggactctgcctactccagcagcaccacttcaacctccttcaagccccggcggtcagagaacagctaccaagatgccttttcccgccgccacttctctgcatcttcagcctccacaaccgcctccacggccatcgccgccaccactgcagccattgcactccggctgccgggagtgcaatggctgcccggattgcaatggctgnccggantgcaatggctggccggagtgcaatggctggccggagtgcaatggctggccggagtgcaatggctggccggagtgcaatggctggccggagtgcaatggctggccggtattagtccattctcacactgctaataaagaactacctgatggtcgggagcagtggttcatgcctgtaatcccagca

SEQ ID NO: 602785 - DNA, 663 bp, Homo sapiens
  misc_feature (173)..(173): n is a, c, g, or t
  misc_feature (460)..(460): n is a, c, g, or t
  misc_feature (466)..(466): n is a, c, g, or t
tccgggatgactatgagaagtccaaggctcgggtgcagccactgagacggcgaatcccgccgccgctcttcctctgacacagctgcctacccagcaggcaccactgcggtgggcactcctggcaacggcaccccctgctcccaggacacaagcttctccagcagccgacaagntaccccatcttcctttggccagttcacacctcagtcctcccaaggaaccccctacacgtctcggggcagcaccccctactctcaggactctgcctactccagcagcaccacttcaacctccttcaagccccggcggtcagagaacagctaccaagatgccttttcccgccgccacttctctgcatcttcagcctccacaaccgcctccacggccatcgccgccaccactgcagccattgcactccggctgccgggagtgcaatggctgcccggattgcaatggctgnccggantgcaatggctggccggagtgcaatggctggccggagtgcaatggctggccggagtgcaatggctggccggagtgcaatggctggccggagtgcaatggctggccggagcgcaatggctggccggagtgcaatggctggccggagtgcaatggctggccggagtgcaatggctggccggagtgcaatggctcgatctt

SEQ ID NO: 602786 - DNA, 452 bp, Homo sapiens
ggaccccaagggagggctcttggatctggcgcgagaaagaattcagggcgagtccatggtgcacagtgaaagcaagtttattaagaaagtaaaggaataaaagaacggctactccatagacagagcagccctaggggctgctggttgcccatttctttcttttcttttcttttctttcctcttctcttttctttcttttttttgatggtgtctcgttctgtcactcaggctggtgtgcagtggcgagatcttggctgactgcaacctccgcctcccaggttcaagctattcccctgcctcagcctcccggctgcttacggctgaggtgggaggattgcttgggctcgggaggttgaggttgcggtgagctgtgattgcaccactgcactgtagcctgggcaacagaacaagagcctgcctcaaaaaacaaaacaaaacaaaacaacaaaaac

SEQ ID NO: 602787 - DNA, 602 bp, Homo sapiens
gtacagatggggtttcacagagttggccaggttggtcttgaactgatccttgtgatccgcccgcctcagcctcccaaagtgctgagattatagatgtgagccactgcgcctggctcccttccccaccgactcttaggcccatgttagcagccagcagtgggtaatctacagtctctctaattctgagctcctttgtggtcacatacaggaagggaggccaagtggcagtgagaccacactagggtaacaccagacttaccagccaccctcaggagagaaccgaagcaggcaagcccccagctctcgggagaaccaccttctcctttggcttcaggcaggtgaggaggctgtactcctgtcacagctcgagaattataaaggatgcttacaaaagaactgtttttccctaccgtcagttataaaagcctggacaacagagcaagactccgtctcaaaaaaaagaattggctgggtgtggtggctcagacatgtaatcctagcactttgggaggccgaggtgggtggatcccttgagtgtaggagttcaggaccagcctggggaacatggcaaaaccccatctctacaaagaaaagatagatag

SEQ ID NO: 602788 - DNA, 655 bp, Homo sapiens
  misc_feature (638)..(638): n is a, c, g, or t
gctgtggccacagtgataaccaaagcgtatagtaccatcgatctgcgataaagcactggtagcttcaggtcccggtttcctttgtaggctaacaggatctaggcctcatagtagctccgagtagatggtataggaattttaatcgtgcaagctgtggccgtattaacgaagatcttacagcagcgtccattggaacatcatgtgccatattagaacgaactaactcgaaactcctacacatgaacacatgcacagttatttgatgaaggtgactattcacttgacacagtgctcgtcaacttcatacgatcagcctaaacgctataactctgctacttgctataactttagtgctatgtctgacactatgatgctataagtgatatgatgttgcaagacggcaaagacatcgcatacctttgccgattgccatgactatatactgatgtgacgtaccttgctctttatgacagttaagtgcagtgatggatgcatagagaacctatatagagctaggccatgcttacctatatgccgcgtactacttagactattgatagtgggattacgagcaattaactgatggttgcaagcttatagtgctacgttcacgtggcagaccacggagacgtcagctntacagttgcttatgccc

SEQ ID NO: 602789 - DNA, 377 bp, Homo sapiens
attgcttggaaccttggaggtcaggctgtcagctgagccatgtattgtgccactgtactcttagcctgggcgatagagacgagacccctatctcacaaaaaaatagataaaagatacaactattagatagtattatttttccacctctcgtggagatccctttagaaatgtcattgcattcatcatatcattgacaagtgccgttttctgatgatgtgattgttcgccgcctcctggggatacaaaaattagtcaggtgtggtggcacgtatgtgtaatcacacctgactaatttttgtatttttagtagagacggggttttaccatgttggccaggctggtcttgaactcctgatctcaagtgattgttccccgct

SEQ ID NO: 602790 - DNA, 316 bp, Homo sapiens
  misc_feature (91)..(91): n is a, c, g, or t
  misc_feature (311)..(311): n is a, c, g, or t
aggtgaccctatgaaattgacttaaaaaagttgggctggatatagtggctggcgcctgtaatcccagcactttgagaggctcaggccgtanggtcgcttgagcccaggagtttgataccctgtctgagagagaattagctgggcatgttagtgtgcgcctgtggtcccagctactcaggaggcggggcgagagggatccttccagggctgagatgtgagggttctttgagcccagggaggtccatacttgcagtgagccattgattgggccactgcatttcttagccttcagttgacaagagttgagactntttta

SEQ ID NO: 602791 - DNA, 114 bp, Homo sapiens
ttttttttttttaaaggcacagaaaaaattatgggaaatccctggaatacttttggaagtgtagctcggtattcccaaacaaagtaggtgggagaggtgggagaaggaccggtg

SEQ ID NO: 602792 - DNA, 151 bp, Homo sapiens
tcagcacatttagttatccctgtgtatcccacatatatcttacttgggagcactttttttttagtcccgatttacatccggggaactggtgtgaccatgctttaaaaaaaacggtggtaaattaaagataagatttaccatcttaaccatt

SEQ ID NO: 602793 - DNA, 331 bp, Homo sapiens
  misc_feature (112)..(112): n is a, c, g, or t
  misc_feature (198)..(198): n is a, c, g, or t
  misc_feature (233)..(233): n is a, c, g, or t
  misc_feature (288)..(288): n is a, c, g, or t
  misc_feature (327)..(327): n is a, c, g, or t
ccaggggtggaatgatatggtttggctgtgtccccccacccaaatctcatgttgaattgtgatcctgagtcttggaggtagagcctggtgggaggtgattggatcatggggncagatttcccccttgctgttctcatgacagtgagttctcatgagatctggttaagtgtgtagcacttccccctttgcttgctctcnccctctgccatgtgaagaaggtgcttgctttcccntcgcccttctgccatgactgtaagtttcttgaggcctcgcagccatgcttcctgnacagcctgcagaactgtgagttaattaaacctcttttcntcat

SEQ ID NO: 602794 - DNA, 885 bp, Homo sapiens
tttgggaggctgaggcgggcggatcacgaggtcaggagattgagaccatcctggctaacatggtgaaaccctgtctccactaaaaatacaaaaaaattagccgggcgtggtggcaggagcctgtggtcccagctactcaggaagctgaggcaggagaatggtgtgaacctggaaggtggagcttacagtgagctgagatcacgccactgcactccagcctgggcaagtgagactccatctcaaaaaaaaaaaaaaaaaaaaaattcttcttttgacagataagggatccggggttcgaaaaacgagggtgacctgcccaaagtgtccaaagccacacttacaaggcaacaaataaggggtttaaagctagcactggttagacttcaaagcctcttaaccattctactggccctgctgtagggcatggggaaatggggggataacgccagggttggccatcacaagatgttaatataacaattaacttggcaaatgggatgggcagcccctggttaattgggccccacgttggtgggcccagggtacacgcggctaagcactataataaccctggttaagtcactccaaaccagaaatgctcccctacacgcaggttctaataggggtcgacgtgtgggcacttaagcagggaacctgagtaagtaagccagcacagggccggtggacgtgactccaggctggtaatcccagcacttggcgaaggctgagcgctacgggtggcacacaccttgaggcaggagtttacaagaacaaccccggccaattagggccaaaccccgtgttttacctaacactttcacacaactgggtaggcgggttgttcactgcacgccgtaaatccaggaccacaggaacctacgcagg

SEQ ID NO: 602795 - DNA, 1286 bp, Homo sapiens
ttcaaaagagcaggctgagagcttcaaggtgcaagatcctgttcatcttcatcgacagcgaccacaccgagtaaccattctgcatcctcgtagttctttggcctgaagaatggaagagtgcccggccgtgcgctcttatcaccctgcgaggaggagatgactcaagtacaagcccgaatcggaggagcttgacggctagagaggatcatctagagtttctgcgcacctgctgtcctggaggtgctagaactccagaccctaactgatgagcctggagctggctgtaggattgggtacaaggagtgcatgtctaaggctgcgttgtccgggatatgaaccttttgtagagtacgtggccttttgtgactgatgcaaatacacataggggtcgtagggtaggagttactattgtgcccagtggttgttggtcacgtgcgaaatggttttgagcgtcacgcatttttgcggactaaaagctgcgggaaggaagatcggttatgagaagggcatcgcagtggaacgaaacgattccgttgggagttcgtcgcgaatgaattgcgaacgtctggactgtggcccaatcagacgggttgggacggggcggatcgaaaagggttgtaaccagagctgtccccccatgaaggtcaaaatgggttcgtttgacggcattgatcccagtgtggcccccgaacgacgggcaccggattcgactctgcaagtctaacgcaaatcggggggggcaaaacggcagaccgccattgggaactggggtcgtgtataacacggcaacaagtttgccttggggtagcaacgccaggggctgggggcaccaattgcgggcacttggtgtggggcccacgggggggagaatttgtagcttggactgggaactccacttccgagaagtgagatacccccgttgggaaaaacgcgataatggaccacggggagggggtatagccacaggggaagccaatttggcgccaggggaccctgtaacaggacgctgcaacttacaaacgcacacagcacagacctttgcctgcaaccaacgtgtattttggaacagcggtggcctaacaaattgtacacggccgcatcgccggctccttagtgtaaacaccccccggttgttgtcatggcccattgttccccgggaaaggaaactccgcccattttggtggcgcgggcttggcccgttggtgacgcgccaaccgcgcaaatgcccaagggacacagtggcggaccaacaggtctgtttgcccggcaaacgcacgcactttccg

SEQ ID NO: 602796 - DNA, 894 bp, Homo sapiens
  misc_feature (37)..(37): n is a, c, g, or t
  misc_feature (67)..(67): n is a, c, g, or t
  misc_feature (121)..(121): n is a, c, g, or t
  misc_feature (547)..(547): n is a, c, g, or t
  misc_feature (583)..(583): n is a, c, g, or t
  misc_feature (606)..(607): n is a, c, g, or t
agcggaggatggcggcggctggggctggccgtctgangcgggtggcatcggctctgctgctgcggancccccgcctgcccgcccgggagctgtcggccccggcccgactctatcacaaganggttgttgatcattatgaaaatcctagaaacgtggggtcccttgacaagacatctaaaaatgttggaactggactgttgggggctccatgcatgtggtgacgtaatgaagattacagacttcaatgtgtgactgaaaacggggaacgattgtggatgctacggttgtaaaacagtttggctgtgtgttccacaattgcctccatgctcattagccactgacatgggctgaagacggaaacgacggtggaggaagccttgtactatcaaataaccacagatatctgctcaaggagctcgtgccttctcgtcccgttgaaaactgtacatgtccatgcttgggctgaatgattgcaatcaagggtcgccctggcttgattatcaaattgatatcagggaatcccaaaaaaggagaggcagagaagaantgagccctccctcggcgacctccagcaggccacacnagctgtttcccacctgctgtgcnntcaccttagatgttcagaagccgcttcctctccactgaagagctatgagatacgcacaatacttgctgttcacgttatgactctcatgcaagcaagatacacagtttcattgttctgaatccctgtggtttctttcagcccacttttatccgccttaacctaagttaatgtatattttgaattggtgtgtatgacctcagaactgaaattggataatgaagtttgcaagttttgatagcccgtgaagtgcataagtatccaattttacctgaaatttgatttggggg

SEQ ID NO: 602797 - DNA, 877 bp, Homo sapiens
  misc_feature (588)..(588): n is a, c, g, or t
ttgatatatgttttttttggccccgcgggaggttttttaccacccacctgtgtcggcggtttagatatatacgtaagccgccttatgtttattgaacggagcgtaaaaggcctttctttgaggaatttaagtttcgtttctcccccccctgtggggcacaccactgcgacaactgttcaatcccccctgtgtttgagatcctcctgttggagtctttttggcgcccccaaagcaccacggtttttctggggtgaaaaaatttggttagaacacaaccgcccccgcactcttcccctccttctctctttaaggggacaccacccaattttgttactctagtcttgaaaaaattatttatttttgtgttgggcccaccaaaaacagcacgaactctcgggcaaggaaggctcacccccacgcaccactattgtcttgttgagaaaagagcgcacgatctttctctctctgagagacccaaatcgggcctagtccacaccaccaaatatagtgggctgcagaccaccccccatcgtgttggttaaatcgatccctatgctaaaaataattttctgagacaagtttatgtgntcgaacccactattatatatcctgctatccacccacgccacattctttttattttgcccccaaataaagatcgaacccacccctcttatcccccacccccgctgtatgagagaaaataataataatatgttgttttagaaacaataaagcttataacccccctacaaaaagaagcattcccccttgttttttttttttttttttctccccaaaaccaatttggaaatttttttccaaattaaaccacccttttgttcccccccaaaaaaaattggggggccccatccca

SEQ ID NO: 602798 - DNA, 816 bp, Homo sapiens
gacagagcagcctggcgggtgtcctaccaacaagcctccgtttctccttcctgtacgctagggctcctgaaactcacctgatgaagtctccgtctgtcacccaggctggagtgtaatggagcaatctcggctcactgcaacctctgccttccaggttcaagcgattctcttgcctcagcctcccgagtagctggaattacaggcgcatgccaccacgctcggctaatttttcgtattttcagtacaagacggagtttcaccatgtaggtcaggatggtctccgtctcttgaccctcgagatcagacccgactcggcctcccaaacgtgctgggattacaggcgtgagccactgtgcccggcactagcgatttctaacatactaatctacgaacgtactctgtgagagcaaatgcgtctaccttcgcaggcgcatggcggccaggacatcatctacaggactcaccacttggcacacaacatcgtgaccggcacgaaagcatgaacgcacacatactttaccacaaagcatggggcctgctacggactcgaaacccccagtacagcaccgaaacgaattggccccttggacccatccaggaccttcagttccctcggacgaacaaccgcgttccagaagcgaacattccccaagcggttggcctacaaccccagattcgctggtgaccaaactcaccatctggccccactgggccccccgcgcacaacgccaccggcaccgcacgaagccacctcgcaacaaaaacccatctcacgccccctcacgggcgccccacgcgcagggggtgccagtcacc

SEQ ID NO: 602799 - DNA, 188 bp, Homo sapiens
atcgtcgtctctgacagcactgccgccacgagcgtggccaggccatcgttttggctcagtggtgtcagcacctcgttcagtccatcgacttcacccagacccgatagcaataccaggcacgaggatggatcgcggaacccacacagggcatcgaaatcagtaagggcgacgatcatctcgggcttggg

SEQ ID NO: 602800 - DNA, 123 bp, Homo sapiens
ccgcgttatgtcttacgctggtcccagtattccctaagcactgggggtcttttttagaatgtgccaccagagtcaatgtaagaacacttttgagagaattacacctatactacactgttgtgt

SEQ ID NO: 602801 - DNA, 162 bp, Homo sapiens
tgtgatttgctatagtcactaagcgaatatatggcagaaccagctgggcactgcagcgcgggctatgatcgctccatgcactccagcctgggggacaagagcgaaactccttttcaaaaaaaaaaatttacatataagtaatggcttaatgttaaattctgg

SEQ ID NO: 602802 - DNA, 202 bp, Homo sapiens
ttctgctaccagtcgagcaggtcctgagcgggcacggcctggctggaggagcggacgcacacacagccaggagctaggtccctgcggccctcgggacgggggaagagcgtcaacaaatttatggagagtccagccgctgggtcggattgagacaaaccattgtgtgatagggttatgggtcagcaggctggagagggtactg

SEQ ID NO: 602803 - DNA, 430 bp, Homo sapiens
gatacgggctgtagccacggctcccatctgggtacccagggaacctacatgtagctcgtgtgcagagagcccacattggccacccaaaagcaattgaggatggagcaggcttggggctggagctcattatttggaataacaaccacatctgcacagagaggacctgataagatgttgtccttccatctatatctgggaatcctgtgtagggtctctctgtaatgacaggggcagggttggctccttggcctctagttagcctcacgagtagtctagtaaagattttgcaaacttgtcaccatctgtggacattctggtcagctcttgttttcaccctactgacttcttcaggcactaggctgttgctttagaccattaatggtttttcttcctcttcaaatcagtaatcaataaatcctcttcaaatcag

SEQ ID NO: 602804 - DNA, 231 bp, Homo sapiens
ggtcggcctcatctcgttggattgcacatgcagtcaggctgcatgtgtttcgcatccatcaactcagtcatggggcatccaggggtgtcaggtgtgcacttgtaggtcaagcacagatgggctcagggccatttttcacatcttcagcagcgcacacagcctcatacatccacatgcagcccagcctccatcacaggggcataggccacatggcatcagagtattcatcag

SEQ ID NO: 602805 - DNA, 238 bp, Homo sapiens
acaccacctgagtcacacatgagtctattgatgtttgtgaattcttcgataatggcccatttgggcaaaaagccggttagcgggggcaggcctcctacggagaggagggtgaatggaattaatggtgttagtcatgttagcttgtttgacatacaagatccaaatactgtcgctgtgctagattctaatttgtgcaataataatgcggtagtcgttaggataatataaatagtttaat

SEQ ID NO: 602806 - DNA, 430 bp, Homo sapiens
agcactgtgagcctccccaggttctggaacagcttttatgtcctgtacccagtgttaccctcgataattttagtaagccttccagattcctgatcacccaagggaggcataggaggctcacaagtgcagcactgtgagtcctcctatgagcactagtggccatcctgctgtgtaatcccacgaactctgggcagttggagagaagcaggcatgactcgcttgagcatcaggcagttctgagaccagcctgaggcatacaaagcgaaggtatctatgaaaaattaggaaaaaacaaaaatttagcagagagtagcagtcatccgcctgtggatccagctaatcaggagactgaggcaggaagatcacttgaaccactaacagccggagttggaaactgaagtgagcaaataccacgccactccattccagc

SEQ ID NO: 602807 - DNA, 136 bp, Homo sapiens
  misc_feature (88)..(88): n is a, c, g, or t
cactctagtccaacaactgagtcgtaaatcttcacaaccaaatccataaaccccaagtgacatgtgctcgtaccactgctactagccngtctgtcgtgtgtacaacggtctcttatccatataaagcatcttcaag

SEQ ID NO: 602808 - DNA, 236 bp, Homo sapiens
  misc_feature (188)..(188): n is a, c, g, or t
gaagagctgggtggtgcacttgggttggaggttctctggccttgacgatcaagtgtaacctggatgggaaggacctcgggctggggaggggctcccgttctcaggatggcctcacggtatcccacctctcatgacctggctacctcatgccgagtccctaaggacgtgttaaaatccagtcctgcctnacccaaacctctgacttagtctttgggctgggcctccacaacctttca

SEQ ID NO: 602809 - DNA, 442 bp, Homo sapiens
actgtgaattcagttgggtgtgtagctcaggcctcaggcataaatacccagcacttagggaggtcaaggtgggaggatcacgaggccaggagtacgagaccagactaaacaaaatagcaagacctcatctctaagaaaataaataaataaaaaacaaaaacttgtgtgaataagcatactatattacaatataaccaaatgatctcggccttcacaccatcttctaggacacctctgcaccatgagagcctagtgaagagaagcgaatgcgcaggctgaaagcgcacaagaggaaagatgaggcagaggtccaagtaacgcacaagcttatgcacccatggaggctacaggagcaaaaacatggaatccagaggctggggatgctggtacagttattgaggctgctgctattgtctagagcttgttccagtgcatctagaac

SEQ ID NO: 602810 - DNA, 150 bp, Homo sapiens
  misc_feature (147)..(147): n is a, c, g, or t
gatctagcaggatcctggctcagtgatctcctgcacagatctatatagctgggataaggcgctgcacacagcagctaattttgtattttagtagagacggagtttcactatgttggcaggtcgaactcctgacctcaagtaatccanctg

SEQ ID NO: 602811 - DNA, 935 bp, Homo sapiens
gctgcatgggcccctccccgcgtgtctcaggagactgctggcttttccaggtggtggtagagaggtcccgaagccgtgtgcacagagtcctttgtcccggcggcgttacatgtccttcacgatgttccgtggaggcggaggacaatgcccgcaacgagaacctgagtaacagatacttgacagcccacccaggtctctgagcaggaacatccacacggtcaggagctggcagagctaacaggtgtgactgttagagttgccagaggagccacagcgtctgctggaaccaggcagaacgctgaagggtgtcacgcagcgaggaaggctgctggttccagtgaatgacgctgactccgctgactgtcagcaccttgctggatgcctcggcaaagcactggcaagaaggtcatgcagaaggaaacaattcaggaccaactggtgtggctcctgaaaagctcttttgatgaagaagatgagcgcaggctctgctacgtcctgcctgtgaaacgaatctcttcaggaaaccagaggcttccctcatttaccttttctcctacaaagggaagcagctgaaagaaacagtccagtacttgacccatgccccacaaaagtctactatccaatatggggcagcttaccaatggttcctaccaactttgtgaaccgcactagcgaagtaactcgctatgacaactactgcgctgtgcttaggccaacgggagaaaatttatgtccgattctgcgtgcataagtctaccgacatggccactaacgggccggatagcccattgccgggccaatgctgtcatcccggcctttgaatagctgcgcccgcgggctgtctgaccctgggtatcgcacacccccacacacgaactccctccattaagaaacgggttcgcactcacaggggacagcaaggaagcactccgcag

SEQ ID NO: 602812 - DNA, 607 bp, Homo sapiens
atgacagttagagcgaatacgtgattagatggtatagcgataataacgagatgagttagggttgtctgtggcaagtgttcaatatctaggctgcagtattgatattattatattggtaagcaagtgaaacaaaaggaaatgaagttaacatttctataaaagtctttttcttgtgaaagaccaaaggctgtgtctaatctattaatgttctatgaagagcagtgatgacatacaatctgcgaaaggcacaaacacaaatagtatggctggagctggtttacagcttatattctatcaatacatctcagccagcatgctctggaagtgctgtagctgttctctgctttcacttttcagcaacttcagaactgagtccatgcccagctcatatgtagtcacactaaattgtgtttgcagtagttgaaaaggaaaaaacataagaaaaaaaagcctaaaggtgtaactttggaagtacagatatcataaaggttactcttttctatgagcattttaatgggaggtcttgccatttgacacatgaatattataaaacttataatattctggctgtggctgcctgtgagaaatgtgtttgtagcttgagcaa

SEQ ID NO: 602813 - DNA, 109 bp, Homo sapiens
atcctcccagagagcacttctctgaagtagagtcatccagtcacttcagtcccataacttttacctgttccaaagccaatactgaagacctcccaaaaattggttggtt

SEQ ID NO: 602814 - DNA, 189 bp, Homo sapiens
  misc_feature (83)..(83): n is a, c, g, or t
  misc_feature (103)..(103): n is a, c, g, or t
  misc_feature (132)..(132): n is a, c, g, or t
tggctattctcccgttcggcagcctgcaacgaagctactggagctcatcggccgctgcactgacctcgctgtcgattgcgccntggccggtaagactggcgtnatcggccaggacgaggagaacggcgacangttgacgaacatcgccttcgatcggatcaagggcggcaagcctttcgacaccactca

SEQ ID NO: 602815 - DNA, 315 bp, Homo sapiens
ccggtgataactggcaggtaccatagttttgtgtgtgcgtgtgtgtgtgtgtgtttcttaatcagcgtctcagtttcaattctgacctggcctaatcatactcgaactcaaaggttaattttggtctaacttaaaaatctgatgctctcaagagacagccttgttggaccattcaacgatccagttgtttctcgccacccccccttgttttatacctcgtcactacagatgccacacttcaacgtagctcctttttatctacttcttagcattatgttctctgattcttttgctaatgttcactgcccacaaaca

SEQ ID NO: 602816 - DNA, 383 bp, Homo sapiens
tcagagtctgtgggaactgaatacgcgacaactggagtacgattgaccgcaggcgcgacaggggtgctctatgctatatttccggaattaccaatttggtgccaagttaaaggaagggttttgggaaacctgttaaaacggccccggggcgggccaaaaaatttttggaaaaattttgaaaaggcctttcagggcggaaccccttgggaaaataagaacgtccccaaagggtttccaaaaatttataaaaggggggggggggccttggggatttttggggacccccccccccgaacaaattcgtggggggacccttttggggcccatttgagggttttggcccgaggggccccccgggggttttgggggccttcccccggggt

SEQ ID NO: 602817 - DNA, 356 bp, Homo sapiens
  misc_feature (178)..(178): n is a, c, g, or t
  misc_feature (198)..(198): n is a, c, g, or t
  misc_feature (248)..(248): n is a, c, g, or t
  misc_feature (258)..(258): n is a, c, g, or t
cacaccattccaggtttgtaccaaatggggctagggcatagtaaatcaccattactatttaggaaatggtacaagtgtcaagttcccagactccaaacaagtgctactcttgcaggcagacctttctaaagatagcagtctcacacttgctatgttaaatattttctgcatatagttnattagcatatttcaagtttntattaaacatgaaagtaaacattttaaatattttttaaaaagttaatttnttcttaatanatcgtttaaaaaatgttgctcttgtgattattgcttatttgcctatttattaaacaaatacttactgagttcttactcaataactgtattagatgcca

SEQ ID NO: 602818 - DNA, 352 bp, Homo sapiens
  misc_feature (28)..(28): n is a, c, g, or t
  misc_feature (38)..(38): n is a, c, g, or t
  misc_feature (133)..(133): n is a, c, g, or t
  misc_feature (155)..(155): n is a, c, g, or t
  misc_feature (186)..(186): n is a, c, g, or t
  misc_feature (278)..(278): n is a, c, g, or t
  misc_feature (284)..(284): n is a, c, g, or t
  misc_feature (315)..(315): n is a, c, g, or t
accagattaaaaatacagtaggaataanttctgtttgnccacaggaaactggtgccttctggtacaccctccctatattaaaagtctctattacatggcccaggcacagtggctcatgcctgaaatcccaacnctgggacgccagggtgggcagntcacttgaggccaacttgagttcgagactancctggccaacatagtgaaaccccgtctctgctaaaaatacaaaaattcgcgcgcctgtggtcccagctctggggctgaggaatgggaactcncttgancctgggagatggaggttgccgtgagcggagntcacaccactgcactccagcctgggcaacagggtgag

SEQ ID NO: 602819 - DNA, 988 bp, Homo sapiens
tagacactatctatcggtacacactattttcccctccatatggacccaggtcggtttacataaaaccgtgtcattacagtagtattgtaacatttgtagattggatagcattttcactgatattgatgagtttcttgtaaggttaccgtcttctaagagattgctgctctactggccactgagcagcaattcagaataaccttgaaacgatggagtctaaacaatcattacgctgttacacacatggaacatgttcacttactacacgtgactcaccttcgcacttgagccaacatggctcttaacttattatatccttaacacaatcagcttacagacatatactacaaatacctaactattaggaccaaacgcttacagtattactatatatacatatgatacgtatctataactgcaaacagaatacacctataaacgtagcaaactctatatttttcccttttatacgtcctgtatttacctcgatatgtagtttactatcaccactatctctgcgaacgtcaatacgagcacactgacgttaaaactagcacacacatatatataccttccatgcacatgcatccacgcacacgcaagggccgtccaactaagttaaattacaatgtaacacgtatccgttcagaatgggatcactccgacgcccataactttatataactcaaccatcagtaatcaccaaagtgatatcccaactggattacaccccaacgatccatacttaggccatgctacgtgggcacctgaccccttcgtcaagcgttccaaatcaatttaatacagttattcagttaccctactcgcggacattaaacaccatgacggtttacgtccacgggggcctcaccaaacaattgtcccgcctgtcaccacacattcgttacagaagcgcccaatacggtctcaccaacaacaattattccctacacacactggtgtaggattgggttaaccctttttcaag

SEQ ID NO: 602820 - DNA, 876 bp, Homo sapiens
ggccttccttacccaggtcgaccacctcagtactccactagacgacaggactgaccagttagctcttccttccaagaagcttcgcagatctagcggtctggggtctggttgaaagatggcggccctcactaccctgatataggtacataggatgaaacatcaggatcgcgtacagttagagcaacgacctcggcaacaactgggctggcgtactccacgcacggtgatgtgctggcgtgtgccagggagcaatgacgcaggacgacacagtcgaggacggacgtgagtggcaacgcttgcctggcatgcagtactgctctcacgcacgccgctggggtggtcctcgtgtctcgtacacctggcgtgggagtagtacgcggacaagaccaacagaggcatactccctgcaagtgtgctgcggtagactccgcgacactgcacctacactagtatacatggctacgcgagcaggggacgtggatgctttcctagaacccctaacaggacactgagatgaatcccaggtggtggagatttattaccaggtggccacgcgtagcggacttggtagcaagggtcaattgaaatggaccccattgtgaacgggcaccagtggcctatggggaaccactgtcgaatgacctcatattaagcccccctggcgaggcggaaggcagcatgacagcgggggcacacgccctggataactggcgcgcacacaaggcggataacggtacgcctgggcacttggcacttcaacgggggggctcccccgagcagaggcacaggggaccgtcgggcaaatcatacaacggcacacgttggcagaacgccggactacttcaacgaaaagcacgaccccagggggcaccaatg

SEQ ID NO: 602821 - DNA, 222 bp, Homo sapiens
cacaccactccagaccatctgaacccccatcagtggacccccctggggctgttaatatactctacaagccatactaaaaatgctctgagggaactggctcacgaatagtgggcctggtgattgtctatcacgcaaggatttgtattagtcactgttccagaacatctgtccacctattctgcctgccccttgtttccctgcacatgcaacatgcttctaggg

SEQ ID NO: 602822 - DNA, 373 bp, Homo sapiens
cacgaggctgagctgttgggtatgaagtgttccagaacagactttaccacctgaaactgctgcttcatgttcagatcaggcagggaacacacctcgcaacatgtaacacaaccaaagaagagtacacttaagttgacgacacaacacgtgatctgaaacaagaagtttgtggctactcaacagctttgagagagcacttcccaacgctgctagtagtctttgatttcttcaatgctgtaccgtgagattgcccggtacagcaccagttgtattctttaatatcttgggagatcattttctctcgctcttttttttaatactagcagctttcatcctttggaacgtgtgctgaagccaaagaatcaacatgtac

SEQ ID NO: 602823 - DNA, 105 bp, Homo sapiens
tcacgctcagccacctaaaaacatttaccagaccatgtactacgtgccagctctagttctcagccttgggaggtattattctagacttcctctgatttatggcat

SEQ ID NO: 602824 - DNA, 717 bp, Homo sapiens
  misc_feature (633)..(633): n is a, c, g, or t
  misc_feature (678)..(678): n is a, c, g, or t
  misc_feature (701)..(701): n is a, c, g, or t
ttctctccctgatctctgtgaagacaagttcatataccttaatcatttctattcattcttgttatttaaggatagtccatatgttttaatataattctatattgcggacacacttctgaggaatctgagctgccttgtttctccttttcccttgttctcatcatcgtcttgatcaaagaaacaattcttgaatccatgattgcctgtagaattttcataactgcacttctaccacatctagccactggtttctaagggggtttgggaagggaattggcttgtatctaactttcctgttttctttctcctacttctcttctcttaccaagaatgtgaagccttttggagatctgggagaactgcaaagctctactctgtctaaccaaaccctaaacatatattccaaaactctattcagtttgatttcttcatgtttttatgtctatcaaattaaaaagttgacgttggtttgcgtatctcttcttcatgcttccatttttttcttttgggtagtactgctggaacactaagcaggcagatcgccagaacacaatacaggttgagcatacctaatctaaaaatctgaaaatctgaaatgctccaaaatctgaaactttttgagcaccaacatgncactcaaaggtattttggactgaggcgggcagatcacctgagggncaggagttcgtgaccagcctggncaaagtggcaaaaccc

SEQ ID NO: 602825 - DNA, 271 bp, Homo sapiens
tgcataaggacagaagcataacagatagatgtaagatccctgtctcaaaaaaagaaaacaagccaggtgcagtggcttgtgcctgtaatcccagcactttgggaggcccaggagggtgaatcacttgaggtcaggagttcaagaccagcctcgccaatatggtgaaaccccatctctactaaaaatacaaaaattagccaggcatggtggtgcgtgcctgtaatcccagctactcaggaggctgaggtgggagaatcgcttcaacttggga

SEQ ID NO: 602826 - DNA, 346 bp, Homo sapiens
ttttttcccccctaaaaaaacccggggggctcccccccccccggttttttccttgggccggggggggggatcattttttccccgggggacccttttcccccttggccccttttgggggcccccttaaaccagtttttttcaaaaaacgggggggggccgcggccggattctccggggtttttttcccccccccgcccccggaaattttaaatttggggcccatttttggggggggcccccccccccttttttggggttttggcccccccccgggggggggggttttccccccgtttttttccccccccggggttcggggcttttttttaaggttggggggttttta

SEQ ID NO: 602827 - DNA, 490 bp, Homo sapiens
agcagcttccatgagcaaagctatgcagtttggtcagctcctgacacacttggataccaccccagcagatgatggccagttcccttaaggataatactgctctcctgacccaggtgcagacaacgatgcgtgaaaacttggccacagttgaggggaactttgccagcattgatgctcggatgaagaggctgggaaagtgagcatcactgggagctggggagcggggatgacccttgcccctgaactttgtcagacccttccacagggtcactcacagccccagcccacctgacaagggcaagggttcttgcatgtggggtacacaccctcccgacaaacagagtgggagctgggggctcttattggatgaggttgtgggcccagccacatgcagttcccgtccagtaagtgctttgcctgctgtgggagagggactggatcccgtcctctaacgtctgtctctggccgagtctaacactgtacaactgtc

SEQ ID NO: 602828 - DNA, 908 bp, Homo sapiens
atactttctgctgtcactagcataacagaaaacgacgaactggcttttgtcttctaaactgacgggcacattttacaacaacgctcactcttctccatttactttcttctttcagcaaaacaagaatttgggcttttgacgctcttctctacaaacaaaccaagacaacacacctttcctttgactcttgacgaacactaactttaagtcaaagaatctgctctatgctaaccaagagatagagcacagcaaagactctgccaggccccaggcctctacctagtggcctggcaaattcaagtattcttattggtggaggccatttgtttctgattagaagctgtctaaacctcctactcctcaactcaaaggaaaacacaggaatcttccaaagatgggatgaccagggtctataacatcattagtgacaaactgtctgtaaggacaatgtcatgttacacgtgacttccctttccacgaagatcatcctaatttcatgaaccatgacaaattccgggactatctacaagcaattcgctgagcactttgacctcctgaactacattcacgatcaacagaccactgtcgctgcacgcataacgaagcgtcccagacttctcccgaaactggatcacgcgggatgcagaccaagacgaccgaaggcaagccacataccaccgaactacgacgctgctaatggacgaacaggaacattcccagaatacccaatatcctatggaaacactatacctggaacttccataacttaacacggttcacgattcctacagtacccaaccagattaacagtatcccaaaacagcttcaagggataaccacactctagggacatcgaccttgcacaacactcgacgaacaacttgttgagcacactctcatcaacgaca

SEQ ID NO: 602829 - DNA, 264 bp, Homo sapiens
  misc_feature (51)..(51): n is a, c, g, or t
taaggaaaccttgggccgcggagagcagaagggttgtcgcggatccaccancgcgggcgccgggccgcggagccgggagcgcgcccaggcttgcacccgcagcaaagccaaggccaccgccccaaagccctttttttcttgttcgccccgttttgccgacttttccccggctttagtcaacaacagcaaatttttattttggagggttaggtaatttttgactttgaaaattttaaagcaaaattaaaattcagacccctttta

SEQ ID NO: 602830 - DNA, 3494 bp, Homo sapiens
acttagatatgcagctgaaggggttcctgggtttatttctcctgagaactggcatgggctccgagttttgccattcctggcttcggtcctagcattctaagctgcctgaccttgggcatttgtcaacctgtctgaaccttagtatcctttcctctctgtagagtgggaagagatggagtctgtgaagcgcctggtgcaagctgtactaatacacctaacaatgagctcctccctccctccctccctgcctccttgcctccctgcctccctccctcccatggggaggccagaatctggctgcttgctgccacctagtggctctttggggtcatcttccctcataggaaccacagatccagtagcctagagcagaaagggaaggaagattcaaccaaggggtgattatgtttaccgtgtgtctggcactcggggagatagtgcatgggactacataagtaagacagcatcgaagaggtgtcttggagtgtggttaggagcgagggctctggagtcagacaagctacagactagctgagtgaccttggggcaagttatttcatttcactgtgcctcagtttccccatctgtaaaatttgtataacgataacctacctcgcgtatctacagtgcctagcatagtgccccacataaatgtgttcactaaatgtacgtcgttattaatcataggagcttgcagtctcactagggccgactggaaaactattaagtgatcctcaaagccacaggcgctcagagactggagagatcaaggtgcagaagactcagggaagggtagtcttgagggcagctgcccttaaagggtgggcagcatttagtgaagcagatggagggaagttgaccagcatcccagatgtggggaagaggccagcagcctagtctcctccacggcccagcccccactgtcttaccaaagaacagctttaaccaaacccctctgggcatcaggaccaccgctacacctcttgccaggctgcagagctatgcagtctggaggcccagctctcgtcagaagctggggcatgggctctaggggaacctggggtcggatgagcccctgagcaggtggcaggtgcctacatgtcccagtgtgggttcgtgtttgtgtaaagctctcctgcccccacccccaggcaccagcacagcctttgccttcactctctcccctcccctgtccctgggggattgaataagggaagctggggttggccgtccttctagcttgattggcagcaccagcgctgtgacggaaggatgtgttgtgccagcagcctcttggccgcaggacaaatgcacatttaaagagataacctttttgtgtcctggctgggaaagaggtcagtgcagatgtttttgggtccaggtgttggctgtgagttttcctttcctctatgaactgaactcagcagcctagtggacagtcacctccttacaggtgtaaaatccaagccagtcaaccatagcaggtggcagacttagctgccttccctgtggtgtggtgcagaccatgacccttgaggcaaatgggtgagctggccccacctcgcctgcagcctcctctgaggctcccctgctgcctccccactagccgccctgaatcacctacttcccagcacccccagcccgtggttctcatcccgtcttccatctgtgatctggcactcattcttccagagccaaagaggaatcccctcttctcatgcagaagacagtcatgcctgcccttgtgtgtcaaaagcattgcatttatgccctgttagaacccctgtcacaagcatggtgcctgaacacaggtgcctctgtggtctcttctcatcctcacccaatgggtactatgctagccccattttacagatgaggcaaacgtggcacggagagctccactaacttgcctggatgattcatgcatccatccattcacttagcaaatacttatttaacttctgctttgtgctagctagtggggatgtggcagtgggaatgtggcagtggggatgtggcagtggggatgtggcagtgaggaagacgacagacaggctccttgggaagcagagtaagcaagtgaggagacaggcgggcgtggtgaggctgcgcaggcgctgagatcgagttgctgggggaggcctctctgaggtggtagggcttgagttgattctgaaggacaagaagagccagccctgggggtctgggggaatggtattccaagtggagggaacagcaggtgctgggggcagggaggtgacagatgtgtcccaggtacagagaacagagtgaacaggagagaggagggggccagggcattccaggtggggaaaggcagcaggtggcccggtggtaccacctcttttggcgagggctttggaccttacccggtgtgatgggaagtcctggaagtgtgttaagcaggggagtctttttgatcagattttctagaaaacgacagtgggctgctgtggacctcagagaggcatgtgtgatagtgtgtttcgggctcttcccacgaaactcggctctgcacagtgagacctcatttcctggttctgtttgatgagtgagcgaatgcacatggcaggcggtcatgtcccttgggcctgtgaggtgaggaagggtccctgagccctgtggggatagagactcttccaccattctgacatgatccgagttagcaggcagcactgtccagatggaaatggggatgggagacagaccatctctctcagcgggtccagccatgagccagcagactgtttcccattggcccccatctttcagagtgggatgatctttctaacaaagaaacccacacaggaatttggtgtgtgtgtgcgtgtgtgtattacctttcaggatggaagccggtggggtgtggagcgaggggctggcatggttggcctcgcccagctcctgtaccctgtgtgtgcctagagcatgcacctgctccctctgctgggctgagactcagaggacactgggcaggtggtggggggtaggagggtcgtggctgtgttgggtggggccacatcaggtgtgtggcacagagggggagggggaggtggagtggcagtgtgttccacccagcagtccctgtgtttgacctcttcgtacactctcagttgtattagctctcagaatgaaaacgagatacttttccccaatctatgtacgttgttcttaagaatgtacacttggccaggtgcagtggctcacgcctgtaatcccagcactttgggaggccaatgtgggtggatcacctgaggtcaggagttcaagaccagcctggccaacatggcgaaaccccatctctactaaaaatacaaaaatcacctgggtgtggtggtgggcacctgtaatcccagctactagggagactgaggcaggagaattgcttgaacccaggaggtggaggttgcagtgagccgagaccgcgccactgcactccaacctgggcaacaagaacgaaactctgtctcccaaag

SEQ ID NO: 602831 - DNA, 181 bp, Homo sapiens
gtctctgtgggcgcggttgcactacggtaacttgaaacgccgaggcagaaggctggcttgggctgagcactgcttcctgttattgctctatgggctggcgcccccgaactctgttccttacccatatctatcttctctcaagcttagtacctaccctcaaacttccagtccccatctggtc

SEQ ID NO: 602832 - DNA, 166 bp, Homo sapiens
gtagagaggagttacacgaatgctggtagctgaatgcttccaatgcaagtatctcgacggctcccaggcagtctacataagtttattttctttactcccttgaaagcagattgatcaccagattcacgacgcgtctctcggatagactcaggagaagtcgacagta

SEQ ID NO: 602833 - DNA, 494 bp, Homo sapiens
  misc_feature (5)..(5): n is a, c, g, or t
  misc_feature (28)..(28): n is a, c, g, or t
  misc_feature (53)..(53): n is a, c, g, or t
  misc_feature (99)..(99): n is a, c, g, or t
  misc_feature (128)..(128): n is a, c, g, or t
aaaanggtctcccctgtgtttgccccangctggcctcgaaatccctggacctnaaaaaaaccttcctgccttggcctccccaaagcactgggaattaanaggtgtgagccattgccgccctggtccanaaaatcttgtttttttgtttgtttgtttattagagatggaatctctctctcttgacccaggctagagggctgtggtgcgatctcagcccactgcaacctctatctcctgagctcaagcgatcctccttagcttcccaaatagctggaactacaggcatgtgccatcacgtccagctaatttttgtatttttagtagagaaggttttaccatgttggacagggtggtctcgaactcctggcctaaagtggtccacctagctcagcctaccaaagtgctgtgattacaggcgtgagccaccatgcccagcctctaaaaatctgttttctattcaaagtaaaaatgacatgtgtttgagtcaaaaaaaa

SEQ ID NO: 602834 - DNA, 144 bp, Homo sapiens
cctgacggggcagctgggggctgtctggcgtccacgctcacgttctgggccggcggaccccgtaccggccaggccgtggcggccacgggggcccggaagtcctccttcagctggttttgcacggaactgtgtcccgacgcggtt

SEQ ID NO: 602835 - DNA, 419 bp, Homo sapiens
  misc_feature (394)..(394): n is a, c, g, or t
gcctttcaatatacttcctgaaaaatcttgtgttctacaaaatagtgccctaaaaatagtgcagtttatgagagaactaagagcaaacaactcaaaatctgtccagctttttaaccagaagccaggaaaacccaaattggttcctggaatataatttgacaccccaagtaagaaactcagaactctggagtctgtctcagggaatattaaaaacatacaacatcaaaaaagtggcacactggcttgcaggtgccagggcagggcggtgaggcagagctctgagccagcggggtagccattacaggtgtacaggaggaagcacaaccaactgcagtcctggagcttcagcgacctcccctgggggcagccccaggcatgtgctcatgtctcattnttttgccttacacatcttgctcctg

SEQ ID NO: 602836 - DNA, 157 bp, Homo sapiens
tggggcaatactgaggcatgttatataagtgaatgctgacggataaatggcccatttggggcaaaaagccggttagcggtggagcaggccatcctaagggagaaggagggtggcatggaataacagggtgtctagtcatgtaacgcttgttccaagg

SEQ ID NO: 602837 - DNA, 210 bp, Homo sapiens
gactggtttttgtgttttttagtagagacagggtttcactatgttggccaggctggtctcgaactcctgacctcaggtgatccgcccaccttggcctcccaaagtgctgggattgcaggagtgagccaccacgcccagcctccgttgtcctcatttagactttgtctgggttatcaggcacttttgacttcctggggtccttcttcagtt

SEQ ID NO: 602838 - DNA, 467 bp, Homo sapiens
  misc_feature (231)..(231): n is a, c, g, or t
tgggtccccccacccccacagccctcacagcattccccattgctcctggctcttccccacccctaggtgggacagtgaaggggagcagtttaaccagaagattgctgctgccccttagggttctcagctcccttccctcatggaatcccttcttaggataggaccctctcaggacacccccttctcgtgcagccctgtggttccttctagaggtagcatagctctgtaggnccccaggtgtggggtacaaatgcagggtatgggccctccagtagatgccatgcctcgctgctggtctttctcgagtcgagagggttgggcggtctggcacaagccaagtcttgcctctgctcctaggccgactctttacgtctcctcccctctgcggtgtctacgacttctaggtcccatgaatatattccccttgttgcttaaaataaatagacatcgaggtacaaaaaaaaaaa

SEQ ID NO: 602839 - DNA, 1554 bp, Homo sapiens
  misc_feature (514)..(514): n is a, c, g, or t
  misc_feature (823)..(823): n is a, c, g, or t
  misc_feature (1554)..(1554): n is a, c, g, or t
gccgcgtcgccccgagagcacagagcctctcctttgccgatccgacgtccgtccacacccggcgccagctcaccatggatgatgatatcgccgcgctcggtcgatcgacaactggctccggcgatgtgcatatgccggcgttcgtcgggctcactgagtgcccccccgggtccgtctcttcgccctccgatcgtggggcgctcacctatggctgccaagcggcgatgcatggtcgggcatggagtcagcagggcattcctatgtgggcagacgtaggccctaggacgcaacgatgacgggcatttccatccatctcctgaaaagtatcccccaatcgcatgcagcggccaatcagttccacccaatagcgtgcgggaccgcagcattgggtaggaatagacattcgtcggcctagcccaaccaatcgcgtttcgtacccatagttgcacggctgggcgggttgctcgggtcgtcacccggattggcacgacaacccacctgattggcgttgacntcgaatcgcaaggaggggacgccgcaccccctttttgatagcaccccgcaaaaccgggtcggcatacccccgggcagaatggacatggaattgaacccccctaggaatccgatttgttatcttgcagggaccaccttttgcaaaagcgagcgccccccatatgtcccacttggggtaaccaagatttggctggtatgtaccccaacggcgtctcttagagtgacacataattcccccaccttgggttaagcagcgccccttctatgagggctgcggatataccacgatacgttgtgtggctattcaggntgtgagttgaggtgaccatccccgagtttgagaacagtagcgcttgtccaatctcgccaacgatcgttagttcgagcccccaatttctttcactgtgagcggggggcttaataggacgccgcttccctgcccaaattggcccaattccctgtgaccgggttcattgtggcaacccgtgggactctgtggcccgggggaacacccccttgcatctttgtagcgttaacccctgtgccagtggtaagaagcacttcccgtccaagcgcaggaacgtcgggcggggccgttagcaatggccctttacatgcctaaacgcaagagagggccaggaaggccgggggaacaccattccgattgccggttccatcgaatcttagaagggacagaaacggcgcttgctttgtcatagcagttttggctcccttgagcacctttttccagagggcccacacgaaggactcgggtccaccggggggttagcgtttccccaaaggcgtactcttcccctcttggggcacgaatatgaaggcgtatatcgaaaggctttggccttgagaactgggtcccagcgggtccaattccaccctagtgtcgggccacacttgaagccgagagttcacaggattggcccctttggagtgggcacctttcctttcgcagagccgtttccttttccctagggggcatctgcgacggttcccttgtgtggcgcattccgagcggaaaaacan

SEQ ID NO: 602840 - DNA, 148 bp, Homo sapiens
  misc_feature (104)..(104): n is a, c, g, or t
  misc_feature (107)..(107): n is a, c, g, or t
gggccccctgatcaattctttggatgcttttcaaatttcccaggatcccgatgtcgtcatacactccgaacatgacccttttttcttccaacgatcaaccactncgngggacgggagagtgagccttataccgatcaatctgcacacc

SEQ ID NO: 602841 - DNA, 160 bp, Homo sapiens
ggtcatctactctaccatctttgcaggcacgcttatcacagcgctaagctcgcactgatttttatctgagtagggcctatgagaatataacactgctaggctttttatttccacgtgtctatacccacaaaaaaataaaacccctccgggttccaccaga

SEQ ID NO: 602842 - DNA, 317 bp, Homo sapiens
gctgttcttgaggatcccatgcgcgagcttccatcaagaaagtgaaatgatgcctataatcccaggcgggtttggaaggccaaggcaggatcacttgagcccaggagttccagcccagactgggcaacaaagcgagaccctgtctctacaaaaaaatttttaaaaaattatccgggtgtggtggcatgcccctgtggtcccagctactcaggagactgaggcaggagaatcacttgaacccaggaggtggaggttgcagtgagctgaaattgtgccactgcactccagcctaggcaacaagagcaaaactctgtctc

SEQ ID NO: 602843 - DNA, 162 bp, Homo sapiens
gggggcgctggatgtcagagatggacgggtatctacacatacattctaggtgtatagaggatcaaagaattatgcatcaaaactaacatagaaggtgtccacgtaacagtaaagaagggtccaatcagtatgtacaaaaaaaggggcggccgcggggtaccg

SEQ ID NO: 602844 - DNA, 358 bp, Homo sapiens
gtcaaatcattctgctttatgaaagtcatggtatctagaggtcaatacccatcagctaggagcagcaccatgaaatccacatctagcatgcagactcgggggcacttaatagatattctatatggtaagactagggggacagcttcctttggagaacatgtgagttgtctgtgaatatcagcttgctctccctaggtttccatcacatggatcagcgagagttcatgctgactccccctccctcgggggcttatttgcaatctcccgatttgctcaaaaacttccaggtccagagggaccctaaagaccctgtcatgtccccctgtgaattaccagcatcccaggccattgctgggtt

SEQ ID NO: 602845 - DNA, 147 bp, Homo sapiens
gcccctgatggggaatgagtttattttgccatttaccatgtcagacggcagctacatgctaacgaattgcagttaactgcgactgggcacagggaacccgcaggcctattcacagctatgcacagattccacattaggcaaatgaca

SEQ ID NO: 602846 - DNA, 209 bp, Homo sapiens
atagagtgagaacaacagtaatgaaccaggcatgccagattgatcattgaaatatgtttctatttatgcttcgtttgcccgccgtagagcattaagtccagaagagtgtactttctggcacataaagaaatcttgaggacttagtttaaaccttccataaaaaaacaattatcggtttctcgggttctctctctctgtctctcgctcag

SEQ ID NO: 602847 - DNA, 343 bp, Homo sapiens
atttggagctttttaaaaatacgattgttggccacatgtatgtcttttttggaaagtgtctgttcatgtcttttgcctgctttttaatgtttttttgtaaatttgtttaagttttttatagatgcaggtattagacctttgtcagattcacagtttgcaaaagttttctcccattctgtaggttatctgtttactgtgttgatagtatccttttcagtgcagatgctttttagtttaattatatctcatttgtcaatttttgcttttgttgtaattgcttttgggcatcttcatcatggaagtctttgcccattaggtatgttctgaatgggtattgcctagg

SEQ ID NO: 602848 - DNA, 280 bp, Homo sapiens
ccatagtgaagggggcaaccttccagcctccactccctcttcttctcccttagcctgtgttcttcaaaacctaaaaccccctttgactaacacctgacctaaaacctaaatgccttattttcttctgcaataccgcttggcctcaatacaaactggacaatggttccaaatagccagaaaatgacacttttgatttctcgatcttataagacctggatgatttttgttgaaaaatgggcaaatggtctgaggtgcctgacatccaggcattcttttattc

SEQ ID NO: 602849 - DNA, 150 bp, Homo sapiens
ccatttagaaagctgacactggactctcttccattacacctatatgcaaaaattaattcaagatgaattatagacttacagtgtacgacctacaacccactacaacaccccctggaagacaacacctaggactagtacaggtaccgagac

SEQ ID NO: 602850 - DNA, 165 bp, Homo sapiens
cccccctttttttttcccccggccccccaaaaaggggggtggttctaaaaaaattttccgggggaggggggaggttccccttttttgggccaaagggcaaaagtttttttccccctcccccttttcccaaaaagggggggggaaaaaaaaaaaggggccccggga

SEQ ID NO: 602851 - DNA, 306 bp, Homo sapiens
cgctgtgattagaggatcggtattgagtggcatgtgatatgatgagagtgcgtgtgtgtgtgtgtgtgtgtgtgtgtgtgtgtgtgtacgtatatatgatgacttcatatcaggttgaatctgtaggactccttaggacacgattgtgtaaatgctttgctccagatttatgcttatctctaccaaatgccagagagttccaccaatgtggacacaaattatctacattttacacatggtagctccccatgccctggcaccggtcgcgctatacttatactgcatgcccatccaacattaagctta

SEQ ID NO: 602852 - DNA, 951 bp, Homo sapiens
gctcggccttagatggtgtcggggtcatagatggacagagaagactcttggccaggcagatggcttctcgtgtggcagaacatggggaccatccgtgacgccggagatctctccaggcaccaggagcagactggaggacagcaaggagctgcagcctgtggtcagccatcaggagaccatctgtaggggccctgtgtggtccctgtgcagacagttccaaaggaggctgaccctgagagccgtcaacctcaacctccggcgcagggacctcctggaaacgcctggaaaaccccagagccaggtcagcaagaggactccaggcatgcagactcgactcagcataagagtgctttgggtgccgtgtgccagagaatccaggagtcctggcaaagatggcaccaagtggcgtggtggagaccaggtgaaggccaggaaggcggaacgagcaggagcacaagacagggccaggagagatacaccgaagtcaagaggacaagaagacagagaagaagacaaaccaggacatgatcaaggaagacaggacacacgagcccgaagacgagagcgaacgacaccacatggagaggaaaggaagacaatgaaacagacaacgcaaaagaacacgggaaggggggcacaacaagggacagcaaacacaagagtaacggaagaaaggaaaggaacagagaacagggacaggaaccaagcgaggagaaggcacgcaaaaaaacgcatacaaaccaggaggacacgcacaagacacaaacccaaagagagaaggacgagaagagagagaaacaaaggaggaacaagagaagagggggggagaacgaaagagggaataagacaaaaaagaagagggacacaaagaaagagaagaaaggaaggcaaaaaaaggaaagggaagaagaagaggggagaccgaaaagaaaaaaaagaaagagacaggac

SEQ ID NO: 602853 - DNA, 196 bp, Homo sapiens
aagtagtcgggacgcagtagggacggatatgtaatcccagcagttggaagaccaaggcaggagaatctctcaaggccaggagttcgagaccagcctgggaaacacagcaagaccatatttctacaaaaaatttaaaaattagttgggtgtgtaggtgtatgcatgtagtcccagctattcaagcgggcgaggcagg

SEQ ID NO: 602854 - DNA, 204 bp, Homo sapiens
ggttcgatagttctttgaaaaggcatccagcaggatgtggatcgaggcgtgccgtccagttttgttgtcccatttcatcagcattgcatacaaggcatcccctgggcctgctgtaccagctctgaccacatcgatctcatttttcgtgaggtccagctgcctcatgagctggtcccaggagtcaaagggcacgatgtttgcaaa

SEQ ID NO: 602855 - DNA, 912 bp, Homo sapiens
  misc_feature (121)..(121): n is a, c, g, or t
  misc_feature (125)..(125): n is a, c, g, or t
  misc_feature (738)..(738): n is a, c, g, or t
gtttcttctgtgctggaggtgtctcatgtgtttgctgcccgaaccgggttcgaggagctttgagttggaataccgggcccggaggactcctggctttcggcacatcctgctccgttgtgcnctanaccctcagaaaaaagtggttattaccaatctgaatggccacaccgctcgagtcaactgcctgcagtggatacgtacagaggatggctccccttccaatgagctggtgtctggaggatctgacaatcgggtgattcattgggaactagagaataatcaggttttaaaatcagtccgtctccaaggccatgaaggacctgtttgtgctgtgcacgctatttaccagagtgggccatccgaaggggagcagcatgcgctgatagcttctgcagcttcagattctactgtgcgaatctggtctaaaaaggggtctgaagtcaaataccttcagaaccttgagcttcagggatggattcgttctttctgtctgcctggctattttgcctggtactaatgtgccagtattagcatgtggtgatgatgactgcagaattcacttatatattcaacaggatgaccagtttcagaaagctctttctctctgcggacacgaggactgataagaggcgtggaatgggcaaccttggtagagacttttcctaagcaagctgctcaccggactgcctaattagaatattggcgactgtttttgagacccgatctttcgaaacccangattggtgtttaaggtgaaggaacccgttccctcataaagggtggggcgtgcaaccaccggtggcggttacctgacaacgctggcgcccaaacggggtaaccgtatttgggtcctcttaacaattgtgtttgtcccgaaatgtctcctggaaacagcttctgcccaaaccggga

SEQ ID NO: 602856 - DNA, 680 bp, Homo sapiens
  misc_feature (116)..(116): n is a, c, g, or t
  misc_feature (149)..(149): n is a, c, g, or t
tttaaatttattggaaatcagttgcattaatggaaaattaaaaataattggaaaactaagataatttagcagcttactaaaaatgattgaatgtaaatttttattttagaaaaacnactttatggaactagttcgtattcacttctatnattgtttctgaaatgggcctgcttttaaatgcctatttctttggacaaaagaggaaaaatagatctggaactcttatgcctatacatacataatctcttgttgaagaatgtagcaagatgtgcagggtttgctttgcagaaaacccagactgagtcttggataaacacaagatgataacaggataaacctaggagaggtgtggtacatttcatttgtaagtgatctggacttgggatccacgtcttgaggaccctgtgggaacaggttacttaactagcttctatttttctgttcctcctttcttctgccggagatgaagcaaccaaataaaccagcaatcctgactctttgcagcaagatgaacacctgaatcctccctgcccctaattatgatgacaaagctcactccattagatcctgtgatttgacccaatgaaactggccttaaacactgagcaaaatgagtagttggtggttgtgtactatgcttcctcatttgctgtgttgagacccttctttaagtatgttgt

SEQ ID NO: 602857 - DNA, 761 bp, Homo sapiens
  misc_feature (15)..(15): n is a, c, g, or t
  misc_feature (22)..(22): n is a, c, g, or t
  misc_feature (38)..(38): n is a, c, g, or t
  misc_feature (40)..(40): n is a, c, g, or t
  misc_feature (46)..(46): n is a, c, g, or t
  misc_feature (71)..(71): n is a, c, g, or t
  misc_feature (86)..(86): n is a, c, g, or t
  misc_feature (115)..(116): n is a, c, g, or t
  misc_feature (131)..(131): n is a, c, g, or t
  misc_feature (173)..(173): n is a, c, g, or t
  misc_feature (226)..(226): n is a, c, g, or t
  misc_feature (232)..(232): n is a, c, g, or t
  misc_feature (524)..(524): n is a, c, g, or t
ttggggcctctgcantctagcntgggttacacagtganantccagntcaaaaaaaaaaaaaaagaaaagtncatacaaaaagagancattaaagatgatcatttatctagaaatnnctaagaatccaaacnatagagcactaggccaggcacagtggctcatgcctataatcncagcactttgggaaacagaggtgggaggatcatttgagcccaggagttcaagncaagcntgggcaacatagcgacaccctgcctgtacaaaaaataaaattgtggccaggagcggtggctgactcttttgtaataaccattaacacacaaacacatttatagctgtacaaaaattttttctttctttatatcttcattctataagctgttttctattaaaatttatttttctttttaaacttttttgtaaaaaactaagacacacacacattagcctaggtctacacagggtcaggatcatcaagatgtcactaggcaacagaaatttttttagctccattataatcttangggacaaccatagaattaatatatgggatctgttatgtggtgcatgacaatatagagagagatccagttatggcctgcatggtttggtattgttcaactttttttttttttttgagacagactctcggtctgtcgccaggctggactgcagtggcgagatctcggctcactgcaacctccgtctcccgggttcaagcaattctcctgcctagcctcccgagtagttgggaggctgag

SEQ ID NO: 602858 - DNA, 160 bp, Homo sapiens
tgaataccggatcttagggaagccttagccgggtctcctcagtactcttgagctagtagtcccccactcatccgttattggttcattctacctatatacgctttttctatctaaaagcatatacattttacttcatctcattcacgtgagtatagggagt

SEQ ID NO: 602859 - DNA, 925 bp, Homo sapiens
cagggggattaaataaattcacatgtcgtgcagccatcaccctgatccttctctagaactttcttattccaaatggaaattccatactcctcaaacagtaactcccgttcttccttcatgttaccttttttttttttttggagatggagtctctctctgtcacccaggctggagtgcggggcgcggctctgggctcgtctgcagcctccgcctccgtgggtttcaggcagttctccgttgccatcggctctcccgagtttggctgggatcgcaggtgtcttgccaccatcgcccgagctaatttttttttagtttgggtagagacaggggtttcaccatgttggccaggtgggtctcgaactcctgacctcaggtgatccacctgcctcggctcccaaagtgtggggatttacgggcgtgagccatgtgcaccgtggccccgtgataactatttatgagcgtgattctctctacagaagatatctttatattttaaaaacacaggatacaccttacctgggctccttaaagaatatgtaggactacattccggcatgtggttccaagcattattattccatataaagtttcccccctaagagcatatcacgggtctaagcggcgagccagccaagtaacgccatgatgaaacatgccagcgctaactgaaggctccccagggcgcccctaccataaacatcccttgagaaacgctaaacagaaggtgatctcaagaagtggcctccagggattttacctaaatcggggaacgtcagcccaagggcgaggtacagagcacaaaaatttcgcacagcctggagctgccacggaactcacacatttcaagccgatggatcccgacggccggctggcaacccaaacgccagggatgcgaagccggagaaggcacaaacgacaaggaccc

SEQ ID NO: 602860 - DNA, 330 bp, Homo sapiens
gagagtggggatgagggtgagtgtgagggagggaaaagtggtggcatagagagttccgggtgtaactggagtagtgcatagagtgcgtgagaggtgagattccaccgaagctagagtgagagggcagataggcaggattctatgagtggttatacttaagggggacaaaactgcccaagaagaatcttgagaatagactctttcgaggtgggggagatactctttagcagggtacactgagctaatactaccagttctttatgagcactggaatgtgtatgtgaaaggagtcctaagtttagcaaggtagtctacagaaccatgctccca

SEQ ID NO: 602861 - DNA, 290 bp, Homo sapiens
  misc_feature (114)..(114): n is a, c, g, or t
gcgcatcaggggtgtaagattcctcccgtagtttttctcctcatggatgtgaatgaaatgccaataacacatccactttcaacgtgtagtttacgcggagcactttcgaggccntggccgggtgggcctacttctcacctgggcttatcttctgaactcgctaggttcttatcaacattggggggataacttggtatatttttttcattgggcttttctttaccagtttctgatttttattctcaatatattttggctaaacctatttcacaaatcaccaccgactgatg

SEQ ID NO: 602862 - DNA, 460 bp, Homo sapiens
actatagtagtatagtttggaaagtagaaacgcctttttatgaatgtattattatatttttggaggcagagtctcactctgttgtccagcctggagtgcagcggtgccatctcggctcactacactctccgtctcctgggttcacgcaattctcatgcctcggctgggattacaggtgcctaccaccatgcctggctaatttttgtatttttagtagagataaggtttccccatgttggccagggctggttttgaccaactgaacctgacctcaagtgatccacccacctcggcctcgtaaagtgctgggattacaggtgtgagccacctactttcatttctttctttctttttttttttttttgagacggagtcttgcattgtactccagcctgggcaacaagagcgaaactccatctcaaaaataaataaataaataaataaataaataaataaataa

SEQ ID NO: 602863 - DNA, 1007 bp, Homo sapiens
caccgaaaccatgagccctaataggcgtcctcttaaccctgcctaatgacctgcggctctagatcgagtgatcttcacttcgcgattcctagtaaaagctcgctggatattagcggacctcatgtaatgcaacccatcactgagaccagtactcattgcagagttggttgcgccgccgatgctagatcacagagaaacgcaacatgatgctagcgtgcacacagctacacacgcacaactgtcacacgactacgggctttcacgagaatcgtggcataattgtacttaagaatagcctacacgaaagttatatcgtcctaacggactggaatatttcctctgatgcgctgttttataacagcgtgcgcagcactaggcacaacatatcctactccatgtttatgaagagtgccacatagggctctccaccagatgaagtgtcgattcaacacgactggattagactcgctcctatgaaagtcacactattctcgcattcatccatagctccagtcaattactatcctgtcacttcctgtgaggtaatctaggtcgactcatcgaagctgttactctagctatagtcgtatagtatagatcaaacgagagcctgaacactcacaacataattttgcaagtgccagaatgcatttactcttgcaattttttagcctccggggtcatacgagtgggctaacccggtccctgaaacagaacgtcaaattctacccaagtaagttcccgttggtctttcccctttggcagcccgatggattccggagacaaagagcctcactactgcgcttcggacctttgtttgaaaggtccacagcgcacctggggctcttccgaacttggaatccttgctaggagtttcactttattattgcgtcttgccagacttgtttcggggcttcttattcctaggttctcaattcgccgttcatacctaggtggtcctttgctcttcttgccttttccggaccctttttttttttaggggcttc

SEQ ID NO: 602864 - DNA, 274 bp, Homo sapiens
  misc_feature (41)..(42): n is a, c, g, or t
cccccccccccccccctttttttttttaagaggggttttgnnggttggggcccccctcccgggggggccccccatcattttttttgttttccccccggggaaaaggggggaaaagggggggggggggcgtgggtgggggggccgccccccttccccccttggggggggagcccccttttaagaaacccccccccccccccccccctttttttttgggggtttttttggggggggggcccccaaaaaaaaaaaaaaaatttttttttttttttca

SEQ ID NO: 602865 - DNA, 381 bp, Homo sapiens
  misc_feature (102)..(102): n is a, c, g, or t
  misc_feature (140)..(141): n is a, c, g, or t
  misc_feature (159)..(159): n is a, c, g, or t
  misc_feature (178)..(179): n is a, c, g, or t
  misc_feature (198)..(198): n is a, c, g, or t
  misc_feature (307)..(307): n is a, c, g, or t
  misc_feature (340)..(340): n is a, c, g, or t
  misc_feature (371)..(371): n is a, c, g, or t
cgtggtcctgaaccagttatgtgtgccgcatgagaaaacgccagccagtgacagagtcaccaaccgctgcacagaatccttgccgaacaggcgaccatgctnctcagctctggaagtcgaccaaacatacgttcccaaanngtttaatgctgaaacatncaccttccatgcagatatnngcacactttctgagaaggngagacaaatcaagaaacaaactgcacttgttgagctcgtgaaacacaagcccaaggcaacaaaagagcaactgaaagctgttatggatggatttcgcagcttttgtagngaagttgctgcaaggctggacgataaggagacntgtttttggccgtagggaggggttaaaaaantttgtttggc

SEQ ID NO: 602866 - DNA, 392 bp, Homo sapiens
tcgcttggaggtgcagtgcacagacgtacaagcagtaggggggtttggcagcctctgcctagatttcagagaatgtataagaaagactgggtgcccaggcaaagcctactgaaggggcagaatcctcacaaagaacctctactagggcagtgccaaagggaaatgtgagattggaggcctcacacagattcctcactgcagtactacctagtggagctgcaagaaggggaccactgtcccccagaccccagaagggtatatccacgagtagcttgaaccctgcacctggaaaagccataggcattcaatgccaaccagtgacagcagccatgggggctgaaccctgcggagatacaaagatggagctgtccaaggccttaggagcctaagga

SEQ ID NO: 602867 - DNA, 289 bp, Homo sapiens
gtctgaggagaatctggttcaacagcttcactttagcatactgcttgtgatagggaagcaatggaggagatgctccaccagttgttggctgcaatttagcaagggccacttggcacaaatttaatggctccatacaccctccagaggcgcctttttgtcctagattctattccaaggttcagtctgaagccctaaaagaaaatcagatctgagggatccagaggcagtcaacagtagaaggctagggcacagcccaggtgagcatgactatcccttctgtcgtcttctc

SEQ ID NO: 602868 - DNA, 105 bp, Homo sapiens
gctgataactttggaatccaattccctttagaccttgatgtaaaaatgaaagctgtaatgattggtgcctgtttcctcattgacttcatgtaaagagaaagcact

SEQ ID NO: 602869 - DNA, 875 bp, Homo sapiens
atggcacatgcagcgcaagtaggtctacaagagctattcccctatcatagaagagcttatcacctttcatgatcacgccctcataatcatttccttatctgcttcctagtcctgtatgcccttttcctaacactcacaaaaaataactaatactaacatctcagacgctcaggaacaatggaaaccgttctgaatatcctgccgccatcatcctagtcctcatcgcctcccatccctacgcatcctttacataacagaggaggtcaaagatccctcccttaccatcaaatcaatgtggccaccaagtgtactgaacctacgagtacacggactacggggatactcttcaatcctacatattcccccattattcctagaaccaggagactgagatcctgtgagtggacaatcgagtagtactccgatgtgaagcccccatcgtatacatacttacattcacaaggaggtcttgcacctcatgagctgtccccaccttaggcttaaaaacaagatgcaattccggagtctaaaccaaaccattttcaccgctacacgacggggtatacctagggcaaggctctgacatcttgtggcgcacacccacagttcatgcccatcgtcctagaataatccctaaaattctgtgaaaagggcagtattaacctataaggacccttaccctgtagagcaaagaaaaacaaacaaacaaaatggggggccgccagaagtcaaacctcgtggggggggccgagaggacggcacggccaagaacggccgacgggtcccaaacccggcggtgaacacagggcgggctcgcacgcacgtcccccggggggaagcaaagacacgcaggacgaccaacccccagcagaaac

SEQ ID NO: 602870 - DNA, 121 bp, Homo sapiens
  misc_feature (77)..(77): n is a, c, g, or t
agctgcatcatggatgtgtcaaaaggcaaagtgtgttctgagatgaaggttacagagaagatcccagtaaggcattnatatacaaaagatattgacatacatgaagttcgtatggctggtc

SEQ ID NO: 602871 - DNA, 365 bp, Homo sapiens
ggtctgtctcttgcttcaacagtggttggggacggagagcagatcctgtggtactctctttccagtcctccgtatccgtccctccgtatttccgtctccgtcttggcagacctccgcgggaccagtcgttcgtcgggcgcatctcctgacttctggtgacctggcgcaggcgagccggtgtgtatgggtgtgattaggcgatccatttcatttggccaaaacgcgagagcgcgagtgggagggcgtcctcaagaaattacggtccgagaagagtgtaatatacgcagcgcgaatcgttggcgcaggtgcctatgtccgttacaagagcgaggccctgggattccaaaattttggttaccccttag

SEQ ID NO: 602872 - DNA, 286 bp, Homo sapiens
gcacttgttatccacattttcctctgcatacctccagtgggagaacagatgcttttacaattcagatggggacttcttgatctgtccgcagaagagggaaccttctcatttacaccgatgtttggcaatgatgcttgtacacgcccaagtgagatcgtgcgtcattcagacgaggaatgctggttcacgcatagactgtcttctgacggagaccatggggctacactcttggacggtctcatggtgtccacttctgagttacctgactcttggacccaatttgggg

SEQ ID NO: 602873 - DNA, 911 bp, Homo sapiens
  misc_feature (274)..(274): n is a, c, g, or t
tctggaggcaggaaaatggcttaacccggggaggcaaaggtttgcaggtgagccgaaatcgccccaagtgcactccagcccaggtgacagagcagggacctcgggtattcagaaaaaaaaacaaaaaaaaactcgcggggacatacctacgagcgggctgcgcggcaaaacggcggcgcagaaagtgggacgaagtgcctaatacgcagtagcacggcgaacccacgacggataacagatgaggtacaacacaaggcgggactcaacctccatncagggagactccgcacaaaatatgcgggagatcggccaataaaaaccacgcggaacaacaaacaccactggtagcacacaccagcgcgcaatacaacacaacatcagggacaacaacgacagacccgacgcaacaaaacaataaggcactactaggacaacagaacaacaacaatgggacacgcacgcgaacacaacagagacgagaaggagagagaaagaagagacacaaacacacagccaacacgaaccacagcagacacgaacgaacacaacacgagacaaggaagaacacagaaagagaaacgcgagcacacaaaaacagcaccacgaggctacgcgatcgcaatgaggcgcagcagaacgcgaacgtgaaccggaagacagtagatgacaacgacggagggggcagaaccacggagcaggacacagaagcgcgagcagaaggacgcggcgggaaggagggagagaggaagcagtgacgaaaggaacggacagcagacacgacaggaggaaggaggacgagaaggagcaggagggaggacgcagatgccgggcggaagagacgcagcaggagagagagacagaagcaaggagcagaagggtagcagcgaatagaggggacggatagaagcgac

SEQ ID NO: 602874 - DNA, 765 bp, Homo sapiens
agcactttccaagggagtggtcgtgtgatcgccatcttagtggaacagatgtctcgtccgtggtcgcagctggcgcggtcgaaccccttcaacactgccacatctgcagcgtggtgcacgatggtctcggggacctccgcagcagctccccagggcccacgggccagccccgaccgcccctcgcaacctggcagccgccgccggtggaagagtacagtctgtgaatttggctccgcgaagtattatgcactgtgtggctaatggtggggtcttaagttgtcggtcttgaacacacgagcatgcgtgtggttccccgtggatttagtgaaatgccgtatgcaggtggacccccaaaagtacaagggcactatttaacggagttctcagttacaccttaacagaggatggtgttcgtggtttggctaaaggatgggctccgacctttccttggtactccatgacagggactctggaagttaggttttatgaagtctttaaagtcttgtatagacaaatatgcttggagaggagaataccttatctctggcgcacatcactatattgtggctgccgtctgccagtggctgaagtctcgttctgcttgaacaatttgccccttggacttccctaatgggaaatgctgcataaccgagttccgaattcaacaggccaagccaggtgatgccaacaacttttgaggggattgcaagtccaacaaattgtattcgggcacgacaggctaacaggcattctacaacgggggcg

SEQ ID NO: 602875 - DNA, 129 bp, Homo sapiens
cttttatctgtgttttagcagaaatgttcctctgtatcctcaaacggtatttcaatgtatgtgtttccttattaaaatatgcatagagattttttgtgtgtatgaaattaaagcgtttattagccttca

SEQ ID NO: 602876 - DNA, 1062 bp, Homo sapiens
gaaccgccatcttccaggtacttcgtcaataatgacgatcacacatgggaatgaggagaggcacccgatatatgttcatctaggccttttatgaaaacattggatgttgttcctttggccactatatatgcgaatctataagaaagcgtgatattgctagactgtcaagggaatgtggttacgtgtttcatatacaatggaactagcaccccttttcacgttctgagctcccagaggttagcctcaatggctactccctctgatcatctcggatctgcttcttctcacatgatcaataaactagccgcacctatctcaatcatataccaagatctcatccctcatctaacatcgtaagccttcgtcctcacatctctcaatcttatccgatcatagctgggtcatgttgatggtggatttacatctcaatacccagctacgcaaaattcttagcattacttcctcatattacccacatacggatgacatcatacgcagttctaccctgtactaaaccttaacatatagcgcatttctctcattttaaactcagtgttcagtattagtcctatactacttaccgtacttcctatctactcaaagttaaactccagtctactcacgagccctgctactattatcgcaccttgataacaatcttaactatgacttaacaacccttttattctctatactaaccctcctctcccttagggaggccttgaccccgaataaacctgggctttttagccgcaaaattgggcccattcatcggaagaataccggcgaaaaaaccaatcaggccttccttcatcccccaactatcaataaggccatccatcagctcatccatgagcctctactttctatgcttagcgctaatcctatcccacttccaatcacactaatctccatgttctaacaccgtataaattaacttgaccggttgaccttttcaaaaaccaccccattccttcaccaaagtgattggcctttacaaggagagtgcttgctaattgtaccccttgatagtaagtactcgttttacgcaccacacataag

SEQ ID NO: 602877 - DNA, 127 bp, Homo sapiens
gccacccttcaacctgggtgatgctccttggggccctatgtagagggactgacttttgtccattgccacaaaccccttttagtactgttttgagcattgtcattaaaacagccacctttgtatttta

SEQ ID NO: 602878 - DNA, 298 bp, Homo sapiens
ctaaggatcgtttgcggtcctttcattcgaatgtggatcatgcatgactcgaatcatgatgatgatcgaatgttggatgcagtgatgatcgatgcatggatgagttactcaatggattgatgaatggaccaaatagatgcatgaatgaatgactcgaatgaatgaatgaatggatttgcagaatgaatgaattggatgatggatgggggggaatagggagaatagagtcaaatgaatggttgaatgcatgaatgaatggaatggactcaatgaagagataaatgaatgactcaatggc

SEQ ID NO: 602879 - DNA, 564 bp, Homo sapiens
acatacacacacacacacacacacacacacacacacacccctcacaacatatagacggatccttctaagagggggatgccgcaaagaggcagaatgttattagaggacacaatatagacatcagcttttctctgcctctttctaatgctgccagacagtctgtcaactcccactcaggagcaaggaaactccctgagtttggaatattttaaggccattttgaaagtcacgctggcatattgttgcagtgtgcttcagtgacatataaaatcaatctctctttctgcctctctccatctcctaattgtcacagctctagacagcctcagaccagcagtggttcagttcactacataactagatataatttaatggaattaattggtccccgaagctgcctgcagaagacttttatattccagctcaaaaagagagctaataccaaaatgtacatacggatagcataggtaagcaagcatcctcaaattagggttccggcacatctaataaaatgtaataaaaaactgtgtttgttattaaatagaccttgtttactttgtcaaa

SEQ ID NO: 602880 - DNA, 135 bp, Homo sapiens
gatccacggcatttccagccaatcgctgcatgcaggcatctacacagcactccgtgcccgcacatgtcgtctggtccctgttcaacaccctcttcttgcaactggtgctgtctgggcttccatagcattcgcctc

SEQ ID NO: 602881 - DNA, 1313 bp, Homo sapiens
  misc_feature (745)..(745): n is a, c, g, or t
actgatgtgctgccgttactgtgtgctcgttagtctgttgtgctgcctgctagctgtctgatcggtccttcgtgcacgagttcgttttctgttgttcttctcgttgtggttggcccgcgcgttagtgtgtggttgttggcagcctctctcccctggtgtgtcgctcggtgggggcccccggggtgttgtgcggcacacctttgtcgtgttcacctcgccggtgtttcgctctcccccttcgttcgccgcctgttttttggcttctcgaccctctggggccgttcataccgttctgtgtgagattggccgtcgtctcggtccgccccgaggttgctcaattcttctggggctcccccaccgttatattggctaggcctttaccccacaggcgcgttaatgagagagccctgtttccggtctccccgttttgactcgccccttagcccaatgtcgaagccccccatctgctggggccaatagtaactgtcgcccagtacttctttaaattaggcggcctaatggtataattacccccttcaccatcgagttgttcagacccccctggccagacacctttgcctaccccccttccttgtactatccctatgaggcataattataccacagctccatctgcctacgaccaaccagacctgtaaatcgctcacttcgcatactcttcacatccagcccacattagcccctcgtagtacaccagcccattttcgatcccaaccccccctgnaagctttcacccggcgcgccagatcacattcttccataaatctcgccccacgggcgttacaatccctccattacataattctgcccctagcccaaactcccaagctattcgagaacgccactcttcaccacgttcgcacttcactaatcccttcttctccaaggagcttcacaatcttctatcttcccacctatataggctcttttgagtgacactttctagcccagcccttcgcctatagcctcgcccttatccccccacgctatttaaccctatctgggaagaaacttcttctgtgctatgtaacccaccgctttctccctgatccaatattcaccttctcctatcttaccacggaactcacaccactactagtgcacacgccctatatctccctctacatagtttagccaacacacacccaatggggctcacctcacccacccaccacttaacacacattaaaccctcattcaccaccgagaaaacacccctcatgttcatacaccctatccccccttttcctcctatccctcaaccccgacatcattaccgggttttcctctta

SEQ ID NO: 602882 - DNA, 189 bp, Homo sapiens
atctagagctgagtctggtagtaacaaggggcactgacctcggacatcacgtcatagcaggtgagtagatcatcgagagcccctctttctgaagttgaacctaattacaaaggcacaacagagtctttccttgttcagccgttatttcggaggtactgttccatttggattattaaattcaaaattggg

SEQ ID NO: 602883 - DNA, 212 bp, Homo sapiens
gtggtgacaacaagggctgaaaacaaaacttagaccgggcgtcggggcgtgtgctataatccagctactcaagacgcgcacggcgagccgagcatttgggggttcaaggcgggagggtcggttggggccgggagttcaagaccagcctggactgcatagcaagatcctatttgtacaaaaaaatgtaaaacttaaaattgcacaaaatttgt

SEQ ID NO: 602884 - DNA, 340 bp, Homo sapiens
ggcggggggggggggtttcccccccccccttgggtgggtttctcctccctcccagcggggggtgtttttacccaaatcttggcgggggggttgtttgcttttgcccgcacccccttgactgaggggttggaacaaattccctgtcccctgggttgggagggcgggccctttttttttagttggggggggggggttttttttttctgaatggcgggcctttttttttttttccttcttcctttcgggcgcggttttttttgtttgaatgtccctttttttttccccccctccccttccatttgttgcggtttttttttaaaaaaaaagtcagtgttaaaca

SEQ ID NO: 602885 - DNA, 341 bp, Homo sapiens
ctggggaacttgtcaaatgtaatccaaaaaagttggggctggcccctttgccaagcagcgcccagttggtggaaggaaaaaaccaaggtgcagggtgccaggcaaaggccccaggcagaaaattttcctggcctgaaaccatcaggcctagtttgctgagtgtgagggtgacctttattggttaccatccccagtgcttgcatccaaaggctccagccctgaccaaccctttttgagtatccaaaaatgggcctttgtttgttaaataatttgctccctcccctgctccccccccaaagacaggtactactaataaaattaaagtcttcttccccctcata

SEQ ID NO: 602886 - DNA, 426 bp, Homo sapiens
  misc_feature (169)..(169): n is a, c, g, or t
  misc_feature (308)..(308): n is a, c, g, or t
  misc_feature (335)..(335): n is a, c, g, or t
ctgctctctacggagattaccgcacgggaactgctgctgtgtaagctgatcccttattactttctcgggatgctggcgatgttgctgtgtatgctggtgtcagtgtttattctcggcgtgccgtatcgcgggtcgctgctgattctgttttttatctccagcctgtttntactcagtaccctggggatggggctgctgatttccacgattacccgcaaccagttcaatgccgctcaggtcgccctgaacgccgcttttctgccgtcgattatgctttccggctttatttttcagatcgacagtatgcnccggtgatccgccggtgacgtacattnttcccgctcgttatttcgtcagcaccctgcaaagcctgttcctcgccgggaatattccagtggtgctggtggtttcattttcgagcagata

SEQ ID NO: 602887 - DNA, 122 bp, Homo sapiens
tggggtgggggcagtttaaagttattagttttaaaaatcagtatcttttaaatgggaaacaacttgcccaaaatttggtcccagatttttgggagacccctttaaaaaagtgttaattggag

SEQ ID NO: 602888 - DNA, 161 bp, Homo sapiens
ttccgcggtaatggggaggggccagactctgacagacaccacactcaggctctggcgcagagtctgtcattcgagtcaggtaggtggaggcccttgccccacctgggcaatggctggacactatggcaggagaaggaccctgtgtacaaacttccttggct

SEQ ID NO: 602889 - DNA, 1146 bp, Homo sapiens
  misc_feature (25)..(25): n is a, c, g, or t
  misc_feature (123)..(123): n is a, c, g, or t
  misc_feature (137)..(138): n is a, c, g, or t
  misc_feature (194)..(194): n is a, c, g, or t
  misc_feature (202)..(202): n is a, c, g, or t
  misc_feature (223)..(223): n is a, c, g, or t
  misc_feature (415)..(415): n is a, c, g, or t
  misc_feature (444)..(444): n is a, c, g, or t
  misc_feature (481)..(481): n is a, c, g, or t
  misc_feature (658)..(658): n is a, c, g, or t
  misc_feature (830)..(830): n is a, c, g, or t
  misc_feature (879)..(879): n is a, c, g, or t
  misc_feature (945)..(945): n is a, c, g, or t
  misc_feature (978)..(978): n is a, c, g, or t
  misc_feature (991)..(991): n is a, c, g, or t
  misc_feature (1003)..(1004): n is a, c, g, or t
  misc_feature (1031)..(1031): n is a, c, g, or t
  misc_feature (1063)..(1063): n is a, c, g, or t
  misc_feature (1081)..(1081): n is a, c, g, or t
  misc_feature (1083)..(1083): n is a, c, g, or t
  misc_feature (1085)..(1085): n is a, c, g, or t
ttttaaatttcacacactaacacanaccaccatcaacaaaaaaacctcattcttaacactgcactacctctccttacttaaccaccccttaccaaattttattaccacttccccaaccttctnccattttcctcccnnacccagtgggtacccgtggggatttaatacaaaaaaacttccccccaacctccttngtcctccnacaactctaacaccccccttncatacccccaacctaaccgttccttcccacaaactttcctctcatccctcttactttatcaaaccatcctttctaccccactcaaacactgtattaaccctcctcacctttccaacccactttttccagctctttttactacaacaaacgagcagccgcttgacgtaccacttattctccacagatcgtcgncgcagaaaaaataataaatacaaaaaagnccccataataccaccattccttttctccctctcaacncaacattccccactccttttctcaccccaccactcctttttattccctctacaaatcaacccaactaataaccaatcccaaacccattcacaattaccttaatttctaattagaacacacaaatccccctttcacccaacatcaataatcataacttttcccccttttcccctcccntatgacaccccccttaccttttttctcattatcctcaacccacatctcccacctttacaacaacacccttacttttttttaacatctctaccttttctttaaaaccctaaactattcccaaccaccccctttttccccatcccctcctacacactttctttaatacaccttntttcctcatacactcaccactcctctttacaccactacaccactacttntcatctccccatcacatccccactccacatacattatcacacatctctccttttcatatatattcnacaccatcacccctcactctctctctctatcanatccacctatccnacactcttactnnccaccacatatctactctctcacattntctctctcctgctcctctcccaacacaccctnctccacacgatatctaantnantcctctctctaccatcttctcccgacatcacatttatataccacaactttattttacacct

SEQ ID NO: 602890 - DNA, 1258 bp, Homo sapiens
  misc_feature (462)..(462): n is a, c, g, or t
  misc_feature (503)..(503): n is a, c, g, or t
  misc_feature (611)..(611): n is a, c, g, or t
  misc_feature (937)..(937): n is a, c, g, or t
aataccagacagtgaggtgagtctggatccgagagaaccgcgaggtgctagaaggcgtgggctattcataaattgtggtccaactctagcgcaaaaagattgtccagtcattaacactaacacccctgtgtgattgcgcatttacaggccctgcagccattgaacgtatgtaagagactgtttatctcaatacgactcgaagcacattattgtaaaggaaaaccggtgatggatctacctccaaaatattatatggattatatctagatagagcggaaacattgagtgttgttcaaatgattttatccaggcatgatatgtgagatttactcaatgtctccaacagatatgtctcaagaagaaagtcgagataggtttactccacaagaatcaatttaatattgctgaaccttgatcggttaaagcaacaaggctacctgtcaccgctgaaaaagatgtganccgatgaggaaactagtggagaagcatagtggctgatgggnaaagtgtgacaatatagtcgggtacggcgtatactataaggtataagtcatatatattcctctttgcattaattaccggaggcataggagtgggttagggtcaatccngcaatataggataggtgtgatgtaggttacaccataatattgtcgggaggcgtggatgacgaggaagaagcatgacggaggtgttcggatacttacttgggtaaatacttcgtttcttttaacttaagcgttatatattggaaggcgtaaactttgatgtggcgatactttgcttgttcaagcgtagtgagaactgccctattaaagttagggatgtttgcgaataaaatctgaacatggataaatgcgaattaggcctataactaacatatgggaagattctgggaggatgcttacgcgacacgcgtagtatggcgtttgcttangggcataatagaggggtcaagttcaatgaccgacacatttggtgattcttaccgcaagaatacagtggctggttcaattgggagtgcccactttcatggacaatccccggtccactggtgaccattctgttccgcatcccggacttctgccacgcacttgtgtgtgtttggacctcaacaaacctggacgggaatacccaacccatgatcgggaaaacggtggccttctaaaagctcattaaaacgggcacaagacaggaaagaaaaaacccgaaaacaacacacacgacatcacacacaaaaactgtcgtaacccaaaca

SEQ ID NO: 602891 - DNA, 272 bp, Homo sapiens
ggacagggaggtatggaaaggcgagagctgctggcacccaccgtgaggaggaaggcaagagggggtggaggggtgtggcagtggtttggaaacgctacagatgcccttgctccccatttcccatctgcaccccttctctcctccccaaatcaatacactagttgtttctacccctggctgctgtggtgtctatgttggtggacgtcgctgtgtgatactgagtgtcagactcggttttcatgcgcgcgcgatacacactacacaacacacac

SEQ ID NO: 602892 - DNA, 954 bp, Homo sapiens
tctgtgcttgacgaacacgataacggcccgtcaatggcctatttataatccgctgcctacatgcgtcccctccgtgttaacgccttctcccttctgcgattttgcccgccaaaaactgttaacccaccccaggtcttgccatagagtgtccgtaccggctccacccatatatctctatagccttggcccccaacagtatagggccctttcaagttaatcggcaaactttgtggaaatgtgagccgccactggttcactttcataaagagcgcgctcccctgttgagaaaagggggttaccgcgggcgctgcccaaccaaattcttcaaacctgtaatatgcgcccgtgtcatcccaactggctgttcggccaacggacagttcttcatccctggaacgggccaaacgacaggccgtgggaaaccctcttagtagcccgataatgcggggcaacccggcccaacttggggagggcaagaaacaacgtttgacaaatgcacacatgtgggcaacataccaaaaaagaggtaaccacggcgagaaacaccggatagagaagccgagtcgctgacacgcaacaacggtagaaccccccttgttcaaaagtagtgagaaactatcaccgcgtcgttggtgaagcaaaaacagggtgcctttttctccccccctacatgtgctcggctcgctaggtcatctccacgtgaatagcgctcccacgttaataaacgccaatggggcacaaaacaccttgggccacagtaaaatatgaggaggagacagataacccctgtttatatcttttcagcactggaaataaaacacctgattttgcggaaaaggaattaattctgaaatatctcgtgtaggcccaggaacttacaggggcacctcatagcagaacgtcattgttcatgaaaccacccttttttttgggaaaaatgaaggtttcggccca

SEQ ID NO: 602893 - DNA, 308 bp, Homo sapiens
tgaaaattttttttatcactgtcttaatttcatttgccaaataggtttttgtgctatgttatctgctgtaaactcaagattgtctccttaagggacaacttactatgtttcagatagtagatttggggaattgattttttcaccgatagaacattaagcacttaaaaaatagcatcactaaactctaaaggggcctttacttaaaacaaattttgttggtagttatttttgtggttaaaaattgaaaaagtacaaaagtttatgagtaggaaattccattcccactgcactcctgcactccagcctgg

SEQ ID NO: 602894 - DNA, 446 bp, Homo sapiens
gggcgagtgtacacgtccgactctggattttagtagtcatggccctacgctaccctatggccgagtgccttaacaaggggcactaaatgtccaagaacgagagcaagctcatgcacaagccacgccaagggcttgtgaccaaacacaccaagatatggtccgacatgaataaggaggtgtgtggctatgacccgtacgaacggttcacaatggagttactgaaggaattcaatgacaaacgggcctctaaattgatcatggggtagcgacgcatatccgctccatgaagaaacagcactagctgatctacttactgtgcttcatgaggaaagttactggcaataaagagtgagcccctgtcatgatctctgtctgaaatgaacattttgagtgttacatttaggatgctggttcatggcatgaggtatatagtatactgttatcct

SEQ ID NO: 602895 - DNA, 405 bp, Homo sapiens
ttgctttcttctttttacttctctgtggttaaaaacaaacaaaaagaactaataatacagtagtaaaaatatagttaactttcatatgataaccaaaattagaattatgccattttagttttagtttctaaactcatggtttttggtccaaagtagcaaaacagaacaaatgaacttttaggtcaatgtttttgaaacaaaaacatgataatgcaatttaccaatatctttaagtctacatctccaaaggaatttttaagccttcaaatatttgcacaaatccacaaggattcctcatcttatagggaccacgaccttaacagtatagaggaatttctccactgcttgaaaagaatatttctattatattgtgcagccaggtacagcggttcacacctgttaccc

SEQ ID NO: 602896 - DNA, 568 bp, Homo sapiens
  misc_feature (346)..(346): n is a, c, g, or t
  misc_feature (559)..(559): n is a, c, g, or t
tggagacgggggtctcaggtaatattctcctcttggtagggccggggtcggggacactttagacagacagggtagataaaatatccaagaactcggccaccaaggcttttccggtcctgggctccaccaaaagtattttatggctgatgactaaacggcctaggatggaaagaacaaaggcctgtcctcaccttctcccaagtcataatggggaagtcattcagtcttcaaagggctgcagaaaaaaagaaattaactaataagaaagacggagggtgaaggacagcagcaagtacaaaataaagagatagaggtctaaaattcaggtggagagacagcatgtgtntctgaactcagaggaaggcagcaaggggaggaaacaggcagactggactcacgggcaatgagatgcaggtgacccctcaacaaggcctcacggcccagcctcgttaactggtagtcagcagggaccaggcacgggggctcaagctggcaatcccagcacttggggaggcaaggcaggtggatccttgaagtcaggagtacaggaccagtctgnccaaatggt

SEQ ID NO: 602897 - DNA, 725 bp, Homo sapiens
  misc_feature (2)..(2): n is a, c, g, or t
  misc_feature (123)..(123): n is a, c, g, or t
  misc_feature (145)..(145): n is a, c, g, or t
  misc_feature (147)..(147): n is a, c, g, or t
  misc_feature (150)..(150): n is a, c, g, or t
  misc_feature (162)..(162): n is a, c, g, or t
  misc_feature (267)..(267): n is a, c, g, or t
  misc_feature (298)..(298): n is a, c, g, or t
  misc_feature (343)..(343): n is a, c, g, or t
  misc_feature (396)..(396): n is a, c, g, or t
  misc_feature (398)..(398): n is a, c, g, or t
  misc_feature (419)..(419): n is a, c, g, or t
  misc_feature (495)..(495): n is a, c, g, or t
  misc_feature (540)..(540): n is a, c, g, or t
  misc_feature (610)..(610): n is a, c, g, or t
  misc_feature (644)..(644): n is a, c, g, or t
  misc_feature (648)..(648): n is a, c, g, or t
  misc_feature (652)..(652): n is a, c, g, or t
  misc_feature (692)..(692): n is a, c, g, or t
gnggggagcaacagcaaagggagaaatgagatgttgcaaaaagatgggggggggttcccctctcctctgggggctgactcaacacactgatgtggcagtttaccccactccagagtcaggggngttcattcttttttgggggtgngncanggtgggggttangagggcgtttctgggggcttgggggccccggctggtctctttcccccctccccccccccttggtccctttctctggtcggggggagggggctgggtggggggggnggggttgggaaggggggggttccccttggcngggtggggcgggctcctccggggtggggcttgggggggggttganggtgggggtaatactgctgacacctcccttgaggctgaggtggggaatgggcntncttggggatttggtggctttnatggcctgggtttccctctccaaaactttttgaatgggaaatcccctccccttccttatatggtggcttcttcccnctaccttctacccttttctactttgggcttaggatgatggccatnatctacatgtgttttcagcacctggttggttctaaatgggatctggagacccagcttcttggagattttnaagaggaagtattaactggacaaatggaatgggnacanaaanaaatacagggtcacccagaatggcagaaacctaggtttcncagagtggaaagagagaggagacattcaacaca

SEQ ID NO: 602898 - DNA, 1635 bp, Homo sapiens
gggccacgcttaagcgacctttgcaggacgatgaggggcgctggtgtcatcatgtgtcagggctccaagaaggattacttcaagaagttcttatatgagccatggccagtagaatctcacctggaccactgtatgcatgaccatcttctaatgctgagatcgtcaccaagacctattgagaagcaagcaggatgctgtggactacctcacctgggacctttctgtactcgccgcatgacagagaacctcgcagattagctagcaacctgcagggtatttcccatcgtcacttgtcggaccacttgtcagagcgggtggagcatgaccctgagtgacctggagcagtccaatgtgcatcagtatgcgaggacgatgcatggggacgtggcgccgtcctgataccgtagtgcatgatcgtcgccgtactattacatcaattacaccaccattggggctcttcagcatgtcctcaatgccaagaccaaggtgcgaggggcttgtccgagatcatctccaatgcaacagaggtatgagaacagttcccatccggccaccatgaaggacaatcgtcccgggccagttggctcaggaagcgtcccccaacaggcggaataaacctaaagtcaaagatccgcagtgtggacacacctgtcctggggggtcccatggcccgcgtgcgtgacaggaattgccccgaaaggggacacctctgacgcacaggcacacagacggggggggctccacaaggaggagacctactcgaataaaggcaaagcacctgtttcgaacagaggcgctctgtcttactcatttgtctgttcttttttcctctgttctcctcactctcctctctctgccagtataccagccacagcaaacgcacaaaaaaatacatcaacaacacaacacaaatacaacacaccaaaatacaaaacaatcacatcaaagacatcaacacacacagaagacaaacacaaattacaaaacaagcaactacaagggagcgtagagagggacgacgaagagtaggagagaggcgcacgcgcgccgaggcccaggccggcaacgggcagagacagcgcgacgacagccgccgagagagagagcacacgacagagacgacgaccacagacacagcacgcagccagacaggcaggacgaggcggacggagacgaccgagcgacaccaagaacacgcgaacgcacacccgagaggaacagcaggaacgcggcaaccgcacgacacacggcagagagaagcagcagagaaagaagcagacgacaaagcggaacgcagcaaggccgagacaagatagggagcaagcaagagcagagaagaagcaccagcaggacaggaagacaagagaaggccaggagcacgcacagagggaagaaacacgaggaggcaaacgagagggagaagacagcaagaagcaaaacaaggacgggacgagcagcagagagagagcaaacgaggaccacgaagcagaaagaacaggagcacgaagagccacgagaagaaggagcgaggccaaaaaggacggcgagcacagccgcaggccagatggaaggggcaacagacaacaagactaagaagagacgcaggacagcaccaacgggggaccagagcaaagg

SEQ ID NO: 602899 - DNA, 483 bp, Homo sapiens
  misc_feature (8)..(8): n is a, c, g, or t
ttagcttnagactgccctcctcgccccaggaaggaggaggatgtggaaagttcaatcgaactaattgctgccctggaaattgatgacaatggacaaggccaattataggaataactgcaagaatgagaaaattcgcccatgttccagttcaaacttggaaagggtggtctccagattctctctttggagactggttttcatttttcagagggttcaagactttaatagcagtagttctggctgtactaggaagttgcctaatactcctttgtctcttacctctccttgctagaagcattcaatcagctatagaggcaatagtagctaggcaaactaccactcagctgacggctctgcataaatatcaacctttgcccaaagaagaaaacttgtctcttgacgcagaattaagtaatagtgaggccttctattaaacttcttttataaaaggacttgaagtggggaaaaatgtagtgagggtta

SEQ ID NO: 602900 - DNA, 1249 bp, Homo sapiens
tctctcctcccccgccgcggcgcgagcggcggcgcgccccttgagagagagagagagggatgagcgggggcggcggcagcgggggggggggtcccccccccccccgggggggggcgccgccggaggagagaggggagagaggagaggagaggcgggcggccctctaattcccccgcgcgcgcgggggggggcgccccgcgaggagagtatattagtgagaggggcgcgccagaaagagagagaggcgggggagagagagagaggaggggggcctcatctgggcgcgacaaccgagggggcgcgcacctctccttctaagagagagaggaggagagacccgcgcgcgcggggcggaaagaagagagtgagagggtgtgagctctctctgcggcgtctgcgagggggaggcgcgcggcggggaggggaggagagaaaaacagcgcggcggagagaggagagagaggaggcgcgcccctctcccgcgcgagggaggggcgcgggtgggggagaacgagaggggagcacgccacaaggagagaagtactccccgcgaggcggtcttaacaaagaaagcaagcggggtgaggagagggaaaagagggcaccacaacccaatacgaggaggaggagcgaaaacacaccccagggggcgccccaataggtggggcgccccccacgcacaacaagaggaggcgacaccaacacaacacacccaccgcggggcggacgaccacaggagaaaacaaaaaaacaagaaacaccatcgggggggggccaaccccacgcggaggacagtgatgagaaaccaccagacagggaaacaataacaaacaacaccccgagaaatgaaaaccaacaaccagaaagagaccaacactagcgagatccaacaaaagaacaccccacaaagagaactctggagaccaaaacacacacaaggagggtccactaaaaaaaacagagacaaccaccctacaaaaggggagagagggacgaacacacacaacaaaaaagaatagacacccccgacgggagcaaaccaggcggatacacaaggagggcgccacaacccacgtccccagagaaacagctggcaaccccgaaaagaagaaaaacaccgggggggcccgatccccccaaaacccccggacccaaaaggaggacacactaaaagcccaaaaaggggcgggaggggggcgaagccggacgcgtgcttgtccgccgcggccaaccaaacccacgcaccccc

SEQ ID NO: 602901 - DNA, 1033 bp, Homo sapiens
  misc_feature (4)..(4): n is a, c, g, or t
  misc_feature (36)..(36): n is a, c, g, or t
cgcntcggccccccccccgcccctgtgtgggtgtgnggggtctctaaatattatgacaccgccccgcggtggggcgcctgcctcgcggtttgtaatatgttggggcggccccccctgcgtcgtctgcagaggttgcttcgtccccgccttgtgggagtaggaccccctccgtcttcatcttcctgtctccgccgccggcggccggtcgggtgttgttgttggtaggcccgccgtcttccctccttcttcatttggaggagagggagcgtccccctccctctgcgggtaggtgtccctctgcatgttggttcctccaccggcgtcgtcttctctccggcgggagatgcttcctcttattaagcgtctcctctatgtggggggcttctctcggccggtgtgcacggcggaggtttattactccgacatcgtgttgttttcaccacacacgcgcggcgaagacacaccacggctcatatgggcgccgcccctcttaatagggccgcctcatctttttaatagagaggggcacacactccatcttatgtggagcccaccacggtgttgtggtgtagtccccgcaccaaagagcgcacgcgcgctcgcgtgatacccgcgctttcccgcggcgatatttttctcccgcgcgagatatattttcgtgtggcgagaccccccacgcgcgctctccgcgctctatataagagaacacacagcgcttttccacagggccctctcttctgccacacgttttttcacgcgggggcgcccacaagaatagaattgtgtgagaatataggagagatataggctctttatgttttgtatacaccacccgcccacctccctctccacacgaggtttatggaaaaagagttaccacacacagattttggttacccgcgaaaattcttgtgggctataaaaacctcttttaaaagagattttgtaaaaactcatttaaaactggcgtttttttttccacgcccagtatcccacaccacaattggttttggtttccaaaaaaattttggga

SEQ ID NO: 602902 - DNA, 169 bp, Homo sapiens
aaaccaaccttcaaaattacggtcccaaattcatgaaggaatttttcttaaaactaaaaggggggtgggtataatccctaaatggtacccactggcgcccctaaacggtttccggtcaggtcctccgtagtgattttaaaaatttaggtatatgaattagttaaataga

SEQ ID NO: 602903 - DNA, 546 bp, Homo sapiens
  misc_feature (319)..(319): n is a, c, g, or t
caagctgaagaatttggtgattattggtgggaacatctatttatcaaagaagcccaagagcctggtggctgatattcatccccattaatctccattagccctgggcaaggtaagacccatgacagcaattttttaaatcccatctcggtcttctctaggttgctctgtaagaattgtttagatgtaagctggtgagtgctcaggaagccaaagtttaaagcaaaagttttaagcaaaagagtaacatgagctgatactaaaagccatctcttggcccggtgcaatggctcatgcttgtaatcccagcactttgggaggntgaggcgggcggatcacgaggtcaggagtttgagaccagcctgaccaacatggtgaaaccccatctctactaaaaatgctaaaattagccaggtgtggtggcatgcatctgtagtcccagctactcagggggctgaggcaggggaatcacttgaacctgggaggcagaggttgcatcactgcattccaacctgggcaacagaacaagactccccgtctcccccacaa

SEQ ID NO: 602904 - DNA, 248 bp, Homo sapiens
gcacgaggccagtgtggggcacgatggcagtggtggtggattgtggcgttcctctggctcagtcgtggtcttcatcccacctggctgtctcctgccccagaggacaggggagcctcttccagcagccggaggtcctgcactttctcacatctgtcccccatcaacacggccgcctgtcgacagcagccccataggccacagcctcatcagggttgatgctcttgttcagctccttgccgttgaagaag

SEQ ID NO: 602905 - DNA, 859 bp, Homo sapiens
cctgattcaaaatgaactctttcaatcgtggaaagaagcagacattcatgaaagtatgaacatattccacgatggaaagagtgcattttgaatcaggattggaagtgaccccaatatccgcagcttcagcacgtggtgcttgatcacttatggacagcaaggacaaagtagccacgacatttcctctgctacaacgactactgcagcacacgtgtggcccgatccctatgccctgaaccatacagctgtgagctgctttactttcacaggcgacgacaagacatagcgctagtgcggaaatggaaccaacgtatatcaggcaacgcgtgaaactggtgcagcacgcaaatgagattgcgccttgcaaaagatagtacattattccaccatgatgtgcccgatcatgaacgctggttcaatctgacacgcgacagtacacgacaacgagcttacaacagaaaatagaggtggagaaagagagacatcaagcagacgagagaccagattgacgactgtaagaccactcaagcaacataacacggacgaggcatagcaagatgtggcagctactttactttgctcacgtaactgtgcactgctgtcatattgaagacctaagactagtatttcctcgcagcacaactgacatgacagtgtgctccatttgaacgataacgataacagcagtcaacatcgcctattgtcgctttcaaaatgatcatgtttatagctggatggtctttattacaaagtattagatttttacttctatttaacggaaaactggacttcgcgtgaatgtgcataacttccttttattagctcttaaatatttacattcagacgcctacacaataaa

SEQ ID NO: 602906 - DNA, 547 bp, Homo sapiens
  misc_feature (438)..(438): n is a, c, g, or t
gattcctagactggagtgtagtggacgatctcagctcacggagactccactagccaagtgcaagcgattctcggtgtcttaagattcctgaggtagctgggattacaggcgcacaccactatgcctggttaacagggtttcaccacgttgaccaggctggtttcgaactcctaacctcaagtgatcctcccacctcggcctcccaaggtgctgagattacaggcctgagccactgctcaaattcaactttttaaagatagtgtttagaactaggtaaactttgtatacctcagaattttgtgaagaggagtaattgttcatattcgtgtctgatactttcagtgttacaggctaaaaggaaaaaactgtttctctatagtcaaaatacttcgacaccaaatgtttggatttttcacaccaagcaattttctgtagacnaagggaaacagttgccctacaatttaattcagttctgacattacccagagttagcacagatcccacaggccagggatcagtgctgcaacatccatccgaagcagtgccg

SEQ ID NO: 602907 - DNA, 259 bp, Homo sapiens
  misc_feature (2)..(2): n is a, c, g, or t
  misc_feature (43)..(43): n is a, c, g, or t
  misc_feature (57)..(58): n is a, c, g, or t
  misc_feature (74)..(74): n is a, c, g, or t
  misc_feature (76)..(76): n is a, c, g, or t
  misc_feature (113)..(113): n is a, c, g, or t
  misc_feature (120)..(120): n is a, c, g, or t
  misc_feature (131)..(131): n is a, c, g, or t
  misc_feature (148)..(148): n is a, c, g, or t
  misc_feature (151)..(151): n is a, c, g, or t
  misc_feature (156)..(157): n is a, c, g, or t
  misc_feature (162)..(162): n is a, c, g, or t
  misc_feature (176)..(176): n is a, c, g, or t
  misc_feature (189)..(189): n is a, c, g, or t
  misc_feature (201)..(201): n is a, c, g, or t
  misc_feature (206)..(206): n is a, c, g, or t
  misc_feature (208)..(208): n is a, c, g, or t
  misc_feature (211)..(211): n is a, c, g, or t
  misc_feature (213)..(213): n is a, c, g, or t
  misc_feature (221)..(221): n is a, c, g, or t
  misc_feature (233)..(234): n is a, c, g, or t
  misc_feature (244)..(244): n is a, c, g, or t
  misc_feature (258)..(258): n is a, c, g, or t
anagaattgcattaacttaaaatttatcataccttggcaaganctaaaataattttnngatatcttttcccttnanttgtagacgacatctaagaggatgaagaaaggagagnctaagtntgactcttggnctactttcctaacaatngtnttggnnagttngatgatggtaaagnagaaagggcacanttccaatgcctntttcntnagntnagggaacntcaaaatcctgnntatgtactgnttttttttttgtgnc

SEQ ID NO: 602908 - DNA, 206 bp, Homo sapiens
tgtactggggtacgtaaatacaaaaaatgaaagcatcatcatgccaacactcatagcaataacagcactgtaaaacctctatttctacatacgactagcctactcctcctcactgactatgttcccatccaccaacaacataaaaataaaatgacaattcggaacacacaacaacaaataaacattacgttcccacaataattggt

SEQ ID NO: 602909 - DNA, 133 bp, Homo sapiens
cggagagagtgggctaggtgcttttactacatatgatgatctgaaatccctgcttggttctgagctgcgtatattgaattggtaaacgtaataccaataggcttattatatcatttcctatcttaccctatta

SEQ ID NO: 602910 - DNA, 587 bp, Homo sapiens
gtactacttggttcccgatatggatgatgaagaaggagaaggagaagaagatgatgcatgcatgcatgcaagcaggcatggcagcatgcaagcatgcaggcaagcctgagtccagctcactgggccaagctgggccagctgcacagcatgcatgcaggcatgcacgcatgtcgcatcacccacagcacagccagcacagcaccgcacgcaggcatgcactcagcacagccaacaacacaggcaaacagttcacacacgtcaaaacacacaatacacaacagtgccgcctgtgaacctatatcaacactctcccacattccccggtcctccagacaatcgtcacacacgtggctcccctttacgagttcatcatgagaggcccggccccggccacgcaacccggctgtgcgacagactgcgcacaacacaccgagcagccagtatgaaccaacgagacgcacgaccgccccaacacaaagccacagacccaccaagatcacagtgcagccaccctctacggcaaacaccagggcgagcaggccaccaccacggaacacccacacaactttcacccaaaggacaccgtg

SEQ ID NO: 602911 - DNA, 153 bp, Homo sapiens
cacgaggctgcggacgacaggccactcctgggcagatgtctttgcagaagtattttttgtgtcaggttgtgatggggttttgctatcgctggcagggctggtctcaaactcctgacctcaagtgattcgcccacctcgtgccgcagcctcgtg

SEQ ID NO: 602912 - DNA, 315 bp, Homo sapiens
attttaaatccataatcttttaaaaatgactgcatctctatgctcactagattttcctaaaagagatttcaaggtgtaaattggccaactagtcttctctcggaactaaatcttttcagggttacacggaatatttgcccttaagaacattttgggttctttgtcagttgtcagaaagtccttcattcaaggtttttgggccgggtgcagtggctcacgcctgtaatctcagcactttggaaggccaaggcaggaggatggcctgaggccaggagtttgagagcagcctgggcgacagagcgagactccgtctca

SEQ ID NO: 602913 - DNA, 366 bp, Homo sapiens
agtcaagagaaatttataggaggccttcgggagaattagagcaaagactctcaggagaattcagcagacaggaaccagaagaactaaagaaactttcagaagtgggcagaagagagccagaagaactgggaaaaacccaatttggagaaataggagaaccgaaaaaaacaggaaatgagatggaaaaggaatatgaatgaagccctcggtagagatgaggatcaggaagctggtgttcagagggatcatgggattttattaaactggattttcaagcgatttgtctgttataggaaaaatgagggttttacttctgctgctttccatccctattttgccattaaataggtgtctttcactcttgca

SEQ ID NO: 602914 - DNA, 383 bp, Homo sapiens
aatacttagtacttatcttaggtgtcaattaattgcgtgttgtttgtatttattgatttcaccatggaattaaaaaacaggacaatgggccggggtgccagctgtcacgcctgtaatcccagcatgtttggaggctgaggcggttgtatcacctgaggtcaggagttccagaccagcctggccaacatggcgaaaccctgtctctactaaaaatacaaaacttagccgggtgtggcggcatgtgcttataatcccagctacatgggaggccgaggcaggagaatcgcttgaatctgggaggcggaggttgcagtgagccgagattgcaccactgcactcagcctgggtgacagagcgagactctgtctcaaacaaaacaaaac

SEQ ID NO: 602915 - DNA, 546 bp, Homo sapiens
tcccctggcatatagggggatgtgtctgcacacagctcacacgaccgagggtacaggaagactcaaactcagtcaaccattcttcaacccaactgggagtctagaaggcctaggcacacaggtgctacactaaacacttgtaggtcatgacgacgtgaaggaaccgatcttgttcatctctgtgccccagaactcggcatgtagcccatgatcgacaatgcagatctgaacaactgtcacaatcttctgtatcactagtgcccggcaacacagtcagtgctcttcaggtgtgtgggaaagaagccaatgagtagagaagtacccacaacgtctagcagtgaggaaaaaaagaaaaacgtgaacagtaacctatgtaaactacccattcccatcccatagctcagctccctgcacacagcaggtgctcacgtaagtgtaccgaatcaggaactaatctttgtgacatgcgtgcaaggccaacagaaggtgaccaaaatgtgcttgaataaatggatagaaagatataataaatatcaatattccaga

SEQ ID NO: 602916 - DNA, 623 bp, Homo sapiens
gccaagagtacttttggggaagtatatacttcccaaaccggtataactgtatgggggcggggcatgcttagcactgcaactgcgctaggttaagctgccaggagtccacgattaatcctcggttcacagggaagaataagacatgatggctctgtgccaatagggacactaaactcacagcgtacgatgacttcacaaggaagctgtcatgactacagggaagcagctctattctctctgatgccagggaccccttgttgtgtaggcacctgccctgagacatgtcaatggcccaatatgggatctagcggaaatattctgaggtcaggagtattaggcccaccctgggctccacggccgaaagccgtaacttggaaaaaccccaaattacccggtccggtctggccgccataggaaaccaggaacgggggttgccacccttagataatggcttaacaccaggggccggggagggaaaaatgggcggcggtttacaagggaaggccggggaataccccgcgttacccaaaattaggggcttggggggaaacccccctttctcacaaggggaaaatggggaaagggccccaccccctttgccacaaatttccgggtggcgggcg

SEQ ID NO: 602917 - DNA, 89 bp, Homo sapiens
ggatttgctggtgcagtacaactaggcttaatagggacatgatagactttacatcaaaggtgagctgctgtgaggcagtatttagaaca

SEQ ID NO: 602918 - DNA, 801 bp, Homo sapiens
  misc_feature (527)..(527): n is a, c, g, or t
agcactcctaaccaggtgtggaacatcggacgtccgtcccttcctggtccataagtgaaccatggctctcatacgtcgatgtataaggctcgagtgccttggagaagttccctgttgatccagcgcttcaagttcgggagcctgatgaccatccgtcctgtcacgtcggtgcgtaggacgcgggcgcaattgctcagaaagagccacccgcacggccacaagtgtatccgtgatgccttgctgttcctgcaacctgaggtacacatgcggctgctgttaccagttccgctctgtcctcgatcatcctgggtcagcatgacatgtggattgagcaatggggcttgaaggtgcacggtatgccgggtgaaagagtcgtgatccatggctgtaatcgtctctcttggcctctgtctctgccgatcactgtcgtcccaggaatggttgaagggggcatcgtggttacccatgtgatcccacatgccccaggataactaaagagtcatgggacgtctagctgcataactaanacaattcattcggagataaagtgggaacatcgtatcatccacattccacatcccggggcgcgtcttggtttactagagtactcccggtggcgtggtgcctgcaggcaccttcagtggcccgggatgtgcgtaggatacacgtggggcccccacatggcgtggttccgcttccatggcgtcggcgcacgtcgcgtagccggttaggaagcctgcgtccctggcggagggcggctcagttgcccctgtcgtgtcggcgcgcccctctatgcgaggg

SEQ ID NO: 602919 - DNA, 109 bp, Homo sapiens
gcaagcgtggtgctcactcgcaagtcttgcgtggtgcagacggaagcggcgggctcttggagaagattgatcgttagttcattgtacaccacactccaagttttgggct

SEQ ID NO: 602920 - DNA, 966 bp, Homo sapiens
  misc_feature (8)..(8): n is a, c, g, or t
  misc_feature (14)..(14): n is a, c, g, or t
agcggggngggggngtggcctgcccccggcccagccggctcttctttgcctctgctggagtccggggagtggcgttggctgctagagcgatgccgggccggagttgcgtcgccttagtcctcctggctgccgccgtcagctgtgccgtcgcgcagcacgcgccgccgtggacagaggactgcagaaaatcaacctatcctccttcaggaccaacgtacagaggtgcagttccatggtacaccataaatcttgacttaccaccctacaaaagatggcatgaattgatgcttgacaaggcaccaatgctaaaggttatagtgaattctctgaagaatatgataaatacattcgtgccaagtggaaaagttatgcaggtggtggatgaaaaattgcctggcctacttggcaactttcctggcccttttgaagaggaaatgaagggtattgccgctgttactgatatacctttaggtaaagttcacttagaagctttaaaaaaaaaagtaattaaattcttttacaagtttccattgaggtgtgatatacatacagcacaggtgctgtatgtcttagatatacagcacaggtgctgtatgtcttagatatacagcacaggtgcacaggtcttagatatacagctcagtgaagcttcagaaatgcatgcatgcatgtagccatgactcagatcaagatacggaagagcccagcactccacgatgctccatcatgcccctttgcagaaaatactgcctcctccagtaaacactattctgatgtcactatagattagttttgcctcttcgtgaactttgtataaatagaactgaacaatatgaactgtcctgtgtgatttcttgtatttcattatgggtggtgtgctattgtatcaacagggtatttgggtggttttcagatttgtgatattaacaataaaggaattataaatattgtagtacaaaaaaaaaa

SEQ ID NO: 602921 - DNA, 226 bp, Homo sapiens
cgccaaactcggatttcatctgggacggcaaatcttaccccgtcctgtttaccaaaaacatcacctctacccatcaccagtattacaggcaccgcctgccccagtgacacatgtctatatcggccgcggtacctctcaccgtccaaaggtatcatttatcacttgttccttaattccggacctgtatgaatggctccacgagggttcagctgtctcttacttttta

SEQ ID NO: 602922 - DNA, 402 bp, Homo sapiens
ccccactggaaccatgtgtgacctcgcagtcaccggggccctgctgctgtggccgctcttactcctgctgttgtccatacgcaggcacgagcacagcagctgctatttgccaccacgccctttcccgcattccatcattggcaacctatagcatacgcaatagaacaatattcccacgtccttcacccgagtgggccagcgctttgttacgctgttcacgctgtacgtggactcacagcgcatgcgcgacgatgcacgcatacaatgcgctgaacgaagcgctgctggactacgacaaggtctaggccagaggcggacctgcacacggtccatgcgcacagggacaggcgaatcattcttaatacacggacctacctgtaacgacatccgtcggttccctgg

SEQ ID NO: 602923 - DNA, 373 bp, Homo sapiens
gttttttaagggattttccaccccccccccgaatttggatggttttaaaattggtccctccagccccccggaacccttttttttttagggggggcccccccgggccccccccctttttttaatttttggttttaaaaaaagccaaaaagccccctgcccccaggtggaaattaaggagggtttttttttccccaaaaagcccggaaaaaggttaatttttttagccctttagaaattggggaaaaatttggaatttttcccattttgggttcccccattcccaaaattttttttgggggaaaaattggttcctttcccgacccccccctattttgttttttaaaaaaaaaaccccgaaatttttggtggggga

SEQ ID NO: 602924 - DNA, 937 bp, Homo sapiens
  misc_feature (8)..(8): n is a, c, g, or t
  misc_feature (14)..(14): n is a, c, g, or t
agcggggngggggngtggcctgcccccggcccagccggctcttctttgcctctgctggagtccggggagtggcgttggctgctagagcgatgccgggccggagttgcgtcgccttagtcctcctggctgccgccgtcagctgtgccgtcgcgcagcacgcgccgccgtggacagaggactgcagaaaatcaacctatcctccttcaggaccaacgtacagaggtgcagttccatggtacaccataaatcttgacttaccaccctacaaaagatggcatgaattgatgcttgacaaggcaccaatgctaaaggttatagtgaattctctgaagaatatgataaatacattcgtgccaagtggaaaagttatgcaggtggtggatgaaaaattgcctggcctacttggcaactttcctggcccttttgaagaggaaatgaagggtattgccgctgttactgatatacctttaggtaaagttcacttagaagctttaaaaaaaaaagtaattaaattcttttacaagtttccattgaggtgtgatatacatacagcacaggtgctgtatgtcttagatatacagcacaggtgcacaggtcttagatatacagctcagtgaagcttcagaaatgcatgcatgcatgtagccatgactcagatcaagatacggaagagcccagcactccacgatgctccatcatgcccctttgcagaaaatactgcctcctccagtaaacactattctgatgtcactatagattagttttgcctcttcgtgaactttgtataaatagaactgaacaatatgaactgtcctgtgtgatttcttgtatttcattatgggtggtgtgctattgtatcaacagggtatttgggtggttttcagatttgtgatattaacaataaaggaattataaatattgtagtacaaaaaaaaaa

SEQ ID NO: 602925 - DNA, 217 bp, Homo sapiens
ggcatggaactgaacacattcaagtgcaggtggtgccggatatgcggtcactcagttcagacgcaaaatatctcgtgaactatgtgccacccgtgccacaaacattcaaaatgaccgttcaatgaactggatatgtgtctttcgaatgcgatgggtaccaaagattcgaccgccctttgaggtggcctttttgacgacaggaaaatcaatgacgcgg

SEQ ID NO: 602926 - DNA, 912 bp, Homo sapiens
  misc_feature (8)..(8): n is a, c, g, or t
  misc_feature (14)..(14): n is a, c, g, or t
agcggggngggggngtggcctgcccccggcccagccggctcttctttgcctctgctggagtccggggagtggcgttggctgctagagcgatgccgggccggagttgcgtcgccttagtcctcctggctgccgccgtcagctgtgccgtcgcgcagcacgcgccgccgtggacagaggactgcagaaaatcaacctatcctccttcaggaccaacgtacagaggtgcagttccatggtacaccataaatcttgacttaccaccctacaaaagatggcatgaattgatgcttgacaaggcaccaatgctaaaggttatagtgaattctctgaagaatatgataaatacattcgtgccaagtggaaaagttatgcaggtggtggatgaaaaattgcctggcctacttggcaactttcctggcccttttgaagaggaaatgaagggtattgccgctgttactgatatacctttaggtaaagttcacttagaagctttaaaaaaaaaagtaattaaattcttttacaagtttccattgaggtgtgatatacatacagcacaggtgcgtgcacaggtcttagatatacagctcagtgaagcttcagaaatgcatgcatgcatgtagccatgactcagatcaagatacggaagagcccagcactccacgatgctccatcatgcccctttgcagaaaatactgcctcctccagtaaacactattctgatgtcactatagattagttttgcctcttcgtgaactttgtataaatagaactgaacaatatgaactgtcctgtgtgatttcttgtatttcattatgggtggtgtgctattgtatcaacagggtatttgggtggttttcagatttgtgatattaacaataaaggaattataaatattgtagtacaaaaaaaaaa

SEQ ID NO: 602927 - DNA, 1177 bp, Homo sapiens
  misc_feature (1177)..(1177): n is a, c, g, or t
cgtttagaaaccgtggctaagccaatgggagcacaaacagatgaacgattagtctcagtataaggaagcggtataagagactgggaggatcctaatggaagaaactcctgcataccacttatgggacccactattcatctgcaatgattgtggcctcataccttgtaaggatggagcctttcacacagatattcgttaaggtctacagggtggccactattgacctggttgaccggatgtttcacagtgtgcgcgaggcctggctatgcagcgctcgaagcacaatatggcagatgtgcaaagaactgatcccagagtgcttatatttacctagaagtacctgattcaatatccaaacaactttgatctaggctgtagacatagaatggcaccaagcttggagtagtgtatccttccaacctgggccataaggggagccacgagaattcatcagagtccatcgtggaggcttggaagtgtgataacggtgagtagccatctacatgagtggaattgacttaatgcttcggttatagaacagcaaggccctagcagcaggtagaaagcttgtagaatgtcttccaatcagtcttactttactgagcggttcacgtggcatatctacgaaaatcaagtgaagcgcattgaggggagacacgacccaattgggggtcattgactaacttcggccagaatcctaaaccgctatttaacaaccgcattccaccaaagcgtgtcggcacacagttccactccagtgggcgaccaatggccgcaattcgtggtcgtagccgggagccataagttgtgccggatttttgtggtacgtcgaaacccattgcagagcctcacttacaacccgtcaggagcccagaacctgaggcaaatctctttcgcacagagatacttgaggtaaacaaaaagaagggctactcgacacgcacatggaaacaaaacagcatcgtggccgcacacaccaacgtgccggacccctctgctctaaagctacgaccttatacacggtgcatcgtgcgatcatctgcgagacacaaaatgaactacatgaagatactcgtcatagcacacaaaccaaactagctaagaatcgacgaccgaccatctgtgcagtagactatcagctcatgttactgttttgatctttgttctagtgcgatgn

SEQ ID NO: 602928 - DNA, 327 bp, Homo sapiens
atatgtaacatcatacaggtggtatatgaacttagatgagtatagcctactacacacctaggctatatggtatagcttgtggctcctaggccacaaacctgtatagcatgttgccgtactgaatactgcaggcaatggtaacacaatggtaagtacttgtgtatctacacatatgtaaacatacaaaaggtacggtaaaaaagcataaaaagataaaaggcataaaaataataaataaagtataaaaagcatgaacaaataaaaaaatggtttatcaatataagggacttcaacatgaacggagcttataggttacataattacgga

SEQ ID NO: 602929 - DNA, 584 bp, Homo sapiens
  misc_feature (8)..(8): n is a, c, g, or t
  misc_feature (14)..(14): n is a, c, g, or t
agcggggngggggngtggcctgcccccggcccagccggctcttctttgcctctgctggagtccggggagtggcgttggctgctagagcgatgccgggccggagttgcgtcgccttagtcctcctggctgccgccgtcagctgtgccgtcgcgcagcacgcgccgccgtggacagaggactgcagaaaatcaacctatcctccttcaggaccaacgtacagaggtgcagttccatggtacaccataaatcttgacttaccaccctacaaaagatggcatgaattgatgcttgacaaggcaccaatgctaaaggttatagtgaattctctgaagaatatgataaatacattcgtgccaagtggaaaagttatgcaggtggtggatgaaaaattgcctggcctacttggcaactttcctggcccttttgaagaggaaatgaagggtaagatgaagtggaaaggtacggaatcgggtacgggggggactgtctacggagtagcctcctcagatacatggaactaggtcggtcccaatgtaggggatggcggatagtacgtcggtaattactgtggcgtgatgcacaac

SEQ ID NO: 602930 - DNA, 1443 bp, Homo sapiens
gtggccaccccaagacgcgccccagcccgccatggcccggatcctccgggcatcctgccttctgtccctgctcctggccgggtttgttccgccgggccggggacaagagaagtctaagacagactgccatggcggtatgagtggtaccatctacgagtatggagccctcaccatcgatggggaggaatacattccttttaagcagtatgcaggcaaatatatcctctttgtcaacgtagccagctactgaggtctgacagaccaataccttgaactgaatgcactacaagaagaacttgggccatttggcttggtcattctgggcttcccttccaaccaatttggcaaacaggagccaggcgagaactcggagatactccccagtctcaagtatgttcgaccaggtgggggctttgtgcctaatttccagctctttgagaaaggagatgtgaacggggagaaagagcagaaattctacactttcctgaagaactcctgccctcccactgcagaactcctgggctcacctggccgcctcttttgggaacccatgaagatccatgacatccgctggaactttgagaagttcctggtggggccagatggcataccggttatgcgctggtaccaccggaccacagtcagcaacgtcaagatggacatcctgtcttacatgaggcggcaggcagccctgagcgccagggggaagtaactgatgcccccaccctacccctaccccctgcccatcatgcaagggccgaggaggggctcttcaggaaggaagccacattcccagtcattctacccccaccccagattctctttcttattacataaaagacaagcctggcacaactgtgtgtctgaaccactgtggacacgtgacaattgtcccagtgtgtgcatggctacacagccacgtatctgcctgcttgaaacccagggatggtccatctgtgtttacggcttggcacaacaccctcatatttttttcagctttctgttccaaatgagcccaaaggaaacacaagttctaggtccaatggttctgctcaaacctgaacatcattcttggggccagcatctcccacatgcccacactacacaccaccagcctccttcttccttcctgaaggaccctcctgagcccccaagcccatcccacagtgctcctgagaccagccaagacaactgtgagcgcgatggccgtgtaccccaggtcaggggtggtgtctctatgaaggagggcccgaaagccttgtgggcgggcctcccctgagcccgtctgtggtgccagcccttagtgcattcaggcttaggctcccaggcagggacactacccccgcgcctctggaggacatgctatcctctcactctgtccactggtatctcaacacccccatctgcccagtaaaggtctttctgcagcaaaaaaaaaagtgg

SEQ ID NO: 602931 - DNA, 498 bp, Homo sapiens
caggcaatagctcgtactaaacaagaatgtttgaaaagccacattagtagtccaattttttttttcacaggtgactactgtaccagtgtggagaaatggggctgttaactgtggtgggcccagacagtcatttgtctatattcctagtgatgagaaatttattccccctaaccttccaatgaaacaagtgtccacatagttctcatttttccctatggtggaaacattagtgagagggacccatgcatgttattaaaaattaagttcaaaacacttaaaataattctgtattagaaacttgactctatcataagtctcttctttgggaagtcatactgggctggtctaaactgctccaattccatggttattaacatttaggaagccagaagactattccagctagttcaaactagaggtttagtaactacaacactgattcctggtaggttgtgtgggttcggaaaggtctactcctcttcctctggcagaatttgc

SEQ ID NO: 602932 - DNA, 1452 bp, Homo sapiens
tttcgggttgttagagcgcttccaatgtcacgtcctgccattactgcagcagccacttctgtgttctgtggctcatcccatcgccagcttcaccatgctgtcatacctcacgggaaaggaggccgctcatctgtcagtggagttgtggccactgtgtttggggctacaggattcctgggtcgatacgttgttaaccaccttggacgaatggggtcacaagtgatcataccatatcggtgtgatgtatatgacatcatgcaccttcgtctgatgggtgacctgggccagcttacctttctggaatgggatgcacgagacaaagattctatcaggaaagcagtgcagcacagcaacgtggtcatcaatcttattgggcgggagtgggaaaccagaaactttgattttgaggatgtttttgtgaatattcctcgagcaacagctctttgagaaaggagatgtgaacggggagaaagagcagaaattctacactttcctgaagaactcctgccctcccactgcagaactcctgggctcacctggccgcctcttttgggaacccatgaagatccatgacatccgctggaactttgagaagttcctggtggggccagatggcataccggttatgcgctggtaccaccggaccacagtcagcaacgtcaagatggacatcctgtcttacatgaggcggcaggcagccctgagcgccagggggaagtaactgatgcccccaccctacccctaccccctgcccatcatgcaagggccgaggaggggctcttcaggaaggaagccacattcccagtcattctacccccaccccagattctctttcttattacataaaagacaagcctggcacaactgtgtgtctgaaccactgtggacacgtgacaattgtcccagtgtgtgcatggctacacagccacgtatctgcctgcttgaaacccagggatggtccatctgtgtttacggcttggcacaacaccctcatatttttttcagctttctgttccaaatgagcccaaaggaaacacaagttctaggtccaatggttctgctcaaacctgaacatcattcttggggccagcatctcccacatgcccacactacacaccaccagcctccttcttccttcctgaaggaccctcctgagcccccaagcccatcccacagtgctcctgagaccagccaagacaactgtgagcgcgatggccgtgtaccccaggtcaggggtggtgtctctatgaaggagggcccgaaagccttgtgggcgggcctcccctgagcccgtctgtggtgccagcccttagtgcattcaggcttaggctcccaggcagggacactacccccgcgcctctggaggacatgctatcctctcactctgtccactggtatctcaacacccccatctgcccagtaaaggtctttctgcagcaaaaaaaaaagtgg

SEQ ID NO: 602933 - DNA, 1228 bp, Homo sapiens
gtggccaccccaagacgcgccccagcccgccatggcccggatcctccgggcatcctgccttctgtccctgctcctggccgggtttgttccgccgggccggggacaagagaagtctaagacagactgccatggcggtatgagtggtaccatctacgagtatggagccctcaccatcgatggggaggaatacattccttttaagcagtatgcaggcaaatatatcctctttgtcaacgtagccagctactgaggtctgacagaccaataccttgaactgaatgcactacaagaagaacttgggccatttggcttggtcattctgggcttcccttccaaccaatttggcaaacaggagccaggcgagaactcggagatactccccagtctcaagtatgttcgaccaggtgggggctttgtgcctaatttccagctctttgagaaaggagatgtgaacggggagaaagagcagaaattctacactttcctgaagaactcctgccctcccactgcagaactcctgggctcacctggccgcctcttttgggaacccatgaagatccatgacatccgctggaactttgagaagttcctggtggggccagatggcataccggttatgcgctggtaccaccggaccacagtcagcaacgtcaagatggacatcctgtcttacatgaggcggcaggcagccctgagcgccagggggaagtaactgatgcccccaccctacccctaccccctgcccatcatgcaagggccgaggaggggctcttcaggaaggaagccacattcccagtcattctacccccaccccagattctctttcttattacataaaagacaagcctggcacaactgtgtgtctgaaccactgtggacacgtgacaattgtcccagtgtgtgcatggctacacagccacgtatctgcctgcttgaaacccagggatggtccatctgtgtttacggcttggcacaacaccctcatatttttttcagctttctgttccaaatgagcccaaaggaaacacaagttctaggtccaatggttctgctcaaacctgaacatcattcttggggccagcatctcccacatgcccacccaacacacacaattttaaaaagtaaactttttaaaaagagtaatagcattttttgttgttgttaatcagtagataatgcttgaactgagttgatacattgaaaattaaaatacttgtgtataacaata

SEQ ID NO: 602934 - DNA, 256 bp, Homo sapiens
gctgattatgaaaaaaagaagtctgtatcatctgcttccaagtctgttatgtccaaatatattttaattatgcatttattttgctacttttataaatattagaggatttcaccttaaattattttttgtaactcggtctagagacatgtctttcccattattattttctctcaatgtgagacatatatattcaactctgtgctatgcatatatgtgctctacacagagtgactctctctatagagagtagtgtaga

SEQ ID NO: 602935 - DNA, 1063 bp, Homo sapiens
gtggccaccccaagacgcgccccagcccgccatggcccggatcctccgggcatcctgccttctgtccctgctcctggccgggtttgttccgccgggccggggacaagagaagtctaagacagactgccatggcggtatgagtggtaccatctacgagtatggagccctcaccatcgatggggaggaatacattccttttaagcagtatgcaggcaaatatatcctctttgtcaacgtagccagctactgaggtctgacagaccaataccttgaactgaatgcactacaagaagaacttgggccatttggcttggtcattctgggcttcccttccaaccaatttggcaaacaggagccaggcgagaactcggagatactccccagtctcaagtatgttcgaccaggtgggggctttgtgcctaatttccagctctttgagaaaggagatgtgaacggggagaaagagcagaaattctacactttcctgaagaactcctgccctcccactgcagaactcctgggctcacctggccgcctcttttgggaacccatgaagatccatgacatccgctggaactttgagaagttcctggtggggccagatggcataccggttatgcgctggtaccaccggaccacagtcagcaacgtcaagatggacatcctgtcttacatgaggcggcaggcagccctgagcgccagggggaagtaactgatgcccccaccctacccctaccccctgcccatcatgcaaggaccctcctgagcccccaagcccatcccacagtgctcctgagaccagccaagacaactgtgagcgcgatggccgtgtaccccaggtcaggggtggtgtctctatgaaggagggcccgaaagccttgtgggcgggcctcccctgagcccgtctgtggtgccagcccttagtgcattcaggcttaggctcccaggcagggacactacccccgcgcctctggaggacatgctatcctctcactctgtccactggtatctcaacacccccatctgcccagtaaaggtctttctgcagcaaaaaaaaaagtgg

SEQ ID NO: 602936 - DNA, 288 bp, Homo sapiens
ccatctgattttggggggtcccggatttctgggaaaattcccccagaaccccttgggaacggggattgaaattccgtccccctaagggagatttttcaagcttttcaaccctggggaccccccctggctttgggccccccccctctcagaacagaagggggggaagccagagcccccccccctgcccccccccggcccccccgcataacgggggtcccctggccgcgggtttttgggggtgggggggggccccctaaagccccttaataaaatttgggcccaagccca

SEQ ID NO: 602937 - DNA, 323 bp, Homo sapiens
  misc_feature (76)..(76): n is a, c, g, or t
  misc_feature (208)..(208): n is a, c, g, or t
aaaatagtaaacctttagcaaatacacaaatgatgccccattctgtattctttttaattttaaaaataatgacacncacatacaggaagataaaaggtataaaaatatactaagtactttttaaaaaggaaaattcatgttttggattattactgaattgttgctaattactgtaatgtaagtcatatgtccttacatagttttgaanaatgctttctttgaaaatctaaaaaaagtgtgaatatactgatagtcattgctgtatcattgatgtttcactcaatttttggtaaagatttataaagatcttacctagaaactaa

SEQ ID NO: 602938 - DNA, 140 bp, Homo sapiens
aggctccatgctaaacgagtatttggaggtcagcacggctgctcacgtgtcgacggaacttgtacaggggaggcatgcaccgaaggtggtgaatacacgtcgaccaggctccagtgtttacgattattgtggaggtcagc

SEQ ID NO: 602939 - DNA, 222 bp, Homo sapiens
tggtctcctcccgttactcctgagctcttcctcatccacactatacaccaccacatagtggttaatgaggtcttccaccacactggccagccttgtagtcctgcccatctgtctggaatagcgtgggccaaacacaattgccaggttgtgcacgttcatcttggttcgtgtactgagaagcacttgaacacagtacatggtggcttgataaggggcctatca

SEQ ID NO: 602940 - DNA, 1216 bp, Homo sapiens
tgcagtgcctcacacctgtaatcccagcactttgggaggccgaggcgggtggctcacgaggtcaggagatcaagactatcctggctaacatggtgaaacctgtctctactaaaaatacaaaaaaattggccgggtgtggtggtgggcgcctgtagtcccaggtattcgggaggctgaggcaggagaatggcgtgaacccaggaggtggagcttgcagtgagctgagattgcgccactgcactccagcctgggcgactgagcaagactccgtctcaaaaaaacatattgaaaggccgaggtaggtagatcgcttgaggtcaggagttcaagactagtctggccaacacagtgaaaccccatctctactaaaagtacaaaacacgaataaaaattagccaggcatgatggcacacacctgtaatcccagctacttgggaggctgaggcagaagaatcacctgaccccagaggtgaaggttggagttccagggaggtgagaggcaccattgaattccggcctttgcaacagagtaccactctgtctcaaaacataaacctacattgaagagaaaaaatttggacgcccgcttggccccagccgactttaagactcgggcaagcttaagcaatgcggcccgaatttcaggtcaatttggccaattcgccttatagggggccgattacaattcaactggccggggtttacaaaggcggaactggtaaaaccttggcgttcccaacttaaaagccttggagaaaatccccttttcccagttggctaaaaccgaaaaggccctgaccggttggcttcccaaatttccctaacctaatgggcacggaattcaaagcggtaaatttgttaaaacgcgggaaatttggaataaccgcacttctttccccaggcgcaattcggaaatacctcttcacacaaaataccccgcacagttagaggtttccaattgagacaggtccctctttagagagggcctccctctaggcggcccttttgtgggggtccctctggggacatcccatacaacttttgcgcggggccccatttggtctcctcagtccccctgtacgctgcggacacgctccttccaacacgcgtgtcactgatgccgttccgctccgaccgggcacactgcgctcgcacacccccctcgcgctcgacagagtccgctgcttctcctcacatctcacgtactctctacccc

SEQ ID NO: 602941 - DNA, 202 bp, Homo sapiens
agaagaacagactcgaaaagctctagaactggatcagaacgaaaacgagcaaaagaaggaagcagaacgacttgaaaaggagcgtcgagctgctgaggaggcaagtctgccatagcaaaacaagctgccgaccagatgaggattcaggagcagctagcagcagaacttgctgaattcactgccaagattgcacttctggagg

SEQ ID NO: 602942 - DNA, 503 bp, Homo sapiens
  misc_feature (17)..(17): n is a, c, g, or t
  misc_feature (38)..(38): n is a, c, g, or t
ttgagccccatggaagnacgcgcctttgaagccgttanacgggcactcgaccattatggacgagcccccaccggaagcgagtttcgacacggcaggttcccgcccgtaagaagcgaccgaagcgcctgaggaccggcaacatgttgcggtcgcagaataaggcagctgacgtgctgcgcatggacgcgggctttaccatgagtaactccattcctgctatacgaatccccatttgaacaagcacagaaggtgataaccatgctcgaacagcgacaggagcttgctgagaacaaggatgagatcgctctagccccgctcggaacagagggtactgacaatcccctttctggtgaggaacagcatcagaaccacacagggcacagacatctgatgctaccagacttcgacccgctgcagcacatcggccacaaccaaccacgctaccaacaggccgacttcctgcgcgcacaacagtgcgcatccacgccgcaccaccccccccc

SEQ ID NO: 602943 - DNA, 169 bp, Homo sapiens
aactctccaggagtattgaatccaaactgagtaagagcgaaacaaatatcaggcaaggcacagcctcaggcgggctccgtgggtctggggcaggaggtgggagacaggagaggcaaaatggcagggacttgacagcaggttcctcttgtctacttcttcctcccgcctc

SEQ ID NO: 602944 - DNA, 462 bp, Homo sapiens
  misc_feature (152)..(152): n is a, c, g, or t
ggcggtccgcggcgcgcagctgtttcggtaacgtgcttttgcctcccgggctcccggcgaggcaggattgctgggttgggtggcaggtggcgaacggcggctccctggtgtggggagccgaggctggtcgcaggccctccgggagcgcctgnggtgcgtgggggggccgcagcggttaggcgccctgcccggtgggccccgccagaatctcgcgcttgggcctcccgtttgcttggctttggaatttgccccccggaaaaaggaagggccggccgggctccttgtgggcccggagattcggggcgcccggtgacttcctggtcagcgcccggcgtccagactctcgcggaccacagccgtggcccgtgacattcctttcaagggcgccaagccaaagaggggaggaagctttcccaagggaaggcagaggcggcccttgtggggaaggtcttggagggcccg

SEQ ID NO: 602945 - DNA, 868 bp, Homo sapiens
tcgtagtcgaggcctgggtgttaacaccggcgaccgggatacggatgggtggctgggtgggggacgctgcagctggtggccatttgaggggagcccatggaggcctgaaaggcatctgtcagtgcgcccctgcccggatggcaacatgtagttctatgagagtgagacaaccctaagttgatgagacacccagtggaagacgtatcttttccaccacgaaatcacgaacgttggaaggggacacattgggtgacactcaagtggaacaacaatgtacaggaaaaaggtgaccaaccttggggggggactttggggaggacatgaggacggacgcccttgaagtgacagcgaggccaaaggatggtgaaaacagcggggggggtccagaggccacacgaagacatggaacgtaaacttccgcggttaaaccgatggacgccccccttgagaagagcacccaacatcggaagtacaacgtaaggcaagaagccaagacgggaacaggggcaaaaggagagtatggggcaaaagccctttggtgggtctatactctccaatggggcattctgaaggatggcatgatggaaccattggtggaacgggaacattatggcttacgctggcgttaccatggacctttctggcagaccccactctttatctcccgaagttggcggggcaaacgtttaacccgggaaacaactgtatacccccaaacgggtggggtcctcccccccttggggtggatggcgtgggcccctcttttcacgagtacccacgcttaatattcggatacccccaatgagggaaaatactcccttcccgagtagacgccaaaattattataccagtaacagtgcgacacggg

SEQ ID NO: 602946 - DNA, 620 bp, Homo sapiens
tgtttcgtcttcttaagcacacaatcctctcaactccggataacaaaacactgattttccttgggggtcaacttttcccggttatttgcagagttcggtaggacagtgtcccgacccctcacgggccgaggtctggaaagaattgctcaattagactctctctcttgagaatttgaatcctcagctgagtggcttgatggaaaattgtccccattctatgacagaatccccctgagactgcctactagtttccgctgctcagatcttttgagttttctggttctaatcctttctgaggtctgtatggtcagatttttttttaattctatgaatttccccatactcttttgatgaatttctttgtgattagcttagccagatttattttagttgcttatactaaaatatgcctaacttatgtaggaattatgaaagtaaagtagaaacaagaagtgtgtgtgcatgtgtgcaagcacgcgtgtgtgcgagatttacctcttgtcagatatatttcctcccttctcactttcatggaaggagtatacttccctgctcctttaatgtgggacttgaccatatggctttctttggcttcatggtggatagacagtattcaccac

SEQ ID NO: 602947 - DNA, 213 bp, Homo sapiens
ccttttttttttttggggccttttttcccccccggggggggggggggggggaaaaaaaaaaacggggggccccccccccccccccttggtttttccccccccccaaaagggggggttttttttttttcccggaaaaggggggccccgttttttttttcccaattttttgccccccggggggtttttttttttttaaacccgggggccccccca

SEQ ID NO: 602948 - DNA, 111 bp, Homo sapiens
cctttttttttaatgaaaaaaactttttaattaaatcgcttttggggaagggcatataaaataaaggatttatcccatatatgtttctagaaataaaagaacccttttgga

SEQ ID NO: 602949 - DNA, 100 bp, Homo sapiens
  misc_feature (93)..(93): n is a, c, g, or t
actaattgatttattttatttttaatttcattatttatttattatttatttattttttattatactcattatttatttgtaagaaaggaaganggaaagg

SEQ ID NO: 602950 - DNA, 441 bp, Homo sapiens
  misc_feature (25)..(25): n is a, c, g, or t
  misc_feature (40)..(40): n is a, c, g, or t
  misc_feature (60)..(60): n is a, c, g, or t
  misc_feature (90)..(90): n is a, c, g, or t
  misc_feature (405)..(405): n is a, c, g, or t
tttaatattagtgaaaaaccccaantgaatagactccccntgggataggtgagaacatgnttattgcaatatgttcttggtaaacattgncacagttctacctccattctgaaataaagtttgtgaatctggtttttattgtgacaaatttcatagataacattggaatttgatttgtaatatttctaattgggagatttaaatgaaaagtaaaattaatttatttttaaatggtcaggggaaatttaaaagccaatcttttgtagatatttaaaaaatcagtgtgggttattttacttatttaaccccctgggtgttaatctgtaacagtttgtaaaaatggtaattttgaatgtgttgtatttttacctagatgtaaatttccacatgtattaaaatgtacanaatgttttgttaataaaatttaataatgtttataaa

SEQ ID NO: 602951 - DNA, 103 bp, Homo sapiens
acataggatatcttcagagatctgctcttaaacgcaaggcccgacgggaagccacggtcaacccacgaagccacggtcaacccacaagccacggtcaacccac

SEQ ID NO: 602952 - DNA, 308 bp, Homo sapiens
  misc_feature (121)..(121): n is a, c, g, or t
  misc_feature (126)..(126): n is a, c, g, or t
tggaccccccctcccaaccccaggggggcctgtgggggtccatttgggtaagtttgggccccccctttcaccagttttttgggccttcccccgggccttaaccccaaaggaggaaatcccntaaanccctccccaccccccctgggggtgggggggggggtccgtccggaaaaaaaaaaaaaacccaaggcccgggctggggtttatttaaacttttttgtgtgggtttggggagggaaagccccttaaaattattggggttggttgggggggggcaggatttcacccaaaaagggccagtttgttta

SEQ ID NO: 602953 - DNA, 396 bp, Homo sapiens
tgagttgtgtcccccacaaaattcatttgaagccctaaccaggcagtaccaccagaatgtgactatattgagagatggggttttaaaagaagtaattaagttaaaatggtttcattagggtgggccctaatccaatataactgatgttcttataacaagaggcaatatggacatgggcacacacagagggaagatcatgtgatgacatgagtcaagaagagaggcctcagaagaaaccaacctgacaacacctggatctcagacttctaccttctagaattgtgaaaaatacatttatcttgcttaacccacctagtctatgataatttgttatggcatctctagcaaactaatacaatatgtaatcaattaatgaaaataaaatgtattaataag

SEQ ID NO: 602954 - DNA, 114 bp, Homo sapiens
agctttgttcacattatagagactcctaggatgtgtgttcatggacattatagctatttgaagaaaggccagtgatccagcaaagggggaacaatatgcatttcaccccacatg

SEQ ID NO: 602955 - DNA, 181 bp, Homo sapiens
ctcctgactaggcctctctgtagagatggatcagatacgatggaacgaggggacagatcatagaccatgcacaaattccaagatcatagagaatagaccaccgatccatgaacccatatgcatacacagagccagaacctacagagaaggtggcccatgaaatccggttcccttcactgtc

SEQ ID NO: 602956 - DNA, 143 bp, Homo sapiens
atttttagttttatttcctgatagcaaaaggaaaaaaaccccccatccctcaaaaaggccaaggtcccgtccccctgttgtcggtaatttgtttgtctttctgaaaggttgaaaattgtgtaataaacttgatgccgctgtca

SEQ ID NO: 602957 - DNA, 816 bp, Homo sapiens
agggcaactggagacaacccagtttggagaactgctgcttcacatcgggggaacgtggcttcgtgttcaccaagaggacctcactgagattcgggatatgctgttggccaataaggtgcccgctgctgctcggctggtgccatcgccccgtgtgaggtcactgtgccagctcagaacactggtctagaccccgagaagacctccttcttccaggctttgggcatcaccacgaaaatctccagaggcaccattgaaattctgagtgatgtgcagctgataaagactggagacaaggtgggagccagcgaggccacactgctgaacatgctgaacatctcccccttctccttcgggctgatcatccagcaggtgtttgacaacggcagcatttataaccctgaagtgctcgacatcacagagcaggccctgcactctcgctttctggagggtgtccgcaagttggccagtgtgtgtctgcagatcgggtacccaactgttgcctcggtgccacactccatcatcaatgggtacaagcgcgtcctggcattgtctgtggagactgagtacaccttcccacttgctgaaaaggtcaaggccttcctggctgatccatctgcatttgcggctctgcccctgcagctgctgccaccactgctgcccctgcggctgctgcagcccctgccaaagctgaagcaaaggaagagtcggaggaatcagatgaggatatgggattcggtctcttcgactaatcccgccaaagcaaccaagtcagcctgcttaatttgagaaagatggaaataaaggcttacttctctt

SEQ ID NO: 602958 - DNA, 121 bp, Homo sapiens
gcccggcaagtaaatgggaacccctccctaaccaccacacccccgcttatggcggtcaaggggggccgttgggggtttttctttaccacggggggttttaccccaaaacggaaactctttg

SEQ ID NO: 602959 - DNA, 267 bp, Homo sapiens
tagagcatccccccccttccccgggtaggcaggaaggactgtcccagacgatttgcttcctctagagcctaactgctggggaggagaggactgttcctgatggaagttaacccgcagctaagtcacccagagcacaggagctgccatgtcagaggggaaatttgcctatgtcataccgtgacagcccgcaggatcaggtgacttttagcagagaccctggtatttttcctgtgcccactccggcttgtcctcatctctacccatccg

SEQ ID NO: 602960 - DNA, 714 bp, Homo sapiens
  misc_feature (1)..(1): n is a, c, g, or t
  misc_feature (13)..(13): n is a, c, g, or t
ngcgcaacgcgtnctgcctcgcacccctggacagcgacccccgacgcgaaagccgcccggtgccgaccccaggagtactgcacgtctgaccgctgacatcgtggaggtggtgcgcaccgagtacgtgtacacgcggccccgccatggtccgactacgctgcccaccatccacgtggtgacgcccacctacagccgcccggtgcagaaggccgagctgacgcgcatggccagacacaggctgctgctacgtgacccaatctccactggctggtggtggaggatgcgccgcgccggacgccgttgatcgtcgcgcctgttgcgcgacaccgggctcaactacacgcacctgcacgtggagacgccccgagagtacaagctgctgaccggagacgtcccgcgagccacgcatcccgcggggcaccatgcagcgcaatctggccctgcgctggctgcgcgagaccttcccgcgcaactccagccagcctggcgtggtctacttcgcccgactgacgactaacaacctacatgcctggagctcttcgacagagatgccgcacgtcaccagtgagggtgtccgtgtggcccgtcgccttcgtgggtgatctgcggtacgagggccccacgggtgaccggggccggcaaggtggtcggctggtacgacggtgttgacgcgcaccgcgcatatgcatagacactgcgtggatacgccgtcac

SEQ ID NO: 602961 - DNA, 290 bp, Homo sapiens
  misc_feature (88)..(88): n is a, c, g, or t
ccatgccagaggtattcatttgtgcatctcccacagctccaactgtcctctgctagttcttcaccactattattgtatgcagctctangttaaagccacattttgcatgtataacctttaagtctctacttaccacaaacttgctttttacttgtatttattagaaataggtcttcagcttaatcaaatgcatttttttaaggggaagggatgtatttttggaaatgggttttttctcctcctttcagcttcttgtttttatttttatttttatttttgaggggaaaaga

SEQ ID NO: 602962 - DNA, 165 bp, Homo sapiens
ggtaatgcagacgctgcgtagccggctccaagttcaagaacacaggctctggagcagttgcccggtttagatgtgtagttgcaaatgtggagataatcaaaggccttcctgtgtaaatgagcactgtgggagctacaggaggaaactcccgagaaccgtgcctgg

SEQ ID NO: 602963 - DNA, 973 bp, Homo sapiens
  misc_feature (694)..(694): n is a, c, g, or t
  misc_feature (970)..(971): n is a, c, g, or t
ggacaacgcggcgggatgtccgcgagccaggcgagtgccgcggggcaggggggccttgcgcgcggagggcggcctgggttcggcctccctccgttccctgaagcgggcccgcgaccagcgcgggagcaggcaagaagaggcggagggctccagcgcgtctctctcctccccacttaagctgagccgggggaagccaggcgggcccggggtgtcttggaaggaggggggggttccggttgccccgaaaattggaaattcctcttcacttagaaatatggaagacttgttccattcaacccaggggagccacaacagttcattcattggtgggggtggaataatgcagggaaaactttaccattttttaaccaaatttcctattgaatgtgagtggtacattacctttttcctaaaaattagggaggtatgtacacagaagatagtgtgtaataaatacatgtttccaaatgtggcaatatggtggacaaaaaaatcttcttggtctccctggaaacatttactattatttaccacaggagttggtaattagttgttgtggaccagaacagacagagagaggattgtggtactagagaagaactctataaaaggtaggcatgaaggaactaagaaaagctggaatggcgggatttgtgctaataacaaggatgtttaaggatgtgcttgatggttnccagaaatctccaggttttggaagctacttctatttaaggatcacagggggaattcagggagtctgtggccaacggcgagggaaaggtgccaggaatggatgggtatgcggatagaatagaacgtaggacctccaaatggaaaagagggggactacgcagaggcaaaaagggcgacattaacggcgagtttagaaaaaacatgaagaagatctcggtgtataacagggggtattcagcggaggaacttctttttgctttgctttattttcgttggnngg

SEQ ID NO: 602964 - DNA, 868 bp, Homo sapiens
cgggcacagtggctcacacctgtaatcccagtactttcggagggccaaggcgggtggatcacttgaggtcaggagttcgagaccagcctggcaacgtggcaaatcccatttctactattaaaaaaaaaaaaaaatttaggaataactctaaattacactttttttcacacgcaactttattcacaatagccaaaaactcaaaggtccattaccaggtgatggttaaccaaccggtgggtagatacataatagatagaatattattagatatcactagggaatgacggggctgatacattggctacaagggagataaacctcaaaaactataatggctaagtaacagaagccagacttaaaagtggtcatatttgtgataactccatttatttatttcataattcattctatttatataaattattggaagagtggagtctcgctgtgtgtgcccaggcgtggaattgcagtgttgtgacctcggtcactgtaagctcggctccaggttcatgcattctctgactaaacctccgagcagtgagaccaaggttccaccactaggcccagctaatttttggcattttagtagacgggggcgttcaccgggggtatagacacaggggggtgcgaaacaccggggaaaaaaggggaaaccgtgtgtgttagcgaaaaagtggcaccaacacgaagcacaacaacgaaaaacatgtggggcggcgcgcctggaaaaaactaaaacaacgagtggggccggggcagcgaaaaagaaaaagacaagagggtctataggaccagacggagcaaacggggcgctacacaaaaacagcggcggcggcgaaaacacaatgggcgtgagacaaagaagact

SEQ ID NO: 602965 - DNA, 165 bp, Homo sapiens
tgtcggtacatggactccatcatcgctgtcagctctgactcggagtgcatcaggctgctacttagcaacaaggcctttctgtttgatgcctgctcgggaggttggcttcagtctccaggctttcctgatccgtgtgcatccaggtatcttgttacttgctttctc

SEQ ID NO: 602966 - DNA, 244 bp, Homo sapiens
  misc_feature (129)..(129): n is a, c, g, or t
  misc_feature (162)..(162): n is a, c, g, or t
  misc_feature (221)..(221): n is a, c, g, or t
  misc_feature (227)..(227): n is a, c, g, or t
attattcgtgagcacatgggagacatcctctataaactttcctccatgaaattcaaggatccactgaaagatggtgaggcaaagatcaaaagcgactatgcacaacttcttgaagacatgcagaatgtnttccgtagccttgaagattagaagccttgaagnattacaactgtgatttccttttcctcaggcaagctcctatgtgtatattttcctgaatntctcanctcaaaccctttgcttc

SEQ ID NO: 602967 - DNA, 254 bp, Homo sapiens
cgtcacggggattgtgcggtgtgtgatgctcgggtacaatccgagtactttggacacataaaatgtgcatcgtgcggattttattttacagtttgttggttaggtacgcttcacgggttaggatgagtgggacgaagaccgagaggaagtaaagtttaattatgcctttttgggtcgaggtgatcattgaggtggagatttggtgctgtgaaattgtcctaggttatagcttttctagtccggttaggtctaag

SEQ ID NO: 602968 - DNA, 191 bp, Homo sapiens
tcaggagagagaactgaaccgcgagtggcaccaacagtagcttgtcagagtggcaagagtagatctctggagctcggcgcaccatgcaggcttgtgagatagagctgcagtcccagctcacgatgaaagcattcccttgtggggcaacctggcgggagacagacgaacctgctactgcggtgcagcttgtc

SEQ ID NO: 602969 - DNA, 287 bp, Homo sapiens
aggcctctagctaaaagagcactgaaatacacagatgaaaaagagacggagggttctaagccaacaaaaactcctaccactacaccacctgaaactcagcagtcacctcatcttagcctgaaggatatcaccaatgtctccttgtatcctgttgtgaaaatcagaagactttctctttctccaaaaaagaataaagcaagcccagcagtggctctgctaaacgtaggtgcacagccagcgtgaactataaggagcccaccctcgcttcgaaactgagaagaggggac

SEQ ID NO: 602970 - DNA, 160 bp, Homo sapiens
ggcggcagtgatcgagctcggtaccaggatttgagccaatcaaaaaaggagctgtcagcgactaggggatggagccaattgccgtgcgagcaaatcccttgtcgctaggcggaaaacaactgggcttgaccagtttctacataatcgccggtcacgagat

SEQ ID NO: 602971 - DNA, 741 bp, Homo sapiens
cattgtgagggccaacaagttattacgaaactggactatccgcgcatcccatacaattgggacagaccgtagttccactgtaatcatgaggaggctgactccagtaagaccagtccctaccctcacacagattctttaccatttgcacgtctcatccgggcgccttcaagttatgagcagccctgagctatcagctccagccgtcctagttcttgcacgtaagcgggactcaaaacaaccccctaggaaatcacctcccagttccgataaggagtcaccttgcgcacccttacttacagcatactctatagaccgcccctcggctctacttctcttccttcgtctccttaatgacattaacactattctcaccagacctcctaggcgacccagacaattataccctagccaaccccgttaaacacccctccccacatcaagcccgaatgatattgtcctattcgctctacacgattctctcgatcccgtccccatagacataacgtaggaggcgtccttgccctattactatccatcctcatcctagcaataatccccatcctccacatatccaaacaacaaagcataatatttcgcccacgtaagccaatcgactttattgactcctacccgcagacctccgtcattctaacctgaatcggaggacaaccagtaagctaccctttaccatcagtggacaagtagcatccgtacaattcttctacaacaatcctataatgc

SEQ ID NO: 602972 - DNA, 300 bp, Homo sapiens
aggtagtgtaggtggatgccgataattccagggactctgggattgccaacggcatggagggtcgcttgagcacaggagtacaagagcagcctagcccccatctctacgaaaaataaaaaaattagcctgggcatggtggtacacacgttgtagtcccatgctactgtgggatgtgctgagtgtggtgatgtgatcacattgatgcttcctgggatgattgatggttacatgggaacttgtgactcataccagctgcactccatgccgtgggtggcatgagcaatgtgccctattgtattg

SEQ ID NO: 602973 - DNA, 614 bp, Homo sapiens
ccttaaaacattgttaacgggcccccccagagtttgataacaaacgagctgtggagcaattcacctcttctcaaatatcggaagaaggtcctcctcccctcttgtcgcccctgagataaacgcatgtagcaccacaggttacaatgggagcacttctcgttgaacactcatgtggagcaaagactcctcgctgttttttcgctaaacagatcactcccgagtcgtgggagagtgagcgataaaatatccccgcttttcttttcatgaacacacacaccgcacactccggataacaacaagagtgttgtgcgcgcgctaaagcgtgccgcattcccttgtttagcccggtgttttgagcagaaagatattatattccgccacagagaggcgtccgtatgatgacccccccactgatgtgggcgctctagcaccagattctgttctttaaacgcgatctcctcttccccacgcgggtgtacagtcgacacactgtgcgctcaccacacagatttccccacccatctatcatgcggtcttttgacaaccagggttctttacatggaccgggacccaacaaggtgacggataattaacggcccagcaatgtacgaaaa

SEQ ID NO: 602974 - DNA, 369 bp, Homo sapiens
cccagcccattcgaatgaggctcctggtcatgcttctttaccttcccttaggaaatcctcctggatgggtttctataaatcttattctgctctgtataattgtatttttcatgtggacagcatttctttcatctgcttgttcgtgctctaaaaacatcattaattaattattcatgattttatgccattatgcttctactaaaggtatatgtatcccatctcttgatctgtttaactagttttgattactttcaatcgtgcagttcttagcatttcttttaatttagtgtacacttctatcccctggcagtgtcattgtctcggctgtgagcacttattgtttgataactctcttcacagaaacatgat

SEQ ID NO: 602975 - DNA, 331 bp, Homo sapiens
gagatgatgaagtttcactcttgttgcccaggctgcaggacaatggcgtgatctcggctcaccacaacctccccctcctgggttcaagcaattctcctgcctcagcctcctgagtagctgggattacaggcatgtaccaccaggccgggctaattttgtatttttagtagagacagggtttctccatgttggtcagtctggttgcgaactcccaacctcagttgatctgcccgcctcggcctcccaaaatgctgggattacaggcgtgagccaccgctcctggctgaagttttcccttctggatgtcccctcacccttctgtcgtcttctc

SEQ ID NO: 602976 - DNA, 227 bp, Homo sapiens
tcctgaaataccagtttgtgaaaaaggctgccagccacctcctgggctccaccatggtcatcatacaggtggaaatacggtcttctttgtctctgggatgactgtagactacacttgtgaccctggctatttgcttgtgggaaacaaatccattcactgtatgccttcaggaaattggagtccttctgccccacggtgtgaagaaacatgccagcatgtgagacaga

SEQ ID NO: 602977 - DNA, 203 bp, Homo sapiens
actagctgccatgttctgctgcctagtacatgtgtgacagtcctgaacaagtgaagaaacatgtgtctatattaatgtgctataattacacatggacaaggttaaatccccatactagaaaccactttcctaaattccccaagccctaccgcaatccctcctaaaagtctgcaataatccgcaaccacagatcacccttcgtg

SEQ ID NO: 602978 - DNA, 406 bp, Homo sapiens
tgtcgcacagccctccacacgcacatgtgcatcattcgccagatggcagcataaggggcagggaattcaggtcagcatgtggtcatgcagggtggggccaccatgcatgggattagagcctttataagcaagcacaactcgggatgcttgcatgccctctgccctctctccactcacatgcatgtggaaaggcatgtgagcacacagcccgaagggcagctcccaggcaaccagcaggagaggccctcccccagacactgatcctgctaacaactatgatctgggacttcaagtctccagaagtaaatacctgtagtatgacgccagccagagtatggtatttaactgtggcagcccacgctatgacaatacttaaattttgtcatcgtcttaggcctaccactcc

SEQ ID NO: 602979 - DNA, 862 bp, Homo sapiens
ggtccacaaggacaaggatctttgttttattcacggctttatccctaaggcctaaaacaggacctggcacatagtaggtatacaaaaagtatatttgcagaccgaatgaacgggatgtccctgggggtttaggactcagaaaaaagacctagttcagtcatcccagtccaaacaaacttcccgagggttggctggatgcccagccttgtgctagggcttcaggggtggtgggagaagatgggagttgcctcgattttcagacctgtttcctcatttcaaagatggggaaagagacagccctatcccacagtggtctggggaggacccagtgagatagtggtggcaaagcctacccccaaattaatcgtacatttgaggcaaagatgactttctgaggcaggaggatggcttgagcccaggagtaagagaccagtctgggcaacatagtgagacctcgcctctacaaaactacccaaaacacaacaacaaacaaactagctgggcatggtgttggaacatgcctatagtcctggctacttgctgacaggccacgaggatccacttgaagctcaggaagatgggggcttgcaatgagctatgactgtgcccctgcaactcccagcctgggtgacagagcaagaaccctgtctctacaatactcaatctacataccctgataatatccagtgtaaggattcaccactccaaggaaggtctgtaagagaatctggaggtgcctccattccacgtcaactgcccccacatctgcaactatgtcaaattctgcattcctcacacaagcaaaatcctacggtcttcaaggtgcacaacgtcccatgcacagtgctactgcttgtcaccg

SEQ ID NO: 602980 - DNA, 871 bp, Homo sapiens
gttattctcagatgcttgatgcactgttggaaatgtgattaatttaatcatgcagataaaccatttaaatgtcaaaaaaaaaaaaaaaaaaaaaaaaaaaaaaaaaaaaaaaaaaaaaaaaaaaaaaaaaaaaaaaaaaaaaaaaacaaaaaaaaaaaaaaaaaaaaagaaaaagagagagagagaggggggggaggagaaaaatatatgaaagagagagagcgacggagagtagtgtggtcttaatcactacctgcagtcagttgttgtatgtggatggaacgagagcggcggcgcccgatttaatggtggaggattatatatatatatacaaagcgcaggagagcagtaaacagtagatagtaataatacaaaaaaagaatagaaagccggagaccagcgggagacagaagagagaacaaccgaaaagagaagaggagaaccaaaacgacagagagcggggggagaagagcaaaaaggagggagagaagaagcaaaacaaaaaaaaaaaaaaaacagaaagcaagggaagaaggaggagtaaaatatacaacatcacccaggagacggaataagggaggagggggagaaacaacgagtaagcaaaagaagaggagagagagggggagaaggagagaaaagagaagaagcgagaagcgcgcggtgaggaagtctaagatgtaatcatcgagcaacaaaataactatataaaatacaaaggaagataggaggacgaaccaaatacaaaacaaaaaaaaaaaaaaacaccatgaacacaaacccaagaacgagaaacaaaaagactaaaaagaaaaaacaaatcacaaccaaccaaagacaaacacagcacagcggaccacaaacaacccca

SEQ ID NO: 602981 - DNA, 308 bp, Homo sapiens
cattataagatataactacataaacacgcatatatgtgcacataaagacagcagtattccttcttaaccaatctagacgcctaacctactaaaagttgatatctttatattcttcctctctctctttttatctcttactttcatcctttttcttttacaccttatttccctggctgaaacttccaataaaatgtatcaaaatattcagcacctataaaacttacaaaagataatacatgataaaatctacatgaccttggacttcgtgatgaatttttaaatacaacatcgaaagcatgatccataaa

SEQ ID NO: 602982 - DNA, 164 bp, Homo sapiens
  misc_feature (25)..(25): n is a, c, g, or t
  misc_feature (82)..(82): n is a, c, g, or t
  misc_feature (87)..(89): n is a, c, g, or t
  misc_feature (93)..(93): n is a, c, g, or t
  misc_feature (96)..(97): n is a, c, g, or t
tcgtagaaggcaagtcagccaaganaagtgctttcccacattccttacattcatatggcttctctccagagtgaatccatangaatnnnaggnatnnggaaaagcattctcttggctcacttgcccggaattccagcttagcgtcgcccgctaccattaccagt

SEQ ID NO: 602983 - DNA, 637 bp, Homo sapiens
atttttctcccgtgaaaaaaagacttataaacaaagaagaagaggaaaacaacaagcggaaacaaaaaaaaaaacaagccatccgacaaagatcaaaacaactataaagctacgacagattgacgactaggagcccatgtggggccgctttgcccagttgctcctaaagtgggccgcttttctagctgcggccccatgtcgtccaacttggccaatggggcccctatgggggtccctaccctgaccgggtggccggtttaccccctttcgccggggggagccctggggttccgccccttaaggtgcgcgctgccaaacccccttttacccggaggggtgattgtgaaatgcacccgcccatattgcttttcacaacgggtgacccccgtggtgggcaaggcggattttaacctgtaaactgctgtgaaaaccaggttaaatatcggttacccccttttagcccagagggcggcccgctgaaacccgttaccatatacattcgcgcggtcagggtcaagggtggccacctggtgcccagggccaagttccaaggcggggcctcccccgccgttttgggttggcgccactggactcttggggcccttagggaccccgtttgggctttcctgggcccgcc

SEQ ID NO: 602984 - DNA, 421 bp, Homo sapiens
  misc_feature (221)..(221): n is a, c, g, or t
  misc_feature (224)..(224): n is a, c, g, or t
  misc_feature (240)..(240): n is a, c, g, or t
  misc_feature (258)..(258): n is a, c, g, or t
  misc_feature (276)..(276): n is a, c, g, or t
  misc_feature (279)..(279): n is a, c, g, or t
  misc_feature (283)..(283): n is a, c, g, or t
  misc_feature (293)..(293): n is a, c, g, or t
  misc_feature (295)..(295): n is a, c, g, or t
  misc_feature (330)..(330): n is a, c, g, or t
ggaaaacaaagttgcaggactaacacagcctgatttaaagcctgcagacagtgtggtgttggtgtcagtattgaggtttacatcttcatgttatgcaatgaaattgtgtcagttaggttttgctgtgtaacaaactttcccacaacttaatagcttaacaaagtgttaatcaattaatttgcccagagttctgcgggtcaagaattttggggaatggtttnagncttggccgaatttgcngagcctcagtggttctanggataacctcactctaangtntggnagttggaagntnagttgatctgggggctcagctggaagcaggttcanctgtattccacttggctctcgtccttcacactttcttccacaccagtaagtgtcggggttccagagagtagcaagagagggcaagcctcag

SEQ ID NO: 602985 - DNA, 580 bp, Homo sapiens
  misc_feature (194)..(194): n is a, c, g, or t
  misc_feature (215)..(215): n is a, c, g, or t
  misc_feature (217)..(217): n is a, c, g, or t
  misc_feature (231)..(231): n is a, c, g, or t
  misc_feature (234)..(234): n is a, c, g, or t
  misc_feature (242)..(242): n is a, c, g, or t
  misc_feature (245)..(245): n is a, c, g, or t
  misc_feature (253)..(253): n is a, c, g, or t
  misc_feature (260)..(260): n is a, c, g, or t
  misc_feature (288)..(288): n is a, c, g, or t
  misc_feature (290)..(290): n is a, c, g, or t
  misc_feature (294)..(294): n is a, c, g, or t
  misc_feature (296)..(296): n is a, c, g, or t
  misc_feature (301)..(301): n is a, c, g, or t
  misc_feature (307)..(307): n is a, c, g, or t
  misc_feature (318)..(318): n is a, c, g, or t
  misc_feature (404)..(405): n is a, c, g, or t
  misc_feature (409)..(409): n is a, c, g, or t
  misc_feature (427)..(427): n is a, c, g, or t
  misc_feature (439)..(439): n is a, c, g, or t
  misc_feature (447)..(447): n is a, c, g, or t
  misc_feature (459)..(459): n is a, c, g, or t
  misc_feature (462)..(462): n is a, c, g, or t
  misc_feature (464)..(464): n is a, c, g, or t
  misc_feature (475)..(476): n is a, c, g, or t
  misc_feature (578)..(579): n is a, c, g, or t
gctgggaaactgtacctacctctcttcccactgcaaatttctgggatagaccaaaagtgaatttgattatgtgttggctgaagttcttcattctgactgttgaggggaggttttcctttgaagagttttcatcccagactcagctgtcttttcacatggatgaaataattcctgctaccaacaacagagcttcnccaggaagttgagttttcaanangccttgttgctttnaanaagggagngangtcaattntcttgtnacattctccctttagcaacctgagtaananactntntgccnctgggntgcaaaaaaanaaattacttgaatctccccttggcccaggctgaggtaccccttttttttaaaaaaaaaaatttttccccccccctttttgtttggnntttnccccccctttaaaatttnaaaccccacttntacttggncactttgctttnttngntaatggaacanncagtagcatgttaaaagggatttcatgtttttgtttttttaaagttaaaaattacatgatgcagagattcaggttttcctttaaataaacaaaacagcccanna

SEQ ID NO: 602986 - DNA, 1426 bp, Homo sapiens
gacagacgctgcccggatccctgcggctgcctgcactctggaccacgagctctgagagcagcaggttgagggccggtgggcagcagctcggaggctccgcgaggtgcaggagacgcaggcatggccggtgagctgactcctgaggaggaggcccagtacaaaaaggctttctccgcggttgacacggatggaaacggcaccatcaatgcccaggagctgggcgcggcgctgaaggccacgggcaagaacctctcggaggcccagctaaggaaactcatctccgaggttgacggcgacggcgacggcgaaatcagcttccaggagttcctgacggcggcaaggaaggccagggccggcctggaggacctgcaggtcgccttccgcgccttcgaccaggatggcgacggccacatcaccgtggacgagctcaggcgggccatggcggggctggggcagccgctgccgcaggaggagctggacgccatgatccgcgaggccgacgtggaccaggacgggcgggtgaactacgaggagttcgcgaggatgctcgcccaggagtgaggctccccgcctgtgtccccctggctgcgctctgagccttcagggccaccgcccgctgctgcttttgtgctgggactctccggggaaacctggtcggtggatgggaaactgcctccccctgggaggaaggctttgcgctccggggcctggatgcggcgccctcgggccgcctgcgagcccctctctgcctccagaccttgggcagaaggaggcctccttgggcctggtccccctttgccctgcagtggaatgagggcccctcagccccgcattgatctaaataaaggactgccgagttcaaaaaaaaaaaaaaaaaaaaaaaaaaaaaaaaaaaaaaagagagggggcgggccgccgcagaaaatttctcccgcggagggggcccacaaattaggaggcgctcaccccgttttgctggtgcgaacaagagggtggccccctaagaggggggagccgcttaattataaaagcgcattgaggagcggtgggcgcggggtttttataaacaaggtgtcggttaggtgggaaaaagcgtggcgataagcgtgggagaatttttgggggaggaggggaacacctctttatcttgcgggggggggggggagaaatatatgtgtggggacaaaatacaccccagagagagagatttttttaaagagctctttaagagggggaaacaaatataataagccgatttttaaaagggggtgcatcaagagggtgggttaacacactaggcgcggattatatgtgcggcgcggtgggcgtcaggaaaagaattgtgtggactcacagggggggggtgtgcatgatttggtggaagacatttttttatacccgggggggatctgtgtttaaatatact

SEQ ID NO: 602987 - DNA, 517 bp, Homo sapiens
  misc_feature (194)..(194): n is a, c, g, or t
  misc_feature (215)..(215): n is a, c, g, or t
  misc_feature (217)..(217): n is a, c, g, or t
  misc_feature (231)..(231): n is a, c, g, or t
  misc_feature (234)..(234): n is a, c, g, or t
  misc_feature (242)..(242): n is a, c, g, or t
  misc_feature (245)..(245): n is a, c, g, or t
  misc_feature (253)..(253): n is a, c, g, or t
  misc_feature (260)..(260): n is a, c, g, or t
  misc_feature (288)..(288): n is a, c, g, or t
  misc_feature (290)..(290): n is a, c, g, or t
  misc_feature (294)..(294): n is a, c, g, or t
  misc_feature (296)..(296): n is a, c, g, or t
  misc_feature (301)..(301): n is a, c, g, or t
  misc_feature (307)..(307): n is a, c, g, or t
  misc_feature (318)..(318): n is a, c, g, or t
  misc_feature (376)..(376): n is a, c, g, or t
  misc_feature (384)..(384): n is a, c, g, or t
  misc_feature (396)..(396): n is a, c, g, or t
  misc_feature (399)..(399): n is a, c, g, or t
  misc_feature (401)..(401): n is a, c, g, or t
  misc_feature (412)..(413): n is a, c, g, or t
  misc_feature (515)..(516): n is a, c, g, or t
gctgggaaactgtacctacctctcttcccactgcaaatttctgggatagaccaaaagtgaatttgattatgtgttggctgaagttcttcattctgactgttgaggggaggttttcctttgaagagttttcatcccagactcagctgtcttttcacatggatgaaataattcctgctaccaacaacagagcttcnccaggaagttgagttttcaanangccttgttgctttnaanaagggagngangtcaattntcttgtnacattctccctttagcaacctgagtaananactntntgccnctgggntgcaaaaaaanaaattacttgaatctccccttggcccagggtaagggactatcttgtcccaaacacttntacttggncactttgctttnttngntaatggaacanncagtagcatgttaaaagggatttcatgtttttgtttttttaaagttaaaaattacatgatgcagagattcaggttttcctttaaataaacaaaacagcccanna

SEQ ID NO: 602988 - DNA, 860 bp, Homo sapiens
gacagacgctgcccggatccctgcggctgcctgcactctggaccacgagctctgagagcagcaggttgagggccggtgggcagcagctcggaggctccgcgaggtgcaggagacgcaggcatggccggtgagctgactcctgaggaggaggcccagtacaaaaaggctttctccgcggttgacacggatggaaacggcaccatcaatgcccaggagctgggcgcggcgctgaaggccacgggcaagaacctctcggaggcccagctaaggaaactcatctccgaggttgacggcgacggcgacggcgaaatcagcttccaggagttcctgacggcggcaaggaaggccagggccggcctggaggacctgcaggtcgccttccgcgccttcgaccaggatggcgacggccacatcaccgtggacgagctcaggcgggccatggcggggctggggcagccgctgccgcaggaggagctggacgccatgatccgcgaggccgacgtggaccaggacgggcgggtgaactacgaggagttcgcgaggatgctcgcccaggagtgaggctccccgcctgtgtccccctggctgcgctctgagccttcagggccaccgcccgctgctgcttttgtgctgggactctccggggaaacctggtcggtggatgggaaactgcctccccctgggaggaaggctttgcgctccggggcctggatgcggcgccctcgggccgcctgcgagcccctctctgcctccagaccttgggcagaaggaggcctccttgggcctggtccccctttgccctgcagtggaatgagggcccctcagccccgcattgatctaaataaaggactgccgagttc

SEQ ID NO: 602989 - DNA, 729 bp, Homo sapiens
  misc_feature (45)..(45): n is a, c, g, or t
acatacaacaccaacctgacaagcacacaaaacaaacggaagggncagagagctagaatacacaaacaaaatacaccacaaaaaacaacacaaatccagacactgaccaacagtgcctcggctccagcgccatggcgccctccaggaagatcttcgatgggggaaactggaagatgaacgggcggaagcagagactgggggagctcatcggcactctgaacgcggccaaggagccggccgacaccgaggaggaaagagctccccctacagcctatatcgacttcgcccggcagaagctagatcccaagaatgctgaggatgcgcagaactgctacaaagagactaatggggctattactggggagatcagccctggcatgatcaaagactgcggagccaagtgggaggtcctggggcactcagagagaaggcatgtcataggggagtcagatgagctgattgggcagaaagaggcccaagctcaggcagagggactcggaagaaacgactgcataggggagaagctagatgaaagggaagctggcatcactgagaaggtggatatcgagcagacaaaggcaatcgcagataacggggaaggactggagcaaggtcgaccaggccaaagagcctgagaggaccataggaaccggcaagactgcaacacccaggaccaggaagaacaccagaagctccgaggaaggatgaaacccgttcattgacgggggc

SEQ ID NO: 602990 - DNA, 831 bp, Homo sapiens
  misc_feature (36)..(36): n is a, c, g, or t
  misc_feature (38)..(38): n is a, c, g, or t
  misc_feature (47)..(47): n is a, c, g, or t
acgcaaccgcgccgcccccctttgaaaaccaatagnanaggcagagngctattgcgccgagacccgggaatccggccattacgagcgggaggaatgcacaagaccatttcagctcacgactccagcaatataacaacacggggacacaacccctactccaaggccacgggccgaacacaagaagttcaacggacagagcaaaacgcactatcacaacaccgacctccaagaaaaataaccgaggccactatcacagctaaggacagtcagcaaaacagcgcagaacaaacacggctcatatcaagcactaaggcccatagcgaaggctaccacagagaagaacaaccgaacaagaccaaaagcccacacgccgcagggcaggcacacgcggctcgacgcacagaaagccggagaaacactgggagcggcgaggacgggctcacaatagaggacacgaagaccgagaggatcagaggacaacacagaccaaaaccggcgcgatacaaaaagacacaaaactaggctggaaacgaaggagcgccggcagcaaacccaggcaaccaaggaaggcgacggcagaacaaacacctggaaccaaggcaaccaagagaacaaggcgaaggcgaaaaacacgctaccggacccgccgaccagacgcaccgcgcaacgaacattaaaaacgacaaaaacccacacgacccacaacacaagcgactaaggaacacacatcagggcaaacggacaccgtcgaaagcagcaaactctaagcaaggaggcacgaagctgtagcacaaacaggcacaaacacaccacgggacgatagcgacgccg

SEQ ID NO: 602991 - DNA, 452 bp, Homo sapiens
gttggaaactattattctaagtgaagtaactcaggattggaaagccaaatatctcatgttcttataaatgggaactaagctatgagaatgcaaaggcagaagaatgatataatgcactctggggactcaggaggaagggtgggagggtggtgagagataaaagactgcacattgggtacagtgtacactgctcgggtgatgggtacaccaaaatctcagacatcaccactaaagaacttatccatgtaaccaaaaaccacctgttcccccaaaactattgaaatctaaaaatcagagaaacaataacaacaaacatggtgtgtgcctttgaagaccagatcagaaaaggcatagcagttcctttttttctttggaggaaacaagctgccatgtcaggaggacactcaagcagcctttggaaagctcatatggcacgaaactgaggcttcctg

SEQ ID NO: 602992 - DNA, 289 bp, Homo sapiens
atgactgagttccataacccggacctaatatatggatcactgctgtgtatcgatcatgaaaaagtctgcgcgcgtagtcgagtatcagcgctgttaaacttgcagcatggtagcttatgttctaaaggtaccggtgtgtacgttgaaccgtcctacgtatactccggaatattcaataggcctaggttgcatatgggggccggctgcagctggcgccatcgatacgcgtacgtcgcgaccgcggacatgtacagagctcgagaagtactagtggccacgtgggccgtgc

SEQ ID NO: 602993 - DNA, 345 bp, Homo sapiens
aggatcccggctatcacattatcccaagaagctataccagtaggacaggcaggaaaatactacacttttcaggatcaagcccttctgactctcatttggaaaactgcatgtttggtaagcacctgcttctttaaggattgcgaagggatttaaatgatactccccagaaaccttggagagattaaatgggggcctattggagaaggtgctcttgaacttcaggtggttggggacttggaataaaaatttaaccattgtcattgtttttcagaaacaactaaagctgttttactattttcatgttgcatggaaagcccctagaaactaaggttgtggtttaatttc

SEQ ID NO: 602994 - DNA, 325 bp, Homo sapiens
gataccacttcacatccattaggatggcagttatcacaaaagcaaattataaatgtcaaagatgtggagacattggcacccctatgcattgtttgtgggaatgtaaaatgttgacaacagtgtggcagatcctcacaatattaaacatacagttaccatatggcctagcaattctgcttctaggtagattcccaaaagacagcagaactagaataggtatttgtacaacagtgttcacagctgcattattcacaatagccaaaaggtggatgtcacacagtgtccatcgatggatgattagataaacacaatctgtatatacatg

SEQ ID NO: 602995 - DNA, 294 bp, Homo sapiens
ttcgggtgtgccgtccgtgcgcggacgcgttgcaacgatccggcgcgcgctctttcgctgaccgctcttgagtggcgattgacggtgcttgttcctgaactcgatatcggtactcatcgtcatgctcattcccatctggtctgtggtttgcgtggcttttgcttgcttcgaacttccatcgtggagatctgtagactcagctactcgggaggctgaggcgggaggattgcttgagcccaggaggtcgaggctgcagtgagctgcaactgtgtcactgcactccagcctgggtga

SEQ ID NO: 602996 - DNA, 344 bp, Homo sapiens
taatctcatctcaggttttgatgtccctgagggctcggacaaggtggctgaagatgagtttgaccctattcctgtattgataaccaaaaacccacaaggtgggcactctagaaacagcagtgggagctctgagtccagtcttcccaacctagccaggtctttactgctggtggatcagctcatagacctgtagccgtgacccagtagcagatgcagttctgtaaccttcataccgtaaaatacattttcattacggagttatgaaaaaaatgatttttttaaaaaaatctgcaaataaggggccctccagcccttttctcctaccccttgccttctcctgtaga

SEQ ID NO: 602997 - DNA, 811 bp, Homo sapiens
ccgtgttgccttgtcgtggcgtgtggcctttggccgacaagcggccacggaggggcggtgtctgtccagaggagggcgcttgcgcgttcccggggagtttcgcaaggcgggggaagatgcccgggcggaaaatccgccttgcctgtggggcctttaccttgtgggtgtgtgcgcgccagcgcccgtctggggttaagcccttgctcgttgaagttccacgttatagaataacttgagagcggagtctcccaccggtgctgcggggagggcacatttgtgtgggggccacatgggaacccacatgtgcgggggggtttccacaggggtcacacacacgccaaccaattggatcacggagccgaaaagtagcacgcacacacacggttgtgctttttttgttgcacaataaccttgaaaataagttgccccactgtgcttggaacttagaagagagaaaatccccgctgaactttttcctcactcaccccctgagtggctttaatctaaccctctgttggggcactgtttgtatttaattgcttcactggccgaactggaatcctgaagtcctgggaaactggcaaacttacggggattttgccccgtgtcctgggccttcttgcttccgttccggccgcaagtgcgtgtggtcacacaacaggtcctgggcgcgctcaaatgctgcccctggttgaaagttcttcttgataatgctggaccccttgtctattttaaagcgaattttgtgtgatttcctagccctttgcgttatattgtataaaaacccactgaaggaaatgaacctttggat

SEQ ID NO: 602998 - DNA, 864 bp, Homo sapiens
ccggttggtgttcgcccccttttggagtggatttcggaccgttattccctctgttggggcgaccctccccgccttctctcggttctggcatccgagccgcttgtgcccgtgaacgcaacccacccgggggcccacgggggatgttcccgaatggccagcttaaaatgggttcacctgtggggggaaactcttcaggccccctggaagtggaggagccgcctggtccgtcttcacgccggcctttttttcggcgacacccggtccctggctgctctgcggtcccccttcgcacagggttgtccgtcttcgacgatgtaaacccccggcgcgtcgtcccaggcgcccatcttccccgggcgtacccttatgtttcgcacgaactaaagccctgtgtttataattcaaggttatatgccagatggctgtccacgtgtgccccaatatcgttgagtcctatgacgtggtaatttgaagactgtgttgttagctccacgtaagagtgaacaaacctgtgttccccggggtggtcacacgcctccaccatagccctcggttgagggtggtgatatgcccgcgtcaaggaatttaataccaacttacaatgtcgcctattggtgtgttaaagctgtcataccatgtaaggtcagattccctttaggaatactgggtgctgtcacccacggtttgatagttagactttaacaacttgaaattcactttttggggggagggatatactgaaatagagagttgagaattccccattgggggaaaatagcatttcaaatgggaaactgtgtttgggaaattgggtatgagtatttttgtatttaaaacctttttaaggcttttttttttacttta

SEQ ID NO: 602999 - DNA, 222 bp, Homo sapiens
ccaatggcaggagagcaccatttatggctctctgatctaagacataaaagttgctaatgcagcatttggaatcccaataccgcaaagtcagcaccccgtcacatctacagagtgatgcattttaaaaaagaccccactgcagagacaaccttcgctcagacaatttcacatggccaagtataaactcagatccttctcactggtttatttaaaaggaattgc

SEQ ID NO: 603000 - DNA, 515 bp, Homo sapiens
cgagaactgacattagtcactggcaagagggactgaaaatttaggcagatagccaccttccaattttatttccaaatctggttctatcttgaaacagcaatgaattctgctggattaaaatgaacatatttcagaccaggcgcggtggctcacgcctgtaatcccagcactttgggaggccaaggcgggcagatcacttgaggtcaggagttcaagatcagcctggccaacatggtgaaacctcatctctactaaaaatacaaaaattagccaggcgtggtggcatgtgcctgtaatcccagctactagggaagcaggggaatcacttgaactcaggaggcggaggatgcagtgagccaagatcgcaccactgcactccagactgggcggcaagagcgaaactctgtctcaaaaaaaaaaaagaaggagcaacatttttattaagataaatcttgatggccaggtgtggtgcctcatgcccgtaatcatcccagcacttgggcaggccgatgcag

SEQ ID NO: 603001 - DNA, 257 bp, Homo sapiens
  misc_feature (34)..(34): n is a, c, g, or t
  misc_feature (47)..(47): n is a, c, g, or t
gaccacactaattattatgcaaagctctggtgtntgggttccaaccnattggtcaacagctgtaataacgactgagtctgtagcgccgagtgaagcggggtgcctgacgtagagaggggggaggccagctgggtcgagggtcagtggtgcagtgattggtacatgccttaggcactccgttgcagatagcggcttgtggctgaacgggaggagtggcggttgtgcacaggggtacccgacgctcagaacttcgttga

SEQ ID NO: 603002 - DNA, 351 bp, Homo sapiens
tagggggagttcactcttcaggggtagggattttgtgtgggcatagggaggttaaggttgaggattattttgtagttaagcaagggagggttttgggggtggatgtcacattaagggattgtaggtatagattagttggggtgaacgggccacaggcggcggcagacagaagggagatggtggactgtctgacgcccctgtgtgccacaaataggcagttggtgatagggggggattttaatatagatttggggatagggggggatagcagtgcaggcgccatcaccgggctaatggcttgccatggtctgggtcgacgcggccgcgaatttagtagtagtaggcggccgc

SEQ ID NO: 603003 - DNA, 107 bp, Homo sapiens
tacatcatatgtaatcccgcttttctaatttacaaccagttcaagaattacaatatccaaagaaagtatttgtagaatatatatgctcactggtcaggtgatatttc

SEQ ID NO: 603004 - DNA, 134 bp, Homo sapiens
gctacagaggacagatcatacactaagcgtgatgatgacgctccaggatgctgtattactcacttctgcaaggtctatgagagaggagagtacttctgggaggtacgagcggtgcatggagaggggctctcaaa

SEQ ID NO: 603005 - DNA, 606 bp, Homo sapiens
gggacgtatgtagtcgtcgggccgggtgctgacgccttgccttctctttacttctccactctaggccacgtatgccgtagtagcattacctgggaggagtgcagaccaggctggcgaaaagctttaactcgcctgaacctatgaaggcacgtgtggtgctcagatatatatggcaggctgatgggaacttgtgtgttaaaggtaacagatgatttagttagacagtgtcttgctctatagctcaggctgcaggtgccgggggctgatcatagctcactgctatcctcaaagctcactgggctcaatgcggtcctcttgcttcagcctcctgaatagcagagactacagtgtttggtgtatacaacagaccacacctcaagatgtagagaagattgcgacattccatcatgtcaaggctaatgcgagttatggtagccaaggatgcccgcgagtgttaccatggaaactgagtgaagtggtttgaaatgcagactttgtcgtgtacttaggaagtaaatatctttcgatttcgagaaagtgttgggacagagagtactttatgtaactaacgtgggctgttcagaagcttagaggtcattgtgtgat

SEQ ID NO: 603006 - DNA, 375 bp, Homo sapiens
  misc_feature (223)..(223): n is a, c, g, or t
tttttggtcccgttccgtttccttcagggtccactgaggaagtgttccccagtgggccccagcagccccctcccctcccccaaaaaaaaatagtgagccgggcagccttttccccggatgggtttttttggacccaagggtcccccaaggccgggacagcaagcccccaggtgaacctaagcccctcgggaaacaaagtccacacttgttttcctttttggantaaggcccccctggttttttttggaattaaacccatttccagttccatgcaacgtcctgagggcagttttgtgaactgaatgcagcctgggccctggccccaaaaccctgtttaggattttttcccccctttggccaattgttttttaaaga

SEQ ID NO: 603007 - DNA, 533 bp, Homo sapiens
  misc_feature (12)..(12): n is a, c, g, or t
  misc_feature (44)..(44): n is a, c, g, or t
  misc_feature (105)..(105): n is a, c, g, or t
  misc_feature (139)..(139): n is a, c, g, or t
tattccattgtnccacaaatacaaggtcttcaggctactatgancaccattatgtacataaattgaaacctggggagacggataaattcctggaatacacaaccntcctagattaaaccggaagattagaaactctaanagaccaataacagcagtgagattgaaatggtaatttaaagttaccaacaaaaaaaagtccaggaccagtcaattcacagctgaattctataagacattcaaagaagaattggtaccaatcctactgacagtattccaaaagatagaggaagaggaaatcctcactaaatctctctatgaagccaatatcacccaaataccaaaaccaggaaaggacacgacaaaaaaggaaagctacaggccaatatccctaatgcacatagatgcaaaatcttcaagtagctaacagaatccaacagcatatcaaaaagataatacaccatgatcaagtgggtttcataccagggatgcagggatggtttaatatccacaagtcaataaatgacacaccatat

SEQ ID NO: 603008 - DNA, 360 bp, Homo sapiens
  misc_feature (18)..(18): n is a, c, g, or t
gtcgaccccagaccaagnatgctgaactagagaaggatgctcagaacagattggcacccattgggagtgagtgtcttggaagaagagtgggctgtgtctaaaatgcaatggtactaaagtaacaggaggacaaaatgccagaaaagtggtgtctcctgtcttggggacaagagagcaacatctgtaatagtatgttgtattcaagcctagtaacaagcagtactgaccttgtgtacataataagcaggatatgtggggtttgcccaaaaccaggcatttttagacatacgggtttcaggagttgaccctaccagacctaagcaggtgctttctgggctggagcttgtcgacgcggccgcg

SEQ ID NO: 603009 - DNA, 531 bp, Homo sapiens
  misc_feature (18)..(18): n is a, c, g, or t
gtcgaccccagaccaagnatgctgaactagagaaggatgctcagaacagattggcacccattgggagtgagtgtcttggaagaagagtgggctgtgtctaaaatgcaatggtactaaagtaacaggaggacaaaatgccagaaaagtggtgtctcctgtcttggggacaagagagcaacatctgtaatagtatgttgtattcaagcctagtaacaagcagtactgaccttgtgtacataataagcaggatatgtggggtttgcccaaaaccaggcatttttagacatacgggtttcaggagttgaccctaccagacctaagcaggtgctttctgggaggaaatgggaaccagggataggcactcaagcccttctttcttggcattaggctcatatactcatgttaataaggccagttctgacattacaggcatgaaacattctagtagatacaagtgagcatttctatcccagcaacctgatgggcagtatctgttctgagccttccagatatggacccccaggaccttta

SEQ ID NO: 603010 - DNA, 200 bp, Homo sapiens
tgtctcagtttcgggacggagtgtgtgctctggaaagagcagttacagtgtcagggctgtcatcacaggacagcctttcagctctttgaaaactgcatcctgctacattttctcctcttcagcctggttaccaccgggtcccttgactcattcatttgctcatatattcattcagctggtccataaagacctgccaggca

SEQ ID NO: 603011 - DNA, 486 bp, Homo sapiens
  misc_feature (283)..(283): n is a, c, g, or t
aaaaaaaaaaaaaaaaaaaaaaaaataaaaaaaaaaaaaaaggggggggcgtgcgaattaaaaataaaattttccctgggggggcccagtttggggttccggtttttttgaaagagggggccctaatagggggtgtttttataagtaggggggggcggggttaaaaagggggaatggtgggaaaaagctgggcagacgtggggaattttgtgtggagagaaaccaataactgtgtggtgggtgctgacaataattggttggcaccaacatataccctacagangagatatttagaagcagcctcttaggcggataacacttactatacaattatttcacggtgttgttatctagctgtggtggtctaaaacacagagcggtgatattatgtgcactggccggcatggacaaagagttatgtggatatacacggagagtatagtgatgttgatgggcataaattttttttatattcacaccgagtga

SEQ ID NO: 603012 - DNA, 371 bp, Homo sapiens
taagctcggctaccgcttccgtgagactcacatctgatctcccagtctcccagccacgttttttttcttttctttatggccgcacccactgcacccaggacatatgaatcccagacacagctacggagcaacgatgcagctgctgaggcaacactggatcctttaacccactgctcaggtggggaatcgagccagcacctccgtgagactcacatcctgattaccatagccttgtaatattgcatgaagtctgggagagttatgcctcctgcttggtttttgttcctcaggattgctttggcaattctgggtcttttatgaatccatatatatttttgggttatttgttctagttctgtgaaaaatatcat

SEQ ID NO: 603013 - DNA, 1850 bp, Homo sapiens
ggtctttcccactcttgcaagaactggcgggggtgaaaacacacgccttgagcaacgcccagaactacctaacacgacgaacgaacaccccgacacgcccaaagcaacaggcttgcactgcctgcgctggcacacggcctgaacacaaagcggctaaccctttcaacacgcctaacacaacgccccaaagcacaggggcgacagacccacaactctgtcacggcccgccaaaaccccctgccttccctttagcttccacggcacgcgcaaaactttggcgcccacgcggctaaatttcccccgggacttccttggccccacttgattacttctccccacggcacacaaggcgcccccaaatggcttacccacacggcaagggcacaaggcttaacccttcccatgtccccggcctcttaataacaccttcccccagacgcggcctctggcaacacacaaggcaccacatcacacggccaaaaggcgcaaggcaacaacgccggtcctccctctccggccctaaatccctttggccttttaaaccaaaaacaacacccccccaaaggtcttcctggcgccctggcgaccttcgaaacccacaaacgcaacaaccccgccggccccggcggccttcaaccccccccggaggagcgccttgcgggcctcttaacaaacaattccctttattcccggcacccaacaacaaccacgcttggtccccccactaaaggcgcaaccttcaacgttctcaactttcccccgttaagagcgctttgtcaatcatggcaaccttggggcttggcccccccatttccgggcgacactaccatacgaccccattgcgcccttctggcaacgctccccctaatccggcggcccctccatcactcacacatagcgatcgcgcgtcccttattccagggggcttcccaaactgtgtctacaccgggcttagggaacgggaataccactaatccgtttagggtccaggaaactggcccacctaaggggccccaactttttgcaaccccaccaacatcctcgggaggagggaaagcgcccaaagtttcataccctttcggaaagctatcccgacactttccccccttttcctatccccctttggcgggctacccccgcgccccctaattctcaatcgggcggcgccgggtccctactaccgcggaaacgggggggagggttttggggcctatcatacctcctcccctccctttggcgcaacaccctcccccatacgcgccctatcgtgctcggccccttcaccggtcgctgtgcggcgcgccctttcctaccctttctctaacccgctttcttgtgcatctgcgaatagcacccctggcgcgagcaacaccccccctatatcccgattggctcgcgtttccccccgtgtgtcgcgtaacacacacattactcaccgaaccgtagtgtctttctcccccccgcttccgcattatgacgccgcgctaaaaccacctgacctaacaaaacccgcaactccatcagctcccgcccacacgtgatcaacgacacgcacgctcttctccctacggcgtcttccaccacaatttactgtgagggacctccccatacacaccgattcctcacccatcagatcccgcctccgaacactaccaagcacacgctcatcacgagcaacacacctcttagaattctctccgcaaagggcccccaaacaacacactcttgggacttcaccgaccacacgactacacaatctttctccacccccctcataacacatgtcaaccacacacccacaccttctccatccatcacttcagcagctctttgggacaaacctctgtggc

SEQ ID NO: 603014 - DNA, 1038 bp, Homo sapiens
  misc_feature (4)..(4): n is a, c, g, or t
  misc_feature (9)..(9): n is a, c, g, or t
  misc_feature (12)..(12): n is a, c, g, or t
  misc_feature (23)..(24): n is a, c, g, or t
  misc_feature (29)..(29): n is a, c, g, or t
  misc_feature (31)..(32): n is a, c, g, or t
  misc_feature (35)..(35): n is a, c, g, or t
  misc_feature (37)..(37): n is a, c, g, or t
  misc_feature (43)..(43): n is a, c, g, or t
  misc_feature (45)..(45): n is a, c, g, or t
  misc_feature (53)..(54): n is a, c, g, or t
  misc_feature (56)..(58): n is a, c, g, or t
  misc_feature (63)..(63): n is a, c, g, or t
  misc_feature (73)..(75): n is a, c, g, or t
  misc_feature (79)..(79): n is a, c, g, or t
  misc_feature (81)..(81): n is a, c, g, or t
  misc_feature (85)..(86): n is a, c, g, or t
  misc_feature (89)..(90): n is a, c, g, or t
  misc_feature (94)..(94): n is a, c, g, or t
  misc_feature (98)..(98): n is a, c, g, or t
  misc_feature (107)..(107): n is a, c, g, or t
  misc_feature (109)..(109): n is a, c, g, or t
  misc_feature (111)..(111): n is a, c, g, or t
  misc_feature (116)..(116): n is a, c, g, or t
  misc_feature (119)..(119): n is a, c, g, or t
  misc_feature (124)..(124): n is a, c, g, or t
  misc_feature (131)..(131): n is a, c, g, or t
  misc_feature (144)..(144): n is a, c, g, or t
  misc_feature (148)..(149): n is a, c, g, or t
  misc_feature (151)..(151): n is a, c, g, or t
  misc_feature (153)..(153): n is a, c, g, or t
  misc_feature (160)..(160): n is a, c, g, or t
  misc_feature (168)..(168): n is a, c, g, or t
  misc_feature (173)..(174): n is a, c, g, or t
  misc_feature (177)..(179): n is a, c, g, or t
  misc_feature (181)..(181): n is a, c, g, or t
  misc_feature (184)..(185): n is a, c, g, or t
  misc_feature (187)..(188): n is a, c, g, or t
  misc_feature (190)..(190): n is a, c, g, or t
  misc_feature (196)..(196): n is a, c, g, or t
  misc_feature (202)..(203): n is a, c, g, or t
  misc_feature (205)..(205): n is a, c, g, or t
  misc_feature (209)..(210): n is a, c, g, or t
  misc_feature (213)..(214): n is a, c, g, or t
  misc_feature (216)..(216): n is a, c, g, or t
  misc_feature (218)..(219): n is a, c, g, or t
  misc_feature (225)..(225): n is a, c, g, or t
  misc_feature (230)..(234): n is a, c, g, or t
  misc_feature (249)..(249): n is a, c, g, or t
  misc_feature (255)..(255): n is a, c, g, or t
  misc_feature (278)..(278): n is a, c, g, or t
  misc_feature (286)..(286): n is a, c, g, or t
  misc_feature (308)..(308): n is a, c, g, or t
  misc_feature (314)..(314): n is a, c, g, or t
  misc_feature (328)..(328): n is a, c, g, or t
  misc_feature (332)..(332): n is a, c, g, or t
  misc_feature (344)..(344): n is a, c, g, or t
  misc_feature (348)..(348): n is a, c, g, or t
  misc_feature (353)..(353): n is a, c, g, or t
  misc_feature (374)..(374): n is a, c, g, or t
  misc_feature (510)..(510): n is a, c, g, or t
  misc_feature (513)..(513): n is a, c, g, or t
  misc_feature (540)..(540): n is a, c, g, or t
  misc_feature (550)..(550): n is a, c, g, or t
  misc_feature (559)..(559): n is a, c, g, or t
  misc_feature (593)..(593): n is a, c, g, or t
  misc_feature (605)..(605): n is a, c, g, or t
  misc_feature (738)..(738): n is a, c, g, or t
  misc_feature (877)..(877): n is a, c, g, or t
  misc_feature (951)..(951): n is a, c, g, or t
atgnttganccngatgacccaanntgcangnnatncnatccantntccctgtnncnnnatgcncaccccgcannntggngnttgnnggnntacnttgnagccatccntncngaganggntggancgctgtngcctggcctgccntcgnngncnccccgangccccacnccatnnaannncntgnngnnanaatcanggaggnntngctnnggnncncnntctggnatgcnnnnngcggttatcagtttncagcgnacagctcaaatctactaaaaagncccccaanaaagcgattgagaaaatagaancatctnctgaacagcaagtngcantttaacgccttnaggnttccngctccggctcagattccagcncctcctctacctcgtcgtcgtcttcaaacaccagtaaatacaaactcaggctaaggggtcaggccagatggcgcaggaagctccacaggaccggacccctagaccaccctacccccccagccccttccccctttgnttntaaacttcttcttatcccccccccccncccccctctnggagagctngctctgcagtgggaggagggatgcagggacattnactgaagaaggnacatggacaaaaccacattgaattcccagccccattggggagtgatctcttggacacagagcccccattcaaaatggggcagggcaagggtgggagtgtgcaaagccctgatctggagttacctgaggccacngctgccctatttacttcttagggccctgttttgagattgtttgttctaatttattttaagctaggtaaggctggggggagggtggggccgtggtcccctcagcctccatggggagggaagaagggggagctcttttttnacgttgatttttttttttctactctgttttccctttttccttccgctccatttggggccctgggggtttcagtnatctccccatttggtcccctggactgtctttgttgattctaacttgtaaataaagaaaatattattcaagaaatggaaaaagaaacc

SEQ ID NO: 603015 - DNA, 625 bp, Homo sapiens
ctaaaacagaggcctgcgctgttctggctgggatgagggcagggaaggtcgaggtggctgaggtctgggggtggtgagtcagggtgggggctcgtgtaattcttctggggtgcctctgagtcatgggaggctttgcaggcctgtgcttccccagacgcccgatccctcgtgaggcctgggctggtcagcaagggccgccaggtccctgtaggccgcatgttagtacttgcctgggctgatgccgaagagagggaggggtgaggatgccactggtgagctgggacgcccttaaggtacgtccggggagctcacacctcaccctactagactgagtgcatgaagtcggaagtgtgcatgctacacgacccatgctggcgtggcagggagccttccaccaactgtgcttgtggaggggccacgggcagagagccgtcctcggtggaccggaaggatagaggaggagggagagtcttatacccggtcggcgctccggcgggggaggagttctcagggtggagaactcaggagaattagcatttcgagctaggaagtcagttcgaacggcaagatccgtggtatgagccgtgcagattggtcgagggaaacgagagaaatatcctcgaag

SEQ ID NO: 603016 - DNA, 478 bp, Homo sapiens
cgccagaggaaatccctgctttccaaaaaacgttggccggagaaccaaccagcggattgtaatgaggcggcgccgcccatatgccctgtcccttcccccagccttgccctcttattttactttttttagccggttcaccttgtaaaacgccaaagggttgggtccagttttaatggctgggctgcccccttcccctcaaaaaactactggcaacgagggccgggcccgcctttcccctctgtctttctttttgggggccggggagggaaaaaacttgcctgttggtgaaggaaaaagtgggggggaaaaagtggggggggccccccgtgaatttttgggttaaaccccgcgggccccaggggtcccgccggggggaatgccgttttatccgggggccctttttttttttggtccaatggtttttatttttgggaggccccattttttttatatgccaaaaaaaagtttaaaaacttta

SEQ ID NO: 603017 - DNA, 846 bp, Homo sapiens
gaggatgcttgagcccaggaggtgaatgtagcagtgagctgagatgcaccactgcactccagcctgggcaacagagcgagactccatctcaaaacaaaacagttaaatcagacaaatactactagtgcacttgtctaggtgggtagacagattcctggtggtttcttctctgccatcttcccaaaatactgtcaatccatctgtcgttgatacttagttgtttcctgtgtgtggagctatgtgatgatgaagctctctgaaaattcatgcaggagtctgtgtgtggacatatgtttttatttcccttgggtaaataactaggaattaagttaatgcttaactttgtaagaatctaccaagtaattgctgaagtaattgtattatttacatgcccgctagcagtggatgaggatgccggttggtccacgtctttgacaaaagatgatgttgtatttttaattatagtcattctagtgagtataggatatgtcattgtggttttaaattgtatttctgtagtgaccagtactgttgaacatttttttcatgtgcttactggctgttcatatatcctgtttgactatctttcatttttcatcacttttactaggtgtgtatcatgggtgagagtcttattttttcgggtcaaggccttatcgatttgggggggcctttttcccggccgctttcttcctttcactagtttggccaagcgctttcgggggatagccccgtgggggagttttcgcgcgagggcctttccgtgccggggtttcgggtgggggggcgctatgggggcccccttcggcgttggctggagcaccctttgctcttgtgtccgtccgg

SEQ ID NO: 603018 - DNA, 417 bp, Homo sapiens
  misc_feature (1)..(1): n is a, c, g, or t
  misc_feature (11)..(11): n is a, c, g, or t
  misc_feature (181)..(181): n is a, c, g, or t
ngccaagccgncatcagctgatttcccaaagagcagctcagccagcaggaagatcaagagcaaaaggatgaggagagtgaggagaaagccttgcacaggatgcgagagtgggacggactggaaggacacccatcccaggggctacggcaaccgacagaacatgggctagtcatccagaagnccaaaggacagcgtggtgcacaccttcacaccaaggacaacttcaggagggtgcagtgagggcagccgtgtggagtcttgctttgcatttgatagtgtcaaataattgcttgtaccctaggtaatgaccagtggatttttgtttggctttattaatctcatcacagtgtattctgatgtcttaagtggtcagaaaagagcactaagaaatggatctatataaccaatgagttgatt

SEQ ID NO: 603019 - DNA, 565 bp, Homo sapiens
cgcaatgtgacctgttgtacacgcgcgggccacgaaggggagattggagcgcctgtggagagtggaggtggtgatatgggataggaggtttctcatatactctggagaagagaggctatgtgaaggctgggctctggacttcagaggcggtgatagaacacccagacgcaggtcggcaactctacatgggattcttgagagccggatcaaatggcatgcagacttttacacttttctggcagtgaggaaaatatggaaaggaagtgggaagaagtaaatgctggtggctgtgacactctccagggaagtggctgtgaaagaggatgctttggtagcaagggggatctgtcagacattaatattcacataccacaagggtgaagcttgagattaaaaactttttcgagaacaggtataagtttttggctggatgtggacattttgagtgcagagtgatttgagcacgttgaagaagatgtgtgggctgtggaagacttcatgcgtgatataacccccggagtggctctgagagctttgaaggcacgggctttcttggtggggtgct

SEQ ID NO: 603020 - DNA, 206 bp, Homo sapiens
ctgaggtgctttgggggctcctatcttgatcctgcccttgctgcacttgggattcctggagcaaacttgaactctcagtctcttgctgcagatcagttgctgaagcttatgagtactagagatcccaagttgaatcatgtagctgctggtctcgatatcaccaagtctgaaatcggatacctctaggggtaccgagactcgaaata

SEQ ID NO: 603021 - DNA, 246 bp, Homo sapiens
atctagaggatccctcggccccatgttaagcagaacatgtgcagggaagtcgggctccacgggcacactctggcttcccgttgtgtgggctggcacacgaaggctcagcgaaatgatctcaggcttgcagtggggagaagacactgtattatgacggcagacgaacagttcctgcaagtgccccagcacccgcagcgcagacactgtgatgacaacggcggacacagacgtgcccgctatgcctct

SEQ ID NO: 603022 - DNA, 376 bp, Homo sapiens
  misc_feature (193)..(193): n is a, c, g, or t
  misc_feature (213)..(213): n is a, c, g, or t
ggcgctgtgggctgcgggagggtccggccgggcgtctctgcgagcctggagtttgcatgaaactttcaccgtgcgctccggggagactttcggctccggtctcccacacgacgcgcctcgcacgcctctcgcgactcgtcggggcgtccgttccaaactcacggttcccgagcatgggacggtgcatccccangttgcagacagtctgtccangaaggcgtccatgagtcgatgcgacgatgtaccggctacgttctctggcgctgcacgtctcatgcgaggcagtactgtggcaacagagcctggcctagaagctggaagcgttactctccagaagcgatgcccgtgcgtatcgtttcacgcctgcagaatatca

SEQ ID NO: 603023 - DNA, 627 bp, Homo sapiens
tggcggctctggcggcctaaatgaaggctggcctgtggctcagccgtgggctctaacgcggggctgggggcctggagacagacttcgcccagtgtgacgggtagtagggtgcggcgccgcttggcctcgtggggtgtaatgacccacttgcttgttgcccccggaccttgcctgccacaccatgccctgtcctggtggcgtgaacctgaaggaatgtgtcgtggccctgctgccccgccccgtccttcctccttccctgggctgtgtcactgtgctgtggctcacttttagatgtttacttcaaccacgtgtgagcttccatggctggcctctcagtgtcctgggtggagaagattaacatcctgtctggtgatgagactgtcaaacgctggtggacatgtggaccctgctggggaacgactgtcccgagcaagatagtgctcccccagactgctcctggaggcagaagtgtgcctcctacgtgttggccctgagtgccctggagcttcagtgcctcactcacacctggtggccctgggcagtgcccttgcctacagatcccactggtgtcctggatcccaggctcttggtgggttgtgccgtggctgtcctggctgtgcactggta

SEQ ID NO: 603024 - DNA, 186 bp, Homo sapiens
ttgtgtggtgatctacaggatccttacaaacggttggacaatagactatgatcctgcaaccatttggacatcataaatggaaatgagtattgaataatgtattctttcctagaatgattaattcagatgtggatatgatgatagattaactttccacaaaatgtagtaccccaaagctgagacatg

SEQ ID NO: 603025 - DNA, 107 bp, Homo sapiens
tctagaagtgagaggtggctgcatagcaccatggtggacttcccagtcaggtagaaatggctaccctgctgccgtgggagggtgcgagtctctctagcctgaagtgg

SEQ ID NO: 603026 - DNA, 1225 bp, Homo sapiens
atggacgctggggcgggccggccctggctgcgcggagccaggagtcgggcctcccggctgctgagcgtcctcgaagcctcccctcaccccggcttcctcctaggatccgcgctgacccccgcccggcttactggactcacgactccgcacggtacacatagaaagccccgagaaacgcaaggcagagagagcgagcaacacaacacgaacacaacgaaaacacaccgccaagagcaaaggcagacacgacacacacacacacagaacgactaccagaacacaaccaccaccaacgacacgcgaccgccgattccgcacgcgacagcgtgagaacggtgcgagagaggagacgagcacaaggaacgcgacggccgacgccgagccgagcgaggacaagcaacgcagaccaggcgagccgagaacacgcagacacgcgacgagcgcgagcgaacgcagcacgcgcgcggacgcaccccagcccagcgggaaacgacccagggacggcgagcgaggacgacagcaccaagagcacaccgacggagcgccggaacacgacgacagcgaacatcccgggcaacggcgcaccacgacgcgcgcgcacacgcacagacgcggagcggcacaagaagacccaagggtccaccccgacagccagaaggaaacgacgcgcccacagccagccacaacgtccaacgacgagcgaccaggagcgcgcaggggcaaggcgcaggaggaggcgccgcaccccgcgccgcggcgccgcgggggggaggcgggggggggaggggggagaggagggagcggcgcgcgcgaaagcggcgaagcgggaagggagcgagcggaggaggtagcaggggagcgaggaccgaggaggcccggacacgggcgagacccgggggaggcgaggaagagaccggacagcgagcggagggcgcacgggcaagtgcgcgccgggcggacggcagcagcgacgagggcagagggcaggacggcgaacgagagacaagaccgccaaaacaacaaacaagaagtaccaccccccccacaacaacacaataccaaacgacaaagcactacaattacaccaaccaccagaaccaaatccaaccataactgaccaacacatcctccagcataacaccaccccacgtcccaacacaacaccgccacaaccacacccccaacactatccccactacccacccaacccctccacacctcccct

SEQ ID NO: 603027 - DNA, 147 bp, Homo sapiens
ctgtcgccacagtagggagacttgggaacggtccgtttaaaggcaaaactgtggagtcctagcaggtgtgtgtgttaatggcgagggtgtctgcagcagtggccatcaggggcaggggcacgctaggggtgtcgtggctacgtcggt

SEQ ID NO: 603028 - DNA, 151 bp, Homo sapiens
ggtccgccttacactctatgcgaatttcagtgtccgatggtaagatgtgaactgtacggccagcaggggcagcaggtatttgggctgcaggagtttgccatttaataagttaaaaaaagatacaaaaacaaaaacctactagtcttgaaca

SEQ ID NO: 603029 - DNA, 133 bp, Homo sapiens
catctccctcctcctggggtgggagggcgctcctgttcccatttttgtgttccctggaggcaggtatcacaaaagatttgttaattgctttaggtgcacgcccaccacccactcaggactcttcacccgccat

SEQ ID NO: 603030 - DNA, 280 bp, Homo sapiens
gtgggaggatcgcttgaacccaggagtagagactacagtgagctctactgtgctccagcctgggtgacagagcaatatcccgtttcaaaaaaaaaaaccaacaacttttaaaaaaatacaaaatttagctgggcgtggtgacaggtgcctgcaatcccagctactcaggaggctgaggcagaaaacattcccttgaacccaggaaaccggaggtggcagtagggacgagatggtgccactgcactcacagccggggacaccaaaggaagactcaaaaaac

SEQ ID NO: 603031 - DNA, 684 bp, Homo sapiens
agggtattcaattaggaaaagaggaagtcaaattgtccctgtttgcagatgacatgattgtatttttagaaaaccccattgtctcagcccaaaatcttaagctgataagcaacttcagcaaagtctcaggatacaaaatcaatgtacaaaaatcacaagcattcttatacaccaacaacggacagagagccaaatcatgagtgaattcccattcacaattgcttcaaagagaataaaatacctaggaatccagcttacaagggacgtgaaggacctctttaaggagaactacaaaccactcactgctcaaggaaataaaagaggatacaaacaaatggaagcacattccatgctcatgggtaggaagaatcaatatcgtgaaaatggccatactgcccaaggtaatttacagattcaatgccatccccatcaagctaccaatgactttcttcacagaattggaaaagctactttaacgttcatatggaaccaaaaaagagcccgcattgccaagtcaatcctaagccaaaagaaaattggcttctttcttttcttctctttcttcctttttataaacaaaggcagtcatttactttaaaattggatattattcgttcttaaaatttttttagaatttctttcgtactatcactgtcattactgctgcttagagatttcagtgct

SEQ ID NO: 603032 - DNA, 1771 bp, Homo sapiens
  misc_feature (49)..(49): n is a, c, g, or t
  misc_feature (283)..(283): n is a, c, g, or t
aaaaaaaaaaaaaaaaacagaaattactagggaagggccaggcgttggntggcttcacgccttcttaaacccagcacttttgagaggccaaggttgggaggatcaccttgaggtcaagagtttcaagaccagcctgtgaccaacatgtggagaaaccccattcttcttactttaaggttaaactttttatttttcaagcctttgtgtgggtgtttgcaagttgtaaactctggttttattaaaattgtttctattaaattattatacccacttattctccttntggtaacgctacttttaacacatttaacacaaaacaaaaaaaaaaaaagaacagaggggcgcggcgcgcgcgctctcatagagagatatatctccctctcggagggggcgccccaaaggcttataccgcggtgtcaccccaggctttctcttgtgtttccccacacggtgtggctccccctatatatgtgtgtgggagcgcgcgcgatattatatatagcgcgtcttgaggcccgcgtgggccgcgcgcgcgttttatttacacacacgcgttctgcgtggtgaccacgcgtgtgtgagaacaccgcgtgcgtatacgcgcgtggggagaccctccctgcgtgggtgggagggggcaacaccctttatatctctctctgtggggggggtgtgtgccaccactatatactgtgtgggccacaaaaaatctatcccctcataacgaggagacatttttaagagggccctctaaaaaggggggatacaccttttttaaaaccattttttcaaaacgggggtgtcgtcttatacaagtgtgcggggtctaaaacccctataaggccggggcaataattatggcgctgcagcgcgggctcttgtgaaagacacgtttggggggggctacaacgcgagggaagattactggatattcttcttgcgcaaccacatctttttttttttaccccgcgggatccgcttctctcgttaatatacacaataataaaacgcgaggactgcgcgcacaacgaacaggcacacaacgactacaccagtgaaaacagtaaacaactcacaacaagtacatgagagggaccgcgaaggctgctagcgcacggcgaactggttgacgaactaagaagagacagagcataggaaggcgggcgaggagagaggctaagcgaacagtagcatagcaggcggccgaggtaagagcaggacgaccaaaggaacaacgacaaaagccagcgaagcccgagcataaagcacggaccgtaccaaaagaagaagacgacgaaggccgaatgcaagagacacaaagaacgatcagagaatgcgagccagaacagcatcaaaccgcacgatacgagtgcgaatcgtaacaccataaacaagaatagcttacacacacatcaaatacaaacagcataccttacataataaaaagctatatcagacaaagactatttatacaaaatacaaataataactcatcaataaagcaaacaaaaaaaatcacacactaacaaatacaaacataaactcaataaatagcaaaaaagagaaagacaacgaaagataaacaaacacaaaaaccagaatagtacacacgacagatgcaacaagcccaacaacacacagaagtacagactaaacatctaacacacagtctcgtagctaaggtacaaaacaaacgacatatagagcatatcatgtatttaaccacttctcaactatacacatagcatgacaacaatacccatatacaaag

SEQ ID NO: 603033 - DNA, 224 bp, Homo sapiens
ggtacagtggctgccaccctctcttttgtttgtcccgcagtcttgaattcttgcaggtgaccaaggtggagttttcttgtggggaagtagaggaagcttagtgttggcaggtgaccagaggaatgcttcctacccgaattgccttcagttttacttgcagccaccttgtgaaaacatatctttaatagatatttgtaaaacttttgctatttggatagagttta

SEQ ID NO: 603034 - DNA, 1749 bp, Homo sapiens
  misc_feature (1593)..(1593): n is a, c, g, or t
tcctcttacaggggctttttattccccggtcagaaaaaaaccaggaacaggccccttctgcctgagcccgggtaaacacaaaacaaaaaccgggaatatggggcgggggaggaatcagaaaagcggtctcctacagcatgtgtgtgtgtcaccttgggtccccttaggttgtgtcccgtggcgtgggtctcaggaaaggccgtgaccgggggtgtcgtgtggcatgtgaaacacctgtgggggaaacgaggccccaaggccagtgtgcgcccgagggacacggcacacgacacggaagcgccaataaaacacacgtgagtgcgccagcgcggggggctctcctgggtgtggcgccccaaggttgtggtgtgtgggataacggctggcccaattcacagggggccatctttgggagagaggggtgagtggcgcctctgcgtgggcagatgtgccccgctgtgaaaacaacagaaacagagcggcagaaagcgcaggggcacaagaatcaccgcaaagcaccccgcgagggaaggagcacacgtgggaagagagtgtcacttttgagaagatctgtgtagggcaaaattgtggggagcctttttttcccccccaaagagtcacagcactgcgagaaaagccactaatttttcaacaagagagacccgtgatgttacccgagggggcaaaacgggggcggcgacaaagtgttctgatagcacccccaagtgcccccacgttgtgtgatggggccacacagttggagggcagacaccccagaacgaccagcgcaaggagcaaagaacacaccccaagagagtgttgtagtctcccccctgacgggagcgtacaccaccgtgggggggatgtcttctcacgacccacccacggggggggaaaaaaaggtggagcagagcgacgaggcgaaaagggcggcaccaacaaaatggtggccaccaacgtcgcagaagagaaaaccaccgagggggggacgacagtcaacataaagcagagcaggctaataacgtatggtgagaaggcggccgccccacacaggaggggtgattacaaaccacatactgccaccgaaaagatgttgtggttataaaaggcgaggggccacacacctcacaaggtggagcgactacaccagacagacggcaggtagcacaccccagcacgaatgatgattcgaaaacacacacgcaggggtggggcggcttgtggcaatcccacaggaggagcgaaacacaacacaaaggagcagggcgatgcaatgtgagagctagcgagtacctaggcaccccgcggtggcccccccacagcagaagagagggaggccgcgtacggggaaatatccacacagaacaacgcacaaagggtggttccaccctccgggtgatgagcagagtagacaaaccgccacacacgtggtatccgagggggagcacaaacccacagcggtcgcgccccgtgtgagaaaaaacatggggagtgaggcagcccgacacaccacctctccgagtaaaagaccgaaggcacaccacgagagttgagtacacacgggcggaaacaaaacaaaacacccagtggtgnggggggacgcacaaacaggagcagcaacgcaagcagccaatgatgcatagggccactgcttctcccccacagagcaacgagcagcaaagaccagcaacgactacaagagataccacacgaacgacgtgtgaccgactagcatagtggcacgcagcc

SEQ ID NO: 603035 - DNA, 649 bp, Homo sapiens
  misc_feature (325)..(325): n is a, c, g, or t
  misc_feature (535)..(535): n is a, c, g, or t
  misc_feature (549)..(549): n is a, c, g, or t
ctgtagtcccagctactcctgaggctgaggcaggagaatcgctcgaacctgggacgcagaaactgcagtgagccgatattgcaccaccgtactccagtctgggtgacagagcgagactccatctcaaaaaaaagaaaacaaaattactgtattatgcacaaaaggattaacagataatatgtccactcatgtgcctaccacccagtttaagaagcagaaccttatcatcccttatagcggaccctttgagccctgaattgcagtctaccctttctccaccagaaataaccagcatttggaattttgaacttcttgcttttagctnttctctatacatttactacatatgtatgcacctccaccagcatactgtgtagctatacatggttttatatgttatgtacacagcgctacagcgtttgtattctgcagattactttcttgctcaccaaatgtgagacttatccatgctgatggatgacatgccatgtataatgatacactttcatccaacgatgttatgccaccatttaantacacattcttctnccaatgagtatcaggtggttctaagtttttgcttttacacggagcctttgaacttttttggacatttttaccaagccagaatttgtctaggatttgccct

SEQ ID NO: 603036 - DNA, 1052 bp, Homo sapiens
  misc_feature (357)..(357): n is a, c, g, or t
aggcgataactgatgtcatgccgaagcattcaattagtatgctggaactaggttgtcgaaacctcaatgtcctatgttacttggacctactaggttgatagataaactcctatattaaccaagtcattaccgttgtcgagggtaccagacctggtaataactcgcatgtatcttaatgagagctctacggctagaatacttctccttagttgtgcaccgaacctaggagcccattgtccctatgtagagcctttgacgagagccctgaacatcgaacgccttaactatggtcaagtgcttcatgaggactgtaccgcagcacatgctggtggccagctgacagtgagactagtgggntaggacacgcgatgtcttcctgcacgtgtacgtacgcgtcctatgcattctctctgtcgccgtatgtccttgattctgtcaataggcgtgagcaactggcgctacaatcaagtacgcgaaagtcttatattgccacatgttatgatgtcacggtcttgtatccgcatgtgacaaatcctcctggtacgctagattcagcccatgaatttctgcttttcacggctgtcaaacggttctcctattgccattgccagtaaccggaaagcgcgtacgggatagtaaacaagatctctggtaggaccgaagagggctctgagagtgtccattaatgccgtgcgatagtgctcttacttgggaagtcaagtctactgaactagaagaccgataaacaccttgcggctcagtttccacctagcctaaatcagatggtcgcctaattgcttggtctcttggcaaattgcgtcctcgtgggaggtcttggctcaatttctttcgcgccatatttaagtatctttatgctcaggtgaaatgtaacaggcgcttagtacttcacgaaagtgttcagagtggggtggaacccggtgggcttttaattttttaagcccgtttaaacaccttgacagcaggattagtacccatattaaccctgataagtcccggcaaacgcactggtcttccgttccccagggcggtcc

SEQ ID NO: 603037 - DNA, 431 bp, Homo sapiens
cagaggagatcatccccttcctctcactctcacctcaacacagaggcctgtgagcgttaaagtgaaaggtttagacacacatctctcactctaaatcaaaagctagaaatgattaagcttagtgaggaaggcatgttgaaaaccgcgataggccaaaagctaggcctcttgtgacaaaatttagtcaagttgtgaatgcaaaacaaaatttctttaaggaaattaaaagtggtattccagtgaacacatgaatgatgagaaagtcaaacagccttattgctgttacggagaaagttttagtgctccagatagaagatcaaaccagccatagcattctctcaagccacagcctaatccagagcaaggccttgactcttttcaattctgtgaaggctgagagaggtgggaggagaggaagggtaccgagctcg

SEQ ID NO: 603038 - DNA, 844 bp, Homo sapiens
  misc_feature (250)..(250): n is a, c, g, or t
atgggggggggaggcggtgatgttgcgaggggagctgggcttacatgagggtgacgtagtcgaggctgagcaagcagagtcggtgagaactggtacgagggcatgctggatcggccaggtcggggcttcttcccgctcagttacgtggatgggtgcgttgtgccccctgcgctgcgaggtgactcacgcgcgtgtccccgctctcggccccgtccgtccacactggccgtcgttcttacaagtggtgtcntccttgcgttccacggttgtgcgcatgcgtgcgaggttcttgtgtctggtcgaccagccggcgccacctgggccccggcccttgaggtactccctgagcaggaccccacacttgggtgggggggcttatctgggtgggtggggatgcctgtttacactacgcgcgtgactcccaacgggtgacggcatcccattccgccactccatggcgccaagccgtcctcccccggatcccgcaagcttctcgaccccaggcatggccgacggccggggtgcaaccacatagaggtgctcttagaaaacacgtaatgttcctctgggggcaggaccccaactccgtactgacgccgacggggggcccgggccactgcctaacgctcgagtcccgcagacatatcacaaggattgggatcgaggggccccccatgaggggtggctcagagcataggagcctgggtataaaaatcacgtcccagactggtagcagggtgaatggggccaaggaccaaaaatcaaggccaaaagggaccccggccgtaaaacaagcactccgtacgccctcacagacaggacaaagggcccacagacatccagg

SEQ ID NO: 603039 - DNA, 428 bp, Homo sapiens
  misc_feature (38)..(38): n is a, c, g, or t
  misc_feature (162)..(162): n is a, c, g, or t
aggaaaaaaccacctgcccaaagtacctttcattttanaagaatcgagtcacttgaaaacttctgattgtttccctgcactttaagttaagcccgggcaacatgttgaagaacctgatctggtttggctgtgtccccaaccaaatctcacttgaattgtaantcccacaattcccacgtgtcatgggtggtgactgaattatgggggtgggtctttccggtgcctgttcttatgatagtgaatgagtcttacgagatctgatggttttaaaaaccatcagtgcagggagttgccctgcacaagctctctgcctgctgccctccacataagatgtgtcttgctcctcttgccttctgccatgattgtgaggcttcctcagcccatgtggaactgtaagtccaattaaacctgtttcttgcaaaaaaaaa

SEQ ID NO: 603040 - DNA, 838 bp, Homo sapiens
tctacaatcaatgcaacaagtcattattaccctcactgtcggaatcccaatcacaggcatgctcataaggaaaggttagaaaaagtaaaaggaactcggcgaatcttaccccgcgctgtttaccaaaaacatgcacctctaggcatcaaccagtattagtaggcgaccgcctgcccagtggacacatgtttaaacggacgcggtaccctaaccgtgcaagaggtagcataatcacttgttccttgaaaatagggacctgtatgaatggctccacgagggttcaggctgtctcttacttataaccagtgaaatggactctgcccgtgaagcaggcgggcatgaacgacagtcaagacgagaagatcctatggagctttaattttatataatagcaaacaggtacctaagcaatagtccacaggtgcctatagagctaccaaacctgcattaaaaatttgcggttggggcgacctcggagctagaacccaacctccgagcagtacatgctaagacttcaccagtcaaagcgaactagtatactcaatttgatccaataagcttgaccaacggaacaagttaccctagggatacacagcgcaagtcccgtattctagagtccatatcaacaatagggtttacgactcgatgttggatcaggacatgccgatggtgcagcgctattaaaggttccgggttcaacgattaaagtccctacgtgatctgagtcagaccggaggtatccaggcggggctaactaacttcaaattctccccgtagaaagggcaaaaaataaggtcatttaataaaaggcttccccggaaagaattatctcactgtt

SEQ ID NO: 603041 - DNA, 387 bp, Homo sapiens
agcattttaaaacattctatatttttgtataaataaggaaaagtactagaacaaaaacatttgaattatattgtctctacctggtaataactattaacactttagagtatttccttttgattttgttttctggtcatatatttacctaactggtagccagttgccagtactgtacagttttgtctgttgctttcttcatcatatcctctatatttttcatgttattaagaatatgttattagaatcctaaaatatattaaaagtattttatggcttggtaatagtccatttaatacacgtgccatattttgtttaaccatttcttattgttaaacaatttggtttctaatttgttagaattagaaataactttaccataaaaaaaaa

SEQ ID NO: 603042 - DNA, 172 bp, Homo sapiens
ctggccaggactcgcacagaacctttcttgaataggtcagtttcacctctcctacacacaaaaactccaccccggactggcgccgtccacaataccagctagtaggctagaataagttcagcgactcaagggaggcctgtacgaggttaaaataaactggcacaacaagaca

SEQ ID NO: 603043 - DNA, 351 bp, Homo sapiens
tagtgcatttgctggtaggtcaaggagggatggactttgaattagtgttcagagtcacagatcctacgtatgtgctctgtggcaaggggtttaacgataaacccaacaagggggggccgccaagcggggcgccgcgtttaagccacagggccccccccccggtggggggggggtggggtgggggtggggtggtgggggggggtgggcgtgggggtgtgcggtccccgccccctaatggatgggaaagctatataatttattggtacttcctaaagatagagactaaagtcatggtagtattggccaaattaattttaaaactgaacaagtcatgaattttcatataaatca

SEQ ID NO: 603044 - DNA, 684 bp, Homo sapiens
gaataaatgtgactgggtcatacgaaaggtataatctctgataatctaagttccatgacatgtgaaaaattcttttccggtgagtgtcaccggaaccggattgacaacaaagtttccagatgaagctacttgtatgggcgttcatgcgcaccgagatgagtacattccatcattttgcatacagtccaagaagatgagggactgtgctctgccgaatgtgactcgctataatttgaatccaagatacagaacctgtgatgctttcacctatactggctgtggagggaatgacaataactttgtgagcagggaggattgcaaacgtgcatgtgcgaaagctttgaccaagaaaaagaagatgcccaagagctttcgcatatagccaagattagaatccggaaacaattccggaaggaaagcaacttagttaaatacatttctttgagatatgttcattccttgtttttgtgcatcttattgcgcctttattttgttgacctttttaatggtcatagtaattcattgaacagaaacttataattacttgagcatgtcattttgaggcggaaaagcaaatacttccatttgggctggaattattaaatttgcaaccccaaagattttttgtgtaagttttaaacttacccaaaaggttcaaaccttttattttaaaacgaaaaaata

SEQ ID NO: 603045 - DNA, 388 bp, Homo sapiens
actcgcacgtccgattgtagtggtgctccgtggcagcctggcaggctgtgtttccatagcggcgctcttctctttctcaaccaaatctgagttgacgctcccatacgcgtgggagcccttgttgttttcaggctagaaggaagagagattcctatagttcaccgagtcttgaagattcatgacacgcaaaatgggcctatcacgttattgaccaaaggagataataatgcggttgatgaccgaggcctctataaacaaggacaacatttggctacgaggaaacaacagatgtagtggggagagccaggggatttggtccttatattggaattgtgacgatcctcatgagtgactattctagatttccgtatgcagttctctttttgct

SEQ ID NO: 603046 - DNA, 391 bp, Homo sapiens
  misc_feature (72)..(72): n is a, c, g, or t
cgctaaaggggaaaataattattcccatcaaagcagtttagacattgaaacaggccaatgacttcaactgtngaggaagccactggactgacaaaacagaagacatttgttggatgtgatagtaaattttgtatgccagcttgactgggtcatggggtgcccaggatgtttggtagattattctgggtgtgtcttttgagtgtgtttctggatgagattagcatttgaatcagtagactgaatatagcatactgccctccctaatgtgggtgggcctcatccaatcagttgaaggtctgaatagaacaaaaagtctaggtaaatggaaactcctcctgcctgactgtttgagctaaaacattggtctttccctagctttggacttgaactg

SEQ ID NO: 603047 - DNA, 343 bp, Homo sapiens
ggacctcatgcatcactccccgaacacagattagcttatgctaaattagtttccttttaaggtaatgacaaattcggaagatattttatatctaacactgtaacagttacatttatttgcttaccatgtgcattaagctaagtgctttacattattatctcaaatgataaccttataaagtggctaaagtcctcatttctgtaggtgaagaaaataaagctgaatgattaactgaagctaaagtagtctgctcagaattgcgctggtggagccagtgcatggctccacctacgttgtctgactctagactactactgtagacaacttctaccatgcgtccatt

SEQ ID NO: 603048 - DNA, 695 bp, Homo sapiens
tggaatgtagggtaagacgggccacctttcgcccgggccaccaaagtggcgaagtgtgacccgctggccctcagggaggggcctgtgatactggcctgcttctacccaaatttgctacagtaggcctggggtgaagacccggggccctttgggggattttccctgcagggggcgattagatatgagggactttcctctacttaccggagtgaggtcctccggaaagggggacaatggtctgcccttcgggtaagaatggatatgatcttcactcttggtatggtaaggctggcgtggcctaaaagcatgagtgcttttgctaaacggtctcagggctggcagggtcaggcattccgctgtgggcagatacatgcccaggatggcatctagggggcggcatagcaaacgatacggggagaggggtgtggagtccttaggacaggcgctcgtgggcttatcaccaatcaatgtcaggtaagtacccatgaagtgtcactccttttcaagtttacaatgtccagcggggtgatgaaaattcaaaagaagtgcagtaggctcctggaaacgacataaccagatcggctgcattgtatgtaacaagcccaacttttttttaaaataagatatttagagtaccatgcaggattggagacaataataacaatgaagtgcaagcagttaatcccgagaaagat

SEQ ID NO: 603049 - DNA, 576 bp, Homo sapiens
  misc_feature (1)..(1): n is a, c, g, or t
ngaacactgtcttagtcaacattatatcaatggtgccggtgttgtgcctggcatgtagtcaacttgcagcataaattcactgactgaaggaatgagtactagagagaaggatacgaaaaagggacatcagggaaagacaaagatgatttccaagtggcagttgttatgtgttgatacaacttcatttacaatgagtagaattttttaagtaacatggtacctactctcagaaactaaccagagtagacatttaaattgtcctggagggggtaaaaaagaaacaactgaatctttgtgctatgttgcctaccataaagtacagctgcccaatggctgtccctttgtcccagatcttaggatattccagctctcatgatctagacccagtccagctacaattaatatgcttttccttctcttcactgtaagacctctgcactttcctggaagtgattagttccaaaaaaaagccagcaagaaactatgaacaagaaaataattaccatgaatcttttcatcttattgataacaattttataaattagtttccaaggaataaagattattcttgcttta

SEQ ID NO: 603050 - DNA, 260 bp, Homo sapiens
actcgccctgccttctctgcagaggacatgcgggctgtcgctgagccacagaaataagggtgagctcaatttgtggccagactagacggcaatagggatagtcaataggaccggatcgttgcaaactctgagctagttcggatgagtatagaaagggactgatgagaggtagaaaatcatgtcgcaatcaagagtagagtaccacttgaatggagagtggctgatttagccggtcagctgggcccacagagagagcgtcc

SEQ ID NO: 603051 - DNA, 444 bp, Homo sapiens
ttaagtcctggaaagtaaagaatgatgtattttcttaactattattgtatagctttaaaaagcactacaagcagtatcaggcagtcagtaatgtgatgactatgaataatcatacatcaacaaactgtatagcctagaagaaataaattcctagacacatacaacctaccaagacagaataattaaagaaatagaaaatttgaacaaaccaataatgaaaaggagattgaatcagtaatcggatacatcccaacgaggaaaagctcaggaccagatggcttcactggtgaattctaccaaatacttaaagaagaatgaatgtcagttcttctcaaagtctttccaaaaattgaagtggagggaacacttcccagctgtattatgaggatatattataccctgattttaaaagcccagacaaagggaaacaccggggatcctcta

SEQ ID NO: 603052 - DNA, 123 bp, Homo sapiens
gagtgcacatgacataatctcagctccccttctgagttcaggtgatactcctgcctcagcctcctgagatagctagggactacaggcacgcaccaccatgtccaagagtaatttattattgta

SEQ ID NO: 603053 - DNA, 915 bp, Homo sapiens
gggagcggcagatggccaggcccccaaaacgggacatcgagggtcacctccatggtgtctgaccgatggtggtggtttgcggtggtgaccactgtgcacacccactcctgagggcacatccttggctgctgcacacccgttcagccgtctgcagtggagtgctgaggacctgcgatgtattgggcgcggtgggtggtggcctatgctgcgacgtcacatcttgcgcggtgatgctctgtggcatcggtagaggcgcgcccctgggactgggctggagtgactgatctgcttctctgtgaccagacctgcgacctgcatcaacgcatgtcacgacagcggaaccaagcgaggtgcgtgttcatcagtctgacgacacaaggtgctggcataacctgtgtgctaccctggccaacaatggagggggctcagcggccggagctgatgccgcatacattatcgaagagcccgtatcgacatcagggatctgcagtccaagagtggagcaccatgacaggaggaaaaatgagagaccaccatccagagaggccttgtgctcagaaatgagagctgcagtgcaaaactacaacagcgacttcatttaccagctgtattcagaagagggcaaaggcagtgtatgacggcaggaagaacgtgctgggtcacatgcagacagggtggggcaccctctccatatggatagaaactttggaacagaatctctgccagagctatggagtggatcactgaaaaatcaaaggaggccgtggcaaaaggaacaacattaaccaccgatgataccagtggtgtgcgggaaaaaccaaagaaaagtacaagcaacctgtggacagatgaaacagaaacggatatgagcacagcaaccagagaaagtgaggacaacgaggccctagtaaacgg

SEQ ID NO: 603054 - DNA, 267 bp, Homo sapiens
  misc_feature (219)..(219): n is a, c, g, or t
atgtatgtgtgtatatatagacaaaaacttgtaagagacaaaagaagctgacttatataatgacaaagggattgatacatcagaaaggtataacaattttacatatatgtgcacccaacactggagcacttcagatatataaagcaaatattattagagcttaaagagagagatgcaaccttataaggattgaaccatgagccattctaaactcatccntatgatgccagtattaccctgctaccaaaaccggacaatcaaaaaaaa

SEQ ID NO: 603055 - DNA, 364 bp, Homo sapiens
tgtggagctgaaaaaataactattgagtactagggtagcacctgactgacaaaataatctggacgacaaccccagagttccttcctgtaacatccttaatacaggtcaagatttaccgcggctaagatttggtatctgttttgctgcccggggaagagcgagggactgactaaccacttacaatgaaaccttttcttgctacacttcatcatgaggcaagtatttcagatgttgggagatagattgtaaaggtataaaagctaacttcacagctatacaaagctatacgtatgtgcaccatgtgtcaaatgagagaaagtatagatattcaatgttgttgaatcctcacaattttctatattag

SEQ ID NO: 603056 - DNA, 409 bp, Homo sapiens
agcgaagagaaagagatcaggcaacagtgattctatagaaacgggatgcatgctcaggaagctgagaggctgaggacagaggctggaacctggtgagcaaactctgagcccaatgctctgtgcccctaaaagaagggaacaacgatgcacctatcacaacacggactccctgggccaataggagtcaaggctatgaagatttctatgcaggacccaacatgcagcaatgtacatctatcatggtgaccagcccggatagcgatactccatagccttaaaaccaaaaactcggactactccactacagaatattcctagaatcacagctgtgatcgaaggacagagctgtaaataactgcgagaggtgctgacctgaactccctagtgcgagtgcaggtcgctcatcaag

SEQ ID NO: 603057 - DNA, 117 bp, Homo sapiens
tccgaccaggtgacaggcggacgaggcccagtactgccagctggtgcgacagatgctggatgaccacaaggtatgtggtgaccctcttggacagagtggcctaacgtgagacgccgg

SEQ ID NO: 603058 - DNA, 339 bp, Homo sapiens
ctgtctcataggatcccatgtccagcgcaaagccagatccgatagtgtacatacagatgcacatgctatgcaggaccaaaacaacatggtcatgtgcggatcactggtcctttgtctgaaatcgataatgcagattcctgtaacctataggtgcgtatgtgaacaggtacagatatgcctaggcagctacttcaaagtccatgttcgtacagcgcaaaagccttatcagataggtgcagcgttacgctgtgacatgtgtgtctggtcagcatccatggtattcacgtctccgattcgcttgtcactaatctcatagccagcattatcaataaatgttcg

SEQ ID NO: 603059 - DNA, 561 bp, Homo sapiens
ctctagagtctcctaaccccgtgaatgctcacctgcaagcacaggggtgaatctgaggtgaggaaaagtgagtgtctacaggaaatgcacaattttttaatctcctccatcagtatccttttcatatatctcatgtgctctctctagaactctagcagatttagaaagttaaagaacccaggaccctctttaagtcttgcagatttagataagtctaaggcatgttgttaagtgagaaagtgagtgagtatatgagaaagtagacttcctttccagttttcaagcttaacacagaaaagatgaagaaatgccacctctacacttcacacccagcaaatcacaatgcgtgctctgagctttcacttctgaaacataaaaccaacccttcctgttgctaagattcagctgtaatgttttacccatgcaaaagaaggtcccagaaatgttgatctactccaagagttgatctgggaaagatgaagaagaaattcctgcttttatcgagggtaaaagtgtgtagaattcacatatagtactcagacaacagaggccacaggtgcg

SEQ ID NO: 603060 - DNA, 1185 bp, Homo sapiens
  misc_feature (101)..(101): n is a, c, g, or t
  misc_feature (923)..(923): n is a, c, g, or t
ggccctctggggctccgaggcccggcgggacgcatgttcaccagcagcggactccagtgggctctacaaggtggcctctggtcgaagagccttcgtgctgngtccccagatgaccctctcccatccggcatcgacccgtcctcgcaggcgcgtcaacgtggcgcagtgaaagtctcgtgttgtctgataatgaagccatatcagcgacgaggtgcgagagaaagcggagatatgccaggtatctcggggaggggttggactgagtgggtgggggcaaaggaaaaggtcatagtgtgtggcctgggactatatgaaacatgtatgacctatttgcatggcgagggtcaggtgcgtgtcgtctgagtgtgtagtacagtgtggtatgaagggatcaatttcgggaaaacggagaaggatagtggggcaacgccatggagacggaattgtgtgccaataactctttgtaaagatgcctagcgaggtttgcctgtggggtcccgtgggtcccaggcgctatcgattctagcgaacctgtttctaacacgttcaatggaaaaggcgtcatgggctaggtcaattctgctgtcgggcgcaattacagctaggtcccagacctaagcattacacttgtggtggcatctactgtgcgccaatctccacctagggcacgacgccttgaggggttaccatcgtgctaacctagcggtgtatagatcgaaccacaagtttaattgcaaactggggacttggcactattttaggccccaacagcgaaggattagcccataagaggtaggggcggaccgaataggagtttcccatatgggggggttacccctggtggtaaggttcaccgagttccgagcgataggacaagaaggggaacttggttttgggaattttgtgaatttcactggaatttngggaggggaacggtctggtctaaaggcctctaattgcacgacgaaaagcacgttacctaggggtggttacaccgccgttaaacgtaattccatgtggcgagaaatttatgggttgaaggcgcccaattccaaaggggttgggcggcaacctcttggatgtgggattaccgccgggggtgccttggattgcgcctcaactggtaaccatggccagccacgaactgggttccgccccaaggggctgggccccatttcaaagtgg

SEQ ID NO: 603061 - DNA, 318 bp, Homo sapiens
accccggggtgctgccactagtgggtccccttcacacaggcagctgggaccctgtattagtccattctcatactgctataaagaaatatccgagactgggtaatctataaaggaaagaggtttaattgactcacagttcagcatggctggggaggcctcaggaaacttacaatcatggtggaaggggaagcagcaccttcttcataaggcagcaggagagagaagtgcagagcaaacaaggaagagccccttataaaaccataagatctcctgagaactcactcactatcatgagaacaacatgggggaaactggccc

SEQ ID NO: 603062 - DNA, 285 bp, Homo sapiens
  misc_feature (10)..(10): n is a, c, g, or t
  misc_feature (72)..(72): n is a, c, g, or t
  misc_feature (138)..(138): n is a, c, g, or t
  misc_feature (180)..(180): n is a, c, g, or t
  misc_feature (237)..(237): n is a, c, g, or t
  misc_feature (281)..(281): n is a, c, g, or t
aattcgcggncgcgtcgacagaagacgacagaagggtgggcagggggacagagtctcgctctgtcacccagnctggagagcagtagcgcgatctcggctgactgcaacctccgactccccggttcaagcaattcttcngccccaccctcctgagtagctgggactacaggcgcccgctgncacgcccggctatttttttgtacttttttagcagagacggggtttcaccgtgttgcncaggctggcccgcccaccttgggctcccaggtaagattacaggnctcg

SEQ ID NO: 603063 - DNA, 211 bp, Homo sapiens
  misc_feature (126)..(126): n is a, c, g, or t
tgtacgccaataaaaagatgtgtacttgtatgttcattgcagcactattcacaatagcaaagacatgtaatcaaccaatgatgcccgttgacagtggactggattttttttaatatggtacatatnacacccatgggaatactaatgcaagccgataagaaaagagaatatactcatgttttttgcagcacatggatgcagctgcaggcat

SEQ ID NO: 603064 - DNA, 691 bp, Homo sapiens
gcatgaattcggcacgaggagagagagagtgagagagagagagagagagagagagagagtgagagagagagagagagagagagagagagatagagatggaaccgtttcgggcactgttgttgcggattaagcctgatctagttgacaacctcccaaatgctcccttacttcttgtcagatcccatgggtttgaagccagttttgagcctggctgtgattgttgtaatcctgtgcacgaatctggaggaaatgggttttgacatggcctatgttgtcctttgccagtttctggttcttaaggattaagacctcttccgtgaatggctgttagacacttgtggcgcctacgcctagcactcccgggacttcttttgatgccttctactgtggtgcgacccccttttttgatgctctcttggtagctctctattcccatgccttatcctagttttgagcccagttgggacttcttccctgtcctctactaaggcagatttctttttgtcgtacttaccctccacctacttctcgggtctttttggagtttttttccccttaccattttacctttttttttgattctctcttttgcctgccttccccgctcttttatcctttccctttccctggtgacagtttccatcttttcctgattgttttccgggccccttcttttactcctcctttcttt

SEQ ID NO: 603065 - DNA, 242 bp, Homo sapiens
gattggaaccggagtatcgatcacatatctgtgtcagaaatacaagtttaagatggcagatcactgcatcttttttctgaggggcaaatccagtaatctcattaacaaaataattaataacagatatttttttttggcaacagagtttctctttggtcgcccaggctgaagtgacaatggtgtgatctgggctcactgaaacctctgcctcctgggttcaagcacttctcctgcctcagcct

SEQ ID NO: 603066 - DNA, 377 bp, Homo sapiens
ctcaggactccccccgtgcctgaacttaggaagagaggtcatgaaatatcatcgactagatatttgctataatagagtcaatgtagctaatgattttagacctattggctcagggccctgagaattattggcatgtcacaataacctcatgaacgtgtggaatcgtcatgcccatggtacagaatcaggattcagagatggtgggtaactcacccagggttaccgagtttagcatcgtggggcccaagtagcaagagtatagaccgtggctcatagtaggtcatggaaagtgatctcttagctcagtatgcatcatagcaaatttggagagatggcagggtactgaaatgtgcacaaatctctctgcgcgctcggtg

SEQ ID NO: 603067 - DNA, 106 bp, Homo sapiens
cgggcgcgcgcggcattcgctggttgtctcgttctctccccctcttcgtccctccttcctctcgtttcgtcctgtggacgtcccacggtaccccctgttttacccc

SEQ ID NO: 603068 - DNA, 309 bp, Homo sapiens
cacatcacatcatctctgatagcaacactcagcctgggaggtatgttgctcatctaggcgaaaaacaaaacatctattctccaggaacagggaccagaaccctgaccctgctggacatcggtcctgggcatggtaaaggtgcccaggtatgtgtaccaggtggccctcgggctgcgcttctaggctcttggtcattgggtgatgggcgtcatcatcccctacaacacccatgtacctgtaaacccattatagacagaaccgcagccccactgaaccctaaagagtatcgcacgcagagctcgcaagtcc

SEQ ID NO: 603069 - DNA, 186 bp, Homo sapiens
tgtccagatacggattcgtggctcacaccgtgtaatttctagctactttgggaggctgtagatggtgtcggatcacttgagtgtcaggagtgcaagagtaggctagcccacatggtgaaaccccgtctctattaagaaatacaaaaactaggccggatgcagtgactcacgcctgtaatcccagca

SEQ ID NO: 603070 - DNA, 685 bp, Homo sapiens
cgcaaccacaccaggctttcgcttcccctgccgaggcctcgttcgccgcgcagttctccgacttacggtcaccgtgccaagattgcatcttaactgccttgcttgcagtttcttttcacagtataggagttgtcatcatgacttccagttaccttctgggaccggttgtcaaatgatgtggctagagacggaggctcactcagattgttgctgcaccacaatggaaatgccagtatgaagccgctgatgttaggaaggctccaggttgtgcaattccatagacaacaaatcaaatcatttccaaccatactggagtcgcgtatatacatattcaagacacctgtgcaggccgggcgcggtggctcaagcctgtaatcccagcactttgggaggccgaggcgagtggatcacgaggtcaggagatcgagaccatcctggctaacacggtgaaaccccgtctgtactaaaagtacaaaaaaattagccggacgtggtgcgggcgcctgtagtcccagctactcgggaggctgaggcaggagaatggcgtgaacccgggaggcggagcttgcagtgagtcgagatggcgccactgcactccagcctgggcgacagagcgagactctgtctcaaaataaaataaaataaaataaaaaataaaacaataaagaccaaaaaaaaagaaccc

SEQ ID NO: 603071 - DNA, 131 bp, Homo sapiens
tccattaaaaattattttattcaaattatgttttccaaaaaaaagggttctgggctaatcgtttttgaaagttttcataccatttcaaaaccccttttgccggaatgaacatttcaaatgggcttggggtc

SEQ ID NO: 603072 - DNA, 180 bp, Homo sapiens
acacaaatgaagactaccacaagtgagctaatgaaaaatgatactaggctattccactgcacttgactataatatttagataattagaacaaggaaaatgacctcatcttacataagtacagagccacaaccttctaggtaatttgacacattcctagctgtcaggtgtaagaagggaca

SEQ ID NO: 603073 - DNA, 114 bp, Homo sapiens
catggatttgctggtgcagtacaactaggcttaatagggactcgaattcgaggtaccgtcaagttgataagcataacaaattccacaatccatagtaaaatccttcaaaaaaaa

SEQ ID NO: 603074 - DNA, 180 bp, Homo sapiens
atttgaattgcaatacagccagagagacagggactacagctttctacgacggaaatagttgtggtgcgttatgtcaccactgcagttgccagtgtgattagtgcctaggggtctccactttacgcacgaaatggtaatgacagtgatataatgcctggaacctggttgggcgtacgggga

SEQ ID NO: 603075 - DNA, 83 bp, Homo sapiens
tcgatacgaccatcatcatcatgatcgaaagacatccctccgacctagtactacttctgtcgtcttataaacagcgcgtatag

SEQ ID NO: 603076 - DNA, 553 bp, Homo sapiens
  misc_feature (6)..(6): n is a, c, g, or t
  misc_feature (33)..(33): n is a, c, g, or t
  misc_feature (39)..(39): n is a, c, g, or t
  misc_feature (42)..(42): n is a, c, g, or t
  misc_feature (71)..(71): n is a, c, g, or t
  misc_feature (108)..(108): n is a, c, g, or t
  misc_feature (162)..(162): n is a, c, g, or t
ctccancgtggtctgggtccccaactaaaccancatctnctnagctatgacccaaaccatggatttacatngagaaaaacctttcaaacttgctgaaggcccatcatngaatataatgctggatgatatcaacaagcaattcctagacgatcccaaatatancattgatgagggatctcccctccaaactttcatatcatctccctgaaacaaatgctcaagaaacttggagtccccaagactcacctatacctaaagaaattaattggagaggtgtccattggcctccaggagacgttcatctaccctgactttctcaaaataatgctgggcaagagatctgccatcctaaaaatgatcctgatgtatgaccaaaaaccgagataaaaggaaaatccaacaggccccccaaccaataaagctatctctcacttgccctgatttaaagggaaaacgcatcatcctatttaacgcccttctaatcacccagatatcgaaacacaaaacaaaatttaacccatattcaacaaataaataaattcccccctcctcc

SEQ ID NO: 603077 - DNA, 911 bp, Homo sapiens
agcggggctctggcgtgcgtgcgtgtggttgctggtggcctggtgctgtcagcctggcctagagaggaggaaggagcctgcggcgtgcagtgtgagtgggctgggaccctggctgcctggctggtggtgtctagcttgggggatgtgtcgggccatgctgggtgggccagtggcgctggtggcttgctggtgtgcccgcttggtggtcacctgcctgcggtggttgctgctgcttgagcggtgcggtggtggcctggctgcacggctcggagggacatacgtgggtgtggcttgacggtgtgcttcggtcaaagtccggacgttggacgatcaagcgtacgtcggctcatcggagccaggtgcttagatattgcagttgattgtgacatcttgtacaagccagcatgaaaacaggcagcgggctcttgtgtctacagccttgagagaagaccgaaagcacgatgctttgcccaatggccacaacagacacggtggaaagactcatgatggcattttgggcatcttactggagttaagcacttcagtgtctaggtaagtgctcaagagattatcaagctgtacaacccaaggcagtgggacttttgaagataccagaacagacttgtgccccttaaataagtggttacctttagtggtcccgtttgtattgatacgggggggattgcatttctgagagattgacgcctcccctagaggtgaaagttttgaggcccgactaccgtggacgctccatgttggatggagtcagtgaacatcttgcaccaaaggtttgggagaccatcgacctttggtcttcacttgggtactctgttgaattggcacaggtgctccagccaaagggggcagacccctggtgtacctgcggaggagtccaggttgtgccttggaaa

SEQ ID NO: 603078 - DNA, 1428 bp, Homo sapiens
  misc_feature (193)..(193): n is a, c, g, or t
gtgtctgaaggagtccggttgattggtgaacgagaagcctgcacccgcgatgtcttggccaactgtgactcgagcgttcctcaatatgtcgtggcctagccgactggtactacgatttatcattgacaaggatagccgtaacttgataagatgtgcactagcctgggtgattggctaacccactggcttggangcactgtgatctggatcgtctagagtcggaggtcgcacgatgtccagttgcaactattagactcatagacttgtgttagcactaggttggccagcaacgagtgaccattactagttggccttgcccgaggagtcgaaacgagcgtcacgggtcgctcgatgatcgcatagagagggcccaaatactaggtattctttcaaaaggtcgtacatttagcaacgttaccccgcaaagcgaagacatgcatggctgagacatgtccgtctgagagcaaaaacgactcctagacttgggttttgacctccaactagggggcgggaaccaattggtgtagacagagatgggtattagctcaggaatttgagccatcctttggggaaaacacacttgtatatgcggaaagacgggcaagaatataaagggcccaccagttaggtttcataacacgccccttggggaccaccacatgtgcccttactcttgggcacgtatggtccccgcgccatgaaaacacaccggaacatttgcacctcatgatggtatttccttaatcattttggcccgaaaaccgggtggagcgtcaccgccgtgtggcttggtgtgcgttcccattagcgctgtttctagtgggagtccccccattctgcggtaacgttaaaataaggcgctccccgtttggcccaacggagggccgcgatttttatctccccttgcggggtattatggccccacacccttctcgggattgggtttcattccccttagggaaccgtttgggtgtccgttagggtacccgcattttctaaagctgggcgtcttcgccacttggcgcgcgcttggccccccactatatataccggcatgcaattgcggtcatttcgtatcggaaacaacggtgggggcgctcccagcgcccttttcgggcacttgccgtattaccgccagtttgggtcggcgcttaacgctacccgcttcttttcacgttggcgggacccgtctgttgtttcgtagctccatctccagtcacggcccgcttcacattcgccgcattccggtaccacccgcgacctctaccctgcgcgtttggagacgcgcccccatttttggcgcttaagaggagggggatgttccctctgggggggtgctcttggagcagtatcccccacctagttgcgtgatacacaccgtgggccgtttccccccgttggggccgcgcgctcccacctcatttgtgc

SEQ ID NO: 603079 - DNA, 764 bp, Homo sapiens
  misc_feature (373)..(373): n is a, c, g, or t
tgggttaaagtgctgatgccatttaattacaatggttctacaacatttaaccaggatgtgctacaaagaagatcttatttcaaaagcacgctgagtggttgggaaagtgagagaactacaggtgggtgaagagcaccagggaggcagcctctcagttgaaaaccaacatttgcgtgatgccctctcgtgagcccttctcagctcccagcagtgaagcccagcaacacgtggccctccccagcctgtgccgtgctgacaacgaccataggctttacttatattctaaaactcagaggtgctcaccagggtcgtgtacgcaagaaattaactcagactaaattgtcgagggacctatgagctcagtttaaaacanaaagacgaacagtgaaagcctattaggcaacgctatgtcgctggggctggttaactgtagcccctgctagggagggtgtcaggagcgcgctagaagtgagccttgggtctcgcaggcccagccctgctgcaaggacgccagggcacccaggaaacttcagcacacacacacacaggggaccctcccttcatgtcacttgtttggctgccctaaagggcttcttgcaccctaacccctgatcctggaaagaaggcagagaaactggcccgtacagagacctgcaatctctacgcaagcttaacacaactttgagacagacagaggggcacgcagaagaggtgggcaaaatgtggtccaacgggggggatgctggaatcctggatggtgtcca

SEQ ID NO: 603080 - DNA, 703 bp, Homo sapiens
tctgaatatgaaagaaaatatcagatgtgcactttaaatgagcttaattgcttgaagtggtgcctgagaatatcgaattgcctcctattgggtgtggctgtgttgaaatagatttgtactcgtcgctgtggtgaagatgatcagtatcagctgttcacagcaaatatattcccagcatgtcacttttccattaaagcagctaagttgtctttgaatgttccatcgttccgagtaagtattttacttgttttctcagtacatcagagagagcgtgatccccctacagctgtcacttccaaagtgttcctgtaggcataaatggtgttacagacactgaggtgcactcttggtttctgagcagagtcgtcatactggtttcctggtctctagggcactggggcagtgtacttcgaaatcaccgaacaggcttgcaattaagatcaataaggctgcagcaccatttcaatttacttgtccatcttacccagtagttatggtgtctggaaattcgttcgggtggttatgtttgcatgcttaagcacacatttgacaattaattatagctgtactaaccgatgttttgcctgggggatgatgggcttgtccatttttaaattctgatgcttgaattctatttctagtgatgttcacatctcccttaagtctagctgcagcaacttgagagagtactttgattaaatga

SEQ ID NO: 603081 - DNA, 3633 bp, Homo sapiens
  misc_feature (34)..(34): n is a, c, g, or t
  misc_feature (40)..(41): n is a, c, g, or t
  misc_feature (43)..(43): n is a, c, g, or t
  misc_feature (45)..(45): n is a, c, g, or t
  misc_feature (47)..(47): n is a, c, g, or t
  misc_feature (50)..(50): n is a, c, g, or t
  misc_feature (55)..(55): n is a, c, g, or t
cgagtattggcaggtgcatgagagcaatagcaanacaaanngnangnagnatccnagatgcaattcaaaatcccaatgacattcagcttcaagaaaaagcttggaatgcggtgtgccctcttgttgtgaggctaaagagattttacgagttttccattagactagaaaaagctcttcagagtttattggaatctctgacttgtccaccctacacaccaacccaacacctggaaagggaacaggccctggcaaaggagtttgccgaaattttacattttacccttcgattcgatgagctgaagatgaggaacccggctattcagaatgacttcagctactacagaagaacaatcagtcgcaaccgcatcaacaacatgcacctagacattgagaatgaagtcaataatgagatggccaatcgaatgtccctcttctatgcagaagccacgccaatgctgaaaacccttagcaatgccacaatgcactttgtctctgaaaacaaaactctgccaatagagaacaccacagactgcctcagcacaatgacaagtgtctgtaaagtcatgctggaaactccggagtacagaagtaggtttacgagtgaagagaccctgatgttctgcatgagggtgatggtgggagtcatcatcctctatgaccatgtccaccctgtgggagctttctgcaagacatccaagatcgatatgaaaggctgcataaaagttttgaaggagcaggccccagacagtgtggaggggctgctaaatgccctcaggttcactacaaagcacttgaacgatgaatcaacttccaaacagattcgagcaatgcttcagtagagctctgctcaaagaagaggatctatgtgctgacctcagaagatgtatatgtttacataatttaatacagattgatgttaatacttgtgtatttacataaccgtttccttcttgtcactgaaatatatggaccttaatttgtatcctgactgactcaacccagcagagcataaattgacttgagagccttacctttgatgtctgaaatgaaacccccttctccaaaggcaaaattcggagactttgatctttgctactggagtcctttaacaacacctataacgataaaaaattcctaattgtttgtggtagtattttaattctagatgtgttatctctctgggaagtatagtttatagaaacacaaaatatttgatttcctgtgtcggttcagctacaagaaacacaactgttatcttgacagaggaagagaggaatccaagaaaaatgcatgtggagaattaaacccaagtgtttcgaattcagcacaccccctctctgtcctcagactgcagtccacacgtgcaacttttctgtttgcacgtgttttattaatcagcatactccttttctgtttggatttatatccctctaatgttctcctttaatttcacatgaaaaaaaaatctgtatttttttcagttagtgggagagcagcagaaatagatagatgtgatgttgccactggactgatgaaggtggctgtcttggaactgggagacaggtcctcagaggtgcactcaggcaacaggacagccatctctctgcttcagccctctgcctacagggattagggaaatggagctctggctttgaagttatttgtgagtttagcaaccttccagttacctgcagagttctgggtgcacagccacccctcataagagccctgttctctgaagaccattcatatgagaacaaaggtctaggatactgcattagttaccagaaaactaggggaatttagagggaaaaaaaatccatgttttctatttcccaggtttttaaaaagtagctcttccccaaccccgttgctagcttgttgcaatataaaagccctggtgcacctgaatttactcctggccttactaatgattcataatgtgatcttgagaaatgtgtttaagctttctgagtcttaacctccttgtctctaaaatgggcaattaaaacaatcttcaagagccctgtaaggttaatgccgataaaatgactgactccgcccttcttccttagtacgtagtatccagcaagcatttgccccaccttgtcttgttgatgaacaatattatgaagcctgcagtcattctctctgtacatcagagcttagttcgaatggaatcatgaaaatctctgattctgacctcctaaggaaaaatgaaacccagaggatgtggtcatacaggatggctcccatgtgggcctagaacccaggatgcttcactcttgactccatgctcttccttttataccatgtggctgtgaatacatactatgggatgggattcaacccttctaagtaaatcctcagtctggtctatattgttacttgcctgtttccactagaaggagtcacccaggcatttagtgaatgataatcctagaagttgagtctgagtacatcagagtttggcattatttgcaacatcccaggaatgagctataagactccattgctttctggactttagtgaccagctgatcttcccttggatcctccaataaaggggaaaaaatacttgtcttatgttgttttagcaagggagttcagccaagtgacaggaaagattccctggtctgcatctaaacattagtcaacagaaggaaaaggctcttttccttggagattttcaagttgaaaaagtacagctgcttggatggagtttctctcatcagaatagaaatatgctaggtggtcttcaagacctttttgaacctacagattctaaaccttagaggaagccagaatatgtgatcataccaggtgaggaaagttaggagatattcatcttaagagatatcctatttggcagtcacatgttacacttgagcaacaattgtctaggctagaaatatagaaccacacaatatttatcatcattgggtcaatttctccccctctatcaagtgaggagattaaggcttaaagaaaggaaaggacttgccagccaccacagggctcatgaggggcttgaacccatgtcgtgtgtctctaccacagctgactctcagctggctaatggagaaaatgtgaggaattacctgtcaaattagattgagctcagagtaaatagatgagcacatttataactctaaattagactttctatcaaatgggaccaaacatatggaaggggctgctgtcctgcctcaatttagccaagacttgtcttgtctcaaagccaagactcagcagtacatggattctgagaagtccagggtctgaattgttgtctctgattactggaaggacaggttaactgaatgtctgtgatcactaacaggtgatgggctttgtgcccactccagagatattgtgggagacaaattcttttaacagcctgtcctcccggcatcaggagtcattgaacaatcatggattgttgtgtttgggattttttttttttttggctttgtttttggtttttgtgtgtgtgtgtgtgtgctgcatgcacatgcgtccaagacttacgggtggtttaggggaaagtgctagcaacagtgtcaatgtcattgttaactatatttcatatttgaggtctcattgttttcaaataaacagtgttttccatga

SEQ ID NO: 603082 - DNA, 1143 bp, Homo sapiens
  misc_feature (34)..(34): n is a, c, g, or t
  misc_feature (40)..(41): n is a, c, g, or t
  misc_feature (43)..(43): n is a, c, g, or t
  misc_feature (45)..(45): n is a, c, g, or t
  misc_feature (47)..(47): n is a, c, g, or t
  misc_feature (50)..(50): n is a, c, g, or t
  misc_feature (55)..(55): n is a, c, g, or t
cgagtattggcaggtgcatgagagcaatagcaanacaaanngnangnagnatccnagatgcaattcaaaatcccaatgacattcagcttcaagaaaaagcttggaatgcggtgtgccctcttgttgtgaggctaaagagattttacgagttttccattagactagaaaaagctcttcagagtttattggaatctctgacttgtccaccctacacaccaacccaacacctggaaagggaacaggccctggcaaaggagtttgccgaaattttacattttacccttcgattcgatgagctgaagatgaggaacccggctattcagaatgacttcagctactacagaagaacaatcagtcgcaaccgcatcaacaacatgcacctagacattgagaatgaagtcaataatgagatggccaatcgaatgtccctcttctatgcagaagccacgccaatgctgaaaacccttagcaatgccacaatgcactttgtctctgaaaacaaaactctgccaatagagaacaccacagactgcctcagcacaatgacaagtgtctgtaaagtcatgctggaaactccggagtacagaagtaggtttacgagtgaagagaccctgatgttctgcatgagggtgatggtgggagtcatcatcctctatgaccatgtccaccctgtgggagctttctgcaagacatccaagatcgatatgaaaggctgcataaaagttttgaaggagcaggccccagacagtgtggaggggctgctaaatgccctcaggttcactacaaagcacttgaacgatgaatcaacttccaaacagattcgagcaatgcttcagtagagctctgctcaaagaagaggatctatgtgctgacctcagaagatgtatatgtttacataatttaatacagattgatgttaatacttgtgtatttacataaccgtttccttcttgtcactgaaatatatggaccttaatttgtatcctgactgactcaacccagcagagcataaattgacttgagagccttacctttgatgtctgaaatgaaacccccttctccaaaggcaaaattcggagactttgatctttgctactggagtcctttaacaacacctataacgataaaaaattcctaattgtt

SEQ ID NO: 603083 - DNA, 4341 bp, Homo sapiens
  misc_feature (34)..(34): n is a, c, g, or t
  misc_feature (40)..(41): n is a, c, g, or t
  misc_feature (43)..(43): n is a, c, g, or t
  misc_feature (45)..(45): n is a, c, g, or t
  misc_feature (47)..(47): n is a, c, g, or t
  misc_feature (50)..(50): n is a, c, g, or t
  misc_feature (55)..(55): n is a, c, g, or t
  misc_feature (3774)..(3774): n is a, c, g, or t
  misc_feature (3786)..(3786): n is a, c, g, or t
cgagtattggcaggtgcatgagagcaatagcaanacaaanngnangnagnatccnagatgcaattcaaaatcccaatgacattcagcttcaagaaaaagcttggaatgcggtgtgccctcttgttgtgaggctaaagagattttacgagttttccattagactagaaaaagctcttcagagtttattggaatctctgacttgtccaccctacacaccaacccaacacctggaaagggaacaggccctggcaaaggagtttgccgaaattttacattttacccttcgattcgatgagctgaagatgaggaacccggctattcagaatgacttcagctactacagaagaacaatcagtcgcaaccgcatcaacaacatgcacctagacattgagaatgaagtcaataatgagatggccaatcgaatgtccctcttctatgcagaagccacgccaatgctgaaaacccttagcaatgccacaatgcactttgtctctgaaaacaaaactctgccaatagagaacaccacagactgcctcagcacaatgacaagtgtctgtaaagtcatgctggaaactccggagtacagaagtaggtttacgagtgaagagaccctgatgttctgcatgagggtgatggtgggagtcatcatcctctatgaccatgtccaccctgtgggagctttctgcaagacatccaagatcgatatgaaaggctgcataaaagttttgaaggagcaggccccagacagtgtggaggggctgctaaatgccctcaggttcactacaaagcacttgaacgatgaatcaacttccaaacagattcgagcaatgcttcagtagagctctgctcaaagaagaggatctatgtgctgacctcagaagatgtatatgtttacataatttaatacagattgatgttaatacttgtgtatttacataaccgtttccttcttgtcactgaaatatatggaccttaatttgtatcctgactgactcaacccagcagagcataaattgacttgagagccttacctttgatgtctgaaatgaaacccccttctccaaaggcaaaattcggagactttgatctttgctactggagtcctttaacaacacctataacgataaaaaattcctaattgtttgtggtagtattttaattctagatgtgttatctctctgggaagtatagtttatagaaacacaaaatatttgatttcctgtgtcggttcagctacaagaaacacaactgttatcttgacagaggaagagaggaatccaagaaaaatgcatgtggagaattaaacccaagtgtttcgaattcagcacaccccctctctgtcctcagactgcagtccacacgtgcaacttttctgtttgcacgtgttttattaatcagcatactccttttctgtttggatttatatccctctaatgttctcctttaatttcacatgaaaaaaaaatctgtatttttttcagttagtgggagagcagcagaaatagatagatgtgatgttgccactggactgatgaaggtggctgtcttggaactgggagacaggtcctcagaggtgcactcaggcaacaggacagccatctctctgcttcagccctctgcctacagggattagggaaatggagctctggctttgaagttatttgtgagtttagcaaccttccagttacctgcagagttctgggtgcacagccacccctcataagagccctgttctctgaagaccattcatatgagaacaaaggtctaggatactgcattagttaccagaaaactaggggaatttagagggaaaaaaaatccatgttttctatttcccaggtttttaaaaagtagctcttccccaaccccgttgctagcttgttgcaatataaaagccctggtgcacctgaatttactcctggccttactaatgattcataatgtgatcttgagaaatgtgtttaagctttctgagtcttaacctccttgtctctaaaatgggcaattaaaacaatcttcaagagccctgtaaggttaatgccgataaaatgactgactccgcccttcttccttagtacgtagtatccagcaagcatttgccccaccttgtcttgttgatgaacaatattatgaagcctgcagtcattctctctgtacatcagagcttagttcgaatggaatcatgaaaatctctgattctgacctcctaaggaaaaatgaaacccagaggatgtggtcatacaggatggctcccatgtgggcctagaacccaggatgcttcactcttgactccatgctcttccttttataccatgtggctgtgaatacatactatgggatgggattcaacccttctaagtaaatcctcagtctggtctatattgttacttgcctgtttccactagaaggagtcacccaggcatttagtgaatgataatcctagaagttgagtctgagtacatcagagtttggcattatttgcaacatcccaggaatgagctataagactccattgctttctggactttagtgaccagctgatcttcccttggatcctccaataaaggggaaaaaatacttgtcttatgttgttttagcaagggagttcagccaagtgacaggaaagattccctggtctgcatctaaacattagtcaacagaaggaaaaggctcttttccttggagattttcaagttgaaaaagtacagctgcttggatggagtttctctcatcagaatagaaatatgctaggtggtcttcaagacctttttgaacctacagattctaaaccttagaggaagccagaatatgtgatcataccaggtgaggaaagttaggagatattcatcttaagagatatcctatttggcagtcacatgttacacttgagcaacaattgtctaggctagaaatatagaaccacacaatatttatcatcattgggtcaatttctccccctctatcaagtgaggagattaaggcttaaagaaaggaaaggacttgccagccaccacagggctcatgaggggcttgaacccatgtcgtgtgtctctaccacagctgactctcagctggctaatggagaaaatgtgaggaattacctgtcaaattagattgagctcagagtaaatagatgagcacatttataactctaaattagactttctatcaaatgggaccaaacatatggaaggggctgctgtcctgcctcaatttagccaagacttgtcttgtctcaaagccaagactcagcagtacatggattctgagaagtccagggtctgaattgttgtctctgattactggaaggacaggttaactgaatgtctgtgatcactaacaggtgatgggctttgtgcccactccagagatattgtgggagacaaattcttttaacagcctgtcctcccggcatcaggagtcattgaacaatcatggattgttgtgtttgggattttttttttttttggctttgtttttggtttttgtgtgtgtgtgtgtgtgctgcatgcacatgcgtccaagacttacgggtggtttaggggaaagtgctagcaacagtgtcaatgtcattgttaactatatttcatatttgaggtctcattgttttcaaataaacagtgttttccatgactgagatatttatttttgggaaagcaacgaggtaaaaattatgtttctcagatgcactgctactttggcgttattactgtgttctcagaaactcgttgtgcaccactaggaattagtagtagaaaaaaaaaaacaataacnaaaaaaaaaaancaactggaaatggatgtcttcacattaggggtggagtattaacaaccagaaagaaagtttggatattaccttttaactactagttaacatcatgcttgatcaacatttgctcctagttatcaccattaaattaagaccttaatggtaaactgaggttactgatgcatcatcacatttaagtaaaaataatttcatgttttccccaaagaaaaattaagcctcccaatcttaggatccaattgtgcagtagaattcagagacttctcattcaatcttgtatcctatgcagctacaaatattttttaaatgttagtaataaacattggaattttgtcttaaagagttcaaaaccttggaacccagttttctcactacgtctataaaggccattacagacccaaggctgttttgcagttttcatatgttgtttgctgaagtcattgtaattttttttgcctgctttgcctttttttctacaggagttttgagtgtgaaatgaaaattaaagtttggtacatatatttaaaaaggctagggaaaaaaaaaagaagagaa

SEQ ID NO: 603084 - DNA, 1033 bp, Homo sapiens
ttccgggagtgtggggaatgggaagatgagccccgtagagacgacagcagcattgtgttggcggtcttcgagccctctggacaatgcagcatgcggcagtcatcctaagtgggtcaggtggacaccctgctgaggaacttcctgccttgctacctgtgggcatgctggcagcgtcttgtccttgctggcatgatctctctgacgagctagggccctcatggatgcctgacctggaatgccatgttgctactgcaatgcaatatacagcttgcccctgatgtcctgtgatgcatcctgatggaccccttgatctccacatgctttcgtgtggccatcgctcatctccctgtgttgtgcaagcccgactcttcttgatggttcgttggcgttggggtgactgtgcctgccccttatggatgcttgggtctcatgcactaaccaaatgtcgatgcgcacattacttcgacacaccacctgtgtggcgtgcccatctttggcccttttggcgccttcaaaccaatgcccactttgaacaatgcgcattaactacctgccttcaccttggcatcttttcccccaatgtccggacggagattattccttcctggaccaatactttcttgcggatttgccttctaccttagcctcccttaggatcattcccgttctcgcgggaatcgaacccgaattaagctttccagggggaacactgaagggcccctttggaacccttccacctcgcatgttccccaatatcatttggggcggcgatacccacctctcggttattggggccaccgctttttgggcatcttgcgaaatgccgcccagtttattgactccgccccctctggggcgccctttcggtgttcttcgccctgtttgggcctgggcgcgctaatccgtccgcacccatttatacccctgtggtcccgggggaccataacgccctttcgtctgcgcttatttccgtttcttctgggtcaactggcgtccagtgcgccactggtggggaatctgcggccacccatcg

SEQ ID NO: 603085 - DNA, 157 bp, Homo sapiens
ccccaaagcgtccgaatagggtgccgacaataaacagacctgataccagaccggcttgtgcagtcgaagcccctagctcagccactgagtagccgacaatcacaatcaccagtaagtagaacaccagaaccagctggaaattcaccagactgatcag

SEQ ID NO: 603086 - DNA, 3004 bp, Homo sapiens
tctgagatgactgtgagcattgaagtgtggatttttgtctaaagaaataagcccaaatatcaattgtgtttccgaaggtaaagatgggctgaagcttacacagagcactgtttgccgctaacctctaccgttctctctccatccaggttcactacaaagcacttgaacgatgaatcaacttccaaacagattcgagcaatgcttcagtagagctctgctcaaagaagaggatctatgtgctgacctcagaagatgtatatgtttacataatttaatacagattgatgttaatacttgtgtatttacataaccgtttccttcttgtcactgaaatatatggaccttaatttgtatcctgactgactcaacccagcagagcataaattgacttgagagccttacctttgatgtctgaaatgaaacccccttctccaaaggcaaaattcggagactttgatctttgctactggagtcctttaacaacacctataacgataaaaaattcctaattgtttgtggtagtattttaattctagatgtgttatctctctgggaagtatagtttatagaaacacaaaatatttgatttcctgtgtcggttcagctacaagaaacacaactgttatcttgacagaggaagagaggaatccaagaaaaatgcatgtggagaattaaacccaagtgtttcgaattcagcacaccccctctctgtcctcagactgcagtccacacgtgcaacttttctgtttgcacgtgttttattaatcagcatactccttttctgtttggatttatatccctctaatgttctcctttaatttcacatgaaaaaaaaatctgtatttttttcagttagtgggagagcagcagaaatagatagatgtgatgttgccactggactgatgaaggtggctgtcttggaactgggagacaggtcctcagaggtgcactcaggcaacaggacagccatctctctgcttcagccctctgcctacagggattagggaaatggagctctggctttgaagttatttgtgagtttagcaaccttccagttacctgcagagttctgggtgcacagccacccctcataagagccctgttctctgaagaccattcatatgagaacaaaggtctaggatactgcattagttaccagaaaactaggggaatttagagggaaaaaaaatccatgttttctatttcccaggtttttaaaaagtagctcttccccaaccccgttgctagcttgttgcaatataaaagccctggtgcacctgaatttactcctggccttactaatgattcataatgtgatcttgagaaatgtgtttaagctttctgagtcttaacctccttgtctctaaaatgggcaattaaaacaatcttcaagagccctgtaaggttaatgccgataaaatgactgactccgcccttcttccttagtacgtagtatccagcaagcatttgccccaccttgtcttgttgatgaacaatattatgaagcctgcagtcattctctctgtacatcagagcttagttcgaatggaatcatgaaaatctctgattctgacctcctaaggaaaaatgaaacccagaggatgtggtcatacaggatggctcccatgtgggcctagaacccaggatgcttcactcttgactccatgctcttccttttataccatgtggctgtgaatacatactatgggatgggattcaacccttctaagtaaatcctcagtctggtctatattgttacttgcctgtttccactagaaggagtcacccaggcatttagtgaatgataatcctagaagttgagtctgagtacatcagagtttggcattatttgcaacatcccaggaatgagctataagactccattgctttctggactttagtgaccagctgatcttcccttggatcctccaataaaggggaaaaaatacttgtcttatgttgttttagcaagggagttcagccaagtgacaggaaagattccctggtctgcatctaaacattagtcaacagaaggaaaaggctcttttccttggagattttcaagttgaaaaagtacagctgcttggatggagtttctctcatcagaatagaaatatgctaggtggtcttcaagacctttttgaacctacagattctaaaccttagaggaagccagaatatgtgatcataccaggtgaggaaagttaggagatattcatcttaagagatatcctatttggcagtcacatgttacacttgagcaacaattgtctaggctagaaatatagaaccacacaatatttatcatcattgggtcaatttctccccctctatcaagtgaggagattaaggcttaaagaaaggaaaggacttgccagccaccacagggctcatgaggggcttgaacccatgtcgtgtgtctctaccacagctgactctcagctggctaatggagaaaatgtgaggaattacctgtcaaattagattgagctcagagtaaatagatgagcacatttataactctaaattagactttctatcaaatgggaccaaacatatggaaggggctgctgtcctgcctcaatttagccaagacttgtcttgtctcaaagccaagactcagcagtacatggattctgagaagtccagggtctgaattgttgtctctgattactggaaggacaggttaactgaatgtctgtgatcactaacaggtgatgggctttgtgcccactccagagatattgtgggagacaaattcttttaacagcctgtcctcccggcatcaggagtcattgaacaatcatggattgttgtgtttgggattttttttttttttggctttgtttttggtttttgtgtgtgtgtgtgtgtgctgcatgcacatgcgtccaagacttacgggtggtttaggggaaagtgctagcaacagtgtcaatgtcattgttaactatatttcatatttgaggtctcattgttttcaaataaacagtgttttccatga

SEQ ID NO: 603087 - DNA, 2901 bp, Homo sapiens
  misc_feature (6)..(6): n is a, c, g, or t
  misc_feature (13)..(14): n is a, c, g, or t
  misc_feature (37)..(37): n is a, c, g, or t
  misc_feature (39)..(39): n is a, c, g, or t
  misc_feature (45)..(45): n is a, c, g, or t
gttttnttcagtnnatctcaactgagacatagacttntntttttnttgtccaacatacacatagacatggaaactgagcactgagtggatggaaggccctgcatttggctccatagtacaaggcaagatcaaagtctcaagtctttgtccctaaagccaggcaagtgaaatgtacaattgcaatatagtatgaaaattgataatgattgcagtcatacagaatcctctagaagcccagaggaacagctcaccagcctgagggggtaggaaaacctgttggtcatttctgcgttggatttctttgatgtctgaaatgaaacccccttctccaaaggcaaaattcggagactttgatctttgctactggagtcctttaacaacacctataacgataaaaaattcctaattgtttgtggtagtattttaattctagatgtgttatctctctgggaagtatagtttatagaaacacaaaatatttgatttcctgtgtcggttcagctacaagaaacacaactgttatcttgacagaggaagagaggaatccaagaaaaatgcatgtggagaattaaacccaagtgtttcgaattcagcacaccccctctctgtcctcagactgcagtccacacgtgcaacttttctgtttgcacgtgttttattaatcagcatactccttttctgtttggatttatatccctctaatgttctcctttaatttcacatgaaaaaaaaatctgtatttttttcagttagtgggagagcagcagaaatagatagatgtgatgttgccactggactgatgaaggtggctgtcttggaactgggagacaggtcctcagaggtgcactcaggcaacaggacagccatctctctgcttcagccctctgcctacagggattagggaaatggagctctggctttgaagttatttgtgagtttagcaaccttccagttacctgcagagttctgggtgcacagccacccctcataagagccctgttctctgaagaccattcatatgagaacaaaggtctaggatactgcattagttaccagaaaactaggggaatttagagggaaaaaaaatccatgttttctatttcccaggtttttaaaaagtagctcttccccaaccccgttgctagcttgttgcaatataaaagccctggtgcacctgaatttactcctggccttactaatgattcataatgtgatcttgagaaatgtgtttaagctttctgagtcttaacctccttgtctctaaaatgggcaattaaaacaatcttcaagagccctgtaaggttaatgccgataaaatgactgactccgcccttcttccttagtacgtagtatccagcaagcatttgccccaccttgtcttgttgatgaacaatattatgaagcctgcagtcattctctctgtacatcagagcttagttcgaatggaatcatgaaaatctctgattctgacctcctaaggaaaaatgaaacccagaggatgtggtcatacaggatggctcccatgtgggcctagaacccaggatgcttcactcttgactccatgctcttccttttataccatgtggctgtgaatacatactatgggatgggattcaacccttctaagtaaatcctcagtctggtctatattgttacttgcctgtttccactagaaggagtcacccaggcatttagtgaatgataatcctagaagttgagtctgagtacatcagagtttggcattatttgcaacatcccaggaatgagctataagactccattgctttctggactttagtgaccagctgatcttcccttggatcctccaataaaggggaaaaaatacttgtcttatgttgttttagcaagggagttcagccaagtgacaggaaagattccctggtctgcatctaaacattagtcaacagaaggaaaaggctcttttccttggagattttcaagttgaaaaagtacagctgcttggatggagtttctctcatcagaatagaaatatgctaggtggtcttcaagacctttttgaacctacagattctaaaccttagaggaagccagaatatgtgatcataccaggtgaggaaagttaggagatattcatcttaagagatatcctatttggcagtcacatgttacacttgagcaacaattgtctaggctagaaatatagaaccacacaatatttatcatcattgggtcaatttctccccctctatcaagtgaggagattaaggcttaaagaaaggaaaggacttgccagccaccacagggctcatgaggggcttgaacccatgtcgtgtgtctctaccacagctgactctcagctggctaatggagaaaatgtgaggaattacctgtcaaattagattgagctcagagtaaatagatgagcacatttataactctaaattagactttctatcaaatgggaccaaacatatggaaggggctgctgtcctgcctcaatttagccaagacttgtcttgtctcaaagccaagactcagcagtacatggattctgagaagtccagggtctgaattgttgtctctgattactggaaggacaggttaactgaatgtctgtgatcactaacaggtgatgggctttgtgcccactccagagatattgtgggagacaaattcttttaacagcctgtcctcccggcatcaggagtcattgaacaatcatggattgttgtgtttgggattttttttttttttggctttgtttttggtttttgtgtgtgtgtgtgtgtgctgcatgcacatgcgtccaagacttacgggtggtttaggggaaagtgctagcaacagtgtcaatgtcattgttaactatatttcatatttgaggtctcattgttttcaaataaacagtgttttccatga

SEQ ID NO: 603088 - DNA, 912 bp, Homo sapiens
ggcgagcgggctggtcgaggaggaggcggcggcgtggagcttgtcgtcctgttcggcggggcgggtctggcctatgccccgggcgcttgcggcgactgcctggatcctgtctccgacaggccggcatggctggatgcctcgaggaggctgactgagccccaggccatgggtcccctctcgcaggacgtggaacctggtgatgccacgaccctcgtctgccggcgcgcctgtggaggagatgaggccgaggaccccggaggcccgagactgggggaatgtgtctctgcccacgcacgacatgcacgcaagaacagagcacgggctcgtactgggacgaatatttcactagccacatgcaggacacctggggagcggttcgagaaaatcgtggtgcgtggatgcgatatgactgagtggtgcacacatgggcttggtcgctgtgaagtcagaagaggaagtatgtctagttttgtgccgagaggatgttactggttagaacagtagggccatttgacgggttctaggtagagcagatgtcagctttatgcggtggagaggtttggagtggcttgggggccgctgaggaaaatgagcctggcagtaacgagggggtagtccatatcgctggaggaaggtgaccaagttgctaggtaaacaacggcgttggaacatgggcatggaaacggtgtcgaattttatgcgccaagggagctggcaaagagtagaagtttgagagtcgcttggaagatgtctgagaatatgggacgcccttggtgagggagagggatcgctggacaagtttggttgggaaaatagcagatgcggaggaggatgtcatagggttgtgacacttggtgtgttgtgaatgggtcaatttgaggagcgaaaggatgcgagggaacgtgagcgaat

SEQ ID NO: 603089 - DNA, 200 bp, Homo sapiens
cacaaagctgcggatgaaggtgaacgagtcgagagaaccagagcagaggcagccacggggacaatcttcaccttcaggtcggcccgcctgaactctcagaggctagtgtcaacaggccctttctgatgttcattgtggcatacaacatcctcttccttggcacagtgaaccgcccctgaggtggggcttctcctgaactc

SEQ ID NO: 603090 - DNA, 768 bp, Homo sapiens
cccgctccctggtgcaaagcgttttggcgtcagcttcctttgtagaggagatgagtggaatattatgatgacaattttatcagaggaaagaaaacgagggctggatgcagtttataatagcaaggtcggactggtcatccatctggtcacagaatcgaacgttgtcttcgaaagtgtttttagcaagatgataagtaatagatgtataagcgtatagctccatcataaaataagacgatgcctgagatttggcaagaaggggcaaatatcgtgactattaatgattgataagcagcgcagtgagagaagttctaaccttttagcagtgttgcactagaaacgtggtataagcatgcgcttgcagtgatactaagcagatcatatgctcagtgggtgtttgagtgtgtgggcagttgaacaagaaagtgaatgttgctttagtaaaaatcggtcattccagccgtttctagtatagagatagctctttcttgcggtgataatgtggtgcacactatagccctcaacaagaccgtgttatgtccaagtgtacatctggcagtgtcgtaaagtaacagttgactgggttgggtcgttatttgcacagtatgtggcgtactatgttgcggtttctgtgcaatctgatttaactaggaataatttctcttgcccgcttatcactcggggatgtcacttgcaccccgatttatgtgtaggaggcactacaccattggtctccactactggccgcgataagatccaaactcgtgg

SEQ ID NO: 603091 - DNA, 284 bp, Homo sapiens
tgctaggattacaggcatgagcctctgcgctcggctgacaatttttacaattttttaaaaaaaattttttaattttttattttttattgaggcagaatctcgctctgtcaccgaggctggagtgcagaggcgtgatctcggatcactgcaaactccaactcccagtttcaagcaattctcctgcctcagcaccccgtgcagctgggattacaggcatgcaccaccacgcccaactaatttttgtatcttgagtagacggttttcaccatgttggcaggctggtc

SEQ ID NO: 603092 - DNA, 1034 bp, Homo sapiens
tttcggactaatgtgctaacgagctagcgtcttagatttcggcacgcaggctgggtcggatccacgaatgcgtagctttgccacagcatgcggcacagccgcataggcttgcccccccgtgccattcgggtgcgactactgaacacaaattgcacagccctaggacttgtcgtccgcgttgtgcgtcgctgccgaggctcacgagggcttgcttgcgctggaccaccctgctccgagaaatcttagccacgcgctaggtcggctacctccattcatcatcggttacttgatactggccgtcgttattacgaacgtgtcggttaggtcctctaacatatgctggtgttctgacaatgtgtgcatacgtgacgtcaacacagacaagcgggatgtctactaccgcctggccaaggagaatggctggcgtgctcgcagcgccttcaaactgctacaactggataaggaattccaactcttccaaggcgtgacacgggcagttgacctgtgtgcagccccaggcagctggagccaggtgctgagccagaagatcgggggccaagggtccggccacgtggtggctgtggacctgcaggctatggctccactaccaggtgtggtacagatccaggtggacatcacccagctgtccactgccaaggagatcatccagcactttaagggctgccctgcggacctagtggtgtgtgacggggctcctgatgtaaccggtctccatgatgtggatgagtatatgcaggcccagctcctcctagctgctctgaacattgctacacatgtcctgaagccaggggctgcttgtgggccagatattccgaggccgggatgtgacgctccctcttcagccgcttgcggtcttcttctccagggtgctggttgccagcccggagcagcggactctagcttcgaggcctcgtgtctgtagggtatgacctcccagggcttatcccggcctgagaaccctgttgcccttctccatttacccttgttgtcccccgtattgccgtggacccggg

SEQ ID NO: 603093 - DNA, 691 bp, Homo sapiens
  misc_feature (49)..(49): n is a, c, g, or t
  misc_feature (87)..(87): n is a, c, g, or t
  misc_feature (153)..(153): n is a, c, g, or t
  misc_feature (156)..(156): n is a, c, g, or t
  misc_feature (173)..(173): n is a, c, g, or t
  misc_feature (184)..(185): n is a, c, g, or t
  misc_feature (191)..(191): n is a, c, g, or t
  misc_feature (195)..(196): n is a, c, g, or t
  misc_feature (200)..(201): n is a, c, g, or t
  misc_feature (208)..(208): n is a, c, g, or t
  misc_feature (244)..(244): n is a, c, g, or t
  misc_feature (248)..(249): n is a, c, g, or t
  misc_feature (251)..(251): n is a, c, g, or t
  misc_feature (260)..(261): n is a, c, g, or t
  misc_feature (263)..(263): n is a, c, g, or t
  misc_feature (269)..(269): n is a, c, g, or t
  misc_feature (275)..(275): n is a, c, g, or t
  misc_feature (280)..(280): n is a, c, g, or t
  misc_feature (282)..(282): n is a, c, g, or t
  misc_feature (292)..(292): n is a, c, g, or t
  misc_feature (297)..(297): n is a, c, g, or t
  misc_feature (299)..(300): n is a, c, g, or t
  misc_feature (304)..(304): n is a, c, g, or t
  misc_feature (330)..(330): n is a, c, g, or t
  misc_feature (349)..(349): n is a, c, g, or t
  misc_feature (359)..(359): n is a, c, g, or t
  misc_feature (367)..(367): n is a, c, g, or t
  misc_feature (369)..(369): n is a, c, g, or t
  misc_feature (375)..(376): n is a, c, g, or t
  misc_feature (380)..(380): n is a, c, g, or t
  misc_feature (386)..(386): n is a, c, g, or t
  misc_feature (392)..(393): n is a, c, g, or t
  misc_feature (404)..(405): n is a, c, g, or t
  misc_feature (407)..(407): n is a, c, g, or t
  misc_feature (411)..(411): n is a, c, g, or t
  misc_feature (416)..(416): n is a, c, g, or t
  misc_feature (420)..(420): n is a, c, g, or t
  misc_feature (422)..(423): n is a, c, g, or t
  misc_feature (433)..(434): n is a, c, g, or t
  misc_feature (449)..(449): n is a, c, g, or t
  misc_feature (476)..(477): n is a, c, g, or t
  misc_feature (482)..(482): n is a, c, g, or t
gagcgccgccgccatgtcctccggggctagcgcgagcgcctgagcgttngtagagcagctcaagtggaggctgcgtgagaggatcanggtctctcaggcagctgagacgtcaacagtactgtatgcagaatgcctgaaggatgccctgtgtgnggngttgtcccagctgaaantaacccccttnngggagnctannatcnngtgcttnactctgaagactcgagagaagttggctgaggaatgncttnnangcacaaggnngntgaatngactgncttcnangtctcaaagnaaaancnntttnccctaattttagagatattcaggccntttcctgtggcctggttcntatagcaaanatcacggntntcatgnngttnctactngagtgnngaaacctggtnnanggantagantttnannttagtaatanntgtggttttttgtgncaggtactttttataccttaggataannaaaantttaacaaccaagaatataacaaagaagtgcacccttctttcattagaggtgcagttacctacaggagtttctaatacactggaatatccattgtttgtgctgacatttactggcaattgtcacctttgaggacgggaaacctagttcctgtttaatttaaaccaactgaattctttattaagctgttgtcctgaaagtttatttttcc

SEQ ID NO: 603094 - DNA, 935 bp, Homo sapiens
  misc_feature (456)..(456): n is a, c, g, or t
  misc_feature (504)..(504): n is a, c, g, or t
gcggactacaagccccacaatgcaccgcacaccctttactggccggccccgcgctgctctcctaagaccccgcgggccagcgccgcgaccccttcccagcgctcctcgcgctgtgtgcggcgcgtcctctcgccggtgacccggtgtgcgtggggtcgaggcgccgggcggagtggctccgggccgaaacgccatgcggaggggcgagcgcagggacgccggaggtccgcggcccgagtccccggtgcccgcgggcagggcctcgctggaggagccgcctgacgggccgtctgccggccaagccaccgggccgggcgagggccgccgcagcaccgagtccgaggtctacgacgacggcaccaacaccttcttctggcgagcccacaccttaaccgtgctctatcatcctcacctgtacgcttggctatgtagacgctgctggaggaaacacctcangacacggcctacaacaccaagagaggtattgtggccagtattttggtnttcttatgttttggagtcacacaagctaaagacgggccattttccagacctcataccagcttactggaggtataggctctagcgtagagtagtggtctacgagctgtttctcatcttataatactacttccagactgtccaggacggccggcagtttctaaaagtatcgttgaccccaagctgggagtcccacttgccagagagagactacgggggaaactgcctcatctacgacccagacaatgagaactgacccctttacacaacatctgggacacagtggatggcttggtacccggcgcactattcattggctggtacctggaagaccctgatgatccgagacggggatgtgctgaacatcagcgaaatgtacggtacctggataacgccggagcacagtgccaattaagcgatgcgtggaccggccg

SEQ ID NO: 603095 - DNA, 322 bp, Homo sapiens
accaatgagcagtcagagggagaagtgcacagggcaagacccagaaggggcccaagcacgggagcttctgccctgaggagtcggggtgcacccccctcccagcacatggatgtggtcgccagctcagaagctctctgaaccccatttgttttttgttttggggtttttctgtctttttcctttttccagacccgcacccatggcatatggaagttcccaggctaggggtccaatcggagctgtagccacgggcctacacttcagccacagcaacgcgggatccgagccgcgtctgcgatctacaccacagctgacagcaatg

SEQ ID NO: 603096 - DNA, 169 bp, Homo sapiens
aagcagttactacagactcatatgaaactgagaatacaatgaagagagagaaaaggcaaggagacagagttaaagggacaaatggagaaagaaacagatccagagagatggagacaacttcaagtgtgcctaatgatcatatgtaatttgtaacttgatagaaagtgag

SEQ ID NO: 603097 - DNA, 404 bp, Homo sapiens
aggaccagacgttgctgtaggtcagagcctacctgtccgagttgtagccgaagctgcgtgcccggctgcaggagagttacgacaattccgcctcggacttcgtgaaggagaatgtcgccgcattcgtgaacatgacaccggaaaccttctctggcgtttatgcgaacgcgatcaaggaaacgcactggctgagctacacgaatttcggcgcgttagtgtccggctccaacttttcaaccgatgctctggcgaacggcgatacggacgtcttcataaacatcgacctcaagaccttggagacgcatgccggcctggcacgcgttgtgatcggctcgttcctcaacgctatctacaaccgcaatggtgctatgaagagccgaacattgttcctccttgatgaggcc

SEQ ID NO: 603098 - DNA, 896 bp, Homo sapiens
  misc_feature (228)..(228): n is a, c, g, or t
  misc_feature (303)..(303): n is a, c, g, or t
tagtggatgtcaggtgtttgtacgtgggtgtgtgtgtggatgtgtgtgtggatgtggatgtcagtgtgtgtgtggatgtgagtgtgtatgtggatgtcagtgtgtgtgtaggtgtgagcgtgtgtcaatgcggttgtgttggtgtgcgtggatgtgagtgtgtgtgtatgccctgacttggagcagacggggcagtggcagctcttgaagtggggcatatgccacagntgcccccacaggccttcagcctctccggctcaactggctccaagcagcattttaaacccacaggtgtccaccagnttctgctcccactgtctgagggacatggacagatctcgagggctcagcaggagaaggtctgaggtccaagggtggcagagggaccaggtggaggaccgccacttctccagccaatctcgggccactcagttccaggctgggcagccacagtgcccctcaggccagtgtcccagccaggcctgcaccccctcctcctgagggactccccgcctgcacggtctccactgcattgcatcccacggtccccaccaatgtctgtccgtggcagcgatgtcgggggtgaactcataggcagcagaggtgtacgcagcatccggtaggaccagcgaggagaggctgctatgagggagtcggggtgctgaggacaaagtgcctgcaggctgcacaccaaggcacagatgccgacctacctggcaggtccacgtatgggggatttataccttctacatacgtcactggacaactttcacatgttcgtaataaacatgcattacttttgtaacaagaaaaaacagcccgaatgacataaagatggtcagatgtcaggtcacaaccgaagaccaggatgtcgcaaagcccctgagaagcggccg

SEQ ID NO: 603099 - DNA, 471 bp, Homo sapiens
  misc_feature (433)..(433): n is a, c, g, or t
ccaggatgttgagagtttcattcattatcgcatgccccctaccccggccccacaatacctactgcgtgggatctgacacgtggcggctggtcaatgaatgaatgaatgaatggtcacaccatctgatgctctggactgactagccctgaaagctggaagcaccataattgacaagtcctacatttaggggcctttgttttacctatatgccaagacctaagcttaacaacactgatagggtggccaatacccaggacagcctgtgggaattacacataaagggagattcccagggactgggggcccaagctaaacactgaaaaatgcatctgtaggctcatagaggaaaagcccatgtctgtctgtattgcccaccactctctcccagcacccagaactgtcccaggacagagagcacttgacacacgttggntagattaatgaatgatttagagttcagtgcgccccaac

SEQ ID NO: 603100 - DNA, 203 bp, Homo sapiens
cgcggctgctggctgctgggctggccgtacctggctcgctaagagcggaccgacgattgctggcctgctgggcgcaacctacctggcagctctcggagcttctcacggattggcaaagaagaccggcgcctggccagcggtcatcaccgtgaccgccgctacctgcaccgcgtgccacttcctgtgcgacaccaaggcatgat

SEQ ID NO: 603101 - DNA, 638 bp, Homo sapiens
gggaaaattttctttcttgctcttagcagtatagagatgtgctctggtccttctcacttaacttctgctgcatccaaagaaggtaagaaaaaaagcagaacatataaaagcaactgaaagctttccctcaaattacctgggagcagtaacaagatattgtcagcggcggcagaaattactgaacaaggaggagagggcccgccagagcttttgacaccagctcacatgcagctgagggggcccactgttccacacacccccaggagcacctcttagtagaagtaaaaaaatcacagtgggttacagtgcaatattttggtcaatttctatgagaaagattattgacctgagaagttggtaacagataatgattactgaagaaaagtatttcattttataagcattgctgtctttaaaatccctctctccatttatatctatatgaatctgtagtgtagaattccagatccttggttgtgaaaggcgttatagagaggatctatttaaatccctttatatcatgtaaacaaggaaatggaggcccaacaagaggtggcttgcccaaggtcatggggccagtataagttgcaagccattcgtctgattcaactacaggtgctccaggcctcatctcacca

SEQ ID NO: 603102 - DNA, 301 bp, Homo sapiens
tcaaacaaagattaaaagtatgtatgtggcaaagcgtggtggctcctgccagcactttgggatgccgaggcagaaggtttacctgagcccaggactttgagaccagcctggacaacacacgaagactttgtctctacaaaaataaaaataaaaaaattattcatgcgtcacggtacatacctgtagtcgcagttgtttgggaggctgaggtgggaggatgacttgagagttcaaggctgcagtgagttaggattgcaccagtgcactccagcctgggcaacagagtaagacctgtccctta

SEQ ID NO: 603103 - DNA, 1294 bp, Homo sapiens
  misc_feature (158)..(159): n is a, c, g, or t
atgacactttgtctcgtctgctaggaatgcctcccagatcaattctcccaacccccgtctcctttggccagatgctgatgaatgtatttccctgttttttttttttatcctgatgcattatcatgaggacatggctacttcagttggtcttaactctnngcagtagcctggagatgggtgtgtggtttaagaaagggtaaaacttactgactggtagtatatatttgagaagagaaattgagcccagctctagccaaccaactttgaccttgtttgatcatagacttagccaagggattttacaccccatgcaacctgcccagcattcgtccagctttctggcttccattgaaccgtgatttctcagatctggagacgtgactgcaagtatttgagatccttggatacaatgtgtacgttatataaatcccaagtattgccattccttttcatgttaactgttccaagtgggatctcagaattagaccaaaacaagacggtggtaatatgataccttttattagaagacttttcactggggcgggggtggggggaggatggggaggggaaggaattgtagcagaaacagatgtatttttcttgtgatttttattttgaatcaaatattgtaaattgtgtataaatgaagatgctgaatagttctgtttccacttggcatttcaagtctgatatcaggtgtctgtacagggttttgatttctttcccttgtataactacacaacaatcctacagtgtaacatatggaatcattttgaatagacttgtgtgctataagctttcagcaggtcctctgtctctagaataagcatgttgtttattttcagataatcagaaataagtgtgctgacaagctggacacaatctgggtgtgcccagcttacctttctttctgatgtttaaattgaaggctgcagccaatggaatatgttcagctggttttccttggcttcctagattaaaaaaaaataataaagcatagttctttattaactttaggatattgttcataaaataaataaaggcccctgcactaacatgacaacatgcctcatggtcaccctctctatatgtacttactcattaaagtgtattttatttccttatgtggaaagcacttttataaaatcacccttttgaaaagaagtgggcacagagaaccccactcctgttcttttcctctagtgccattgtccatcatcaaaagggaaactcttagttaatcagatctgtacaaataaaattccaagtccatttgcttgttttgctatctaaa

SEQ ID NO: 603104 - DNA, 241 bp, Homo sapiens
aaacaaaagaccggcagctaggacgcgtgcgcgacaggaccacatatccgcggctcgggctgcgacgatggcggtcttgtagtcatcgctgacatacagcacccagtagtcgcccttggcaacgcccggcaacagtgatgtaaaccagttattgaattccacccacagcttgtcggtcttgcctggcacctgcggcgttgccgtgcctttggcctcttgccacttccagcgtccgtagcgg

SEQ ID NO: 603105 - DNA, 315 bp, Homo sapiens
ctacaggctaaacatagtactagaagacagaaggaatactcagagtaccaactagccagaatcccacagtcactataagcagacaataaatccaaataagcctagcctactacatacaaagagaagccataacagaagtcactagtagaccagcagcaatacagtaagactactactacctactagcaaaagccagcccaatatactaggtcacagaagtacatcatgagaaagacttaaaataaatactataacagaagaagaccaacagctaagcaagaaggaccagaaaaacaaggcaggtagaaatacccc

SEQ ID NO: 603106 - DNA, 252 bp, Homo sapiens
taagaaaaggaacgtttaaaaatgacactctcaccgtttctggaattatggaaaaagatcgaggtggtgcctgtggaaatcgagcccacagaggaggatctcaacttggatgtaggtccctccacagaagacagtccagaagaagtaactacacacgcattatcacactctcctgtagttggtgagattccacccagatggtgttgaagggggacattgaagcctgaaattaaatatctctgagcagttaca

SEQ ID NO: 603107 - DNA, 488 bp, Homo sapiens
  misc_feature (302)..(302): n is a, c, g, or t
cagcgccgggaggcagaggtggtagtgagccgagatcgcaccactgcagtccagccgggatgacagagtgagactcttgtctcaaaagaaaaacgtggaaattgtaaacagaggtatggcagacacatacagaacatccatactatatatttggttttccgtggattcagcacattaatatcgacgtattcaagtgcccaagagacatcctaagtttagtgctagcagcacatatgcaaacacaaagcaagtgtgttttctcatgctcttcatccagcatcacatataaccctcgttcccangttttatctcatattctagcaaaaatgttctcagtggcagcttacaaaaaaaaaaaatacaatttgggcctataaaagggagtggattcttttggtaacaccaccagctaaatgccatataccagctagggaagggatacgggtataatccaaactaaatggcaagacttttccttcaaaaagatt

SEQ ID NO: 603108 - DNA, 341 bp, Homo sapiens
aactaaattttcacctgcatttaaaaagtgaatcaaatgggccgggtgcggtggctcacgcctgtaatcccagcactttgggaggccgaggcggacagatcacgaagtcaggagatcgagaccatcctggctaacatggtgaaaccccgtctctactaaaaaatacaaaaaaaatagccagacatggtagtgggggcctgtagtcccagctactcgggaggctgaggaaggagaatggcgtgaacccaggaggtggagcttacagtgagccgagatcgtgccactgcactccagcctgggcgacagagcgagactccttctcaaaaaaaaaaagtcgacgc

SEQ ID NO: 603109 - DNA, 570 bp, Homo sapiens
gaatcagctgatgggggaatatcttatggttgcctgtttctttttctttacttctcagaagactagggttctgtagtagtgtttctcagtagagtgctgtattagggttctcctcatacagtaccagtatgggatgtggcaagtggggttgtatatatgtttgtgtatagaaattgagaaagaggagatttttattgattggctcttggaatcgtggggactaacaagtccaaattccacatggtagaccagcaggctagtagttcaggcaagacttgctgctgcagtctttgagtctgaaccggcagtatgaaggcagaatccatttttccttgagagaccttagtctttaatcttaaggccttcaactgcactcggattcaacctatccatgtgtcaggggtaatctgctttactcagagtctgctggtttaaatggtaatcacatctaaaaatacttccagagcaacatctggcatgctgtccgaccagaccactagggcaacattctcctacgtcaagctcgacactccacgcatcacccagtccatggcctcgtcatccactccc

SEQ ID NO: 603110 - DNA, 259 bp, Homo sapiens
cactagatccctttgcgatgccaaaatctcaggctggaactttagccagcctcagctctgcttcctgaagaatggaagaccaccccgtaacaattttgtatttaccttaaagatgttacttgggggttacagactttgagactggccgccagactaaactaagtggcttaaccttgcccgggtcatctcctgtgatgcagcgtgaagcttgtaaacgggaaaagttcttcccacaagtctacagacagttgcagcgggt

SEQ ID NO: 603111 - DNA, 261 bp, Homo sapiens
  misc_feature (49)..(49): n is a, c, g, or t
  misc_feature (74)..(74): n is a, c, g, or t
  misc_feature (78)..(78): n is a, c, g, or t
  misc_feature (116)..(116): n is a, c, g, or t
  misc_feature (127)..(127): n is a, c, g, or t
tccgagagctgtctggggccaacgtgctggctgagtactactggctcanacgccgcctgctgggggcccctggnaatntaagtcctgccccgggctgtgccgccctcctccctganagccccctgcntcctgggcacagggaagcctccataggctagtagcatcacagtgccaggcccagagcttactggacttcccaaggtcctatgggactagggctgagggtacacatcctgcttttttccagaatataagttttgg

SEQ ID NO: 603112 - DNA, 337 bp, Homo sapiens
cgatgccttaacggtctgttaccgcaggtagccgtgggattggaatcaggaaggcgtcgtggccttgcggtgcatcgatctccaggtagcagacgtctttcttggcggccatcagggcatccaccagctcacgggagcgcgctggcgaaaagcgccagtcggtggtgaacgacattacgcagaacttggccgtggcgtgctcgaaggttttcgccaggtcgtcatcgtgattggcggccgggtcgaagtagtccagggccttggtcatcagcaggtaggtattggcgtcgaaacgccccgagaactccctgccctggtaacgcaggtagctttccac

SEQ ID NO: 603113 - DNA, 748 bp, Homo sapiens
agcggtcagacccatgaaacggccgggagggcaggagcgaatcgggccgccgccggcatggagctgagagtcgggaacaggtaccgactgggccggaagatcggcatcggctccttacgtgcacaacatctatctcgagtaacggacattgctgcaggaaaatgagtgttgccgatcaagcttgacatgtgtcaaaacctaaactaccctcagactccacgaattgaagagccgacaaatcttactaatgatgatcgcgagggatggagtgggtcgatctccacagccatcagatggtagcggggcagatgggggactacaatgtcatgtgtgatggagctgctggggccaacgcctggaggatctcttcaacttctgctccaggaaattcagcctcgatagcctgtcctgctgcttgctgacctaaatgatcatgtcgcagtctaatatcatttcattcacatacgatacttcatccatccgggattgtgaatgcctacgacatacttccttcatgtggcctggggatagaacgggcagaccatgggtagtacatcagtcggagcttcgaggcatggtgcgatggaatgtaccggggatgcatcgcacgctcgatgctaggagcatcccgctatattcggtgaaaaacacgtggaactgtgatgaggggaaggagctgctgataaggcctccattcgataacaggctaccttggggaatttgatgggtattcctccgtaaccactat

SEQ ID NO: 603114 - DNA, 242 bp, Homo sapiens
cagaaataaaagcgaggacatcaccatgtatcatacagataataaaagtattttagaagaatgttatatcaattaagatgagacgaagaaattaaatgaaagcaaaaaatcactaaaactgactgaaaaggaaattaaaggagagttccctgatggcctactggttatgacttagcactttcactgctgcggcccagattcaattcctgtctgggacctgagatcctacatcaagctgtggc

SEQ ID NO: 603115 - DNA, 1225 bp, Homo sapiens
  misc_feature (281)..(281): n is a, c, g, or t
  misc_feature (1225)..(1225): n is a, c, g, or t
ggtatcaaacgaagggagtacagtcgagagagctggtgtgtcatgactagcttccgtcgcgtcatccaactgatggaaccttacattgagatacaaagagcttagcgcgacgaagatgttgcgatccatcgtgaggcctctcctcagtaacttctctgtggccgcagtgccaagctgatgaacgactgaacgacccgcggccctaataggcttgcagtctatcgcgcttggcctgccatttggtacctacttgtctactctgacatcggcgaccttccatngttggacgactcctgacccgaggcgagcgatggcagtgtgacaaccgccattgacacctgtgtgctgaggagcaactcgactaactgcagcgacgagaggcacgcgagtatggcacgttcgcggaacgggacgtcaaccctacatgatgatatctccaggggagtcatgaatggacgcatgggacgagtgttactgctgggaccataggtcctccaaacggccaccacgaagctgcacgccactgcaaaacggcagtctatagaggattaccctcgatagctcgccttgggggctaacggagagcgaagcgtttatccgccgcgggacgggtagtaatccctttggggttacgaaacgggtagcaacgaggccaaactaggacccgacgtcatctatcggcccaatggagaggaatctcttccggaaagcacaacgcgagagttccatcagcagggcccgaacggaaacgaaggggttgggagccccctactcgcaaacggttccaaccgctagaaaggagacccctagcgacttccatttggcaatggaagaacttcccaacagaggagaacacccccaattgtatccgttcaaaacaaaggcagcactgtgacacactgttacccttccattttatccgaagaaacaccagccggaatccagcgcatacttgggcactataggctcaaattgggaacggttaccgggcgaaaactggcggcgggaggactgaagacactgggttcacatttccgacacgcgtgaactaccccgagggttaaaacggattggatggtttaccctcccatgacacgggacacccaggaagacccacggaggttaccataactgttgacggcgctgacagcaaattgtgggtggttctccgtcccccctgtgaaccttatcccttggcccacgtcgtgtaaacaataggaacacn

SEQ ID NO: 603116 - DNA, 920 bp, Homo sapiens
ggactagcgggccggccgggccaggacagcgggcgggggcggcgcggacctggccccgggatggctatgtccgcacctggtggcctcggtcaagagggagccgccgccgtccgtcggtcggcgacagcgggcttgaggctgcagttacaccttgcccaatctgccttggaggttctatcaccggcccgtggcccttcgggcagtttggggcccacaacgtctcgtggggggaagtggtctcaaagccctgccttggtggtttgcctcattcccccgtttgtgcccaatttgtgccctgccttgcctttttgaaccccaatagagggtggacagggcccaccccatgttgggatggacgggctcctcatcttagaaaagggcggccgtgtcgaaggttgcaaacaaaaagggtgtgccctcctggggcaaaatcatgagaggtgacaatttggggtctgtgcctgaaagggtccagggagcacgcatggccaatgggcccccatgttgcgtccccgggtgtgccccacattacgaggcttaatcccagagaaatatccccaaaggtcccatcatgagcgcgttgccgtatgggtgccgcacgtggacaggcggaagccgggaaagcacctgggggcaaagccacggaagagacccaaactgggggtggtgcccatctgtcgaatggcttggggtgacccagatacaggagaccaagttcctgcgctttgtcacgagacattccctagacccttcgtgacccagtttgcggaggcgtcaaggtgctggctgctctggactgaggaagcgacccctgcttgggtaggtccgcttgccgactggtggctacggggcagagctacgtaaggcgcgcccgtatagcagcggaagcgtccgagttatcgacacttggttttcgttct

SEQ ID NO: 603117 - DNA, 562 bp, Homo sapiens
  misc_feature (7)..(7): n is a, c, g, or t
  misc_feature (23)..(23): n is a, c, g, or t
  misc_feature (52)..(52): n is a, c, g, or t
  misc_feature (58)..(58): n is a, c, g, or t
  misc_feature (79)..(79): n is a, c, g, or t
  misc_feature (89)..(89): n is a, c, g, or t
  misc_feature (114)..(114): n is a, c, g, or t
  misc_feature (141)..(141): n is a, c, g, or t
  misc_feature (157)..(157): n is a, c, g, or t
  misc_feature (167)..(167): n is a, c, g, or t
aaaaatncttgccctcttaattnaatgtcctggttgttgttgtgtgtgtttnaaaaanaagtgaacttccccaaacccntctttagaanaaatagattgctggaaaaagccaanagcaagccaacaaccccaagccttcgnaaggtcctgaactggnaattggctcntgaagccccctctgcaagaggaaagcccgaagaaagggaacaagagggcaaaaccttcgggtaagaaagctccaagctcccggggccgtgtggggcctcgtgtagaaaatgaacccaagggtggctgacaccgtcgcccgcactggcttggggccaacttttagggagtcattttgcagctttatctcatttccctgctcctccaaaatgccagggcagcataagggccctccgcctcctgcgcccacacgcacctgtcttaaaaaacagagggagggccaggcaccatgctcatgcctgtaatcccagcactttgggaggctgaggcgggcagatcatgaggtcaagagatcgagaccatcctggccaacatggtgaaacccagtctctactaa

SEQ ID NO: 603118 - DNA, 502 bp, Homo sapiens
agccagtagccagggaagtacaagtgacagtctccccaggaaagagagggtggggtttgtctagaaaggaaatatttggcccaaatgtcatcctacatttcttatattttcaatgggtgctatgtcctgtgttcctcttatctgaaaatgtttccttttgtaatttatatgtagaattttagtaagtaggtttaaatgtaatccattgattctaggcaggaggaaacgctcaagaggcatctttggtgccaaggtaaacagctaaagctcaaatctttccctggccatggctagtagtttcaagttacaagaaaccaaaaacctctgaactctacaggaagagatgtctttgagtgcaaacatttctgaattcaaagtacacaacttagaggtaagctgactttatgttggaaacacctgtagttgtcttggtactggaaggctgatgcaactgggaggggagtatgaaatattgcagttagttaagagggagtctggagtt

SEQ ID NO: 603119 - DNA, 140 bp, Homo sapiens
cagacaggatgtcggacatacttcatgatgggcactgtgcggaaacttgacgatcgaaatcagtgacgctgcatgcacttgaaaggaatggcctgtatcctcacttgagagcaaggtccatcgaccacagccctgttctg

SEQ ID NO: 603120 - DNA, 303 bp, Homo sapiens
actttttatgtggcggcaggaaagagagcttgtgcagggacactcccatttataaaactgtcagatctcatgagacttattcactaccatgggaacagtatgggggatactgcccccatgattcaattatctccacactgccctgcccttgacacgtgggggttattacaattcaaggtgagatttgggtggggacacagccaaaatatatctggcttatgcaatctgatcaccccttccgtacttctctcttttaattgcaacattctgacagcatgtggaggcttggatggaaacccggta

SEQ ID NO: 603121 - DNA, 1333 bp, Homo sapiens
  misc_feature (1)..(1): n is a, c, g, or t
ntctccatgacgctcgtgctgcgtctgcttctgtatatttgtcgcgggctgtaattattttgcgcgagctactttggcccttcgcctttcttggccccctattcgctcatgggtcttcaagacgccgcggtggtcctcgcgtcggattctccccgggttttgttgcgcacacgcgcgcctttattatgggccccctgtgtggctctcttggctgggatattcccctcctgggggcaaccgccggttcgcgccgttgtcgcgcaccacctggtgtaactcttgtgtggtaatatgtatgggccacacaacggggttacacccctggtgcctttttaagaaaaacggcctggatttttggaggaaccacatagggaaaagtggttctgttttgttcccccgcgttgaaaaatggggggtcaaccctttggagaaacccccttttgccggggttcataatgttcctgcggtccttgaatggggaacggttgaggaaaactctctcggggatagggcccacacggcccgagagtccaaaagggggtccccccccgagagccccttcggggatatatctcataatagggggaaaaaaggtcgcaagagaggtgtaaaaaacggtgttctcaggccccgggccccccgtgtgtggccctgggttaaatatagaggctgggaagatttgttcccaacgagtttatacaaaaaatagatctactctctctacccaggggaaccccaaaaaagtggcacaccttggggcgcaaaataaattgggtgagacctgggaagatctttttccaagagcttaacatgtatagggtgggcgccccttaatacgttgttcctttgagattgcctgtgtgccacagggaaaaggtggtccccccgtttggttcactgctggttttgtgggggttgtggggggtaatttcgccaagaagtacctcacattttgagacactaatagggtccctcttgtcacgagaatcctctatccccacgagcacttaatatgctcgaggcacggaggccaccacatggagttgaattgtaatccacactcacccacattgagcgaatggccattgaggcgctatagctagccttaatttccactcacctaacgtgtttttgaggcttgctcttaacgttttaaagaggtggcccggggtacactttttgcacctgaaattctaaaaggtgtttttaaaaacacctctttcaccaccaaatagtcctttgtcacttacattatttactcatgtgtttgtacatttttgtatgttaatttatgaatgattttttcagttaaaaatacatattccaggaccca

SEQ ID NO: 603122 - DNA, 564 bp, Homo sapiens
gcctgtaatcccagctctcagggaggctaagaggcgggaggatagcttgagcccaggagttcgagacctgcctgggcaatatagcgagaccccgttcttcagaaaaaggaaaaaaaaaaacaaaaaaagacaaaaaaaaaataaggcggtaactttcccttcaaaagcaacaaccccttccccttccctttttggtataatttaataaaggaaagggtcgggttaaaaaaaaaaaaaaaaaaaaaaaaaaaaaatttggggcgcgggcctcgggcccccctggaaaaggtttttaaaaacaacttcgcgtgtggggcgcggcggcgggccccccacgagggctaagcgagcgaaagcggggcaccaaaggcgtggtctccacagaggagaaatgcggggtccaggacataggggggggggattctcccccaattaaaaaagagcgcgcggggggaaccgaggagcgggttgggaacacatccaagagggagcagtgcgggggccatagggggttcttacaaaggggggtccagagagaccgaatatcatagccccgcggggggc

SEQ ID NO: 603123 - DNA, 335 bp, Homo sapiens
  misc_feature (24)..(24): n is a, c, g, or t
  misc_feature (328)..(328): n is a, c, g, or t
caacaaaagcggacagcaacgcgngatccgagccgcgtctgcaacctacaccacagctcatggcaatgctggatcgttaacccactgagcaagggcagggaccaaaccccgcaagcttatggttcctagtcggattcattaaccactgcgccacgatgggaactcctcctctgggctttccatactcctcctctgatctatagttctgtttttgtgcctgtaccatactgtgttgataactatagctttgtagcatagcttaagactgtgagcctgatacctctcgttctgtttttcttttcaagattacccgcttttgtgttccggngatcctc

SEQ ID NO: 603124 - DNA, 1104 bp, Homo sapiens
  misc_feature (14)..(14): n is a, c, g, or t
  misc_feature (90)..(90): n is a, c, g, or t
  misc_feature (99)..(99): n is a, c, g, or t
  misc_feature (107)..(107): n is a, c, g, or t
  misc_feature (117)..(117): n is a, c, g, or t
  misc_feature (146)..(146): n is a, c, g, or t
  misc_feature (149)..(149): n is a, c, g, or t
  misc_feature (158)..(158): n is a, c, g, or t
  misc_feature (160)..(161): n is a, c, g, or t
  misc_feature (167)..(167): n is a, c, g, or t
  misc_feature (180)..(180): n is a, c, g, or t
  misc_feature (191)..(191): n is a, c, g, or t
  misc_feature (234)..(234): n is a, c, g, or t
  misc_feature (272)..(272): n is a, c, g, or t
  misc_feature (357)..(357): n is a, c, g, or t
  misc_feature (418)..(418): n is a, c, g, or t
  misc_feature (421)..(421): n is a, c, g, or t
  misc_feature (432)..(432): n is a, c, g, or t
  misc_feature (449)..(449): n is a, c, g, or t
  misc_feature (477)..(477): n is a, c, g, or t
  misc_feature (525)..(525): n is a, c, g, or t
ccccacagaacctntcccagccccttggacctgcaagttttactgagtagattggatttaagacaaaaaagcaagtccccccattgagtntcccacttntttgcccntgcccctctncagctttttgagacaaacacaaggagccnttnttttagttntnnttgatntgcttagatcttntgcctgtttantaggcatcgtctctccagccttgaggggaggcttggatttctngggttcctgttagtcaacatgggaggaaaaagcttttntttaaaaaattggacaatgttatgtgcgttgtgaagtgtgttgtgttagattttattagttttttggttagttggcgaggaaatnaaaaaaaaattccaatccttacaatctttcctcttaagcgactgcgctcttctcttcaccnccncctaaacacanagtttgacagaagaggngtttttatgttagcttgtcttatgaggnaatttggcctgtgtcttgggtgggtttattgggattgtggggcgatcnccttgggtttctttggagagcacgcttctttatgcttactcattagagatgggatttgacttttatttctttttatagtgcttaattcaccattatgagaaatgcttccagtcacaaaaatgcagcccagctcactctgaggaagaagcaggacttggtacggttttacacaactccttaccattaaactgaatcagaaatccattttctggctgaataaaaagtttggcttgcctgtgtaatgcccacccccttccccctggctccctagtgatgggacatatatgagagagaagtgtttttctatcatagacaccacaggggaaagtttggggatgaaggagagcttaaaggtgtttcaattaagttagaaaactgacacaggctgttgagaattctttgccacttttcccaccccaaaacagcatggggcctgacatcttctgccctggtcccctttctcttgatgtggaaagtctgaatgcagtatttatagacttctaaggttttaaaatccagtatcaaggaggaaatccggaattctggtttgttgaattaaggagtttaggcattgttaaa

SEQ ID NO: 603125 - DNA, 771 bp, Homo sapiens
cagtgggtcaagcatccctctgctcttggatctgctccaggctgtgtttagttccactggttggaaagctgtctctgtgcccggaccacagagcataaaaaactaccgctgtgtggtgagtcctggtgtctgggtggcagatcctccaccttggccttcttcaaaaacatcatggctattcttgggggcagtagagagaagtggatacaagcatagaccctgtcttaagacaagaaaaaaacagacaaaaaaaggcagcacccagggctcaggttcaagccgttagcccgctatttcccttaccacgtggcccctgcagttgcattcccggcctgagcttcgcctgagagccctcatttgcaacacggggtgatcagtgcccttctccacaaaacatggctggagaattaaatgaagtaatgattgcaaattacctgggcaaattcaccaacaaccagcggaacaccggtctgcacttttccttcccccgtggccacgacctgtgactttgggccagcattcagattgggcgtgggcagggactccattcgttgcagctggtgaattatgtgatgcgaccctgtgggtacaccagattgctgatccttgagcacgatggcctgtgatgcccagaacaagccgttcatggggctcacgttgcaagaaggctggctggaaaattcaatgccagagcattgctctgtgccaccagagacctctttgccgtgtctccaatgtgccccaaaagccccaaatctttggagcctccct

SEQ ID NO: 603126 - DNA, 131 bp, Homo sapiens
tgggatttcactgggatggtgatctcgttggactgcgtggctagcttgggcatgggggcctccacggtcagtgtcgtggttgggttggggtattcgtattcgaaagtgtccacacagtcaaagccagtgaa

SEQ ID NO: 603127 - DNA, 1037 bp, Homo sapiens
tatcatgttgtactgctaattgctgtccggacactctgaaagcgcgaacaccttccttccatgtggcataggccgtagactcgctaccttgcatcaatcatagcgtagcgtagggatgtcccttcaaagctaatcgcctgtggtgccaggggcacacactctaggtttacccctataggacacgaattggcttcgaatttcatggcatgctaaaagtcagatacttatgacagggaataaggtgattgtgttatcatataatcaagttagatagtgctcgaatggagagtcccgtggcgaagaagcgttagtgtgtgcgcaggctcaagttgcagactaatggtctcgccgatgtgagaacacccctgctttgagtgatctaaggtggtatatagtccttcccgagggaattatgtgggcccaggaggcgcctgtgctcgcaagatttgcatgggtgccatgtggagcctaagtcctagatggcgggtgcgccttcactcctggaacctttattaaccatgataccatggagaccgttactgggagactcacggattctttgtggtatagtgaccccaggtgtgaccatgcaagcctacgtacacggaggcactctatatgttagacgctaccttaccattgcggctgtgtaaccacagattctggctctgaactagtgtgggatggtcgcacatcccatgaaaacacacgaaggggaggcgtcagctccaccagggtgttctgagtagtgcggtgggattgcatgtcttcggggcagagctctggctgtcattgcggtgggcgaccgagtgctccgcgtgaaaaataacgcgattgaggacggtgcatgcctgtgtctgttaccttttaccagagggtcctggactgaagtctctgcctatatgaggcccagggtatggtgggccccgcgaaggcgtgcccccggaggcgtttcacgggggacctcggacgcccccggtgctgtttaactgttttccccaaggggttttggaccgggatgggggcccacgggccct

SEQ ID NO: 603128 - DNA, 374 bp, Homo sapiens
  misc_feature (76)..(76): n is a, c, g, or t
ccttttaggaacttccgtccccttccgggccccccccagccccccccccgggttcgggtccgggtccagctccagnttcggccccaaccttgggttcagcagcttcccaggaaagggcagagttttaggtgcctccccggccagccttccccaagggcccccggagttcccccggagacaactgccccagtgggggacatggctcggagggcccagcgcccggggcccgcccggcccccccttccgccccccccggtccttggggagcccccggaaggaaggggaggtttgcctgctcccccggggctgatttttttcttgcccccctgttttttgtaagggtgggtaattaatttttttgggccaaactggga

SEQ ID NO: 603129 - DNA, 273 bp, Homo sapiens
  misc_feature (26)..(26): n is a, c, g, or t
  misc_feature (48)..(49): n is a, c, g, or t
ggctggggttccctgtgcccaagggntaccacgcctcctctcaccccnnattcccaggtggcaaatactgcagcatctaggctactttctccaccgtcccgtccctcatgctcaaggccctacacactccctgacaaccggtagaaagacactattgcatagtgatgactgataacgcacacagctatgagtgaacagacaagtgccactaaaaacagacaagagaacacgcgttcaaatacaagcgccacatacgagggtaatatactaaag

SEQ ID NO: 603130 - DNA, 186 bp, Homo sapiens
aaaatttcccttttttttttttccccccccccccgttttggccggggggccttcccccccccggggggggggggggcttttttgggcccccccaaaaaagcccccttttccagggggggggggggtttttccccggcccccttttttcgtgggggggggttcctttaaggttttttttccccccga

SEQ ID NO: 603131 - DNA, 147 bp, Homo sapiens
gtaatccaatgtgggtttttttttccataattaattttgataccaaagggtgtgaaccaaaaataatttagtcacgtgaaaccttttttccagtcatagtatttttcattcattataataaaaggaactggcttttaaaaaaaaaaa

SEQ ID NO: 603132 - DNA, 359 bp, Homo sapiens
aaggaattaatttgatctaaattgaactttaaaatatctggtttttcttttttctttttttaagacggagctccccctgtcacccaggctggaatgcagtggcacaatctcagctcattgcaacctccacctcccgagttcaagcaattctcctgcctcagactcctgagtagctgagattacaggcatgcaccaggacacctggctattttttttttttctttttttagtagagatggggtttcacagttgatgaggctggtcttggactcctgacctcaagtgatccacccccctcagcctcccaaagtgctaggattacaggcatgagtcactgcgtcaggccaaaattctgtatt

SEQ ID NO: 603133 - DNA, 263 bp, Homo sapiens
tatctcattgtacggttgctgttgttctgctctaccagctctgtagaaactcccagacacttttcctatgtactaggcattttatttggattgacttacaaactcttcttactcattatcaatctcggattttttaagtggtgcagtgtaatgagaaataggtcaagtttctgcctctgattagccgcacagccttgaacaaatcacatttcatctttgaacttacctctactgttagactaggtgactcgtggaaatgtcca

SEQ ID NO: 603134 - DNA, 339 bp, Homo sapiens
  misc_feature (71)..(71): n is a, c, g, or t
  misc_feature (272)..(272): n is a, c, g, or t
  misc_feature (279)..(279): n is a, c, g, or t
  misc_feature (313)..(313): n is a, c, g, or t
  misc_feature (323)..(323): n is a, c, g, or t
ctgaggcaggaggattgcttgaggccaggagttcaataccaccctgggcaacataatgagacccccatctntacaaaaaataaaaaatttagctggacatgccagcgaatacgtggtcccagcaaatcaggaggctgaggtgggaggatcacttgagtcaaggaggttgaggttgcagtgagccacgatcatgccaatgcattccaacctgggcgtcagagcaagaccacgtctcaaaaacaaaacaaaacaaacttttatggttgaaagtnttttggnaaacatacttaaacttgaaattgtgaatctttgntggaaaggancatgttacctgtaaaa

SEQ ID NO: 603135 - DNA, 218 bp, Homo sapiens
ctttcagacacctatctctgctggcaaagagctttcttctcttgcttcttaaactttcactccaacctcacctttgtgtttacactccttaatctccttagaggtagaacaaagaactctggatgttatctcagactacgagagactgttacatcttggtgcactgctgagactatgacacttggtttctttgagtttgacttaaatattttacatga

SEQ ID NO: 603136 - DNA, 526 bp, Homo sapiens
  misc_feature (44)..(44): n is a, c, g, or t
  misc_feature (66)..(66): n is a, c, g, or t
  misc_feature (118)..(118): n is a, c, g, or t
  misc_feature (153)..(153): n is a, c, g, or t
  misc_feature (157)..(157): n is a, c, g, or t
  misc_feature (164)..(164): n is a, c, g, or t
  misc_feature (170)..(170): n is a, c, g, or t
  misc_feature (172)..(172): n is a, c, g, or t
  misc_feature (193)..(193): n is a, c, g, or t
  misc_feature (213)..(213): n is a, c, g, or t
  misc_feature (219)..(219): n is a, c, g, or t
  misc_feature (225)..(225): n is a, c, g, or t
  misc_feature (273)..(273): n is a, c, g, or t
  misc_feature (298)..(298): n is a, c, g, or t
ggggcctggaactgccggatgcctccaaggcctaaggtaagcgnccctcgtcactgcaactggctntcctggggatgagatgggatccctcatccaggctacagccggtggtggtgcnatccacactcccacaatctctgttgggaagaaggncacngagactntctaangntgccggatccctgtatcctcnggactctaatactctaacgntgtccntgttgntgattccagtggacgtatctctgtgaaaaacacaagccctttttgtantctatttgagcagttggaagtttantagctttccaaccaaccaatttctgcattcgagtcttaaccatatttaagtgttactgtggcttcaaagaagctattgattctgaagtagtgggttttgattgagttgactgtttttaaaaaactgtttggattttaattgtgatgcagaagttatagtaacaaacatttggttttgtacagacattatttccactctggtggataagttcaataaaggtcatatccc

SEQ ID NO: 603137 - DNA, 209 bp, Homo sapiens
caactcgcgtgtccaatatgaaaactgggcacaaaccatgcaaagtgtggatttgtgtggagcacactttgaatgggccatggaaaaatcgagcagataagaatgtctttccagatcacacacagtatcatggaaatgagttccttctcacagtccgactatttgacttcatcagtattcggattggttccatcgcaactcaaacaatg

SEQ ID NO: 603138 - DNA, 1300 bp, Homo sapiens
taaagcaaaagactattttaatcccagaagttatctcaacagtgcattggtcttttcataaaaaaattacgtaaaaatccccccaggaaaacaaatactaaataagagtgaaatcatattttggaagcctctgaagtcatagccgagcaaatgaaccggcctccgggcctcgtggtggccaacagcgaagaatcaatcagcctggggtcaagggacaaacacttaggacgtgaacgtgaacccctccccatgaacacaagggtttaatccttatcctttaaaaacgagggtcggaaagtgaagaacgtggtcaactattcccataacttcacttaatactctatctctccaagtggttgggtacaaggtgccatggagtcaagtggttcaaacacattgaaagatcatagataggtgcaacgggtacactaactctcgactttttcacaaacagaatctactcttaagtggcccaatcttcagaaactacgagatagcttatacacacaaggcatacagaaacacaaattgtgcggcgacacaagactcttcaaaacaccacacccaggaaaaacgaggactacagtaagctataattagaggcgggatacaaccaaatacacacacccgtggacatctcggaccacacacacaaccacggccaccacacaacccctcagtggcatcaaccacccaacaagcgcacacatcacacacaaacgacatccgcccgacttacccccagtggctcaaaccactgcgggacaaaaacacatacccgcagtaaaagaactcgctcgagcagaccctcaccaccgccacagcgccagacacgacacacgacaacgaaagggggcctacccacacaacaagaataactagcaggttgcacccacgccacgaactatgcagggagagttacacccacacataggggggggggggaacatacaaaccggaaaacacatacagaccataggaaacaacggcaaccacaactgcgacattgcctcggcgagaacgtaaaccacatacggggggacattaaacaaaaagaatctacccgaggaccacaccaacaaaaaaacgaaagcaaaacaacgagaaacaaacaggacaagaacacacgcaacacacacaaacacaacacacaccagagaacaagaacaagccacacgagaccacaccaaaacaagagcagcaacagagaacaaccacgaaagaagactcatcaaaccgccgcaccacacacaacaaaagagaaacgctagagcacacacacaatcagcacaaacaaaac

SEQ ID NO: 603139 - DNA, 118 bp, Homo sapiens
cgtaacaactaactaatactaacatctcagacgctcaggaaatagaaagcgtctgaactatactgccggcatcatcctagtcctcatcagcctcccatacctacagtgtcctgggcca

SEQ ID NO: 603140 - DNA, 844 bp, Homo sapiens
gcaccatcagcatccaggatactggtatcgggatgacacaggaagagccgtggtgtccaagctggggacgatgcagatcggggtcaaaggcttcctggatgctctgcagaaccaggcgtgaggccagcagctaagatcatcggccagttgtggagtgggttctctactcagctttcatggtggctgacaagagtggaggtctattcccgctcggaaggcccggggagcctgggttaccaggtggctttcagatggttctggagtgtgttagaaatcgccgaagcttcgggagttagaaccgggacaaaaatcatcatccatctgaaatccgactgcataggagttgttccatgcgaggtccgtggtgcgagatgtggtaacagaagtacgagcaacttcgtcgagcttcgcccttgtactatgaatggaaggcggatgaacacctggcaggccatctggatgatggaccccagggatgttcgggagtggcaacatgaggagttctaccgttacagtcgtcgcatggctcaggacaagtccgccgtacaccctgtcgctataagacggacgcaccgctcaacatccgcagcatcttctacggtgcccgacatgaaaccgtccatgtttgatgtgagccgggagcttggggctcagcgttgcactgtacagcgcaagtcctcatccagaccaatgccacggacatcctgccaagtgggtggcttcatacgaggtgtggtgcaagctgaggacattccctgaacttcaagccggaattgtgaggaaacggcctctcagacctcgggaggttaacagaaggcggacaatctcttgaccggtaaaaaag

SEQ ID NO: 603141 - DNA, 1741 bp, Homo sapiens
ggtaagagcgtccctacggatgagcacggatgtaagaccgggccatctcacagtcttcctggggatatgaggctggagagtgattcacatgtctggtgcggtggaagtgtcgactcgagccgcgtactctcaaggctgatgcaaacgtacgagacgtggtggcagtgcttgggcatgcaacttgtatcagcacaaccaaccacatgggtagggttagctagggcacttggtggcgcatactgtgagaagagcacgattcgaaggagcgtacgcggtagccattcagaaaaccatagtacttatgctttgcacgtgactactctaggtgcagtgcatactgactaataaagcgtcgcttcgatactaaaagaacactcgggactggtacagactcttagaggatgggcaacggggccattaaacgcagagggataacgtgcttagggaagaatgtgggcaaggcgcattgaagggaagttgggcagaagtacacgtcgacgtcgtgagacgagagggaccgtttcatggcaccgcatctgaaccggaaagatagcatgccaaagggtcaatccctgcggtgcaatctggggcacagaagcgccatgtactggccgcccttgcattcaacttctttgaccgccctagcacagtgagagggcccccacaccctgtgacactggggcagcaatcgcgaggattgaaaaccgtgcaggggcgcacttgggtggtacctgaaagtaacagcctcgggagaagtagagagtgcgctgtcggacagaagggtggcttgggagcccaagaccaacgggtgtaccgcttgtgtgaacacaccaagagggtgcttgtgtgcggggccacggtggacctgggaagcatgtggacctccaggaggggaatccagatcaggggggagaatggaacacgacaaatgggagggcggagacacagtggtctataaccaaaagagggagggggctaccatcaccaaaactcaggatatgttacgaatgagcgccaaaagcaacagagcaatgaaccgcccttggaaaagaaacccaatcacggaaaggtgttccttgctcgccaacgggctgggaccgtgctaaattgagcgacggacaagtgaaggaggtacctagggcaacgggagtataagcggcatttcccacatggtgagagaacacgagaggccacgaggaagccagataaccaggggctacccaacaccaaccccggggcgatgtgtagcaacggacccaaggagagaaaatgcacaacatgaaaaagaacgacacggggggacacacacaacacaacgaggaacaaagagacaacgagtgataacaacgaaacacacaagaggacgccgaccaaggagacacagtgaaacaccaacattgagagaacgaagagcaatgaaaactcccacggagtggagagcaagactgcaccaacaagcgtgaaagcgagagacacaagacaagggaagaggaagagaaacagcggtgtgtggagtgtgaacaccacacgagagaggtgatccaccacgtaaacaggatgagaaaaaaaaaagaggtgaggaagagaaaaaaaaaaagccaaaacagagcaggaaccacgaaagaaatgacacaagaaacgaacaaagcagccgagacaagaatcaagaaaagacataagagtagtatagtaactaataggctgacaagaacaatgaacaagaaagacacaacaaaagatg

SEQ ID NO: 603142 - DNA, 1091 bp, Homo sapiens
  misc_feature (561)..(561): n is a, c, g, or t
ggatggcttaaggtgcggccccggtggggtatggaggtgacagacgacgacagtggaagagtcaggctccacattcagaggcatctagaaacgatactggcatcacacggcattacagtgatgactgcatgaatacatatgtgtctaagtagggtaacagacaacctcagatgcactgcacatgcattatgtatctgcaggataagcctcatgttcaccaggactaacagcatttagtttggcattctctgcatactttatgtcgcataccttaagatactaactagttatacatagaatgaactaagttaataatacatgagatcgagtggaaaaggaggggaatgggattgtgtagggagatggctgatctcatggatcaactggtggagcaacgatacgacgtatttcacacccatatggtcattgttgagacactatcagaggatcataattctctagtgctctggtcctttcagtacattatcatcaccattatctatgccacgtatgacatcgactactgtcctctttgtttcaaggaattctgctactaactanacattaaggcggccaagattatgagttacagttatcctgattaactagtaataatattcactagtatggacacactggtcagaggagaaatgactgagttatgcaataacaatctgcttgggcgcgatgaatctggaggaacacaggaggcttcacgccgcgagaagactaggtgctggctctatctcctggtacggcctaaaaatcgcaaaggaaggtcatgggcaataggtccacgcgcacagggggaagaacttcttgctcgcttgcttggcatgatccttcgggatgttggacacgacggctggcgagtagaagactcttccctttggaggaactcagaagggggttctacaaaagactattttgtgggcctacccgtaatatacggttgaatctataatttttttggaaggcttcttctgggggggaccaagtaatatgaggagaaggtttgagcttgcaattgaatttcatagatattagactagaggttcttgagccaattaaaaaagacagcaacaggaaga

SEQ ID NO: 603143 - DNA, 694 bp, Homo sapiens
aaaacgccaccatacccccccacttttgaacatcataaccctacaggttaaaagcaaaaatgcacataaaagccccagaaaaaaattgggctttatacaaaacccatacttctttcaaaagagccaattccttcatgcgttccgcgttaaaggattctcccactaaaaccccccaattaaattaaacgcaattaatctaatttccccctctctttagagaccccatcctcttcactccatacgtaaggtttaagacaaaaaatttctcgttagcgcatgccctttaagtcagaaacttcagtgtcctcaccttaaaaagctgtgcccttttctttaataaaaacctcgcaacgtttagtatcttaggggagtggtccccactactttgaggagtcccccggcgctacatgaattcgccaagacaccttattctcggcgttaaatgccactttacactttttttttccagagctttgttaacagtttttcacagtttttaataaaagccctgtacaagctattctgaaaaagcaccatacaagttaaaaactcgttctcctcccacccatcgtcataagtcgttgaaaaccgctaggtgaggtgtgacaaattttttccttgctgaggccccttaatgtttggcgactttaaatgaccaaaaaacaaaatacattaacccggcaataacctaaaa

SEQ ID NO: 603144 - DNA, 695 bp, Homo sapiens
ggggataaaaaagattagacgcaggcctggtggctcatgcctataatctcagcctcccaagtaggtgagactacaggcacatgtcagcatgctcggcaatttcttgtagtcttaaactttgctgtagagatagggtctcactttgttgccccggctggtctcaaacatctgggaggatcacttgagcccaggagtttgagactgcagtgagctgtgattacaccattgcactccatcccaggtgacagagtgagaccctgtctaaaaataataataatgaggctgggtgcagtggctcatgcctataatcccagtactttgggaggctgaggcgggcagatcacctgaggtcaggagttcaagaccagcctggccaacacggtgaaaccccatctgtactaaaaatacaaaaattagctgggcatggtggtgcatgcctgtaattccagctactcgggaggctgcaggcaggagaattgcttgaacccgggagacggaggtagcacgtgacccgagatcatgccagtgcactccagcctgggtgacagagtgagactctgtcgtcaaacaacataacgaaataaataatcagataataatcaatacatacaatacaactaccttgcaacaagccccctagatagactacgaagcctctgtctgcaacctgctgggggattcccaagatacccacc

SEQ ID NO: 603145 - DNA, 121 bp, Homo sapiens
cccacgcaacctctaacatttcacttgcactaaatctgagttcagctaccgtactgtatcctggaatcagagaagccctagtgttggggacaaaacaggggatgggccagtactggcatct

SEQ ID NO: 603146 - DNA, 346 bp, Homo sapiens
ccttgcctacattttaaaaacctaaagctgggcatgatggccccagcctgtaatcccagtgattcaggagactgaggtgggaggattgctaaaagccaggagttcgagaccagcctgggtaacatagctagaccccatttcttaaaataaaatagttaatttagccaggcatgatgatatatgcctgtagtcccaactacttggaaggctgaggtgtgaggatctttgagcccgggaggtcgaggctacagtaagctatgttctcccccctgtactccagcctgggtgacagagcgagacccagactcaaaaaataaaaataaaaaccctgaatattttcctttta

SEQ ID NO: 603147 - DNA, 251 bp, Homo sapiens
tctggcaagtggaagttcgtcaccagtgcatcgaccactttgtactggaagcccggatagataaagatttgggtatcgtcgaagaacggttcaatgagatcgtttttcgctgcctgagccgcgctttccagcgaacgtactgaagtggtgccaaccgcaatcacccggttaccgcgcgctttcgccgccagtaccgcgtctaccacatcctggggtacttcagcgtattccgagtgcatgatgtgatcttc

SEQ ID NO: 603148 - DNA, 260 bp, Homo sapiens
cccagctgtcgctcccgcttttcggcttcacgactcttttcccctggctgtggacctggctgcttggattggtctgatggagggcgatgaaaccttcccaccctctgtcagcgccagtggactcagcaccccatcctcagccaagtgcagcaggcctgtgctgatgacaggacccagatcacggacagcacggttgtagcgtattcttcaacacgcagcaggctgtcatcctctccaaaaagcaccttggagatgtggga

SEQ ID NO: 603149 - DNA, 1113 bp, Homo sapiens
gcagccatgatggaagtttgagagttgagccgctgtgaggcgaggccgggctcaggcgagggagatgatgatgactggcggctggcctgtggccctggagccccatctcatgctgcctgtgagcagccgctgggggcagctgccctcggggagcctggccggcctgctggctggcggcagctggctggcgtttctcgcctcctcttcgtcttttctaaccgtgcagcctcttcctcggcttctcctgaaagggaaggtggaagccgtgggctcgggcgggagccggctgacggcgcggccggcggcggcggcacctcccgctcctgcgagcggcggggcagaacctggctggcggctggccggccgctggccggctgcagctccagggcagggggtctgagtcgcctgtcaccattttccagggctgggaacgcctggagagttggtcatctccccttctactgcctccaacactggcggcggcggcggcgtgcacatccagggacccgggccggttttaaacctcccgtccgccgccgccgcaccccaccgtggccccgggcttccggaggccgccgcgcggagtgcagccgttccggaggattattcggtcttctccccatatccgctgccgacgttgccaggacctctggctgctgaggagaagcaggcccagtacgttgaatcatccagcagccgctgcaggacagccattaacctggctgcggtccagaagccatgcggcggacaagcagcgatgggcctcatgtaacggccgagtcacgagcatttcattctgcagaaagccccgcacagcagtctgcatcttctcctcttttcttcagcaaaggttccagagctagaggcgtcaccacacggatccttgcccgaaccacggcgcaaccccgcaggcctgcctcaccctaaccttgaccctattatcccgccactcctgccactgcatcccccgcagcccacggcgacagcccttgagcgccgcgcatctcacccccccacccgccccactcccgcggcaccacacgcaccgtcgccccctcgcccccccaccctccacgctctcgctcccccacccctgcccccctactttcctcc

SEQ ID NO: 603150 - DNA, 808 bp, Homo sapiens
ctttttccatatcagcaagaaagctgttttgcttccttatcatttgtgtgttcactagagtggtgcttttaatttcttttaagaatcttccctttgcatttacgccttggcttaactgtttggcacaagaggcctagctttcagcctgtctcagctttcaacataccttcctcactaaatgactaagcttatcatttctagccaaattaaagtgagagatgtgcaactcttccttctacttcaacaccatagtagggttattaattggcctaatttcaatagtgttgtgtctcaatgaatagagaagcccaaagagagggagagagacccaggaatggctggttggtagagcagtcagaacatacatacctttattaaacagtttgctgttttatatgggcttggtttatggctccccaaaacaattacagtagtaacatcaaagatcactgatcaccattaatggatatagtaataatttaaaagtttgaaatattgtgagaattaccaaaatatgatgcagataggaaatgaacatatgccattggcaaaaatagtgctgatagacttgcttaacacagggttgccacaaatcttcaatttgtaaacacatgcagtatctttgaagcacaataaagtgaagcataataagacaaggtatgcctgaataattacagcatcagcctaccttttagtcaggaaatatgttccctggagtggacactaaataaaacgtacgtgacagtgcagtttaactgtttttctatgtactaaaacaattacggattagataagaacggagggcttg

SEQ ID NO: 603151 - DNA, 127 bp, Homo sapiens
gcatctctgggtgcacacagagaagtacgagagcgagaggcgcctgggatctgagaggaggctgctgggccttcggggtgagcccccagagctagacctgagcaagcaggagacctgagcaagccag

SEQ ID NO: 603152 - DNA, 783 bp, Homo sapiens
ggaagatggctgaacgttgggctgcagtccaggcgagcgcggggactcggaccacagagcggcccctagctgcttgctcgggcagctgcaccacctgcacctgtgtgccctggagccacgtcgcgggaagctgcagccccgggtcaccgaggagctactggcgagtgctgtcctgagcacgctctaaacgccaaacccgactggacatgcttgtaccctactaccttgaactaacgcccagctggtgggcttgccgctgagccctgccagtggttgatgccggtgcacatacagccaccctctgagaactggcccaacttatcatacaaccgcgggactatggtagcgtgtacactagaccttgccacgcgccctgggacacacgacattacggcaatggcacaataagtgagcaatagcggtacataggcacggatgaccaggcccgggaaggggtactatacggctaacaccggacacatgtagaccccattggggcccccggtggcggacgctaataccacgcggagcatggaattatcaacccccccagaacacaggaacgatcacaggatatttgccgccataccagtcggcaggagcggcgatattggagtatgcgacaacggaaccgacgcagcagcgagtatcagcacactccagatttaggagaacagataacaacagcaaccgcacattggggctctgcgagacaccagaacgggaatccaacaaacggaggtgcgcaccagagcagttagagaccggcgacataggatcacg

SEQ ID NO: 603153 - DNA, 260 bp, Homo sapiens
cctccattgcattcctttcaattccattcgcattccattccattgcacttgattccactccattcccttccactgcattccattcgattccattccattgcattgcattccattccattggattgcattccattcgattccattccattcgaatcaattacatagcaatccattacattcgagtctattctattccgttccattcgatttcgttccaatccattcgatcccattgcattcgattccattccatgtcgacg

SEQ ID NO: 603154 - DNA, 228 bp, Homo sapiens
  misc_feature (76)..(76): n is a, c, g, or t
cgtccttcatcaactacccccagctgtctgaatccaaacttgttcattgtccatctcactgtcatgaacccttgtnagaaaaagacacagtgtctggggagcctggagatcttcacccaaatcaagctgtcactcattgtatgatgttgagcctgttaacatgtaatgggatgacctttcagttcctaccactctgatgtttatatttggtaggtatgatgaaggacg

SEQ ID NO: 603155 - DNA, 125 bp, Homo sapiens
gtgttacccacaccacagcccatggcaacaccggatccttaacccactgagcaaggccaggatcgaacctgcaacctcatagttactagtcggatttgttaaccactgagccacaacgggaactc

SEQ ID NO: 603156 - DNA, 138 bp, Homo sapiens
tctggtcgacctgaggatccccccggaaatgtagagaaagtatgacctctgttagaaagaatatgttcctcaagaccctttctaacagaggtcattactttctctacttttcctcatgtacaccacagttaatctaca

SEQ ID NO: 603157 - DNA, 102 bp, Homo sapiens
agactctagaagatcccccctcaaactgcgcccgggctggagtgcagtggcatgatctctgtctcactgcaggctccgtctctacttaaaatatgtgaagtg

SEQ ID NO: 603158 - DNA, 633 bp, Homo sapiens
  misc_feature (1)..(1): n is a, c, g, or t
  misc_feature (41)..(41): n is a, c, g, or t
  misc_feature (88)..(88): n is a, c, g, or t
natatttcaactcatatgaagttcagaacaggtaaatttancctttgatataaaagaatgagacaagtctgaagatgattctcgtgcngaattcggcacgagatttgacccagaattctcattgctgggtatatacccaaaggaatatacatcattctattataaagacacatgcacctgtatgttcattacctcactattcacaatagcaaagacatggaatcaatctaaatgtccattggtgatagactagataaagaaaatgtgctacatgtataccacggaatactatgaagccattaaaaagaaggagatcgtgtcctttgcaggaagatgggtggagctggaggccattatccttagcaaattaatgcgggaagagaaaaccaaataccaaatgttctcacttaaaagtaggagcttaattatgagaacacatggacacgtagagggcaataacatacactggggcctatctgagggtggagggtaagaggaggaagaggatcaggaaaaataactaataagtactaggcttaatatctgggtgatgaaataatcttccaacaaatccccatgacacaagtttacctatataacaaacctgcacatgtaaccatgaatttaatagct

SEQ ID NO: 603159 - DNA, 880 bp, Homo sapiens
gcggagatctcgcgggcttgacgtgcaactcggatgtgagaagcatcccccggtatcctctcctagtgtcgacagagatcgccacgtggctagaagttcaccatgtctattgctctcagatccatgccagggagatctttgactctcgtcgggaatcccaatgttgaggttgcatctcgttgcagcctcaagataggtctacttcagagtcgtgctgtgcccagctgggtgcattcaactggtatctatggaggccctaggagctccgggacaatgataagactcgtttatatggggaagggtgtctcaagacggctgttgacgtcatcaatcaataagagagctactggcgcctgccctgggttcgcaagaaactgaatcgtcagaggaaacaagagaaggatcgagcaaacctgatgacatcgatgatggactggaaccatgaaaactaaactctaagttacggtagcgaacgggcatatctagggggtagtccctttgcacgtctgcacaagctggtgccgtctgagaagggggtcacccctgtaccgtcacatcgctgacttgggctgggcaactctgaatgtcatcctggccaagtcccggccgtacaagtgtcatcaagttgcgcgtgtgtctcaatgctgcgcgaacaacggctgggccactgccagggagatatcatgatccctacccaggtagggtagcagcaatgacttcagcggaaagaacccattgccgccattgggaggccacaggttatacccataaaacctgtaagaccttgttcagtccacgggacgaacctatgggaaaaggatggcagccaatgtgccgcgattgaaagccgggattggatccaacattcctgaagaactaa

SEQ ID NO: 603160 - DNA, 808 bp, Homo sapiens
gaacgcccgcgcggggagccatggtgcgccctgaccccgccgccgccgcagctggcgcgcagcccccgacgcgccctgtggggacccggaccagtgagggaccctgccccgggaaaaggctgtggacgacctgggctcctgaccccgagttcatccccgctagcacccccgatcgccccgtgccgaacctggtctcgcgctcgggaagcccgtatccctgcccctctgtgtcacgccctggcagcttgtccacgaagtcgctgggcagttggttggttgaccattgcttgcagagacattggttgccaggtggactagagaggagtcaactgcattgcatgagggccttgctcattcctttgtgtgcaatacccagagaaggacctgtgcatcgactgcctgacattctcaaagaggttcccatctgaaggcttagccacttgtagagccatatagggaacacattataccatgtagcttaggcagcaacacgtgttttcagatgaacggacgcgctaaacttgccacacgtctaggccccttgagctcgcaagctcgaacccgcggaaatgtccaaacttattgctttaggatccaccacgggtcaaactcaccctggacaacatgtgagcgccccgttggaaaccggtggctcgtattgttgcgcccagttagcatacacggcagaaggcaagtttccttcggctcctcggcgtcagcgttgcttccacctatcccgggatggccacatcacgggcgcacgattggtggacgacgcgttggccctgtgcgcccttggcgtgtggcc

SEQ ID NO: 603161 - DNA, 216 bp, Homo sapiens
taaatgaaacaggaccctataatgtgaaatacgggaccgatatggtggcgatcgcattgacccatatcaccctgaatgtcctctatggatccagagcctccccagtaatttacctcttcattcaccgtattacctgttcaggatgaagtcctcatacgttgtctctgttctagtgtgacgtctaatcccatccggacactagtattctttggtaca

SEQ ID NO: 603162 - DNA, 490 bp, Homo sapiens
tgcctcgtggctgggacacctgcggcttccgaggctctccccgatttgcatgtcatagttctaactaaagtactagacccaatttgcttaattctttttctatgtttctttttttcctagagatggagtctcactctgtcacccaggctgcagtgcactggtgtgatcttggctcactgcaacctccacctaccaggttcaagtgattctcttacctcagcctccgtgtagctggcgttacaggcgcactgccaccacgcccggctgactgaaatctattaattgaaaagggttatcattttcacaggactgccactaatccatataatggtgtttatgcaaaataggagcagagagtgacccccttctagcatgatacttaatttggatctgccaggatagaacggtggcttacctgcgatataattcatatctggtaattaccagtgtacaatttttccccagcagccagacagttgcagcgtagaag

SEQ ID NO: 603163 - DNA, 1321 bp, Homo sapiens
  misc_feature (391)..(391): n is a, c, g, or t
  misc_feature (477)..(477): n is a, c, g, or t
  misc_feature (674)..(674): n is a, c, g, or t
  misc_feature (680)..(680): n is a, c, g, or t
  misc_feature (870)..(870): n is a, c, g, or t
  misc_feature (1104)..(1104): n is a, c, g, or t
cttaacctacaaaaaaaaaaaaaaaagtgctgcaatgatgaacaaagaattatacaaaacctactttggtatcttaatttgggaatttctggtcctattataaatatggaagtatccctatttcagaaagaacattattttggttaaaaattgaattggtacattattttaaattattgttatttttggcacaggttcttttttttctgatatccgtgttttgggtacaattgtgagaactcatcatagtatttaattttttaagttaattaaaagttaaattacctttttatataatttgtgaagtgtggttctcacttgccaaggccaattagttctctagaaacctgtgcctccttttatacaggtttaaaggggaatgcctctgtgnttccgggtgaaaaagctcttggtccctttttagagtgtcctcggggaggtgggattatcatacagattgaaaggtgggccattggncttctcttctccggtggttgtgccgtggtttctcccgaaatagaacttacattgttaacttaagtgtgaacacacgtgcttttactcttattgggtaagctatttaaagtggtgcgtgggacagctatgtgaacgtgcgtatatgtctgttgttgcctgtgtttgcagtgtgtgtgtgtgtgtgtatattactctcnaagacnactatgtgtctattgttctaccataggtgttgaacgtggtggttcttaaaaaactataagtggggcacacaaaaaccgtgcacaagtttgccgtgaaaaactatagttttaaaaggcttataggaacagaaatccctctttttaacacacagcgcatctttgcaactttgtttcccagtttgtgagaacncttctctggggggcagatttgagtcatatatttctccccacctcttaaaaaactttatctgctcttcctcaacaaaattcttcaaagggggggcccggaaagtctttcggaaaaaaacccaaccccaaaattggccgtgcggtcaaacatttctcaatcaaaagggggttaatttcttaacaccatcttattaagagaacgcctgtctgatgggggtatccactatagactacngtttttcacacattgtgggtcgagaacatgcggacatctggccccctgtggtggtggggcccccccaaaggggggtttaccacacggcactacatttattgtgggtacccaggcccaacgcaaactctttttaaaccccggaaatgtgtgtatccccgatgtaggggttactttacccctccatttgtgagttttccgagtttttaacaccatagtt

SEQ ID NO: 603164 - DNA, 264 bp, Homo sapiens
acactgctgaccacctcgctagattctcttgtctttattctggcatagcagcccaaggcgatctgttgctgcatcttagcgtttagagcttatgtttcctcctacctcaaaggtcagtttgtatgtgtgattcatgggtatctaattggcctagagtgttcacccatatcacgtataatattatgtccagtaatcgtaagtcggccattaagcatcagcttaacaccactgtcacagctcataaaggtggtatgactgtatgag

SEQ ID NO: 603165 - DNA, 126 bp, Homo sapiens
gttaaaaggtcaaggcccattcgggaaacttaccctaataaggttttgggctcaagggcctgaaaggctaaaatggacccttaaggagcccccctttaaaacttagggagcccgtaacctggcggg

SEQ ID NO: 603166 - DNA, 791 bp, Homo sapiens
  misc_feature (607)..(607): n is a, c, g, or t
ggcctatcaggtgtgggtcggtgcatccgagcgggtttgacggaaggagcggtggcgcacggagagaggaggatggaggcgggtggtgttcgtcttctctactcctacctaagttgttgcgcgctcatcttcctctccggtactacttcactatacttacattagtctggatttatcaatgtgattaggcacttaagtgcctagatcgatgttggctcaaaattaaacaagagtggcgtgaattccaggaattgtagttgggctcgataccactggtccctgtagttactgctcattgtcattcgcactggttcatcttccttctcaactatacctgtttgccacatttggaatattatatctgatacattggatggtgccgcgacgtaggtatacatcgggagtcgtttgatccagctatgaagaatactacaaatctggatggtggcatgctagaacgtcacacatgacaattgaagccattgatctaagcttggtttccacttgctctgcttcttcatgttatctttatagtatgatcttcgtctttgataagtgactgaagccgtggagaagccgatgggttcgaacgtctagccctagactnacagtgcgcagttgatggatgccacgagaacttcttaaatccatccttaagaaccgtgacctatatgcagtatatattttttcctcttgggaacaaaaaaatctatttttgctgttatttttaccatatacaggtttttaaaaacccattgacttgagtttctgtagattcctaggtgccttaa

SEQ ID NO: 603167 - DNA, 301 bp, Homo sapiens
  misc_feature (5)..(5): n is a, c, g, or t
acacnataccccgaatacaggctagcgtatatttctgcgtcgctacgatgtctggtgatgaatattgcttatgatcctttagtgagtagaaggacagagaagtaagccgagcgcctatttgattgtgtagtagggttggaaggtgattttatcagtcatgtgacgttattcctaaggcgttgtttgatcccgtttcgtgctcgaataggcccgtggagtgctgctagtggctgtctctccttaagtggtattatgcactgttctcgtccagactcgtgtgagggtcggactgtctattgcg

SEQ ID NO: 603168 - DNA, 337 bp, Homo sapiens
agcttaaacataaatatcagaagtgatgattatcatatgatacctcagtgattttaaaagccatagaagaaacttgactatgcctggtcaccttcttggatctgctgtctaaatgatatatatatgatgtatatgtgatatatgtatatcatatatatgtgatatatatatatatatcacatatatatgatatatatatgatatatgtgtatcacatatatatgatatatatatgatatatatgtatcacatatatatgatatatatatcatatatatgatatatattttttttaatgcaggaaagtatactttgtaaggagcagatttttttgttc

SEQ ID NO: 603169 - DNA, 189 bp, Homo sapiens
  misc_feature (162)..(162): n is a, c, g, or t
agtcacaatcccgtgctctacactgagctacgcccaccatattgcgtgaccaaataagcccgtctacagtggctattctgttgagcctcactgacgaccatccggccttcacgaaactttatttcggtgcgagatgatagagactcgaatctcttacacctngacgcgcgctggcatcctaaactccag

SEQ ID NO: 603170 - DNA, 249 bp, Homo sapiens
ttcctgcggtttacttacgccattctcctgcctctacaaaaaatttacaaattagctggggccaggcacccatagcattccttgaaatcagcctgggcaaacgtggcgaaacagtctctacaaaaaatcaaaaatcagctggatgtggtggcaggcacctgcagtgccagctaagtggggaggctgaggtgggagaaacacctgagcacgaaggtggcggatgcaattgagctgagatcacgccaccgt

SEQ ID NO: 603171 - DNA, 175 bp, Homo sapiens
gcaacactgtaagactcataggtcctaagattaggtagtagattgctataactaagggagctacaatactactttctagggaatgtctgttgcactgtgattgcctataagggcattcataggtcagggactacctcatggctgccaagctttctaatttgtactgtggatgacc

SEQ ID NO: 603172 - DNA, 360 bp, Homo sapiens
tgcatagactgtttaatgatcaatcagggtatttggaatatccatcaccttgcgtatttataatttccatgtgttgggaactgatatggtctggctctatgtccccacccaaatctcatcttgagttgtaatctgaattgtaatccccatgtgtccgaggagggacctcatgggaggtgattcgatcatggggtcggttcctccatgctgttcttgtgatagtgagtgagttcccatgagatctgatggttttataaggggctcttcccccttcactctgcacttctctctccagctgcattgtgaagacggacatgtttgcttgcccttccaacatgattgttaagtttcttgaggcct

SEQ ID NO: 603173 - DNA, 120 bp, Homo sapiens
gctcggtaccccaatgaaacgggaaatcgtaggctaaggcgcgaagttttcgtggctatctattccatgcagcgaatcgatcagcgggcagctaaccgtcccgtggctcgcgcaacagtc

SEQ ID NO: 603174 - DNA, 816 bp, Homo sapiens
taacttaattatatatgatcgtattaactcatgtagttctcaaaataggcagctgcttctgaagccagtaaaataaaattcagttagttattaaaaactaaattcctattagtaaggtaacacccatgattatcgtgtgcatcatactgctcttttgcagcatcccatcagttcatccagtccatctcctcacatatctcaattgcagtcccctaagaatcattttacaacccttttcaacacacatcacatcaacatcatccactctccatcgccctccatcaacttctcaatcatcatttcaatcacatccagtcaaacatagctgcttattacttcccacactttgttctcagtattgttagtgcatcatgagtttcctgctagtgtttgaccactgggtactcctgaagatgttttttagtactagggatgcttttcagtattagggatgcttttttcagtactagggatgtactagggagtactgagtactcctgaagatgtttttcagtactagggatgcttttttcagtgttagggatgcttttcagtactagggatgcttttttcagtgctagggatgcttctcagtactagggatgctttccaaaatatcactctttaacgtttactttttctagtgtgtgtctggaatccaaaggacatgaataagccactcataatttaatttcgagaagatttatcaactgtctatgtttctcactgcaaaagcttaattttggcaaggcaccaatgtctaactcacctatggttaaccatggctactttaccataggcctaagaatctggccg

SEQ ID NO: 603175 - DNA, 345 bp, Homo sapiens
  misc_feature (144)..(144): n is a, c, g, or t
  misc_feature (158)..(158): n is a, c, g, or t
  misc_feature (231)..(231): n is a, c, g, or t
  misc_feature (245)..(245): n is a, c, g, or t
ggccgggcctgtgcctgagagcagcctggggtcgggctgagagtccgcccagggtgggggaccaggaggggcatggcagagcctgaccctgaaggatcacttgcttcccatttgcagcagaagaaggtgggaccccagcaaggnaaagtcggcgggcntggaagtagagcggccagaaaggcccctcgaggcagagaccctccgccctcttgcacaccagggccgctcgtnggactccacatctnagcccccaaatctgtcaggggctcctcaagttctgggttgaaaggcatccgggctccccgcttgttccttgtgcttatcctgggctgtgaataagtgaga

SEQ ID NO: 603176 - DNA, 182 bp, Homo sapiens
aacatagagacctggctaggaagggaatattcatggtaacgagcaacaggggcgcgactgaagcatccttaggtgttcagctcttgggagctaggctatatgctcaacaaacgacagagctgaggctgatagagagtcaatgagcatcccaagagtacttattgcgtgaggtgagtcctgcg

SEQ ID NO: 603177 - DNA, 1189 bp, Homo sapiens
  misc_feature (6)..(6): n is a, c, g, or t
  misc_feature (806)..(806): n is a, c, g, or t
tgtttntttgtgtgtgatggtgagtactatgagggagagtcgagatagatgagaacaataagaaaatgcaatatagacgaggtacaaacgtcgtgtactacgtgtaccctaatatttgttaggagcggtgttattaacacggggtgtaacactctctcccggctttttctgtcacagcgcccccttgttgttgtcgcccccgtgacccccatggggtggcgctctcccccccgggtgttttggtgcgcgcccccggctaaattaggggggctttttcggagtatgtttcttcagaaccggggtctgtggggcccccctcccccccagggggtttcttccagggactctctttcgtggtgtatataaccggccgcggtgctgttttatttttccccccggggggcatatttatcacgccgccaccaggttgttggttgtttccgcccactagaggcgcccaccgttgctaaaattggccaaaaaggggtgtcccccttgggggcacacccacacaccgcgtgagggggcaccaaaataggtggtggcgtcctcgtgggagagaaaacaccttcggtgggagaccctgtggcaacaaagtgtgtctcccgcgtccacattgagggaattattgatccccccgttgtagtatttcccccctcccctcggggtgcccacaataagtaatcccgtggtgatgattcttgcctctcttgcgcttcctccacaagaggttgtgttgttttttctgccccacccggaggatggtggtgtgtgtggtgtgtgtggtgtgtgtgggagggtgggcncgccgtgtgtggccacaccgtctgttgttgtgatagagaggtgtggcgggcgggcggataccacccacaaaagaaggagccacaaagaggagaacttgttggcccaccgaggagcacgggtgtggggccacaagaaagactcgtcgggagagaacatcatcttgtggggaggagggcgcagacacacaaccaccactctgcgccacagctcccccccaatcccccaccgaagaagagccctcttggtggccccaccaatgggggttttttgtgtgtccccccccactgtggatagttttccggggaccccaacttgttcccgagaaaaaaaaaaatttttgttggggcgccccccaaaaaatttgtgtgttttttaaccccca

SEQ ID NO: 603178 - DNA, 270 bp, Homo sapiens
tctagaggattccctgtgtgcagcgctgcggagctgtttccatgaggaagcagagaaggccctaacactcaccgtgtgccgggagaagaggctgaggaacatgggaactgagagggggctgatgcgcttgaccaggaaggagctcagtgctgtcgagcacacccgggtcaccagattcaagtccaagcagctggcagcctgcgggcccgagggcatgtggctgggggcagcgccagctttctgcttctgctgtgtctcatgcacgcagcc

SEQ ID NO: 603179 - DNA, 386 bp, Homo sapiens
  misc_feature (216)..(216): n is a, c, g, or t
  misc_feature (298)..(298): n is a, c, g, or t
atacgctaacttggtttaacttggcttaatattttgattatttacctgtaattaagatttggttattcagtttgtccttttgctatcttctgagagaatggctttttatttacagtttattttatgtatcacaataaagttcatgagtaagtttaagggaggacattgtttttttaattggttaaagcatttcgtggatatgttaaagtatattgntgtagcaggtgcagtcagaaggatagttgaagctagaggggtgactcatatatgaacttacagatcatatttaggattttgnttttatcacattgggaaagtttggattgtgacacaataccactttttttttttttagtaagatgatgtcaattactacattgagtcct

SEQ ID NO: 603180 - DNA, 110 bp, Homo sapiens
gcggccgcctactactactactactactactgctcgaattcaagcttctaacgatgtacggggacatgtcctctttcaagttaaaagaataaaagacttccagccaaaaa

SEQ ID NO: 603181 - DNA, 146 bp, Homo sapiens
cggctggtactggtcccgaagtcctttggatcgggaacccctggcggaggcgatactcgcataagtttgcacggcgctctcaactcggcggccgggcgggcgtcggatcgctgcgctgcgttgccggccgtccatgacttactcgc

SEQ ID NO: 603182 - DNA, 147 bp, Homo sapiens
gctccttggcaaaactttgggctggtacattcgatgcattctgacgctgtatgtcctcttgagttacagtgagtgatgaggccacaatcgcagggtggatgatgtgctttttttgggctactaggtgtacaggaggcatgctgtcct

SEQ ID NO: 603183 - DNA, 106 bp, Homo sapiens
tccatctggatagttgtactcagaaacgagtgcagccatcttccagctgcattgcctgcaaaggatgatgcctctgcgtggtcgtccgacgcgtgaccggcatacc

SEQ ID NO: 603184 - DNA, 768 bp, Homo sapiens
gggacgcagttgcgtgaggggtttgtactatcctcggtgctgtggtgcagagctagttcctctccagctcagccgcgtaggtttggacatatttgagtcttttccccccgaggttgaagttgaccaagagcaagtaggtgatgggagaagccgtagtcccctgctggtcgggcgggaatttgtgagacagtattgacacgactgcgtgaaccgaggccccgagacgatgcttggctagtagcattttatcggaaacgaactcgttgcttatgtccatggggggaattggattcaacatgggaaaggccagcagatgcaggtctacggcacagacacgacatagtccactggtaaagtgatgtgcacaagaagttcagccaaatggtcacagccaaggattcgccatagttgatgctcgatgccacagctgaaatagatggtgtggtagtccaggtgatggaggcttctcatctaatcaacagagcaggcttggaggagattcatggcaaacgtgttgtctcttgctcctgaggaggtcctgttgcaagataaattctatgattcatcaatgatattcttcagataccacagatgaggtctgtaggtgcggtgttgtccactgagccctcaggcaggagtcctgaagaaagaagttagagggaagcctgaagaagagacagctaaacaccgtgaggtgcgtaccttgaatgattcctgggaaccttgctattgatccaggcagtttgtcaagtaatgagcttggaagaa

SEQ ID NO: 603185 - DNA, 954 bp, Homo sapiens
  misc_feature (822)..(822): n is a, c, g, or t
ggacctgtctgcttcaagggaagaaccactcttatccccaaactacagaataatgtgtgtacatacactgctgatacatagttctctatcaggaaaactagaatcgactgtatttatctccgcaggctattcgttcagagatggcctttggtttaaatataaatgttgaaatataaatgtcgtctggattgtgcctataacaatgtactctgtcagggattacggcttattaatgaagatcacagggttcgtatgctcctactaaacgatatcaaagcgcttaatgttgctgtagatgaggggtgactgtcacagtacaacgcaagactgggaccttagacatcatggtagaaactcaggtttgggacagaacaataccagtgtctctaaggcccaaatttatacttgcttaaaggacagttgtattatcttagtctgcaagagacatctagttttaatctcgtaatagctgttatcaagattctgtagtatgtggtacactaagaacttatgtctagttcaattgggaaagtgtacagagaaaatatgaatcaagctcgtgtactgagtcacaagtactctaggctggggccaatagaagactaatgttccttgaatgttgtccaggaaaacccctggcttgtttggctgacgctattgaggggcatgtcccctttcggaagcccgtgaaggaagccacgtgagatggcctagaatgtgcctaggtgctgcggccggagggtggtggcctgacccttcacctctggtctttgctggccccgaggtctaggttgtcgcggcccccaagctatgagctaggtnagggcgggttggtgaaacaaagacccttgggtaatccacggtccagggctgaaagggggtcttgttaaggggaacccgccgcgggggcccttgtgtgtggggcccttctactttgttcccttttggcgagtt

SEQ ID NO: 603186 - DNA, 715 bp, Homo sapiens
cattactgctctctatgcttgagaccgggaggatcacggctcagataacgtgagctctgggcgcatgagaggtgtacggtccagcaaggtgtgtggcgtgaactgtacagatcaagtcagagctaggacagtctggcagcagtgacctcagtgagggaaccatgtccgtcgtacccgtctcgacgcgtctagtgacacctccccctaccagaccctgcctcttcctcgctcctcctcctcctgtgggaggtggtcagtgggacttagggatctttcagcctgctgtgccccagtagttctgatcgtctgcttgtggagcagccgttaatatgttcatccctgtttactgaaggacgcaaatacgtgggtctgtggtcagacaagcttgccagtgtcttgctcttgctacctccgctaggttaggtgggaaattcggagtaagggaactgtaggcgcccagcatctctggcaggtatgactgtcattggccacagaataactgtctctaagctatccatggtccagtgggtccctgccatgtctgtagacttcagagagcacttctctcttgatggggttcgtgggaacaggcgtgggcgtgacttgcttggtggcctcattccatgtgtgcctgtgcctggggcatggacttggttaagcagagtcagccagtgaggtcctcattctccaggcagctctctgcctggagaatctg

SEQ ID NO: 603187 - DNA, 453 bp, Homo sapiens
  misc_feature (268)..(268): n is a, c, g, or t
  misc_feature (344)..(344): n is a, c, g, or t
  misc_feature (347)..(348): n is a, c, g, or t
  misc_feature (401)..(401): n is a, c, g, or t
tcctgcctcatcaggtccagatttctttccaaggcggacgttttctgttggaattcttagtccttggcctcggacaccttcattcgttagctggggagtggtggtgaggcagtgaggaagaggcggatggtcacactcagatccacagagcccaggatcaagggacccactgcagtggcagcaggactgttgggcccccaccccaaccctgcgcagccctcatcccctcttggcttgagccgtcagaggccctgtgctgagtgtctgnccgagacactcacagctttgtcatcagggcacaggcttcctcggagccaggatgatctgtgccacgcttgcacctnggnnccatctgggctcatgctctctctcctgctattgaattagtacctagctgcacncagtatgtagttaccaaaagaataaacggcaataattgagtcctcaaaaaaa

SEQ ID NO: 603188 - DNA, 113 bp, Homo sapiens
tcgatgttggaccagccagcggcggcccaggacgtcgtcggcggggcacagctcctcggcgaaggtcaggtcgaggtcggccatctccttcatcgctcgcgcggactccgagg

SEQ ID NO: 603189 - DNA, 313 bp, Homo sapiens
aaacaggacatggattagagatatggccagaagaaaaattaactttaaaattaattaagaagtacttcacggtaaaatatggggaagtattaataccatctatacggaaaacagttgtctgtgctcaagaactacattggctctagataccagttgtgaattttatctctgggcaaggtttggtaattagcagtaaagaagtagcgtgaacacaaattgagactataacttttggtatttttagatacagatcggggtttcaccagtgttagccaggctggtctcgaactcctaaccttagatgatccacccg

SEQ ID NO: 603190 - DNA, 1009 bp, Homo sapiens
  misc_feature (998)..(998): n is a, c, g, or t
ggcggggggaggcggagtgtcgctcgctcgctcgctcggtcgctgactcgccggagcgcttctgtggccggtcggcggcaggtcggtcgcgagagcgggctctgtggaatgggggcgatggctatgtctgcggtggcatgcccggatgggccggcagggccgggagtaactgggacgtcgccgcggagcttcttcccccaggatacagtgctggccctgagctggagggcctgtgtgctgcctgccctcctgatcttgaagagccctgcagctagcgcgggagccctgcccccggcttgcagcacctgggcacctgacagcgggagctgacaagcccaagccagacccgggcctgggctgcgtgcttgatctaaccacagccaggcagggcgaatacttagccacctcttggagcacggagctccttccccaaaaggacatgaagctattgggagaactcgaagctttgaaagccaatcaactcacagcttgactgtggggagaccgggaggattgcccacatcattggcagcgatttgaagagcctactcatgtaaagatggcagggagaaagacaaacaacatgttcaagcaagttctgccagggaagggccaagccccaacgttgctggaggcactttctccacccccaagaacttcaggactgagcccccagcagatcagcaaaagccaaggcggtgaggaaggatggcccctcagtgacaaggtggagccgcaagaaccttcttctaaccttgagttgcagcgctcaatgagtcctcaggcctgataatacttaagacaggccgaggcataagtaggcgggacacaagccttagcttggttgtgaatgagcactgaggctgtccaagtgtcgcgagagctaggttgaaccagttggaaccggtggaaaagaaatgctgatagatgagataaagtaaccaaaaggaacacttcggagagagacgcgtctacaagtttcacaagggcgagaggcncttaagcaaaa

SEQ ID NO: 603191 - DNA, 270 bp, Homo sapiens
gccccggaactaaaatagcgagcgtgttgagcgaggattcagcagctgggcaattatctaatgaggattcaggaaattttttctttgagattgccaagagagagcctcagaaagcaacttctgatatacattatgccactccataaatactaggatatatacatttaactaccacacaacctacaaaaacaaaacattttataaggatatctgttatctaaggagcatcgtactggtctctagagttcgcacagtcagtcagatttattc

SEQ ID NO: 603192 - DNA, 139 bp, Homo sapiens
gaatacagcgtccatcagagctggtctgcacactcacattatcttgctatcactgtacaccaactaagtgccaacagaacggtttcgtaatagaattatagctgtatctaaaaaaaaaaaaggggggatcctcttagag

SEQ ID NO: 603193 - DNA, 112 bp, Homo sapiens
tactcaaaacaaataatatcaatacacaacactaaaggacagaaactaatctactaatacaagtatccttaatcatattatattagccacaaaactaacactcctacggact

SEQ ID NO: 603194 - DNA, 263 bp, Homo sapiens
ggggggggggggggggccccccttttcggggataagccccttttttcccccccccgtggggggcccggggggggcccctttttatttttaattttttttggggggcccccccgggtccccttggggatcttttgtttgggagaaaaacggggccccgggggtccttttttcccccccccctaaaaaggggggggttttggggggaaccggttttttgcccttttcccagggggggttttaaggggtgggggttctttttttta

SEQ ID NO: 603195 - DNA, 142 bp, Homo sapiens
tcagaggattacgaggtttgaacccataacctcatctcactgatgaggaaattgagacctgggaaaatgttgatttttcccagttaaaacacagctagttaggaataatccagtttcgaagccccctgtgtatattctcatc

SEQ ID NO: 603196 - DNA, 1168 bp, Homo sapiens
taaggtttagagggggaatgctggaaatggtaaggggtatggaacacaatatcatataagttaagtgctaggggtgcaggtggctcggaagtttatttaacatagaggagggtgttatgacagtgggctcgctcagcggaaatcgggggctatgcgtgtccgaaattccataagacacaccgggagaggctcacacacaagcctacgggcacatggggagaacaaaaaaatagagctgcgagagtataacagctcaccaggggcacaagagagcagacacacatagtggagaggtccccaacagcgaccacaacgcgccaacgcgagcgaaagcacagagggtagtgctacacacaactacataacaaacacaacacagtgccacaaggggtgcgcaacaatacccagccgccccatacacaaacacaccacacacaccaacacagcgcgaccacacagaggcgggcaccaccaggaacgagaacgaaaaacatcaccgaacaagcacacgcaaaaaacacaaaaaaaaaaccaaaaaaaataacagaaaaacaaaaccaaccacaaataagaaaaaccaaacgagagaacaaacaaagaggagggagaaacacccagggaaagaaggggaacacaatccacagacacaaaaacagtagagagaagaaaaaacaataaacaaaaaccaacaaacaacaaaaatggagaacacacaagaggaagaacaaaacaacaaaccacacaaaacacaaagtcaacgctaccacacacataccaaaagaaaaaaaaacttgtcataaaacaaaaatagcagagcacaagataacatacgaaacatacactaggagagagcacaaggagaaacaagagaagaagctactctaccaacagaacgacggacaacaaacaaaacacacaaactagaaaaacttaactacaagacaaacaagaagcacataaagcaacacatagatatgacaaaaacagacaacaagtaaagaaagaagaaggaaaataagctacagaagagacaacaacacaagaaatcataacaaacagacaagacgcacaacaaacaaaagcactcaaaggggagcaagctaaaaactaacgtgcgaaaccataaaagaaacagaaaacgaaacgcaaccaacacacacaccacaca

SEQ ID NO: 603197 - DNA, 349 bp, Homo sapiens
cgatcccccctggctgctcaggttctgttgatcacggatgagcaccttaatgtaagtttctttttgtgcaagcctgaatcactttatattttcgtcatattatgcatacctcttcttgacgaatgtgagccttcccttttaaagtctattctgtcatttaatgtgttgaattctgagaattcaggaagataggatttctgcttcttgtacataattgttctacaggaggagtggtactttgtagtgtatgggtgtcagggcatccacgtatttttacttttggggtagctgtatcaacatttattccagttagcctcactttaatcctaagacctgagcaagccaggga

SEQ ID NO: 603198 - DNA, 1882 bp, Homo sapiens
  misc_feature (389)..(389): n is a, c, g, or t
cagagcgagaacgaacccaccgtgtactgatccaagtctggtggctgtccgtgtgacgagtctccgcagatacgagacgatacgtaacgtttcgctgactgcacaggtcttacagggcagcccagcgcaatgtccacgacatgagcaaagggacatgagaggaggagaattcatacatgagagccataaacatccacaaggggatggaagggaacagatatcagccataagaggcgaatacctccgcaaggtaggtcagtgactagggcattgcgtgcgctacctatagacactagttgtccactagtacacctaacatatataggtctgccttgcctaagaagaatggtgtcacgaggataagtgctagcacccaaatcagtggacangcatggcgtagataagctgtgtatgtagcgtcgtacagacagatggtggatagctagacctccatgactcggagaaaaaatggcacgcatttggtctcaatataaccacaatgatcacagagggccagcgatgtaggaagaggctgttaacttgccgtgctagaggaagtaatgtgggatatgtttgtaaagttcgatgttgggcctaatcatggtcagaaataagaccatggattgtttaaccatgttcttggggatgaaacattgatgaacaagctttattggaataaataaagttagtgtgttattgagatcctaaatcgagtctttgtgatagaggcatacgtggtgaggaccactgtctatcgatgaaagaaggttattttaaacagggttaaaggtcttaaagatgatcgacgtataaggttgagattgggggacatatccatgggaacaacgtacattgtaaactgagggaaaggggggtaagcgtgaggcaaaatgaagggcggatttcaataagttagcaaacgtgatagatgacgagattcaatggatacaaaacattagtagaatggccgtgggtaagtaattaactctgggggagaagcaaatatctaataaacgttaatataagccattctgtgacaaaacgcggttttttataggacataggcgcagttttatattcggttccgaatgtgtggcttccccccaatggaagaaaggacgtattggagagaattgaccaacgtggagggaagtatggaaacaaaacgagtttaattgtggcgaattactttaggcagacaacattaatgggacacgcttgcgttggggggcatctttacaacgacaataacccagggtttcgaggcgttccatttaagggttggccactctacaggggggacgcatatatacgccgctacagtacttacagcagcaaatagagcataaagacggaccccgctgtttatagcgcgaccaaaacctaatcgagatgatgagacacacaccctggaacacccaaataagagacagatatggcgactaaccacacaagaggtgctggcataagaagcacaggcttggatcagacattgtacagagggtatgcccccatgtaacaacttggtgaccgtggacacgaccaaaagggcagggagtgaacacaccacccgagaagactgggtgggccacctaaggacaacacgacgcagtcacgactacgccgtcacacggcttcatcacaaacagaggagccggcagctagaacaaatgatcacaacaagcaacaacgaagagggaccgcagaagacaaaccgtagtacggacacacagccaagcggagtcaaggacgcgacacgcacaccagacgaacagtaagcaacgacacgaacagtaaacagaagaagcaaccgacgagcagaagggcacgaccaaatatgttaaattagtattacattcagatactacatccagaagcgcgc

SEQ ID NO: 603199 - DNA, 498 bp, Homo sapiens
  misc_feature (2)..(2): n is a, c, g, or t
  misc_feature (31)..(31): n is a, c, g, or t
  misc_feature (40)..(40): n is a, c, g, or t
  misc_feature (476)..(476): n is a, c, g, or t
  misc_feature (498)..(498): n is a, c, g, or t
anctttggtagctcagcacgtgtgtgtactnacatttgtnctcaatacatacaattcaaaaatggttctgccctaatataatgccaaagatttcaccccacaacttaaaactttttcaaaaacctctttccccacagttacatcctgtaattgtatctagacctaaatctagtatttctctgtgtgtatattaatttcagtagatctgggccgggctcggtggctcacacctgtaatcccagcactttgggaggccaaggcgggcggatcacgaggtcaggagttcgagaccagtctggccaacatagtgaaaccctgtctctactaaaaatacaaaaaatactagccgggcatggtggtgtgtgcctgtaatcccagctactggggaggctgaggcaggagaattgcttgaacccaggaggcagaggttgcagtgagccgagattcggccactgcactccagtctgggtgacagnaaacgaatccgtctatatggtn

SEQ ID NO: 603200 - DNA, 740 bp, Homo sapiens
gagcgggttcttgacaatcagtggacggcgcccatggtccgtggcccggaaagtgctcgacctaataggtggagaacgaggagtagaggagccgaaggccagagtctgtgagcagatccagaccatacagagtaaaaaacaattagtttaactcgtagtctggagatttacatccggcgttatgactttgagggccttcatcacacttctgaacgaatgcgcttctgatattggcagcagcttgggatttgcgaatgaccatctacttcgtgacacaatgacaagactaagactggtgtggacaagaatgtcagtcaaagtgcggacacaggagcacgtaagttcccggactgtaccaggagagcatcttacaacgtgccaacgggacacacggtgggacgacaaccggacgtatacagttgcgaagacgaagaagaggagtgtctgagacacactgggtggcactcaagcgacatacacagagacaacaggcactaccaatagagtttcagaaacgccttgagtacacattcgaaggccacgacattttaccgatgccgtttccactgtatcgcctttatccattccttggtacagcttggacacacttgtggacacagtgattgcgagtggttcttacaaaccaaatcaaggcgcagacgcaattagaccaacggggatcccacagaaagaattggacgaacggcgatttgccaggggtccaattcaacgacaccaac

SEQ ID NO: 603201 - DNA, 861 bp, Homo sapiens
ggggtgaccaaaaagagagaacaggagaaggcgagtataaattttttatttgttctaattacaaacaacataatttatccataatagaaggctggttgattacatttaacacaggtcaatgaaagataacgaaagtccttccttggaacatacctcaaaataacaagagccatttacaacaaacccacagccaatatcatacggaatgagaaaaagctggaagaattcctcttgaaaaccagcacaagacaaggatgtcctctctcaccattcctattcaacatagtattgaaaactctggccacagcaatcaggcaagagaaaaaaaaacaaagggtattcgaataggaagacaggaagtcaaatcgtctttgcagatgacataatcctatatctagaaaacctaatcatctcagctcaaaagcttattaagctgacaagcaacttcagtaatgtttcaggatacaaaatcaatgtgcaaaaatcactagcattcctatacactaacaacagacaagcagagagccaaatcaagaatgaactcccatttacaactgctataaaaagaataaaatacctaggaatacagctaacaagggaagtgaaggacctcttcaaggagaactacaaaccactgctcaaggaaatcagagaggacacaaacaagtggaaaaacgttccatgctcacagataggaagaatcaatatcgtgaaaatggcaataccacccaaagtgacctaaagattcaatgctattcccatcaaactaccattaacattcttcacagaatcagaaaaaaaaactatttcaaaattcatatggaaccaaaaaagagcccgtatagccaagacaatccttag

SEQ ID NO: 603202 - DNA, 248 bp, Homo sapiens
ctccgccttacgtttagtgagggagagattggtatatgattgagatgggggctagtttatagtcatgtgagaagaagcaggccggatgtcagaaggggtgccttgagataacttctggtgactcatgcagtgcaaagggggctattcgctagtttaattagctatagcacattatgcattattaatgcatgagtattgatatggtagtattggtatatggttcattgtccgcgaaagtatattgtaag

SEQ ID NO: 603203 - DNA, 559 bp, Homo sapiens
ttgaaaaacaaagtttttatttttatttttaatgggtttagtttttaacggggggccaacttttacatccccagcaaatcatggggccatgggattttttcccttatgttcatcccccttatatcagggccctcagattttttttttttccctctttttcaggttaaaaagttttttgtctgggacctttttttttcttttctttttcttttttttttggctttaaaacaagggtgatgccatatcaagtccatgttattttttcccagggtactttataaaaggggtgggggtttgtttggtcaggatgttaaaaagtgttgataagtagcatgaccagggtatgcgaaaaggtttttaggaagtatggcaaaaatgttgtattggctatgagggggccatgaaaaagtcagctcccttttaagaggttttatttgttcagtgttaagtgatttaaaaaaataataccctgttttttgactagtttaaaaagggatttgaaaagggttttgaatgcaattaggttatgttatttggccaataaactccccttgcccta

SEQ ID NO: 603204 - DNA, 147 bp, Homo sapiens
aaggaattggggtttttgcaaaattggccaagggtgggtttcgaacctcctggcctaaggtgatccttctcccttggcctcccaaaattcttaagtttttagggatgacccgccattcctagccagcttgtctttttgttactacca

SEQ ID NO: 603205 - DNA, 447 bp, Homo sapiens
acgggggtctagactattaacttggcttgtggggcaccgacacagaaacacggcccccgcccccaccgcgaaacgcccagaaattagcagaaaacggagaatgacacaggggccgtaaagacaagacactaacacgatactactagcgagcattgagggctgcgaattcaggttaggaactgaacgtggttattgttgggccgggacgactgtaagtgatgcgatgttgtactcagaaggcggtgggcttagagggggaactgaagcgggtgctgagctatatacaaaatagggaagaaaatgatagtcttcaatgtgaataatcgcttaactggccggggatattaaggaaaattagcatgaaagtgacgtagaagggagagtacgactcgtggggggggatgtctattaaagtatgtacaacttaaatgtgtgataaagttaaca

SEQ ID NO: 603206 - DNA, 405 bp, Homo sapiens
ggtaaatgaagaaggcagtgaagcagttgcaggtcccgttgttgtgattgctggccgttcgttaaaccccaacagggggactttcagggccaacaggcctttcctggttttaataagagaagttcctttgaccactataatcttaatggccagagtagccaacccttgggttaagtaaaaggttctaattctttgcaccttttcctattttgggttggtgaccagaagtaaaattaattccaaactacttccatttaacattaaaaaaaaaaaaaaaaaaaaaaaaaaaaaccttgtcggccgcttgggcccagtcaattttagactcgaccaggcttatgcatgcggccgaatttcgggctaattggcccaattcgccttatagggagtcgatttacaattaat

SEQ ID NO: 603207 - DNA, 411 bp, Homo sapiens
aggatcccctcagctggccccacgttgctgtgtcacccagcccgtctaaggaagctgtccttcctgcctaccccacgtactcagtgcttctgaagatgtggtacaggctttcatcagtgagattggaattgaggcatcggccctgtccagtctgctggagcagtttgagaaatcagaagccacaaaggagtgtcctcctccggctcctgctgacagcttggctgtcggacactcaggcggtgttgacattccccaggagaagacggccctagagcggttacaagccccagacactggccaacgtggcagggctcacccctccagctacccctccccaacagttatggaagcccctggctgctgtctcactgcttggcaaagccaaatctcctaagtccaacgcccaggcgg

SEQ ID NO: 603208 - DNA, 171 bp, Homo sapiens
agtctcgtccaactttattgctctggagaacaggagggcaagccagcgcggggcggtagtgcccaggcatccctctccccgaggccgccggcccggccgtgccgtcggggaggaccccgcacccgccgcgagcgcgcacacaccctcggtgacaaataaatacggcggccg

SEQ ID NO: 603209 - DNA, 355 bp, Homo sapiens
cagtggctgcgggtagtgatctagaggatccctgggagtctctctaccggcggaccctgtcgggtctatcggacctcacacgtcctccccaataagcaggggctctttaaccctagttctattcccggggccccaggacacagaccatccaatctctccatcaactttactcccttaccccatagaccacttcattacttccaatacgccccctcacctcccagcagatcgggcggccggctcctcccggagcacccctagcagggctaggtcttacattggctttggtctcagccggaagtgtcctttctcggtatctccatgcagataaatcctagccccatctcgggggtac

SEQ ID NO: 603210 - DNA, 672 bp, Homo sapiens
gacaccccattctatatcaacacatactgattttgcggtcaccctgaagtatatattcttatcctaccaggcttcggaataatctcccatattgtaacttactactccggaaaaaaagaaccatttggatacttaggtctggtctgagctatgatctcacttggcttcctaggggtttatcgtgtgagcacaccatatatttacagtaggaatagacgtagacacacgagcaatatttcacctccgctaccatattcatcgctatccccaccggcgtcaagagtatttaactgaatacgccacaatcatctcacggaagccatatgacattgatctgctgcactgctctgagccctaggattcatctttctttacaccgtaggtggcctgactggcattgtattggcaatactcatcactagacgtcgtactacacgacacgtactacgtagtagctcacttccactatgtcctatcaataggagcttgtatttgccatcataggaggcttcattcactgatttcccctattctcaggctacaccctagaccaaacctacgccaaaatccatttcactatcatattcatcggcgtaaatctaactttcttcccacaacactttctcggcctatccggaatgcccgacgttctcggactacccgattgctaca

SEQ ID NO: 603211 - DNA, 400 bp, Homo sapiens
  misc_feature (8)..(8): n is a, c, g, or t
  misc_feature (117)..(117): n is a, c, g, or t
  misc_feature (183)..(183): n is a, c, g, or t
  misc_feature (230)..(230): n is a, c, g, or t
ccttttcnaacaggccccctcccttcaagggggtaaaaaaattatccccctacacccccagcctcttgagggttccatgttaaaggttcccattttcagttccctcctgcccaggantgcattgttttttagccccaaggtggtggcaggggccctccctcccagggttttgggagccacgcntatgccctgcccttcttaagggcccctggggtttttgccccttttgncctttccccaaaggatggtccccccccagccctttatacctttttggttcccaggaaagtttttccagtaggggccccaaagtcccaggcccctggagtttttttcggcagggcccttttttttccctgcttttggtcaggggggcatgaataaaggctccaggttccca

SEQ ID NO: 603212 - DNA, 84 bp, Homo sapiens
gcctcggacaccgccatgtattactgtgcgagaagatacgtcccgtccggtggtatgattatctttgatatctggggccaaggg

SEQ ID NO: 603213 - DNA, 782 bp, Homo sapiens
  misc_feature (272)..(272): n is a, c, g, or t
ccaagcgtccgcgggactggcccatcgactggctcctggagcattattcgtgtgggtgaaagtctgcggatcgccgagaaggatgcgaaggcactgtgaccggcagaaagccaaccttgcggatccgcttcatataccgtccctcttccagtcacgtgtgcactcactgcctcgcctggctggcaatgatccgagaaacatgaatatggacaaaggacgtctgggaaaggaaggcgctgtggtgaacggcagcaatgtgaaccgctgacagncaaaggtgagcgacgatgccatgaagaccaataccatgcacgattcagcccttggatgaacgccgtaccttgctgcgtagggacttctttcctggtgccgttccgacccccctgtccgctgcggggatcttcattcctgcctatccgtttttcttcacatagccctctagatgtatttggtatcgcggttctgtcgttccgtcaggttgggaccggtcggagcacgcctggatggacaaagcttctttcagacggactgtcttgctggacggtgctgccctttcgacaaaccctcgagtcagagcaaggaggccctgcaggagggccgtccgcgtcacctctccggtaccctcggataccctcgagggtctaccttcctagattcggggtccttctacaagggagctggctggagggagaggtggacccttgtgttcggcctctggcacgtcgatgcgcctctcgattccgtgcggtacttgcctttgtgggtgatcttgcgtcgaagat

SEQ ID NO: 603214 - DNA, 435 bp, Homo sapiens
  misc_feature (55)..(55): n is a, c, g, or t
  misc_feature (186)..(186): n is a, c, g, or t
  misc_feature (213)..(213): n is a, c, g, or t
  misc_feature (225)..(225): n is a, c, g, or t
agagcgtggagtgactcagtcatgatacaggcgcatgaggcagccggtggaagtngtgcatgtagcggtcccagagggcctggtgtcggaagccatcgagggagtggacagacgctgaatactgattcaggaagaaccgcacgtcgctgatgtggccatgtggtccggagctggcaggtgttccancgaaacttctccacgatggtccacaanacagtgtctctngacactctttatttgtgtggtcatgcttggctggccactgttcaccatgcccccggtgacaggttcttgagagttggcttccatctcagagaagacgcccagctttccccggagagcagtgcacaccaggctcttgtgcaggtccagaaggtccttgtcagccactagcaccttgagctccttcaagtcctggagaaattccttgtctaa

SEQ ID NO: 603215 - DNA, 439 bp, Homo sapiens
cggcacgagggcgacctggggcagcacccactcaccctccaggctgtgtctgagcagcgggctgagtttggggacaggagcgtgggtggaagcatcccctgacttgtatgcaaatgccttgcaagccagcgtcctgccctggaggctgctgaccctgcttccccacctccacccgccaggttactgcaacctgaactttgaccccgccaccgccggcgacgagctgttccagctctaggagacccgctgggtgctgaacctggggatcctcctggagcccctgacagggggcggccccttcccgggcttcaagcagtgaccgcagatgctgtgctcgcgcggcctgtccgagggccgccactaggacgggaggtggaggtgtccaactcgtggtgtgcctgggcgtcacctacccccgcagctccccgctcggcggccg

SEQ ID NO: 603216 - DNA, 165 bp, Homo sapiens
gccattactgggggcttcagtggaggaagtaatgctgagcctgcgaggcctgacatcacttaccaggggccttagggaacccagccagcacagcagcagcagcctttcctctttttagatcaaacagtttcttggggtgttcccccgacccaccggggacaaaaa

SEQ ID NO: 603217 - DNA, 167 bp, Homo sapiens
tatactcatgcatgcagatccttacccactgatcgaggcggggattgaacctgaaacctcatggatcctagtcagttcgttaactgctgagccaggaagggaatcctgttttctctttcttgatttagatctttttcacatcctttaatccccttggacctgaattc

SEQ ID NO: 603218 - DNA, 1155 bp, Homo sapiens
tgtgtggccgtgtgtgtgggcttgttcttgtggttgtttgttttggtgggtgcgttgttgtttgtcgtgtgtggtttgttggtttgtgttgtttggtggggggtggggtgtttgggttggttgggggggggggggtgtgtgtggggtgggtgtggtggtgtgggtggtgtgggggggtgttggtggggtggggctcttaacacgccttgggtcaaccaccagccgtgttgggcgcccctagagcctcgagtctccccagtgtccaaaaaccaggcttgtgactcgccgccccgtacctgtgccggtccttaagttatctagctctttgtggtgcgaatttcgccactgaagtgtgtcgtctcggggagtcctgctgttgcttctcctgtccccgccggtctatgcctccaatcgggtctgcccctttgcgactgtggcccccgtttcagctcaaggtccgccgtgtgcccacgagggatttgaaccccggcgtgtggcccgagctctatcttgccaaggaggtcttcgagaagacccagcgagctcctgttcctcggggcccacggcctacctgggccaccgtgtgggattataggctttgctgtcgttcacctgcccgaggtcccccaagcctggccctacacgggccccgatgggcttcaccctgggcacgatgctgattggaaccacgacggccgctctgatcaggaggccttgggcacaggcctccgaagctgagcccactttggggtatgcgtcccttgcctggttcctcaatgcgtgcgaaccctggatgggaaggcggttcttcggtcacgtgtgaggcgaggccctgtgcgggcacatgtgtgcgcaccctcgctggggcttgcggcttccgtggcctgtaccctgtgtggccttcgtggactgcacgtgaacatgtacgaagaaaagtgctgtgcacccacagctgtgccaatgttcgagacctgaggctggctcaaaccggctgccttcacaccgggagagccacccccgtgcactggcaagccttccctggaacgagcgctcggtgttcaccctgaactttggggtcgacgggaggggtgccttttacatgttttattttgtatcctaatgaccagaatgaataaaccctgtttaataatttgc

SEQ ID NO: 603219 - DNA, 108 bp, Homo sapiens
  misc_feature (9)..(9): n is a, c, g, or t
  misc_feature (47)..(47): n is a, c, g, or t
ttgggcctnacaagtcgcagggcagtgggaatgaagccgagccactnggaaagggcaacagcgccacgaacacagaagacagccgcacaacgctatccggcccaaaaa

SEQ ID NO: 603220 - DNA, 862 bp, Homo sapiens
tgtgactgttcgataaactccaaagctggtcccatcatacccgtaatgctttcttttttcctttatggccaatctttgaactcattcaactccaggacatggaagaggcctctctctgcccttttgactgcaaaggtcaagtttcaattctggtgtcattggggaaggttgtctaaatctggtcaatgtgggtaaactctgagtttaattcaatgcttccctacattagactagagggctaaggattctgtcttgctgctttgtttcttctaagtaggcattcagatcattcctgtaggcttcctattttcactttactgctctaatgctgctagtcatagtctttagcacactaggtggtatgcctttattagcataaaacaaagaaaaattttaacaggatcttttacatatactggatggggggtggttcggagatgggtgggcagctgctgaacccttagggcattccctctgtaatgtggcgctttacaactgtactgctgcagctttaagtaccttaaagcttctcctgtgaacttcttagggaaaatgttaggtcagaactaaggtgttggcggggtctgtgagaggggaggggtaaaactgggtggcctctgatataatcttaggagccttgtcaactggcgtcgtacaggcatttattacaggactttgattggccggtttctctaatgggcctgcggggtgtttcatatggtttaaaggcggttgtatccattatttggcaggacattggtctaaccacatgttctggtagcctaccttggaatctcaactggggtccacggttaactacggtgtagtgtttccaaaccccaatctttaggagaaccatagt

SEQ ID NO: 603221 - DNA, 463 bp, Homo sapiens
tgctgggattacaggtgtgagccaccgcaccggccctaaagttttatttttgtgtgtttgtttgtttgtttgttgagatggagtcttgctctgtctcccaggctggagtgcagtggtgcaatcttggctcactgcaaccttcacctgctgggttgaagcaattctcctgcctcaggctcccaagtagctggggctacagtcgtgtgccaccatggccggctaatttgttgtatttttaggtagagacggggttacaccatgctgcgcaggctggtttcagactcctgacctctgtgacttctgcacgccttcggcctcgcaaagctgcaggtgttacaatgtacgagccagacgccgaccgagcccagatgataaagagtatagggagtggcggctaagtgtatgttgcccgctcgctaaaaatatatgtcttcactccatttcttactaataaatattattg

SEQ ID NO: 603222 - DNA, 889 bp, Homo sapiens
  misc_feature (2)..(2): n is a, c, g, or t
  misc_feature (874)..(874): n is a, c, g, or t
tntgctggaaagagcacgtactttaggctttctgcggtgtgtccctttgacactgggtttctgtcctagacagtttttatgattaagtcgtcctcactaccttactgctgaagtctttcatcccggacacgttttgtttttctattgctctgatatcactgcagccaagagaagctaactcaacccaagcacgggtgcagcttaggagagggcttgggtgtacgccagtcaatggagtgatggagcatgggtgggtgggtgggtaaatgcctcagcctcactggccttccatgagataattcggaggcacattccctacgattgttaaacgtgagggaacactggctgtccacatcaacactctcccttccatctgggtctttaaaagaaaataagacaatgagaaagaaatgtcttcattctaattgttgtgtatggcctagggaggagggagcaatgaaaagttgttctttggatctagaaagttctcttaggatctggaaagatgaggagccacatggcagaggcagtcctgaacaaactattagcgagttaattctaagttaatcttcctctgaaggcggaaaatttgttggcttgcacgcatcctctcactgtgggttggacctgcgtgcaccctcccattgtgggttggacctgcgtgcaccctcccattgtgggttggacctgcgtgcaccctctcattgtgggttggacctgcatgcaccctcccattgtggggcgggcccgtacatttcataaatgctttcccttttttctcattccctcttaaatgtccgtgttaaagggatgattatccaaatgaaccatgaaggtggctggagcgaaacaaaaagatgttcaaatggttgangtgctcccgaagagc

SEQ ID NO: 603223 - DNA, 314 bp, Homo sapiens
ttccggggttttttttccccccggggcccctggggggggccccccccccgggtttgggggggggggccccccccccccccggccttttggggcccccccccttggggggggggttccttgggttttggggggcgggcccccgggccccccttagttttccccccaacccccggggggttggtggggggtccggggggggccctttttttccccccggggcccccggccgggccccccgggtttgtggggggttttttggggcggggccttttttccccccttgttttttttttttttttttcccccccggggga

SEQ ID NO: 603224 - DNA, 414 bp, Homo sapiens
  misc_feature (383)..(383): n is a, c, g, or t
aagcgaggccatgtcaagaagccaactgtgggctgccggtcgtcctgctgctgctcctgcagagtgcacagggtgtctacatcaagtaccatggcttccaagtccagctggaatcagtgaagaagctgaatgagttggaggagaaggagatgtccaatccccagccatcggagaagtggcctcctccctgctgtgtgccataacccagccttgccctttggacctccagcctgtttgtgcctcccaggaagctgccagcaccttcaaggccttgaggaccatcgccaccgacgaatgtgaactgtgtataaatgttgcctgtacaggctgctgatgaaatgactctgggtcttaagaccactccggacactttccccacagcncaacctgtccatacttaggcaccattgaagt

SEQ ID NO: 603225 - DNA, 369 bp, Homo sapiens
ctggtaccagaggatcccgtgcattgtgcagcatgagggttctccccaagccctcacctgagatgggagcgtcttccagccaccatccccatcgtgggcatcattgctggcctggttctctttggaacttgggttcgctggagctgtggtcgctgctgtgaggtggaggaggaagagctcagataagaaaaggagggagctactctcaggctgcaagcagtgacaagtgccagggctctgatatgtctctcacagcttgtaaaagtgtgagacagctgccttgtgtgggactgagaggcaagatttgttcctgcccttccctttgtgacttgaagtaccctgactttgtttccaccatggcacgtggat

SEQ ID NO: 603226 - DNA, 550 bp, Homo sapiens
  misc_feature (391)..(391): n is a, c, g, or t
ctgcacttcagattgctcatccaggaagcgagggtgaagaggttaattgggcaagttgatgaggagtccttagttagaagcctggcagggctggtggctcacacctgtaatctcaggactttgggaggccgaggcaggtggatcacttgaggtcaggagttcgagaccagcctggccaacatgttgaaaccccgtctgtactaaaaatacaaaaaaaaccggctgggcatggtgacgcacgcctgtaatctcagctacttgggaggctgaggcaggagaaattgctcgaacccaagagctgaaattgcaccactgcactccagcctgggcgacagagtgagactccatctcaaaacaaacaaacaaacaaaattggttcttcttctgtggngcactggggagccatggtaggcctttgagcaggggagtggcagggtcagagctgagcttggggtatgcagtaaagggatggcttgttggtggcgccggggtcagagaggagaggggccattgcccttgaaggacagctcaatacccaggctaggaatta

SEQ ID NO: 603227 - DNA, 142 bp, Homo sapiens
tgttcattggctccaagaaaaaacttgggccagaattgtccgggggcctttatattatcaaggtagccacccaaggccaagccccagcgcctatattaaggcaccatttgaataaattctattacccagtaaaaaaaaaaaa

SEQ ID NO: 603228 - DNA, 246 bp, Homo sapiens
ggctccgactagcgacggagaactgggtgtgggagatagtggaggaggtggggtgaatcacttcagaagcggcatggattaaaaggggcctgagccagccgggcgcagtggctcatgcctgtatcccagcaccttgggaggttgaggtaggtggatcatgaggtcaggagatcgagaccatccttgcagtgagctgagatcgcgccactgcactccagcctgattgacagaacaagactcgttctc

SEQ ID NO: 603229 - DNA, 221 bp, Homo sapiens
ggaagcattttaatcagatggtcggggatggtaacactgcacagggagaactcacagctccaagagcttcctccaaattatgatgaagttcctgtaaataactagatttctacagcctggtctctgcccatgggaagaggaaatatgtaaagcatgtcgtctgcctctgtcatcatagagtctgagcacagctcgtgtactacagtctcagaacacagcga

SEQ ID NO: 603230 - DNA, 942 bp, Homo sapiens
atcagtgatgtgcgggacccaggtgcactccatctgcagagatgagacgggaatagaacgaattgaaaaaggacagagagaagatggggctaaaagaaacagaatggatgaacatgaaagccgtgtcttggccatccgccttctctctagtgctgggccagccgcctttgccatcgcgagagcaagggacagggcagatccgtaccagtatgtggtctgaaggaccccgacggcatgggcactcagacacaagtccacaccacagcactaccgtcccatccgtgctcatgaatgtttaatatcgaaaaagcaggaacaactactcttagaactttttttatgtctcaagtaccaatggctgagcattgccagagaaaaaaaaccccaagtccccaccatttattttttacaaaaccatccttttcgatgttctttgggtgaccgcgggctgcctctcttgttccttttcagacatcacttctctggcctctgtgttgtctcttctgggctgtcttgtcctggcaatgacctaaatgtacgaagggcgctgtctcgcgctgtgccattctatactgggtgagactgacgctgcgcgtggttggaatagtctggacgcccggtggggatgctggaaaggcaggaggcgtgaacttccaggtggccaggaggcaatgttgaattccgggggaataaagactcaccgagtatggtgcttccgcttgaggctaggattggcgggtcaaagggccctggagccggggcttacacccaagggacagggtgccgaaaccgaacaatgcctcctgggtcacgggggggggggacacgtggggcggccggaaacaaagcctttatcacagcgaaaccggttgagagggaaaccagaccgttatagagacaccgagggagaggcctcaccccctaaaagatgggcacacactg

SEQ ID NO: 603231 - DNA, 148 bp, Homo sapiens
cctccttggcctcccacagtgctgggattacaggcgtgaagccaccgcacccagcctacattaccttctttatcctatcacaactctcctgttttacacagaaagaaatgaccttcagagaggtcacggagcttgcccaaagtctcac

SEQ ID NO: 603232 - DNA, 223 bp, Homo sapiens
acgatcccttattttgataggaggagaatggcggatagtatatgaacatgagggtgttctcgtgtgatgagggtttatgttgttaatgtattgggtgagtgagccccattgtgttgtggtaaatatgtagagggagtatagggctgtgactagtatgttgagtcctgtaagtaggagagtgctattttgatccagggagaaacggttgcctatcaaaagacga

SEQ ID NO: 603233 - DNA, 297 bp, Homo sapiens
ccaattgctggtggagaagagccccaaaaaggaacgaagatatgaggccaaggtgggcagatcacctgaggtcaggagttcaagaccagcctggccaacatggtgaaattctgtctctattaaaaatacaaaaattaactgggcatgatggcacatgcctgtaatcccagctacttaggaggctgaggcaggagaattgtttgaacccaggaggtggaggttgcaatgagccaagatcacgccactgcactctagcctgggcaacagagcaagcctccttcttttccatcttaaaag

SEQ ID NO: 603234 - DNA, 102 bp, Homo sapiens
cacgcgatcgctgttttacgagtgtagggggtaagaattaacggaagaacgactgatgaattgctttatttattaccaggatggatatgcccgccgcattgg

SEQ ID NO: 603235 - DNA, 876 bp, Homo sapiens
aaagttaaccttgtgggctaagaatacgcgcccggcgcctcctataagcctgtgccccgcccccccccttaggtgtcaaaaagcacaaaatcaagggtctccagactatgggacctcccgcgcacatgcgggccccggccctcttgttccccggacgaggggaccaccctcttgggcccaagggcccaaccaacccctcgggtcatcggggctgtctcctaggcaacccgggaagcaaaagcatgccgcttccgtcggagttttaatcctgtccacaggggcccccaattcctcatttcgccgtgaacaacgatgtgcccgccctcccccctgcgccgtccgccgcattgtttcttcatggcgccccaacaggttaggcgaggccgtatcagcgtgccccgcgtggtccccccagcggcgtaacattgcgcttctaccagcgggcgcccccgtcgtctttgccctcagaccgcagtcttgtggtccgccgataaccccccaatgagtcctcatacatagggttttcccgccccagggccccgcgtgtctctgattctgcgaccgtcttcttcttggaggtacccttctgctttccgccccactgtggttgttatgttgtcatagcgtgttccaaatgttattgccacccctattgctatttccaaatgactggtgacaaccccgtatacaccaatcccctcataattctgccgatctcatgtgctcaccatagtaatcggaccatatcccccccacaatgattttgcgcttgacaagccaccccgctattttaaaggcaccctctttattcgccccacgcatcttctagaagatcccaccacccccccaaatattgtaggtccacacatgtaacga

SEQ ID NO: 603236 - DNA, 625 bp, Homo sapiens
acgcggctctctagaaccgggtgattgaacctaaaccttcgccgcaccgagtttgcagtacggccgtcacccgcacgactgctgttgcggtggagaaatcaaggccctaccgggcctccgtactcacctctctatagtgggcgtggccgaggccgggggtgaccctgcccgtgaagcctcccgtgccagcgacatgtccacggtcacatttcaagaggtcccgtgggcgccaggcaagcctgcagctagcttccacgctatccaaggtcttatgcagccacctcaaacaaggactcaacctcccaaaaatccccgtgaagggttcgcacgcacgctctccactccactccagttctcctgagggtcactcgctcgctactgtggctggcgagcacaggcagcacagcttggacagacgaggccctttcacacagcaccggacccatcagtgagagcacaaatacaccgcaaacctggatggtcacgggaacacggcaaatccccaaacacataaggcacacacagatgcagccggttcggtaccaatgggggggatcaaaccaggctatgaactacttcccaaatatgccactcctgacatgcatccaacgacttcgggacacgc

SEQ ID NO: 603237 - DNA, 469 bp, Homo sapiens
ccgcagtatggggcttgggatagagtggattgcaactagtctaattgtaggatatgtaataggaactctaacgaagctacccctaggaccctgctatacagtggtcgagagacaatataccccaatgcatcccttgctgatcctagaactgtcacccatgaatgacacaggattctataccctacaagtcataaagtcagatcttgttaatgaatacgcaaccggacagttccatgcttttcccggagtctgctccagccctccatctccagcaatcaactccgaccccgtgggggactaggctgctgtggccttcaccttgttcaccctaaggttcagatctctacctacctttggtgtgtcagttgtcagagcctcccggtctgtccccggctgcatctgtcctatggcaacatgatcctcagtctactcagcgtcggatgtaactatgcctgatcctatgaatgtg

SEQ ID NO: 603238 - DNA, 1053 bp, Homo sapiens
  misc_feature (497)..(497): n is a, c, g, or t
ggtctcccgccacacaaccagtctgtcccactcgcatggagaagatcctgatcctccgtgcttgtcgccctctctgtggcctatgcagctcctggcccccggggggatcattatcaaactggagaaacggtgagctctgcattgaatagtgcccagtgtaagagcaattggctgcagcatttcaatttgcgctgggccttggccctgttgcaacattccatggccagcgagaacagcgagtgctctgtcaagaacgctctattggcgatttactacaagttgtcccttgtgagcgttgcctgacctgtgaggggagacaaagaccatcggtggggctccatcaaccaagaccagtttgtgcatctgcatgacggctggaccgtccaagcagtgagatgcccacccattccaagacttagaccagaatgctggtaggccactaggccgcagggggcatctctcccttagtcagcgcatctccgtgttgccaaccttcntttgaccaagccatattctggtgtcttgatggcgctccttcacaatttagaggggcctcctgaaacgtataaaaaaacacacaaaccacaaacacaccaatgttgcggcactggcccgagaaaactttaaaccatggtggggcggcgcgccccatagttagtgacctggcaagggttccacagaaccggcgcggagcgcggtcgtccccaaaaaacgcggggccgacggttcaaacaccgggccggcactgggtacaggccgcataacaccccgcaggcgggacacaaacacacgaacgaacaacaaacaagcagcagagcaaagaagagagcgtcgaaccgatcgacgcgtcctccatgcaacggacccggagaggcaacacagcgagaacgacacagccccagaacagagagacagcgcgagacgacgccgcacggcaacctgaggccgcgcaggagggcgacgacgacaggagagcgacgaagaccaatagacggacgcggacgccaaagcgacaggaacccacaaccaagacgggcggagacgcgcgaacca

SEQ ID NO: 603239 - DNA, 296 bp, Homo sapiens
  misc_feature (256)..(256): n is a, c, g, or t
cctccaaggtatcaagcaattctccggcctcagcctcccgagtagctgggattatagacgcacaccaccatgcccagataattttggtacttttagtagagatggggtttcgccatgttggccaggctggtgtcgaacctctgaccgcaggtgatccgcccacctcggcctctcaaagtgctgggattacaggcatgagccaccaggcccagccctacaagaagacacattaagtaaatgggccagtctggactgnagaagaattggggcgtgatcaaacgacggtaagggagatg

SEQ ID NO: 603240 - DNA, 359 bp, Homo sapiens
tattctaaccactaactaggtagtgtatgccccttcagaacatgcagagtgtatctttcctacaatctctccttccgtttctcaagtatcgcgcagatttgttcaactctgcaaatatggacatcactttcttcttcttcgagaaaacacttgcatcagctctgtggtgtctccagggagacagctgtctgcatcccctgcagaaacccagcaacgattatgcacgtcgagacatgcgcttctactttcctatgtaagatatctcatttctgtacattatagcagaaaccacaaagctagggaaacacatcctctttacaccatcatctcacccactgttcttaaagcactcgtcaaca

SEQ ID NO: 603241 - DNA, 230 bp, Homo sapiens
tggctggccccactcccctccagccacaggtgtcggcgccccgcgcgcgtccggacccgccagcggccacagccagctgcgagccgttgaggcaggcgttgaccgtaaagaagacggagcagagctgcagccacggggccatggccgtgcgctcgcccagccaggccgttctctgcgccccggccgcccgccgctgcccaccgccgcattcccgtggagcccggcggccg

SEQ ID NO: 603242 - DNA, 101 bp, Homo sapiens
ccgtagttctgagcagtgcgtcatggttgtgcgcagtttgtgtccaacttgctgtaggtctgcttgaggatctgcccagcccggcccggcccccagcccgg

SEQ ID NO: 603243 - DNA, 121 bp, Homo sapiens
gctcgcgcggggtcgcaggtacccttcttatcagcggtataaatgcatttccccgctttgatttacccgataaccacagtaccgcttgaacctctttatttctgtccatctgacccatctt

SEQ ID NO: 603244 - DNA, 366 bp, Homo sapiens
cacgccggcatggtgcgcacccgccaactcaacggcaaactggcgcgagcgctgcaaaagcatgagcggaccgggagccgacacctgcggttgccccatctgcaaagccggatccgattggcggagttcatgctgcacagcgacatggagcccgacctcgacgtgatcaccgaagccgcgcgggacgcgctggcgatgtcgaacgtgcagctgggcgaggaactcgcgaggttcgcactcgatcgtggtggtggcctgccggccgcgttggtcctcgccgaggcggtgagttggcagggccgtggcgaggaagccggtttcgtgctggcccacgccgaacccgacggcgacgacgactggctgatc

SEQ ID NO: 603245 - DNA, 179 bp, Homo sapiens
tctgtgtcaggcttcagggtacacacctaatgtcttatatcgaagtatagtcatagttattgggcattcacattgtagtagtcactgtcgtatacacctaggatctctcctagaacatcatacgatggtcgcaacaacagatgattctcggccacatgttctcgcacatagcacgcaag

SEQ ID NO: 603246 - DNA, 418 bp, Homo sapiens
ccggtggggggggcgggcttaaaacccttccttttttcggggacccggggcccctttccccccctttgggttccccccccccacaagtgtttttcatgggggaaaccctggggccccccttgggccctccccccatgggcctgggggggggtttttaaaccccctgggttttcccgggctggggttttttttttccccgggggggtgggccccttcttggggggggggccccccccccccccaaaacccaaaaccccccttttgggggttttttttccccccctttttttggccggggaaggggggggtttttagggttataaaacctttttccgggggggccccttaaaaaaaaaacccttaaatttggggaaggcccccccaccccttttttttttttttttttttttttttttta

SEQ ID NO: 603247 - DNA, 217 bp, Homo sapiens
tttttttttttaaattttctttccgggaagagaagctctttgtccataaagaaaccttgaaaaattaattgtatgaggtatgaaaagacagagtcccccagtttggtatcttgttgaaggacgcccatgagttcccccaaaaaccccctttattttggtttttgtgccattttaaaggggggccaaaagtgagcaaataaagtggggaagaaattta

SEQ ID NO: 603248 - DNA, 127 bp, Homo sapiens
acgtcttacccccaaactaatcatctcttttttttcttcccacagcgttgtgccaattgatggggcaatgatctcttttttcagccacctccactgactcctaactccaaagtttatactattcaga

SEQ ID NO: 603249 - DNA, 270 bp, Homo sapiens
tgcaaagacctgtacgtacacagtgctgtctggcggacacaccatgtaccctggaattgccgacaggatgcagaaggagatcacatgccctggcaccacagcacaatgaagatcaagatcattgctcctcctgagcgcaagtactccgatgtggatcgagcggctccatccataggactcagcagtccaccattccagacagcatgtggatccagcacagcagagacgtatgaccgacgtccggccccgtccatacgtccacgctccata

SEQ ID NO: 603250 - DNA, 260 bp, Homo sapiens
aaacccccggggggggggggcccccccggaaaaccttttttttgggccgggggggggttttttttaatgggttttttttgggggggggaaaaaaaccggggtttttttcccccggggggtttaggggggggattccccccccccctttttttccccccccggggccccgggggggggggtttgggggggggggtttttttttcaaggggttccgggggtttccccctcccccctttaaaatttttttttttttttcccca

SEQ ID NO: 603251 - DNA, 412 bp, Homo sapiens
  misc_feature (36)..(36): n is a, c, g, or t
  misc_feature (92)..(92): n is a, c, g, or t
  misc_feature (101)..(101): n is a, c, g, or t
  misc_feature (144)..(144): n is a, c, g, or t
  misc_feature (155)..(155): n is a, c, g, or t
  misc_feature (240)..(240): n is a, c, g, or t
  misc_feature (368)..(368): n is a, c, g, or t
  misc_feature (370)..(370): n is a, c, g, or t
  misc_feature (398)..(398): n is a, c, g, or t
acccttcaaagaagttgcaattccgaaaagattccnaagattccgaagaagtttggggaaaaaggcttacgaaggaccttgcttaacccagnttgggggcnaaaccaagagttgggaaagattcgaaacaccgaacctcgtccngggccccttgnaagtccgggatactcaggccaagaagtgcggctgggatccggcggccacctgcacctgcgtatctctcgggccgcccttccgagnggctccccgagcctcccgccttcaccgggctctgttccggctgtccccgacggcgtcaaggtcgtgggacgtgacacgacgctgcggcgtcagctcagccttgcaagaccccagggcccgcgctgcancntcgactgtcgccgccgccgtcgcagtcnggaccaactgctgg

SEQ ID NO: 603252 - DNA, 1546 bp, Homo sapiens
taatctttaaacccccccggctttggtcacaacttataagcaaaaggggacccgagccctatactattttccatctccaaaaagacgggggccgggaggtatatttttggaccccatctcacgcctatactctcatttcaaccaatatacgccctgggcgcggtacgcccataaccggtataacattaacgggcggggcccaccaatctctctgtgtgccccctctaatgtgtggagaggcggcccctccttatcgcaatatatctcacaccccatatataccctctctccctctcataacattatatattacatctctctctcacacaatctctctatatatctctctactatctgtagagactatatctctctactagaaaaatctgcggcgtggctcgccctctatatatctcccacgacgccctatagcgtgttctctcacacctctcttctctagatatagacgcccctctctcttacgcgcgggcgcgacgcaaacacaaacacactatataatatgtggacccccacaccgccatatctcacaccgatgttgccctatatcttctatatatatatgatataaaaacacccgcgaggccccccctgagtggcacaccctctatagagcagaggggggggccctctctctctcgagcagccctctcctctctcatagatatgacacactctcgcggggagccgcaataagcccacgaggtgggtggatatctctcgactctctctcaccacactctccacaatataaaggcgctgctctctccttctctatataatctatgaggggcgccctattatcttattaaacccacacaacaccacactactatataaaacacaccattatattatttctcaccacgaggtgagaggtggggggggccgacgagaatgagtgtgttcaccctccgcgcggagaaacaaaaaaaagcagccccaccccatattatccgcccagagggggcgccccccacccacaacacacaacaaacaccaacgtcgcggttggggcttcccccacacaagaaggcggggcgcccccctatgccgaaacaaaacacaggcggcgggggcaaaaataataatctccccaataatactatatataaatatcatcatcccctccttccgtaagaaagaaagaaggtcgttgatattaataattaaataacatcttctgcggcgacgcaagggggaaatctatttctttgctggtgggtggagggcgcccctatttaatatgtaaccaaccaaaccacttccaccaagaggcgctagtaataagtatggcgccccctcatatataaagcccccccccacggatgatttatcaggacgaagaagggggggcgcggcaaccgatcgttgggggggcgcccccacaaaaagacgcaggggcaggcaagcattcaacaacccccgccgcagggtagtagaaacaagccccccccccgcaataaaaaacaagagatgtagcccaccaaacctacacccctgcaaataacagcacacacgtaccttt

SEQ ID NO: 603253 - DNA, 449 bp, Homo sapiens
  misc_feature (183)..(183): n is a, c, g, or t
atccttccttgtcttgtactgttttgcaactctagaaagaaaagttaaatatgtagaagcctgacagtgatacaaatgatccctgttcatattaatacaaatgcaaattgtttgcctggtagagatacaattgattttctctctgtagaaaaaaggatgatcccagccaggcgtggtggctcnacctgcggttccagcactttgggaggccgagacgggcggatcacagggtcgggagttcgaagccagcctggccaatatggtgaaaccctgtctctgctggggatgcgggaattagccgggcgtggtggtgggcgcctgtggtcccggctgctctggagggtgaggcgggagagttgcttgaatctggggggcggagtttgcggtgagctgagtcctcgccattgcattccagcttgggcgacagagtgagattacatctcaaaaaa

SEQ ID NO: 603254 - DNA, 358 bp, Homo sapiens
catgctgggtgagcagggtttccggattcagagtgtgaagacagagtcagaggagctgtttggggagaccatggagatgatggtcaggatgaaagatattgagttggatctgctgcgcggcactaggccatcatgttgcgctcggcggtcctgataggactggtagaatcgtgtggagcagatccgtgatcatatcaatgtgcgcgtgctctactatgctacctgtaagtgttgctacagctttcatcccgttgccccactcatctgccgcttttgcttttgtgttgggggtagattgggtttgaattctttccatctccatgagactttcatgcagcctaaagtacagcctggacca

SEQ ID NO: 603255 - DNA, 675 bp, Homo sapiens
  misc_feature (48)..(48): n is a, c, g, or t
  misc_feature (57)..(59): n is a, c, g, or t
gatgtcctgcgaatgagcaggagaaaaaagaaggagggagtgagaganagggaaacnnngagaaatagtttgagcagtgcacctggccataaaacaccagggcggggctgggggtgtctttgcaaatggtcacgtcacaccaggcctagctgcaccccagtacaccaggccaccagtacagctgtggcacccgctcagtcgtcttcctttgcggagcacctgctgtcagggtttattgcagaaggagccaagatcacacctttatgtaggcaacaaaataaatccttacaaaacatgaaaggatttttacagccaccctatgaaatgggaactgagtacccccattacagagaaggaaacggttacatagtctatctaaggccatgtgaaatgaaggactggactggaactagaatgcagacctagctcatacaaaagcctggaatgagtcttgcatatccactgcccaagtgaaaaaggaaactattggccgggcactgtggctcatgcctgtaatcccagcactttgggaggccaagacaggcagatcacttgaggtcaggagttcaagaccctctggccaacatggtgaaaccccgactctactaaaaaatataaaaaattagccagatgtggtgttgcacacctgtaatcccagctactcaggaggctgag

SEQ ID NO: 603256 - DNA, 410 bp, Homo sapiens
  misc_feature (14)..(14): n is a, c, g, or t
  misc_feature (164)..(164): n is a, c, g, or t
gtgatctagaggantcttttgggtgctttcttattctggatcagggtgttacatttaacattgatcaggtaaagaggagaggctgtgctaaggtctgagaaaaggttgctctaagcaagtgtggtgaggacaggatgactagggaatggcagagaacaggctgngctactgtcagttcaagcaaccaggtgagcagcagcagtctaaaaatgcccaaaagaacactccatggattcagggaagggtgaggcactgctttctagtatgtggcaaaaaaaacataatctgaattggggcccaggggactttgagtttgtaatggggagggaaaaggagtgagcagttctcctcccctccccaaaggcttaggccaacacaaaaaaaaccacacaaacacacccaccacaaag

SEQ ID NO: 603257 - DNA, 184 bp, Homo sapiens
tcccccccggtcgggcccctgagggaccagttcccccgcggcaattttgggttccaggtgcatcctagcccgcccgaggccccttccaccccccatgggggtttgggcccggccttgccttcccttctgggccagtcaccccttccccaggccacccaaataaagggttatttaactgtctgga

SEQ ID NO: 603258 - DNA, 94 bp, Homo sapiens
  misc_feature (29)..(30): n is a, c, g, or t
gactgtgctctatggggcgttagccacanngttaatttaccccacagtttctattcaaacgtcctggacacataattacaggattaaggtcgta

SEQ ID NO: 603259 - DNA, 148 bp, Homo sapiens
taggacacagttaaaaaaaagaggtaggaagtactactgaaacagatctactagttacaaatcgagtatgagttccccagtgaccggttacaaattagttactgggcagaccctcgtgtgcaaaccctaacagcagaggggtgtaccg

SEQ ID NO: 603260 - DNA, 215 bp, Homo sapiens
cgatgtgtcaattgtcccgtcaggccgaatcaaaagatagaccggcaccagcttttcgagtggcagtaaagatgcgagaccggaggccagaccaagatttgccgccatggacacgcccaagccgaccagcaggccgcgcgagacatacaccgcgagcctcgacctcagccgttgaaatgaagaaacttcagcaaaatgctcttcgagctgtggag

SEQ ID NO: 603261 - DNA, 134 bp, Homo sapiens
gagctcggtaccccccacacacgccagattctttcctgaggctggcgtgtgtggggtgggaccacaagggtcttgtggcctggctgcctgcaggagtctctgaagcagccacattcctgatgcttcggggatcc

SEQ ID NO: 603262 - DNA, 846 bp, Homo sapiens
ggactttgccactgagttgattttagcagagaaacgtggtgacctgacagagagagaatgtgaacctagtgcagtattggaaatgctgatcagcagcatcctgagaccgatgtcttgtcatctttgttctgtcatgctactttctcatttgcaaatgcagcgctaagtgtcagcaagaggcacataataaaggaatagtccatgacgtgtctattaggtggagcagagtacatacaagattgcatgagtatacacaaaagttaacaaggtgagtggaagaatgttcatttctatcgagatcgcacgcgtgtagccagcactagtcgatggacgttggatcatgcggcaacagccgttgagaagagtgatgtcaatcgatggtctacctcagtgtcaaacaggggacaaacagtcatcctagaatattggagaggatgcacagacgtcgagtgataaccccaaatcccaatgaagtatactcttgaaaatttggcagagaatgttgccttatacggtactttcagccatttggcttcgggccccgtggctgtgcaggaaagtacatcgccgatggtgatgatgaaagccatcctcgttacacttctgagacgattccacgtgacagacaattgcaaggacagtggtgtagacgagcatacagacagatacacggacttgtccttggcacccaagatgcagcactaggaaaccatgctggcacatgatccttcaaccccaaggaaactcagaccggtgtctgggaaccatagagcaaggctggcaagtacttactctggaggcagttctcatcagtaaggtcacatacaaatcatccatccttgacaa

SEQ ID NO: 603263 - DNA, 834 bp, Homo sapiens
gcgctgcgagctcgttgctggctggtgtgtcgctgctgtagctgcgtctgctgctgctagtcgtgcgttgcgtcgtcgctgcgcgcgccgtagcccgagtcggcgtggcttgcgtcgcggtctgctcgatgtccgtgtgctgccctcacacgctggggaccccccccgcgtgggctcccccccgctgttttttacccccattatgggggtgttctccccctagacagcagtgccccgcagattctttttttgtgggaggcccccccctagtttttgtgtgttggccacccacttatggtgtgtattctttttgccccgctggacaatatatcccccgggtgtttgcccccactcctcgcggtggtggtctctttgatcatacccgcgtgggggggtgtacccaccacattattctttggggggcggccccaccaccatggttgctcgtctagtagtccatttctgactccagccccgtgtttgtcctcgccacacacaaaaatcatcgtcttctaagcaaaaaacatctggtcctcccttctttcctgtatatcccccctcttctccctgggggtctttttcttcagtacacctcttggtagtacacccccttcaaggaaccacaaaattttctgcgccccccccaactttttcccccccccggagtctacaaaaatcaacaccccccccccctttatcgtataccccaccgagcaccactcactcctctacaaacctaatgttcccaaacactttttaattgttcgttatacacaccctgttctaccccatcaaaaaaaatcacataacagatataataaaacatacaaccaa

SEQ ID NO: 603264 - DNA, 465 bp, Homo sapiens
tttctgtgtgcaagcaaagttcgaggcgcaccaggatgagcggtgagtgtcactcacaaggtaaagccggcagcggtgtctggatggccttctcctctggctcttccatccgcctctttcacacggagactctggagcaccttcaggagatcaacatcgccaccaggaccaccttcctcctgccaggtgaggctgcgcacctagtttgagatgaggggacagacactcatgggtgccaacagggggctgtgtagtgggcatcccagctcattaactgccagggcagccttgaaaaccatggtggacaggaagtggcgggactgggatttatacccaagcctgtcctatcaacgctccgattcctgaccctctatgttccctatgccatctgagcaggtgtggtcctcaggaggtgggctccaggccaggtgggctttcctgtgccaggagctggtacctcggccg

SEQ ID NO: 603265 - DNA, 125 bp, Homo sapiens
cgacgtctgttacctgaggaggggaaagtggaccaggaaatcatggaacagtaaggctcggggggagaacggcattcagacacggacagtgtacaggagggaagatgatctgattccctgctaca

SEQ ID NO: 603266 - DNA, 250 bp, Homo sapiens
ttcgtaacttcaatgcattctttggcggccctggacggcttccgtctttgaagtgtaggtgggcctgctgttcttggtgagttcccctatcacaagccactcacactctttgcctcttagagctgtctctttggcgagtcacgaggggcccactgagcggcgagcagctgatgttctctactctacgcagtgcgacatctgatccacgtcggactgtaagcgtaagcgactgtaagacatggtaaggttc

SEQ ID NO: 603267 - DNA, 189 bp, Homo sapiens
ttatgcatgattagcgggggaaactccgcgcagctctttagacacaagagtactttacttttcttgaagaactccagagttttgtctaggaggcagtaaagcagacagatactgaaagggataagtttcataggcatggctttggcccagtgaacaacatccgtactctagaagctaagacatagtagc

SEQ ID NO: 603268 - DNA, 104 bp, Homo sapiens
gccacccagctgccgactttcattagccagttctcgcgtgcatgacaggtcagggcaaaggtcaaaccctccaaaatttgattcccaggtaagggggccccttt

SEQ ID NO: 603269 - DNA, 169 bp, Homo sapiens
  misc_feature (40)..(40): n is a, c, g, or t
gtgtggacacttgcaaggctctggcccctgagtatgccanagccgctgggaagctgaaggccgaaggttccgagatcaggttggccaaggtggacgccacggaggagtctgaactgggccagcagtacggggtgcgcgagtatcccaccaataagttcttcaggaatgg

SEQ ID NO: 603270 - DNA, 345 bp, Homo sapiens
acttagggaaaggcattgcaatgttgtgttagtggtcatgtggctggaaaccagacttgtaccacacaggctcacaaacatgccttttagagggcttgctggataaagaaggaggggacagggtagtgcgaaagactgcagaagatgtttgcgtgaatccccaactatcgagatgaccttaattcacaaatgctaaaatttggacttctacatgttcatttaaagataaataaccagacattgttttgacctgctattcaggtgaaatactgtatttgggactgtaatctgggaagggtattttaatgaaaaatattaccatttgctttgcataaaataaaaggc

SEQ ID NO: 603271 - DNA, 449 bp, Homo sapiens
gtgagccgagatcgcgccatttccagcctggcaacaagagggaactccgtctcaaaaaaaaaaaaaaaaaagaagagaaaagaaaacataagtttcagccaggcatggtgggtcacacctgtaatcccaacactttgggaggccagggtgggagaactgcttgagcccaggagttcataccagtctaggggcaacatggtgagaagttgtctctactaaaagtaaaaagaattagctgggcatggtggcatgcacctgaggtcaggtcccagcgacttgggaggttgagaggttggaggattgcttgagcccaggagatgaggctgcaatagcatgatcacgacgctgcacttcagcctgggtgacagagcgagagcctgcctcaaaaaacaaatatgtttcaacttttttataataaatatgttcattttgcaactagcaaaaaaaaa

SEQ ID NO: 603272 - DNA, 103 bp, Homo sapiens
tagtaagtttctatattttattatgaattcatcttttttacatgaagacaaaataaacaattatcaaatcaatcaaatcatctcttgtactttctctgctaaa

SEQ ID NO: 603273 - DNA, 229 bp, Homo sapiens
ccacatttgtttatgcatctcagtggatggacacttgagtggcttccacctttagctatggtgaatatggctgccgtaaacatgggtgtgcaaatatctgagtctctgctttcaatcatatggcaatcctatgtttaatttcttagggcactgccataagtgttttacacggtggctgcaccattttacattcccacggaaggttccagtttggccacatccgtacggg

SEQ ID NO: 603274 - DNA, 388 bp, Homo sapiens
taccatatcaacacacagaaaccaagcagcacagcatactcagcagcagtctactagagctctttcagctgcatgtacttcaaagacaaagaccctgacaacgaggagcgtatcatatctgacggagttaattattcaattagaacaaatggtgtgctactatttcataccaaggtaatttataccaggtgctgcttatctaaaaaataaagatggttcagtcatctcatgtggaccagatagctgtactgaatggaaaccagcacccttcaacgattccaaaataaaattacctctactacaacagatggggaatctgtaacgatccatttgtaagaccatgtaaccgtaagaatatccataaaggcctcacgttgacattctgata

SEQ ID NO: 603275 - DNA, 929 bp, Homo sapiens
gttatcaaagagcacttgagactgtctgaagcccaaagcctgaggacagaaagaccctgatgcaggtcagcccatggcaggcagatgcccttgtctgggcctggtggttttccaagccctcaggctggtcctgatccagtgatggatgcacagcttcttcaccttgtctcactgagactcactgatcatgagagcattctgagacacgctgtaataatcctgcacaggcttgctgtatgacccctggccacagccttccctctgtcattgacctggaggggagaggtcagccgttgagctaatgaggtagctatagttgcagccctcatggacaagttcgagagatccaggatcagctttgaaggctggattctatctaccataagtccgtttcgacattaccacacacgggccgatgcagcggagcgtaccgatcctagcattgtagcgactttaagctcgagtgcatgggcaactagaacacgctaatgagacagcagattacgcagtgtatttgagaatgcatgagggacaacctagtaaggcccttaactatcacctatgtgcatcacatctgcacactctcttctccattccctagcaggaacttctagtctcatttaacagataaagaaactgaggcccacggtttcagcatagacaatgatttggccaggcctagtaaccaaggccctgtctctggctactccctggaccacgaggctgattcctctcatttccagcttctcagtttcttgccttgggcaatggccaggggcccaggagttggggagagttggtgatggagggcgagaggggtcacacccatccacttgctgggtctaggctgctgtacaccaaggccctgcatctgtctgctctgcatatatgtctctttggagtgggaattccatttatggtcaaaacat

SEQ ID NO: 603276 - DNA, 404 bp, Homo sapiens
  misc_feature (21)..(21): n is a, c, g, or t
  misc_feature (28)..(28): n is a, c, g, or t
  misc_feature (100)..(100): n is a, c, g, or t
  misc_feature (118)..(118): n is a, c, g, or t
  misc_feature (120)..(120): n is a, c, g, or t
  misc_feature (143)..(143): n is a, c, g, or t
  misc_feature (279)..(279): n is a, c, g, or t
tggcggtgacggcggcggganaagcgcngccctcgcagacagccttggggtcgccggccgctcgcagcgttgtggaggggcgggccggacgctgagcganagcttgcgccacgggtgnanttgtgtgtcccagagtgccggancgagtcccagaagagaggcgaggctaagccagagcgctgggttgcttcacagggaagactcccttccccctgcttcaggctgctgagcactgagcagcgctagaaatggaagccatcgccaaatatgacttcaaangctacttcagacgacgagcttgagctttcaaaaggggggacatccctcaaggttttgaacgaagaattgtgatcagaacttggtacaaaggcagagcttaattgaaaagacggcttcattcccaa

SEQ ID NO: 603277 - DNA, 184 bp, Homo sapiens
ctctatttatcttgttggctcacatggctcagcaatcttgactggtttttccttcactagcttacctgactcagcgtatcttctatccctatgaacacatagccttatctctgaggatcagaagctaggtccatcgaccctctgaccatcctcctgagacacatcatgcaggatcaggaactag

SEQ ID NO: 603278 - DNA, 1014 bp, Homo sapiens
  misc_feature (23)..(23): n is a, c, g, or t
  misc_feature (63)..(63): n is a, c, g, or t
  misc_feature (190)..(190): n is a, c, g, or t
  misc_feature (207)..(207): n is a, c, g, or t
  misc_feature (357)..(357): n is a, c, g, or t
  misc_feature (368)..(368): n is a, c, g, or t
  misc_feature (386)..(386): n is a, c, g, or t
  misc_feature (401)..(401): n is a, c, g, or t
  misc_feature (417)..(417): n is a, c, g, or t
  misc_feature (490)..(490): n is a, c, g, or t
  misc_feature (541)..(541): n is a, c, g, or t
  misc_feature (554)..(554): n is a, c, g, or t
  misc_feature (588)..(588): n is a, c, g, or t
  misc_feature (602)..(602): n is a, c, g, or t
  misc_feature (651)..(651): n is a, c, g, or t
  misc_feature (675)..(675): n is a, c, g, or t
  misc_feature (688)..(688): n is a, c, g, or t
  misc_feature (690)..(690): n is a, c, g, or t
  misc_feature (737)..(737): n is a, c, g, or t
  misc_feature (798)..(798): n is a, c, g, or t
  misc_feature (802)..(802): n is a, c, g, or t
  misc_feature (823)..(823): n is a, c, g, or t
  misc_feature (827)..(827): n is a, c, g, or t
  misc_feature (833)..(833): n is a, c, g, or t
  misc_feature (875)..(875): n is a, c, g, or t
  misc_feature (877)..(877): n is a, c, g, or t
  misc_feature (905)..(905): n is a, c, g, or t
  misc_feature (909)..(909): n is a, c, g, or t
  misc_feature (919)..(919): n is a, c, g, or t
  misc_feature (976)..(976): n is a, c, g, or t
agggtagtaagtcaggggattcncctccaagtctaccacacaaaggaaagtgtcaagcctctnttcacccctactcaatccccacaaaatagggggttgttcaatattgttttcaatgaaaaaaactttgtggttaaaggtttctccttaggactagcgacaaagttaggcttatacttttaatgaagancataaacgaagccagangggctttaggaagccagagttcttgggggaaaattcttagcgtactataccccagcctcttaccttagggttaaatctaggtctaaccaagccgtacaggtcaactaagagggaatgatgaaaccacagagtttcatggagaaaccatgnaaaaaaaaaanagctgaaaagcagtaaanaaactgacccaagcntggagggaaaccattnccccctccgtcctatgagacccctttcttgctccagtcaaacagtgggccacagcatggcaggcctccctgtngggtgcctgacaataccctagatgcctctctaaaatcagaagccgcatgcngccccacccagtnacagccaaagggaaaacataaataaaaggctgcngcctcaggcttgtngttatggaaagagcctggaattgacaggagaagaagcactgccaaagtnagggtcttatttatccttcttgtnttccccatctganantgtggtgggggttgaagccacaagctgcccctcagggatattgtttncagcctttgatagtttcttggcccgccggtatagctcatttaagttaaattctcggatcanattntcctcagagaaggtccatganaaancccgtnctttcttgttaatttgtgggcgccgcattgcctccttgccancntgggacaggatcagggtagggagttgcntggngaggggtgangttctccctttgtaccgcgttccaacatcagtttagcgttcaaaaaccaccttcccnaaatttagccctgttcagttgttttttaagggagaggg

SEQ ID NO: 603279 - DNA, 433 bp, Homo sapiens
aaagacccatgacttggtggagcagtaagccagagactatgtgagttcaagctaagacaactcttgagcctagacaagggaggtcactgaaagcccagataggtcttcctggtggatccttccccgataagtgtcctacttgcttctcatccaccaaggaatgagctctcttatacagcagtagaagcttacatgagacactgggaatgctggtgaaccgcacgcggttctaggacaaccgtggagggttttaattgtctagtgttgtcatttttgtttccttgggtctacttttatacattcaggtttgagttttgctttcacattatggtacactcctggtgtaatttttccagtttttgcccaagtctgtgtaagtttccagttctgtctcctggacctgggtgtttctgactctgggacgtcatacgtg

SEQ ID NO: 603280 - DNA, 740 bp, Homo sapiens
  misc_feature (201)..(201): n is a, c, g, or t
  misc_feature (321)..(321): n is a, c, g, or t
  misc_feature (328)..(328): n is a, c, g, or t
  misc_feature (336)..(336): n is a, c, g, or t
  misc_feature (342)..(342): n is a, c, g, or t
  misc_feature (347)..(347): n is a, c, g, or t
  misc_feature (353)..(353): n is a, c, g, or t
  misc_feature (379)..(379): n is a, c, g, or t
  misc_feature (387)..(387): n is a, c, g, or t
  misc_feature (389)..(389): n is a, c, g, or t
  misc_feature (394)..(394): n is a, c, g, or t
  misc_feature (397)..(397): n is a, c, g, or t
  misc_feature (406)..(407): n is a, c, g, or t
  misc_feature (422)..(422): n is a, c, g, or t
  misc_feature (438)..(438): n is a, c, g, or t
  misc_feature (442)..(442): n is a, c, g, or t
  misc_feature (450)..(451): n is a, c, g, or t
  misc_feature (461)..(461): n is a, c, g, or t
  misc_feature (511)..(511): n is a, c, g, or t
  misc_feature (516)..(516): n is a, c, g, or t
  misc_feature (520)..(520): n is a, c, g, or t
  misc_feature (527)..(528): n is a, c, g, or t
  misc_feature (530)..(530): n is a, c, g, or t
  misc_feature (538)..(538): n is a, c, g, or t
  misc_feature (559)..(559): n is a, c, g, or t
  misc_feature (561)..(561): n is a, c, g, or t
  misc_feature (583)..(584): n is a, c, g, or t
  misc_feature (592)..(593): n is a, c, g, or t
  misc_feature (673)..(673): n is a, c, g, or t
  misc_feature (725)..(725): n is a, c, g, or t
cccgacgacgcgggagccgcacgcgccggacgaggctcgctgcgctccctgttgcccagcgcgggcccgttgaggcggagcctcagttcccggccaggacacggtctgggccgcgaatctccggccgaagagcggcggcggcagcggcgggaaaaaaatgaagaatgaaattgctgccgttgtcttctttttcacaaggcnagttcgaaaacatgataagttgaaaaaagaggcagttgagaggtttgctgagaaattgaccctaatacttcaagaaaaatataaaaatcactggtatccagaaaaaccatcgaaaggagnaggcgcnagcgaganggatgncgggngcaagnaagagtttcagagagtggatgcgcgngatgtccngnaagcntgngaaaacagnnggcgatgcgttggtntagggagcctggggcntgcnaaaggagnncgactgctcnggggggacgccatgtgaggtgtgcgggcgggagggggagaaaaacaaggnagggngggntgccagnntngaaaatanagatgagaacaaggatgagancnccaggaaagttaccagggcccnngagaaggnnacctctgattatcattcaggatcctcttcttcagatgaagaaacaagtaaggaaatggaagtgaaacccagttcggtgantgcagccgcaagtcctgtgtaccagatttcagaacttatatttccacctctnccaatgtggcaccct

SEQ ID NO: 603281 - DNA, 863 bp, Homo sapiens
  misc_feature (197)..(197): n is a, c, g, or t
  misc_feature (324)..(324): n is a, c, g, or t
  misc_feature (444)..(444): n is a, c, g, or t
  misc_feature (451)..(451): n is a, c, g, or t
  misc_feature (459)..(459): n is a, c, g, or t
  misc_feature (465)..(465): n is a, c, g, or t
  misc_feature (470)..(470): n is a, c, g, or t
  misc_feature (476)..(476): n is a, c, g, or t
  misc_feature (502)..(502): n is a, c, g, or t
  misc_feature (510)..(510): n is a, c, g, or t
  misc_feature (512)..(512): n is a, c, g, or t
  misc_feature (517)..(517): n is a, c, g, or t
  misc_feature (520)..(520): n is a, c, g, or t
  misc_feature (529)..(530): n is a, c, g, or t
  misc_feature (545)..(545): n is a, c, g, or t
  misc_feature (561)..(561): n is a, c, g, or t
  misc_feature (565)..(565): n is a, c, g, or t
  misc_feature (573)..(574): n is a, c, g, or t
  misc_feature (584)..(584): n is a, c, g, or t
  misc_feature (634)..(634): n is a, c, g, or t
  misc_feature (639)..(639): n is a, c, g, or t
  misc_feature (643)..(643): n is a, c, g, or t
  misc_feature (650)..(651): n is a, c, g, or t
  misc_feature (653)..(653): n is a, c, g, or t
  misc_feature (661)..(661): n is a, c, g, or t
  misc_feature (682)..(682): n is a, c, g, or t
  misc_feature (684)..(684): n is a, c, g, or t
  misc_feature (706)..(707): n is a, c, g, or t
  misc_feature (715)..(716): n is a, c, g, or t
  misc_feature (796)..(796): n is a, c, g, or t
  misc_feature (848)..(848): n is a, c, g, or t
ggctgcttttggcccctgtcccctgaaccgaccgctggtgagccctgtcactgctgcccctgtgaacccggaacgggtctttctgtccttggccgcatttccccattgttttgcccccaaaggacctggccccggggggggggccccccccccgggttttgaaggccgcgaaggcccccccctttttcccaaagggnttttttccccccctgggccccaggacacggtctgggccgcgaatctccggccgaagagcggcggcggcagcggcgggaaaaaaatgaagaatgaaattgctgccgttgtcttctttttcacaaggcnagttcgaaaacatgataagttgaaaaaagaggcagttgagaggtttgctgagaaattgaccctaatacttcaagaaaaatataaaaatcactggtatccagaaaaaccatcgaaaggagnaggcgcnagcgaganggatgncgggngcaagnaagagtttcagagagtggatgcgcgngatgtccngnaagcntgngaaaacagnnggcgatgcgttggtntagggagcctggggcntgcnaaaggagnncgactgctcnggggggacgccatgtgaggtgtgcgggcgggagggggagaaaaacaaggnagggngggntgccagnntngaaaatanagatgagaacaaggatgagancnccaggaaagttaccagggcccnngagaaggnnacctctgattatcattcaggatcctcttcttcagatgaagaaacaagtaaggaaatggaagtgaaacccagttcggtgantgcagccgcaagtcctgtgtaccagatttcagaacttatatttccacctctnccaatgtggcaccct

SEQ ID NO: 603282 - DNA, 111 bp, Homo sapiens
ctgatccgtgtgtgtgctgctgccgaccacaactaccagagctacatccttagagcgctcggccagctgatgctcttatgtggatggaatgctgggaggtggtggcccaca

SEQ ID NO: 603283 - DNA, 414 bp, Homo sapiens
  misc_feature (326)..(326): n is a, c, g, or t
  misc_feature (346)..(346): n is a, c, g, or t
  misc_feature (373)..(373): n is a, c, g, or t
tttgaacttgggtcagaccaaacgagtttcagtgcttggtttagaaatgaatatgtacccgaagctgagcatgtgagaatccacccataagaatttggccgacccttttggggaaaaggagcctctgtaagctagggtcactaaattggtacagtgaaagcctgtagcccccactttggaaaagcctgcctaagactaacaaccccctgcaaggaagagttgaaaaatggaaaaagactggttttcatcatcatttgcccactcaagttcagctcccttggtcatacaacccgttaaatttatccccacgccctaccaagttattnttgtaaaattatgtcacttntttatttttattatatgaaaaaatttntttgacgcctggggctacaagaacgagatcttttgttctca

SEQ ID NO: 603284 - DNA, 347 bp, Homo sapiens
ggttgcatcctaatgacattttaattggtaagctgtctgtaataatgtttttgtgttgtagtaaaatagtatttattttaactagggtttataagattatgcaaatcccaataaagaactgacacgttccataggccattgagtggaaaatcttgtgaaacacagcctaaatacacagtttttacaccaactaatttgtcttgcctttaaaactgattataactcttctttaagtacaacttttataaagaaaaaatacaacactaagactgtatgttctgtaaattatagtgtgatgacccatgcagaaccgctgtctgaagcttactcagcgattcatagccatc

SEQ ID NO: 603285 - DNA, 182 bp, Homo sapiens
  misc_feature (115)..(115): n is a, c, g, or t
cgcacggtttctcatcttgtcgcatgcattcttcaaacccagtcacagcaggttcatttgcccatccattgtcaggccaggggccatcacaggcacacatggtggccaggcactntccgtccctcaaccacagcacaggcacagtcagttcaacagcacacacatatcacaggcaagcacat

SEQ ID NO: 603286 - DNA, 978 bp, Homo sapiens
ggagagagagaactagtctcgagttttttctttttttcttgggttgaccacagggtacttaataggatggtcacatgacaaggtgcggctccttaggcccctcccctcttcaaggggtctacatggcaactgtgaggaggggcaaattccagtgtggctgggaggactagacgtgtcggccagggaaatccccagcaagtcgaggagtctctactaactaacctacttgtagctctatgaccaggcagagcatcagaggaccacgggagctctaactcctttgaggagcgccattttggcgccatagacggtcaacacaccctggtaagagctggaaacgccaacaaattcggggggaacacaacacacagggacaatagacgctgagaacaaccaggggaccggtcaagcaggcgaaaatgggccaaagcccccagggcgctacaaaggtgtgggacggagacaggggagtgctcggcatagataacgaacgtccacgaggggacccaacccacccgagggagagacaatccaacggataccacccacaagagaagagaccccaattgaaagggcggagcccacctccgcgaaacaaacgcgcgacataaacaacccacaccagtaaacatgggaagacgactccaacacacaaatatgaggagcaaggcgacatacaaacaaaaacaccaggaagagcgaaaacaggggacaccaaacccacgaaaggcaaccaagagtctagagggcacaaaagcgacgccaaaacagagacaacaagtgcaccaaagaaccccacggagtagaaacccgataatcccaccagatacacagcgacacaccacgggaggaacctgaaaccgtgggccccccccacgaacgcccccaaggggacagcagccgccccagacacaacaagagacaacagcacagatgaacataggtacaacaggagcaacagaagcccctcgcgagaga

SEQ ID NO: 603287 - DNA, 517 bp, Homo sapiens
tctgactctggcataacattacgtgacaaaaagaaagtcaaaatattttaccccaaaacatgtttctttgccctattttgcaatttcttccataaaggacagcattttcccccaaaagctatcctttgtggggtaaaatgtgcatctgtaaagaacatctattaacatagctagatgtttttcttccaggccctcccaatcctaaacggattaactaaaagtctaacaccttttgaagatctgaataggaaacatttgtcatctattatctctaagagcagccaccataagacttcaaaagaaccttagtctccactatcttttatcttaacctgaacacttcctttctatcaatcccaggtcttcagacaaactcaaccaattgtcaactagaaaatatttaaatttacctatagcctggaagcccccacgatcacccctttgcgttgtcccgccttcctggaccaaaccaatgtatttaatgtatttgactgatgtctcatgccaacctaaaaca

SEQ ID NO: 603288 - DNA, 205 bp, Homo sapiens
gtaattgtgcacaatatatttgaaacgcactctaatcaactcctccttgtggtacagaatataccagccatttcatctggctacgttcaccatctacaagtgcattaccatatggggattttcgataacaaggagttgaccacaattatatctgcatattattgcctttcccttttgtcaatttttctcccactaattgctggca

SEQ ID NO: 603289 - DNA, 446 bp, Homo sapiens
tcttagtcacggtcataagctgttccctgctgtgacaacccgtggtcggtcgtgacggggcatgccttgtagcgcctgcaggcgttacttccttaatcctagagtgggtcaacaatcttgtgacgaataagcaccctctggaggacagccccgtgaagaccttgtacagaatgtgttaaattacttgtacaaaattgttatatttgcctttatctttgtttgtaacttatctgtaacaggtttctccctactgtcaacaaaatatgcatgtatagtaataaggacttcattcctccatgtattctatcccttatcttactgtcattgtcctaaaaccttattttccaaacttgctcacgtaacatgttgcatgtggcttactctggatatatctcagcccttctgcacatctaagcttcgatggcgtcggtcaaatgagggaacat

SEQ ID NO: 603290 - DNA, 355 bp, Homo sapiens
gctggtaaagttggaagaataaagttaaccaagcaggccaggcacggtggctcacgctattaatcccagcacttagggaggccaaggcgggcagatccctgaggtcaatagttcgagaccagcctggccaacaaggtgaaaccccatttttactaaaaatacaaaaaattagccaggtgtggtggtgtgcacctgtagtcccagctatttgggaggctgaggtgggagaatcacttgaacctgggaggcggaggttgcagtgagctgaaatcgcgtacccccctccagcctgggtgacagagcgagactgtgtttcaaagaaaaaaaaaaacaagcagccttttgcttggttgga

SEQ ID NO: 603291 - DNA, 326 bp, Homo sapiens
cccttttcccctttggccctttttggggcccccttaaaaccagttttgtccaaaaaaccggggggggccgggccgggatttcccgggattttttccccccccgggccccggggggggggggggtttttttaacccccccattttttttttttttaagggggtttttaaaaaaaaagggggcccccagggtcccccctaatttttttttccttttttggggccttttggaaaaaaaaaaaaggggggcccccctttttttttgggccccgggttttttcccccgttttttttaaaaaaaaaaataaaggccgggggttcgggggtta

SEQ ID NO: 603292 - DNA, 107 bp, Homo sapiens
ccatagcagactgtacatgtgtgtgtgtgtcatattattcagtagactaagctttgatccttagttatgacagtaatgaattctgaatgtcacagttaatcagattt

SEQ ID NO: 603293 - DNA, 124 bp, Homo sapiens
cactgtgcgatatctctagtagctgaacgtgagactggacatgtgagttgttatcatgtacgtgcatcagcgaagcttctcgtaactgtctttgagcacactacacatgaaattctaaggtcgg

SEQ ID NO: 603294 - DNA, 433 bp, Homo sapiens
tcagaataggacttgtagaaaggcgctggagacggggtcgctctccagcttctacaagacctcccggaaattgctgttgatattcatcaggctctggaaggtgcgttcctgataggacatgaaagtctggaaggatgataatattgaaaataccatcattgttatagaaaaagccatgaaagttatcaagccccaagcaatacattcctgctggagaaaactgcccagatgttgtgcatgacttcacaggatttacgacaaagctaaccaaggaaatcatgaaagagattgtgaatacggcaaaaaaaaaaaaaaaagggggaggccggaggtttcccaggatggggtttccaaaaaaaatttaaggggctaaaagaccccacacaaaaagatttacgagaggatgcttggatggagattgagtgttaccgga

SEQ ID NO: 603295 - DNA, 231 bp, Homo sapiens
  misc_feature (134)..(135): n is a, c, g, or t
agaaaacaatgagattacaagttccaaactcagccaggaatgtggctcacacctgtaatcccagcactttgggacacctaggtgggagcatcgcttgaagccaggagttcaagaccagcttgggcaacgtagtnngtacccctatctctacaaaaaataaaaaaattagctgggtgtgatggcacacaccttttgtcccagctactcaagaagctgagatgggaggttcct

SEQ ID NO: 603296 - DNA, 273 bp, Homo sapiens
  misc_feature (262)..(262): n is a, c, g, or t
agagaaagtgatccagcaaatgtggggcatcagtgatttaagactcttgctatgcagtctactgtaccccgctcccattccacagtgaatgagtggatgacacctctgtccctcgggaagatggttttgatttgttgttgcattctttgaggcagagggagaacccagcaggtgacaggggtcccttgtctggggatgagtctttagggatgggaaagggtgggggatagaatgggccctggggattttgaggactcatggnagggccaagtg

SEQ ID NO: 603297 - DNA, 911 bp, Homo sapiens
gacacagagggtttcccattatgtcggccaaacaagacaggtggtccctccccctggagaattgagacccgccccccaggggtttctttagagagcgcaaatacacgcacaatgtggagcaaagagtgtttggcacaccacgccacaaaattggccttaggtgtgcccgcgcaaataaaatgcggtcgggaaccacaccgcacatggggaacgctttaaaaaaaaatggttggccgcaaagttgtattgtctgaagattccgcgaaaaggcgtggaaaggttttcttctaagatatgacgcccttcttccgcccgtgatattgacctctcccccgttggtttataaaatttgtcttaaaagccgactctcccttaataagacacgtccttctgtttggaaaacacttccagtggttcaacaccatctttaatatagtttgttacctaccaaatttaccccctgaataatttaaaaaggtagattattatatgcgacaagagacacgagaacttttaaattataaagggtttttttctctcttaaaataaaatttgtaatttaccgcttttattataacctcaaatttctggaatagggatatagaataatagagatgggatacaaacacgaggtgtttctctctttagaccggaagccgcctcctcaaaataattgttagccgtttcgcggcccccacacacctctgccccgcgggctcttccgccatattgtcccagcgcccaacattttatgacggcccccctcggctctgccctcgtgttttcagcagggatggaataaccgctggggtctctctttaaaagatgtgggaaaaattggggccttttacccctattccctgggggaaaaaaaaggggaatggggaaaaaagttgtccaaacccaaaaaa

SEQ ID NO: 603298 - DNA, 359 bp, Homo sapiens
  misc_feature (354)..(354): n is a, c, g, or t
tcctttgaagccttaaagccaggcatcaactcctctctagctgggaacatcctagatggcatctccttctagtagaaggctgttttgtctccattgcaaatctatttagtgttgccatcttaatcagttatcttctagatagctttctgcagcttttccatcagtacttgctggctttatcttgcggcttttatgttatgggaggatggacttttttccttaaaccttcaaggaaacaagctcttctaggctttcaggactttccttctggcaggctgccttcacccacttcttcaggtctttcatagggattggaggagaagggccgggtgccggtgggcctgttcaacaccngtaat

SEQ ID NO: 603299 - DNA, 1456 bp, Homo sapiens
  misc_feature (1456)..(1456): n is a, c, g, or t
taaggactttaatgcgacagatggtaagtgggtgaagatctgaagggcgaaggttggtctgcaggactagtcatgacgattggatcaattcatgtagatcacctctagacatgacgttatgatagcaatctgaggtaataacaaatagttgtgcctcaagagttgcattcaggagcttgatacaggcatctctacaaggccataccctatcaatgagcaccaatatgatgattgcaatcatcccgtgaccggaacttgataaagttccacaacagaatatccaactcgttcacatgctaacttgagcttcagcaatcactgctgagcgttcactgacatgaattgctgcgcttcagaacgtccatcacattgactggtccacgcgacaaatggagcataggtaacaatttgtctgagtagatttgaagatcaacggaactcggcgtgtgggcgacaaaacgcccaatgggcaaggcaccgtggcaggcacaggtgcactcggttcgaggagatcactcaaggcggtaaaatgtggaagacgaccctgggggacacaacgccatcagttttggaaaacaattcgagacactcttcgagaaagagtacacctcccacgggcgggaccctaccccaggactaaagccgaaagacaaggaactcaagggggaagacaacgccaaaagaggccacgaaggctgcccaatcactcacccggcaaggaactacctcgcacagcacggacggaacatccacctcccatcgacagaagcaacacgccgggcgcacacagcgccacttcaaatcacaccattctgagcaaagagggcatcgcgacaacgccgaatcaccacgcaacggaccggcagccccacacctgccgacccgcaaccagacggacaccaacagcgcggcggaataaaaagcaaggaacaatgaaaaaatgtgcacaaaagacgggacgccacaggacgagaaccccacgggccaccaacatgatagcaacacacggcaggacagaaaccgcaacgacaccgacatcctcacaagccggctccgcctacaagcccataccatcccaagacaagcggtaaccaaagaggcaacacccacaacaccccagcatacagacaactcccaccatccataccaccaaaagaaaaaaataaaacatgtagccacagcatcatccataaacctatcatactaccacaccacatcccaagaaagacacaagaaaacagatacatactacatatcctacgacacacacttcaatcttttttgtttgcccatcccaacgaacaaacacacaacaccacagcaacccatcaacacccacaaaacccactacaagaaacctcacggacaaacacccaccaccccacacacacatcaacaaacaacacaaacccaaccacacaacaccacaatacaaccaaccaccaacaaccacccn

SEQ ID NO: 603300 - DNA, 308 bp, Homo sapiens
tttttgaaacagtgtcttcggctgttgcccaggctggagtgcagtggcgaatcccaggttcaagcaattctcctgcctcagccgcctgagtagctgggactacaggcgcttgccaccacgcctggctaattttttgtacttttagtagagacggggtttcactgtgttagccaggatggtctcgatctcctgacctcgtgatccacctgccttggcctcccaaagtgctgggattacaggcgtgacgaccgcgcccggcctattattattttttaagcatgaatctttttaaagtatcgatgtcgacg

SEQ ID NO: 603301 - DNA, 758 bp, Homo sapiens
tgggttggagggggaatgctggaaatggtaatggggtatggagacatatcatataagtaatgctagggtgagtggtaggaagttttccataggaggtgtatgagtgtggtcgtagcggaatcgggggtatagctgtgcgaatctcataaaaacaggggaggttagaaagtagggtctgggtgacaacaatatgttggtgtagcagtctcagggcgagatgtgcgtcatatgtgggtccctaggaacgatgtgtagtgggtgagcgcgtgtaccctcataataaatgtagggtagtataccggctaatagaagatatagggccgagatgggggccctgagcggggagggataataccagatctgttgagaaacgccttgagaggcacttatgttcggagacctcccctttcgggcaaagggtcagaagggggtccggggtaagggctctggcgtaagtggtgggaagataaaatccattatatatgggcccgaaggggtgtccatagatgggggccagggattgtaaaatccaggaggggtgggtgcctatggtgtgtgaggtgcgatacagggggttgggcagagaggtgtttcaaagagtggacgccccacttatatctaaaggtcaatcgggtgggcataaatgtgagaacatgggaatggggctaaaagggggttgcactttccctatatattaggaacgacatgtgggcttgggggggggcttaaacattgggcctccggccaaaggttgccca

SEQ ID NO: 603302 - DNA, 429 bp, Homo sapiens
  misc_feature (24)..(24): n is a, c, g, or t
  misc_feature (34)..(34): n is a, c, g, or t
  misc_feature (58)..(58): n is a, c, g, or t
  misc_feature (78)..(78): n is a, c, g, or t
  misc_feature (428)..(429): n is a, c, g, or t
gggggcccaccccacctcgggccnaggaagcccnccggggcccatttagaggaaaccnagtccagaagagaggttccnaaactccacaaaaccaaaccacctggagttttccatgtgacctatttccaaagcagccatgttgaccatataggaaagataggtgaagataaatgtcaacctgaattaagtcatttgacctataatagaaaagtggaaatcacttggcatttatgaatacttcttattttaccacagtcagagatagagagagatgcattaatacattgatcacttagggcagtttatccaaagagagtgctacaaatgatcccatttcaaaataaataagtaaattcaagttaaaatctggtgcataaccttaatatgattgtatttttatgttcatgtttaaaatacatctctttaann

SEQ ID NO: 603303 - DNA, 180 bp, Homo sapiens
tgtgtgtactctaaggatccttagagctgtgacctgtagtggcaacgtctgaccttggaggacgcaacattgtgcagctcttgggctgaccatcttggcaagcatctctaactggatcgaccggcagcagcagatgatcgagcgttgtggagaagaccaccgggggacaagcggactcgc

SEQ ID NO: 603304 - DNA, 485 bp, Homo sapiens
cacatggtaggaattctttggtcattgaagggacttgagtaatgtgtagctatagctaacacttttttttttggagagcgagtctcaactctgtgcctaggctgcagtgcgttgttgtgatctcagctcattgcaacctctggctcccaggttcaagcaattcttgtgtctcagcctcctgagtagctgggactacaggtgtgtaccaccagtgcccatgctaattgtggtattttaagttagagatgggatttcacatatgtgggacaggctggtctcaaaccccttacctcaggaggcctcagcctcccaaaagtgcggggatataggcttgagccaccatgcccagccagctagcactcagtgaacttttactatgtatcaggaattgattcaagtcctttaacctataatagctcatttaattaagtggatggtgggggggccatttgattttttaaaaggtttccatttccccctcttta

SEQ ID NO: 603305 - DNA, 210 bp, Homo sapiens
  misc_feature (210)..(210): n is a, c, g, or t
aacgacggcagtatagctgtttctgagtgtaaaggactggcgagtatagctgtttcctgattgtaaaggagggcgagtgatagctgttgcctgattgtaaaaggagggcgagtgatagaggttgccggattgtaaaaggagggcgagtgatagaggttgccgggttgtaaaaggagggcgagttttaacggttgccggattttaaaaggn

SEQ ID NO: 603306 - DNA, 277 bp, Homo sapiens
agctctaatttctttgactgcgggtacttaaggcatccggtgctgccgtgatgcgcgacggcgtcttattgatgcccgagcgagagacctgccgcaccacattgaatagacttgcgatggacgttagagatggcggcggcacggctttggtgttgcgtatagaggagccagccgactcatatttcattgatctgtttgaccgcagcgaggactacgcaacactgctgatcgatatcacaaaagctcgcgataccatgtctacagacacggtacaaga

SEQ ID NO: 603307 - DNA, 1091 bp, Homo sapiens
  misc_feature (517)..(517): n is a, c, g, or t
catttttctcaaaagtagtcgttcttaccacctaaggttcgatgtgtacccactaccaaactttccgtggtttaaacgatgcatttaagatttaaatgggccactcaccgaaggaatccacatgtggttgacgaaccttattaatttgtcctcactatgaatgggctcgccagaccggtgaatacctgaagcttcttaggttccttcaatacggccagatattgatccgaagttattctcgttataattttgcttaacctatcaggttcatagaggttactcttcttcatgcctactcattcgcaaacgtctttacctaagggggaactcactatcagtgcttaaaaggttggaagaattttcccactattgtccaaagaccttgcaatgtacatttcagttcaacataggtagcttgatgtcgccagagtaatagagttctttcttatgatgagttcttacatcactaatatcatacgaggttatcaaccctggcgtattatcgttacactggcanaggttactgactagtgaatatggtcatcttaagcctagcgacccggaactctattcaagcagaccggcacagtcactcgaatgtgaattacctagaaatactcgcggttctttactaatcaaatggcttgtccattgagattatggttattcatggatacaatgggcactattaactctcctaaaccgtcactaccacctcttgaatacgagtataataagtccacatcgtatgctgatgccgttagctatgtaatgtgagaactctgtacagtatcgatgtcaaagtgaatagtacgaatgtacagatcagttcctaggcacaaatttgaccaggtgtgttatacgagacaacatgtgccgaagcttgttctggtagccaaggataactatcaaagcaaacaccagaaagttatatcatttgatgcatttttttcaacattcatacacataatacacaaatccaaagacaaatgatgaatattactgtcagtaaatataaagtcactccccgttcttcttatgccaagaaacgtccaatattttcagccattgtttatgcacacaatcaactt

SEQ ID NO: 603308 - DNA, 609 bp, Homo sapiens
  misc_feature (69)..(69): n is a, c, g, or t
  misc_feature (99)..(99): n is a, c, g, or t
  misc_feature (101)..(101): n is a, c, g, or t
  misc_feature (134)..(134): n is a, c, g, or t
  misc_feature (149)..(149): n is a, c, g, or t
  misc_feature (181)..(181): n is a, c, g, or t
  misc_feature (203)..(203): n is a, c, g, or t
  misc_feature (214)..(214): n is a, c, g, or t
  misc_feature (221)..(222): n is a, c, g, or t
  misc_feature (242)..(242): n is a, c, g, or t
  misc_feature (245)..(245): n is a, c, g, or t
  misc_feature (250)..(250): n is a, c, g, or t
  misc_feature (259)..(259): n is a, c, g, or t
  misc_feature (268)..(268): n is a, c, g, or t
  misc_feature (303)..(303): n is a, c, g, or t
  misc_feature (321)..(321): n is a, c, g, or t
  misc_feature (333)..(333): n is a, c, g, or t
  misc_feature (369)..(369): n is a, c, g, or t
  misc_feature (376)..(376): n is a, c, g, or t
  misc_feature (388)..(388): n is a, c, g, or t
  misc_feature (410)..(410): n is a, c, g, or t
  misc_feature (429)..(429): n is a, c, g, or t
  misc_feature (479)..(479): n is a, c, g, or t
  misc_feature (520)..(521): n is a, c, g, or t
  misc_feature (533)..(533): n is a, c, g, or t
  misc_feature (537)..(537): n is a, c, g, or t
  misc_feature (540)..(540): n is a, c, g, or t
  misc_feature (580)..(580): n is a, c, g, or t
aaggctggatttggcgttggaggctggggccggcggtgcctgggaaggcacatgaggcttctcggcacnggacccatgagcccacactaaacctactcntncttcttttgttgaagaaatctgtgacagcgganataactgacggaaanagtgaacatctcaagcgggagcattcgctcantaatccctatcaagggggcggngccagctctangccccgnngggacttccagggcatcacnagncgcangatccaggncggacggcngacccctgacgagcgcacaaagagggcgctagtcnggaaccaccagccgggcngccgcaaagacngttgtaaaggcacggccacggcaaaggccacggcanagggaanaagaaccgccanggagacggcatcgccttgtggnacacccgggaccgcctcgngccagggcctgtgtttggaagcaaaaataacttccacggcttaaccatcntcctggacacctaccccaatgatgagaccactgagcgcgtnngcccgtacatcncggnganggtgaacaagggcgcccgggccgacgaccacagcaaggangggcgcgggaccgagcgggcgggcggcac

SEQ ID NO: 603309 - DNA, 114 bp, Homo sapiens
gagtgtaccaagactgactgctagaatcccatcatttctcatactagaaaacagctttcagaagaagaaagtgacttgcctttattaaagcattatttatgctgtaacacatga

SEQ ID NO: 603310 - DNA, 180 bp, Homo sapiens
  misc_feature (118)..(118): n is a, c, g, or t
tcgcctggtgcatgttgtggaaattcaagtgaggtgaaatacatttcagggtagagagtgacaaaaagggaagctggagagctgggtggggcacatgatggagtcttttgtatattcnaggtaggaatggcttgcaatttgttccccgtgtgcaagtgagggagctgctgaagtggtttt

SEQ ID NO: 603311 - DNA, 1171 bp, Homo sapiens
tcccgggttggtctgttttttttttttaaaaaaagtgggaaaaaacaaaggggtctttttccccccaaaagtgtgtctccccctccttttttatgttggtggtgtcgcccacagggtgaggtcccagtgacacttacaaaatgtgatacgcattttactcccccaaaaaatcccggtatcacaccacgcgtcttcaaaatcaatcggcagacatattcccttagaaagctgttcgtgttaacatatctcctgcacacgtgtggggaaactcgcgctattttctcaaacacaccttgtggcgctcttaaaactgggggccccgtgaagagagatcctcgcgcccacctttttacaccactctcgcccgtgcaagcgaggagggggattcctttatagagagagactatctgcaagagtgtgcttgtgcaaccctccgagagccaatacacccgatatgtcccccgtgtaaaatcttcttccacccgcgtggtgtggggggacccctcccgcggccatttttcagccctccgcaggggggcgcgtccctcctgtggggacgcccccctccagtggggggcccaggggtctgtgtggcaaattgtgggggcccccggtacctctcggaacacacacatttttgagggtgggacccctgtgtgtgtgtgtgcgcccaccatttcgagagttgcgctctgtgagtgtgtaacaggggatatacttccttacacgcgcggggcgcagatcttttgcatgctgtgcgtcagtgcccccacttgtatctccggtcgcccacggtggtctcccccggtgggggggcgccaccaactggtgggacccccttttctttcacaagaaaacagaaaaaaaaagggtgtactcctctcccacacagacatacgtgatgtagagaaatatgtgggtctcaacacgtgatgtgaaaacaccccttagggtagtttagacgacacccccccaagaagaggggtccttaaaataaacaactcctgatgagaaacgcggcgccccatctacaaagcggggccacgcgttgtgacagtgacgacacgagagcgttacacccacataacccacggtgtgcctcgaccaccagaaccaatggccgcacccactatcttttggaccacatctgcgggaaaaccacaaggtggcg

SEQ ID NO: 603312 - DNA, 309 bp, Homo sapiens
aagtcctgacccatgaagacatacagaatggggttcatgcagctgttggcaatggcaatggcagtggccaggggcacacccaagctgaagacggagccaggcatggctctgtgatggagctccaggaggtagagcgtatggtaggggcaccagcagaggaagaaggtgataatgatggtcacgatgatcttgaagggcttcttggtcttggccaggcggttgcgccgcagcttatagacgatagtgaagtagcaggctgagatgatgagcactgggactaggaagccacataggaagcgtgtgatgacc

SEQ ID NO: 603313 - DNA, 308 bp, Homo sapiens
agtgtcttcaagaggatatttggatagctttgaggatttcgttggaaacgggattgtcttcatattaaccctagacagaagcattctcagaatcttatttgtgatatgcgctctcaactaacagtgttgaagctttgttttgatagagcagttttgaaacactctttttgtagtatctggatgtggacacttggagcgctttcaggcctatggtgaaaaaggaaatatcttcccctgaaaactagacagaagcattctcagaatcttatttgtgatatgcgctctcaactaacagtgttgaagctttg

SEQ ID NO: 603314 - DNA, 1326 bp, Homo sapiens
  misc_feature (1254)..(1254): n is a, c, g, or t
agcgggggcccggcccctggtcgaagctaggtgaaggtgagtgtctcctaccagatcgcaattgaggcaagagctgacctgccaggctccgggcgtagggtgaaagtctctatgattctctagatcatctctggatattggctaccgtccggtccacgtcgtttgcctgcaggttctcagcgaggctcctagcgctgtcactcggctcttcccagctccacttgccggactctcagggtagagtatccaggcaccccccctgcgatggttccaacctgagcagttgggtagccttagtctgccactggtagtgtcttggcgctatgcgcccttggagctttattaggcccaacggtcagatcgaatgcaagaagttagcggaggaccaggacccgtactttgacctgactcggagccaaatcaagaccatgagatacttcgaccgaagattactcgtggacccgaaaatcacctggagtggccatagagtctagtaggatttccccggagaagcgttgtcggctatcctacgttcacttgtgccacatgaggggtgatttgcacagcaccccagcgaccttccacacggacagagacagctggcggtaagaggagacgttgttgccaaaatacggctttgggcgcgaggtaatccattgtagtccccttctttcgccaaatttagtggatcctttgcaattttcgtaaaagcggccgtaagggttgcctgatagggaaagcccacaacgatctagagaaacgcggcacctggtctctattcgcgtggtccttccactgcgatcgccatggggcgagataagtctacataggtgcaatggtgcctttctggcgggcatgggatggagcttgtgtatgactaaccagtttctggggtcgcataatctgactgagcctgtggttgaatgcccagacaaagatcacagaagggaaattcggggagccctccccaggtgggcacttatcctttgcaaattggagtctttggggcaagaataattgccttcccgttggcatgttttcttgccgaatatggtttggtccctttcccaaaggccctttgtgttgcaccagcgatgtgcccccacagcggtggcggaatgtgggagcgcccgcgatagccttccggggagacaggggtggggacaccgcccgggatttttgcctcgccttggtctcgctgcacacgcaccccggggagtgcgtgggatccccccctttccgtttttggagccntctcaaggccctaagtgcgcgggggcctctcgcggacatcctgtggcacacccctggtggtatagacgcctg

SEQ ID NO: 603315 - DNA, 101 bp, Homo sapiens
aattaaccactcattcatcgacctccccaccccatccaacatctcgcatgatgaaacttcggctcattctggcgctgctgactccaaatcacacagactat

SEQ ID NO: 603316 - DNA, 1322 bp, Homo sapiens
ttttgggagtgtctgggttccattgggtccctttctgttgctcttgcggtggtccttggggttttcctttgcgtcgttggtgtctggagtttttattgtgtgctctcttgctgtgctgttctcccgtggggtctctgttggtgatctgtggcgtgttggtccggtgtattgtggtgggtgcctttgggccgcttgttctactgcttggctttctgtgtgttgccgtggtattgttctttgtgtgcctctcttgtgtctgttttgtcctggtggttctccttctgtatggtccgctagtgtggtgtgcgttgggaggttgtctatgtcccgcggcatgcgtttggtgcttgtttgtggtgctgttcgttattggttttttgttctgggggttttcccgcagatgttgctcttttgtgatttcgtgcggggtgcttctgctcgcgtctcggtcgggtgtggcgcgcgtagttcgctgctgctgatcgcggtatgtgcccggttgtgccgcgtggcggcgctgtggtcgtcatgggccttgtcagccatttgttgggtctttctatgcgaggtctgtggctgtgttcaggctcgcagtggtcgagcagggtcgtggcggttgggtggaggcttttaggtcgcgatgtgagtcgttgagttgctcttgggtcattcgtcgctcgcgtgcacatggggggctgttgcagcgcccgtgtctagcaggttggagctgagttttgaagatggtagttttggagtggggactttgtgtcaaaggcatctgtacgctgaggtgctctaggtatcagctcgtatgggcttgagcggatgatgtcttttttctctttgagactagggtctgttgtcgtgttgcccaaggctggagtgcagtggcgcagtcagcagctcactgcagccctgactccccaggctcaagtgatcctcccatctaagtctcccgtatagctggaactacaggtacacaccaccctacctggcttaatatatatatatatgtttttttgttaagagactgggtgtcagtccgggtgtggtggctcatgcctgtaatcccagcactttgggaggccgaggtgggtggatcacctgaggtcaggagttcaagaccagcctgaccaacaatggcgaaacccagtctctgctaaaaatagaaaattagctgggtttcggtggcacatgcctgtaatcccagctacttgggaggctgaggcaggagaatcgcttgaacctgggtagctggaagttgcggtgagccaagattgtatcatgcaggtcagcctggtacagcaggcttcccccccccc

SEQ ID NO: 603317 - DNA, 197 bp, Homo sapiens
tacaatttaatgataaaaagacagataaccaattaaaatatgaacaaagaatttgttttattatactttaagttctagggtacatgtgcacaactatgcaggtttgttacatgtgtatacatgtgccatgttggtgtgctgcacccattaactcgtcatttacattaggtatatctcctaatgctatccctcccccc

SEQ ID NO: 603318 - DNA, 495 bp, Homo sapiens
tcaacctatatgataagacataagtcctgctgtacatacgtcacgtagaagaatataaggtagaacagtaacacgactaccactggtacaactacaaacgctgatactagtcgactctatctatctataaaattcccccaatgcactaagggcctaagatagagaagatactgaaacatgctacgatactcattggtcttagaaagactatacagcaagtatataatagaaagccactacacttccagctactaaaaaagagccagacacaaatccctgcttccagagttcaccattcagaatacaggaggtcaagcactgattctgaatcatataatgggctaagatttcgtctttcaagatcagcatagatactgattatctataccggaaagggcaaatacaatcttcccttacacacatcattctataggattctcgtaaaggagtaatcgcagtctgtatgtagccaaggccagtagatactatagtatt

SEQ ID NO: 603319 - DNA, 202 bp, Homo sapiens
accgtactattatttattagactgtggtatcagtctatcttataaattacattgtattaggccgggtgcagtggttcatgcgtgtaatcccagcactttgagaggccgagagaggattgcttgagtccaggaggtcaaggctgcggtgagctgtgatcacaccactgcactccagcctgggtgacagagcaagaccctgtcc

SEQ ID NO: 603320 - DNA, 333 bp, Homo sapiens
cagaatctagagtgatccctttggcatgagcgacgacaccccccattaagtagtgcatagtttgagagttcagcattagactccagacatactgttgaaattggggcacagagaggctagtgattagtcaggctcaatcagtggagtagggagaggggagcggatcctggggcggggcagacttaccccgtgccaggaccactccggctccctctggtatgcaaaatctgaccttggcgtcggacccccaagatgtgcttttagacgactcaagcccaacatctctagtctgggacctgactccgtcccgtcgctctgccaacgggtacccgc

SEQ ID NO: 603321 - DNA, 843 bp, Homo sapiens
  misc_feature (1)..(1): n is a, c, g, or t
nggtattgcctacttattgggataccacgtttacccgagcgctaaacggcttggagtgcctctttcacaagggtttgtccgagccttccaaaggcgcccgttcaagcacacgggggtcgtcgccgcccccattgggttctgcccgccttgcgtctgggccaaacccgcaatatacctgtctagggctcccccccacgatgacatttgcggggaaagatgctgccagttataaagcaccggttgtagctttgtaactccagctcgccggacatgttaactttcttggccgtagctcacgggagtgcagaaatcataactgggagttcatacctagtaaagttttcttcctaagccccttccacaccccattggtaaaaggacaatttgtcaaccccggaatctacttattaatcttggggttcaaaaaaaccctccacttcaaacgcacaggccccctgcgctcacttccacgagcccctcgggttaaaaatcgttgcgtgttttctaataaagcagccccacatgcgcccctctatagaatggtatataatattaattcctggtacacaacaaataattcaggtcccagttacagcaacaaacttggggagaatttattctccccacctattaatcgggccccaatatgccatacagccttataaattagttcgcccccccgtattatcccagaaaccaacgacaccgcctcttcttataacaaagtcagtccactgcctttaatatttattatacacattgtcgggcgaacaataacgtggacctagcaccatcggtcacttccatcccctttggagaacatcaaaaactaaaccccccaca

SEQ ID NO: 603322 - DNA, 468 bp, Homo sapiens
gtttgataatgcgccatttttttgccccattgtggaaacccctggtgtcattccccgggactgtacccctccttggtgaagatgactacccccatttctaacgagtgtcccccgcttgaggaacaacaccactgccagaatccccacctctgggggggggacccagccacgctcagggggagagtgctgcttattaagcaccgctgttatcatatagacgaagttatactttgtatagagacatcttattatgcagcgaggaatatataagatttcttcacatatgcgccacacgagtgcttgctcaagcatgtccatgtcttattttaatagtacacctagaagccacccccatttgtcgaacactctcctataaccacctgtcttctatgatgatcatgaagtgtcttctgttcaccatccctttttccaataaccctcttgtctcttctccaacccaacataaca

SEQ ID NO: 603323 - DNA, 279 bp, Homo sapiens
  misc_feature (4)..(4): n is a, c, g, or t
ctcnacgctttatacttttgactgctcttgtacccaccaagagggcaggaacttatccatctgtttgcaactctgaccttgcccaccaagtagctaaaaagtgtttttctggaaagaatagattgattgaacaactgcctgtaagatctgaaatgccacctactactggccgagcgtccagagtactaagtcatcagccacctgcaggtgctcagggagctcatgtgcatttgctgagctcgcagttccaagccctgccccaggcttgtcttgaactcc

SEQ ID NO: 603324 - DNA, 100 bp, Homo sapiens
aactgccctctgagagtgactgaacaacagtttgaaatctgcatagtggagcctgagactgtgccattgcattccagcctgtgcgacaagggcactccat

SEQ ID NO: 603325 - DNA, 378 bp, Homo sapiens
  misc_feature (98)..(98): n is a, c, g, or t
  misc_feature (209)..(209): n is a, c, g, or t
  misc_feature (291)..(291): n is a, c, g, or t
ttttaaagtattaaaaaaaaaagaaaagaaaagagaagcctaaataagcttaaataaactgcttcttataaatgtaatacagacatgccggaacacanaaggctaaaagaatgttaactttattcatgaacatgtggtgtgtgtttatacacatgctaataaacaaaaaggaaataactgttttcaagaaacaaaacttcatctgaatnagtttaaatactatataaggtgtactttatacaaaatgtgttacattaactactacagtcaccaggatagtcaatctaattnatgctagcatttggatacataaaaatcagttctaaaccaatcaccagcaaaacataagcttggacagtttttacagcattatgctta

SEQ ID NO: 603326 - DNA, 151 bp, Homo sapiens
  misc_feature (44)..(44): n is a, c, g, or t
  misc_feature (71)..(71): n is a, c, g, or t
tctgatatcatgtgtatcactttcttttgattgctcagtagtantccatcatatgaatataccagttccantcttgttttgatagaaacctgggctgtcttcagttttttggctattataaataaagctgctgtgaacgttcttatataaa

SEQ ID NO: 603327 - DNA, 228 bp, Homo sapiens
ggcaccgagcccagcgcagcagcctgggacccggattgggtttgccttaggggataggtttatacagatgaatataaaaggtttttttctttgggcttttgggttcttttttcccccccttctcaccttcccttctccccgacccccccccccaaaaaagctactttttcattccgggggacgattattttttttaactaaaggaagataaaattctaaaaaaaaaaa

SEQ ID NO: 603328 - DNA, 984 bp, Homo sapiens
  misc_feature (505)..(505): n is a, c, g, or t
tcagagggggagttgtttttttttggccaaaattcccccaaaagaggggggggtttttttaatacagggttcctttgaaaaattttttacaaaaaaaaaaagcgtttttttatcttttccacatttctatgctatctctaaaaaaaagctgaaaaccacttcttaaatcaaaatttcctaccacaaaaatgcggcgctctttgtaatgttcaaatctgctgtttttatcaaggtgtaatccctccccccaaatatatgcccacgtggctgacaacaaaacaacaaatatctcggttcactcaatcatatgtttctctaatggccatctaaagcatattttcacaaactccacatgatatgaattcaatttatttgttaaataaagcgccacagaaatatttttcactacactgtccactcccccaatttattgttgttttatctactacgaaaaaagacattttggtttatcatctcctatattagtgtggtacaagaaaactcnccttattataggtactcccctgtgcttcaacaacaaacagcgagggttttttgttgtggtcattattgttaacccagtcgtgttgtgtgtcccaatactctgttgcaaacaacattttcttttgcagaacaccgccaaaatatttgtttctacgactctctctcttattagagtgcccccctttttaatagcgtctcagccaggcggctctctactctacgtggggctttggccgtctaggcggacaacacattgtcgtctgtgcgcgacggggttcatctcagcatacttattcagcagcgggttacgcgaaatatccaacacacgtccgcggaatgtgggaccgcctggtgtggtgcgggtacaacacgcgtgctctccgggacttctcagacgcgagtcgggcgcttccttcgcaacctctatggctttcttcctctcccccagatattttctttgggcaccatttgtgttccccc

SEQ ID NO: 603329 - DNA, 312 bp, Homo sapiens
tcccgtgactcgatggctgtcataaccatcctcgaactcgtggttgagtacgctgcggattacaggtgcccgccactatgcccagctaattatttgtattattgagtagagacggggtttcgccatgttggccaggcttgtctcgaactactgacctcaggtgatccagcatgccttggcttcccaaagtgctgggattacagacgtgagccaccatgcctgtacttttgtttcgataaacatgaattcatgttagttgtataatttggtgatttctttttgaaacggagcctttctctgtccccccggctg

SEQ ID NO: 603330 - DNA, 638 bp, Homo sapiens
tcactgagcgagccgccaggctatgaccccaggtgctctgctgatgctgctgggggcgctgggggcgccgctcgcccctaggcgctccgcaggctcgtgaggcgcgacgggtcgactccggggcgaaacttttctctggctatgactacgctccgctgcggccagctgcggcgcacggctgggacgaccgctgtcacggtgtcagcgttgcgtctcactcctggcgctaactcatcacgcctagaacggagaacggatgacacgacgactgacgcacacacacggtgctactctacagcacctggacgctggagctgacttacagcgcctgacgcctggcgaacccccttgcccggcgacgccacccgaaccgcgcccacttccgcactttccgccttcccgcaaactccacggggccgcgcacactccgttggtggactccctgcaccgtggtgcctacctagacacacaccaactgcactgggaactcttctcaccgctgtcgcttctcgggaccacttttaaggccgtccgccgcgctggttcccttcccggcaccgcggcttcccggttggccggtttgggccaaaacccccccccgggggccaaattccttaattccggccacgctccaccct

SEQ ID NO: 603331 - DNA, 222 bp, Homo sapiens
ggatgtgagggcgatctggctgcgacatctgtcaccccattgatcgccagggttgattcggctgatctggctggctaggcgggtgtccccttcctccctcaccgctccatgtgcgtccctcccgaagctgcgcgctcggtcgaagaggacgaccatccccgatagaggaggaccggtcttcggtcaagggtatacgagtagctgcgctcccctgctagaacc

SEQ ID NO: 603332 - DNA, 216 bp, Homo sapiens
tgctgggactgcaggcatgagccactgcacccatccagaaagtgagtatttgactttatttctatgaagtcatgaaggaaagggagaaaggacagagtctgcaggaggatttatgagagagagaggggttttccattttaatatgggaaaaactttgcatgtataatttgagggaaatgtacccattaaatatatactgctggagggggccgcgcg

SEQ ID NO: 603333 - DNA, 83 bp, Homo sapiens
ggcacaggccaatcccttagtccctcttgcgtcgaggctgcaaaatggttccattcgccaggagacgctcctgagagaagggc

SEQ ID NO: 603334 - DNA, 218 bp, Homo sapiens
cttactttgttccatcgtggactggggcagccattgtctacgttcttcttccgggagagttgcgcatggacgtttaactacctggagaagcgtggtggtgctcccgcagtggcccgcagttgtgcaagtaactgacgtgtcgatgctccaccccgccgttgctggagaaagcagatgtacggttcttctctgaaggcgcggtctcacactgttcgtgt

SEQ ID NO: 603335 - DNA, 528 bp, Homo sapiens
cgtaggtatgcctgcaccagacacaacccaagctcaaaactcaaaacatgttctaaagtcagctggaaacagtatttaatgtgctccaagtactatttatcccatctggaattatagctttcatcaacaaaaaagtgattagccttaaatatatactagaaataaaagccagtgtacagcaacaacatggttctattgtggaaagtctccgagtgcctgtttactgggaaaaaaaaatccatcctctttttctgttcatttatcatgaaaatgtttcccccttttaagaagacaatgagaaaggaagttctctaaagttctttgcattaagaaattatgaaaatagctgtgcttttacatttcctgtaaaaagcaacatctgtcatttgccatttcccctcattgcagtgagtaaatgaagccattccagatccctgaaagcaaacagcaatcctccaaatgcactgtggaatttcagttctgcctagcattaatcacattccaagcagactggtgcaggcatacctc

SEQ ID NO: 603336 - DNA, 274 bp, Homo sapiens
caaaagacaagaaccaatgtcatttgatcttttatttctgaaacactcaaacaccttacaaagtgctgagttgggtcactattacctactcagcactttgtaaggtgtttgagtaggtaatagtgacccaacttgtttgctaaatgattatttgtttaaatctgtacagttttaagtgttcacttatacaaagagtgtatatactttcaaataatttaaaatgctttatattatttggctagaaattgctgtttttaataaatgtgaatttttt

SEQ ID NO: 603337 - DNA, 220 bp, Homo sapiens
tggcgccgaccggaagggacttgtgaccctggtcaggctgagttttctgcttccctaatgctgcctcaggtccagagcaattggaatagaacagaagttgtgttccactcactggtggtcctaagatagggtggagagtcctctcgggaccttgggggtgtccgccgacccgcacccaagatgacccggtgtggcgccaaccggaagggacttgtaggcc

SEQ ID NO: 603338 - DNA, 154 bp, Homo sapiens
  misc_feature (56)..(56): n is a, c, g, or t
ggctaaggtggacaagaaacaattttttaagttggtgcgccataaaagcgccttcngtcagggtatcgcctgagagagcaggacttaccacccctctagagagtcagaagagataagttgtgactgtttctatttggtttggaaatagccgctt

SEQ ID NO: 603339 - DNA, 338 bp, Homo sapiens
  misc_feature (11)..(11): n is a, c, g, or t
  misc_feature (20)..(20): n is a, c, g, or t
  misc_feature (31)..(31): n is a, c, g, or t
  misc_feature (41)..(41): n is a, c, g, or t
  misc_feature (89)..(89): n is a, c, g, or t
  misc_feature (175)..(175): n is a, c, g, or t
  misc_feature (177)..(177): n is a, c, g, or t
  misc_feature (190)..(190): n is a, c, g, or t
  misc_feature (241)..(241): n is a, c, g, or t
  misc_feature (244)..(244): n is a, c, g, or t
  misc_feature (255)..(255): n is a, c, g, or t
  misc_feature (260)..(260): n is a, c, g, or t
  misc_feature (262)..(262): n is a, c, g, or t
  misc_feature (265)..(265): n is a, c, g, or t
  misc_feature (280)..(280): n is a, c, g, or t
  misc_feature (299)..(299): n is a, c, g, or t
  misc_feature (318)..(318): n is a, c, g, or t
  misc_feature (320)..(320): n is a, c, g, or t
  misc_feature (325)..(325): n is a, c, g, or t
ccctgcttctnggggccctnctgggaaccgnctgggctcgngaggagccaggatctccactgtggagcatgcagggctctggtggatgnactagaatgggaaattgcccaggtggaccccaagaagaccattcagatgggatctttccggatcaatccagatggcagccagtcantngttgaggtaactnttactgttcccccaaacaaagtagctcactctggctttggatgaaattcgnctncttaaaaaggnccttngnttnataggaatgaagganacagactcagaaaaaaganttggcgtctgtctcatttngnaggangctgcaggcttat

SEQ ID NO: 603340 - DNA, 481 bp, Homo sapiens
aacgggaagtgtggggagtgttggtgtgtaaccccaacaccgggaaatgtatacaggagccccccaccatccgggggaccccgagtgttatttttttttcaataaacagcagaaggcttggggggtgacaccccagcggaaaaagaagacacaaccaagcgggggtctggggcccctgctccccccccctctccaaacaccgacagaaaaagaaaagggttgggtggtgggggttggagaattttcccagttctacaaccggttttttttttttggaaaaaagacagagccgaaggtggggcccctcccgggcctcttttttccaagaggaaaaagccacacctgctcttttttgctttccccggggaaaaaaaggggttgtggtcgggaaattggggtacaggtttggggagggggaaaaaaaatttttatttttgaacccctgtgtcccttttgcataaaattaaaggaaggaaaagta

SEQ ID NO: 603341 - DNA, 170 bp, Homo sapiens
ttgaattcgccgatatgtatgatggcagtgaggggcgcaatgatctaggctatatatcgagatatgtagcggtaagtaacaagtggactctagaatatagtagatgcgaaataaaagcgtgatatcgatcgcgcgcagatctgtcatgatgatcattgcaattggatcca

SEQ ID NO: 603342 - DNA, 233 bp, Homo sapiens
cacgaggacaactcctactacgtgatctcattcatgaaaggtagccactatgaatttacaagttgtggagcaccagaacaggctgctgggctcaggcagggtgggacaggttcccacaccatgggctcagatcctggacacgatgcagaggggatccaggctgtgggacgtgtgaggagtgaaaggaacccgacatgggatgttggagtctgtgacagggtgatttcggtgtc

SEQ ID NO: 603343 - DNA, 166 bp, Homo sapiens
ctgatcaggtctcgttgataggttatgttgtatgtgtggtagtagcgcattgtgttgtgtaatatgtaagggagtatagggctgtgactagtatgtttgagtgtgtagtatgagagtgatatctgtcaggagacgtggtactagcacagagagctctcctagtagg

SEQ ID NO: 603344 - DNA, 728 bp, Homo sapiens
atgcatagacgctcacactttgtgggctgatggacacggggcagccgaagctggacctgaccgagtactgcatagtgcttctcatgagcatggagctaccgacaactacccataacttagaacccatgcctaactcatacctcgctttccgagaccattgtagcgtgctttaaacagctcaagatttatatggaaactttaaagacttagtagactatcaggatgaaagatttgataaatgtattctaaaacgtgacggaacatgggaggaatgtgtattacagagggaagaacgttgttgggagaaaagtgactgattagtgtacagagcctcacagaatgaccgattgaagggtaacgcttctagaattatcagagtgtgagcttaaagaagtactgcttagttcaaacgtgtgaggtgaatgacttattatgtatgaccatacttaaacagatactgaaccgcccgtgattccttatcgcgtaatcatgacgctgaagaattgcgcattaaggcctgataacgcattatatcgcttacgatgtgtctagataaatggacagttcctagaacagcttgagagcttcttgtaggcacaggacaggatttactggtcccgtttcagattctgtaggcccgggaagaagaaaccagggttactttcttccctggagcttgcaaacttgcatctaactggctggagtatacaccgggcccgttgccgctt

SEQ ID NO: 603345 - DNA, 131 bp, Homo sapiens
gaaactgaagagacatgggtgttagtactttacccactgacaaatgaagtttacactccaccctctcttccagaatcaagtctgtctccccgtcagctagaaggaaatgtggtacaaaatgtcctctcttg

SEQ ID NO: 603346 - DNA, 420 bp, Homo sapiens
  misc_feature (1)..(1): n is a, c, g, or t
  misc_feature (10)..(10): n is a, c, g, or t
  misc_feature (50)..(50): n is a, c, g, or t
  misc_feature (54)..(54): n is a, c, g, or t
  misc_feature (56)..(56): n is a, c, g, or t
  misc_feature (284)..(284): n is a, c, g, or t
  misc_feature (343)..(343): n is a, c, g, or t
  misc_feature (361)..(361): n is a, c, g, or t
  misc_feature (379)..(379): n is a, c, g, or t
  misc_feature (400)..(400): n is a, c, g, or t
  misc_feature (408)..(408): n is a, c, g, or t
nttcggcacngccaaggtgctgacaggccttagaagaccaaggaccgacnggcntncccccagagctcaggggtgcagaccagggcccgcctccctcagacctaagtaagagtccagactctagctgcctcctccctcagaccctaagtctgggcccccagccctcctccctcagaccctgggagtccaggcctcagaccctcctcccttacatccagggagtacaggccccacccctcctccctcaggacccagggagtccagtttccccaggcccttccttncggccagaaccagggagtaacagggtgtttatttttttgaagggtatttcgattcaatnggggttttggatttaacntggaaattacaaaacccntttttggggcagttggatttncaattttncttttcaggcct

SEQ ID NO: 603347 - DNA, 1369 bp, Homo sapiens
  misc_feature (1)..(1): n is a, c, g, or t
  misc_feature (13)..(13): n is a, c, g, or t
  misc_feature (27)..(27): n is a, c, g, or t
  misc_feature (59)..(59): n is a, c, g, or t
  misc_feature (71)..(71): n is a, c, g, or t
  misc_feature (156)..(156): n is a, c, g, or t
  misc_feature (390)..(390): n is a, c, g, or t
  misc_feature (606)..(606): n is a, c, g, or t
  misc_feature (731)..(731): n is a, c, g, or t
  misc_feature (748)..(748): n is a, c, g, or t
  misc_feature (872)..(872): n is a, c, g, or t
  misc_feature (874)..(874): n is a, c, g, or t
  misc_feature (882)..(882): n is a, c, g, or t
  misc_feature (922)..(922): n is a, c, g, or t
  misc_feature (947)..(947): n is a, c, g, or t
  misc_feature (1024)..(1024): n is a, c, g, or t
  misc_feature (1058)..(1058): n is a, c, g, or t
  misc_feature (1062)..(1062): n is a, c, g, or t
  misc_feature (1065)..(1065): n is a, c, g, or t
  misc_feature (1068)..(1068): n is a, c, g, or t
  misc_feature (1105)..(1105): n is a, c, g, or t
  misc_feature (1128)..(1128): n is a, c, g, or t
  misc_feature (1149)..(1149): n is a, c, g, or t
  misc_feature (1197)..(1197): n is a, c, g, or t
  misc_feature (1206)..(1206): n is a, c, g, or t
  misc_feature (1266)..(1266): n is a, c, g, or t
  misc_feature (1271)..(1271): n is a, c, g, or t
  misc_feature (1279)..(1279): n is a, c, g, or t
  misc_feature (1321)..(1321): n is a, c, g, or t
  misc_feature (1360)..(1360): n is a, c, g, or t
ntgggggcactangggaggcggcgggnccttctgtacaagggacccaccccggcgcatnatgggcacatcnatggggcccgcggttgcgccctcgcgggtgtttgctctacatcgggcgatcatcccccaccgggacgcgggtgcagccggccccnccgacaggcgtaggagggcgagatcatttagctctcacgtacttctgcacacgcagccatggcgcgcggaagggtgtatcctgaccattcagcatagatagagtatggaagaagagtgtataagacaaatctatcatgtacgactcttacttatagtgattggagtgctagtgttgacgtgtgatatatttaaataccgacgagaggattcactcacacatactgtatgcggtncagcaatacgaacattgacgcaggcgaccgtcgccgctcagtcgcccgaagaaccagcgacgacgacatcacatacgcgatgagcgggagcgggcggcggcgcgggtggccgcggcgcgggggaacgtctgcatataactataatatgtaaactctctcaatatcatgagatgtacatttcccaactcaagatagtgtattgtgtgatatgtatantcatgcgactgattcagcccattaacatgaacacaactacggtataccactcagtctcccgcgctctgcgggcggagcacgaagcggtgcgggcgcgcgccgtctgcgttccgtgtctcttatcnctatggcgtatcagctncggacaatgtggtgacggtgtatgtgtcgcgctggtgtgggcgggcgggtttgtggtgtgggcggcgctgcagctgtagggtggtacgcgcgtggcgcggcgcgacttgtcaacgcgtggctcngngcgtgtangtatgccacgcgttatgcgatctcgctgccagtcgcctcncgactcgtcccgagtcgtgcaggcngctgcggcgccgccgtgcgggtcagcgagtgaaggagtgcgtgacggtggcggcgatagaggctgtcgcgcgtgggnccgcgcgcacgcgctcgcttgcgtgtgtcacagntcgngcngtngacggcacgacggcgtgtcgttacgtgcgtcgcacangactacacgctcagcgtagttantgtcgacggctctacgtcgcngttatcggtatgcctgcgcgccacgcgacgtgcgaatagaaacgcagngacgacgancacacatctgtcatatagcgtggacacactgatcgtcagtctcgtcagcagacactcgcncgcgnctccgcgncacgcgcgcgcgttctacagctccgctgcgcgctcacgtgcnctcacacaggcaccgtcaccacgcactaacgcacaaccntagtcaggc

SEQ ID NO: 603348 - DNA, 293 bp, Homo sapiens
cggaatgcgactcaagcacgcagagacggtggagatggtgtcatcgccacggtgacgggctccctgagcctggtgactgtcgtgggcaacatcctggtgatgctgtccatcaaagtcaacaggcagctgcagacggtcaacaactacttcctcttcagccgtggcgtgcgccgacctctatcatcgcgcgctttctccatgtaacctcatacaccgtgttacctcactcaacgggctcctgcgcctctcgggcgccgtggctctgtgaccctcgcttgagactcaggcactgt

SEQ ID NO: 603349 - DNA, 212 bp, Homo sapiens
agtccacgcagacgatggcttctaggaaaagttggtgacccgcggcgatcggtaggacatgccgcagcctttggtacaaaagtcgtggcacctttgcccgggaccccctagggccttaggttgtgccttaaaggtcaaaaatatggttaagccttcaagggccgcgatggacgagtaatttgggccgataattttaaaaattaaaagtatta

SEQ ID NO: 603350 - DNA, 989 bp, Homo sapiens
gcggttccggggtctccaacgatttttcccggctgtggtcctacatctgtccaaagcagaggcagtggagcttgaggttcttgctggtgtgaaatgactgagtacaaactggtggtggttggagcaggtggtgttgcgggaaacagcgctactgactaactcgcaggctaatccagaaccaccttggctagagtgaagtatgatcccaccatagaggattcttacagagaaacaagtggcttatagattggtgaaacctgtttgtcggacatactggatacgggctggacaagaagacgtacagtgccatgagagagcaatactttgaggacaggcgaaggcttcctctgtgtatttgccgatcaataatagcgaagtcatttgcggagtattaacctctacagggagcgaccatataagcgagtaaaagactcggatgatgtacctatggtgctagtgggaaacacgtgtgatttgcgaacaaggacagttgatacaaaaactaagccccagcgaactggccaaagagttacgggattccattcattgaaacctcagcaagagctgacagggtgttgaagatgctttttacacactggtaagagaaatacgccagtacgagttgaagaaaatcaaaggagtgatgatgggactcacggtgtatggggattgcatgtgtggtggatgtacaagatgctttaaggtttgtcgaaaagagccatttaagctgcatgaacctgtgtctgattctggggagaggtatacggtggtgtttagattaggagagggcgtgtattccagttagagggatttgagatctttattgaagtccaaaatagctgtatggtgtggacagaaggagctgagtacggttatagggggtgtaagaaaactagctgggttttgagattttagaaacgatgatattagtgtatagaggtttttggaaaggaagaagatagtagtattgatcaaattctcaattacgt

SEQ ID NO: 603351 - DNA, 425 bp, Homo sapiens
aggagagagagagagagagagagagagagagagagagagagagagagagagagagagagagagagcgagcattacactgctaggccctgtcagcttggggtgggcgcctctcgtacactgcgcactggacccgctttgctttcggagcgtacattcacttcttttctctattgggttacatcagtatatggcgtttctgcagtggcaatttgctgttttgcacacgacgctttgtcagatgttgctcattgtcttcttcctgttcttgggacctacttgtgccttcttgatgtgcttggtgctctgtattgtgtcatagctgctatttacctctttctccttcttcggtttgcttctgtatttcgtgatctcttgcgatcctccggtcttgtgtcatgtcttgttctggtgtgttggctcgccgc

SEQ ID NO: 603352 - DNA, 279 bp, Homo sapiens
  misc_feature (41)..(41): n is a, c, g, or t
  misc_feature (64)..(64): n is a, c, g, or t
  misc_feature (87)..(87): n is a, c, g, or t
gggaggctgaggtgggaggatcactttaagccaggacttcnaagaacagccctaggcaacatgngtgggacctcaatctctactaanaatttaaaaattagccaggcatggtagcatgcacatgcagtctcagctacttggggggctgaggcaggaggattgcttgagcccaggagtttgaggttgcagtgagctgtgatcacaccaccgcactccagcctgagtgttaaaacaagaccttgtcgcaaaaaaaaagtcgacgcggccgcgaatttagta

SEQ ID NO: 603353 - DNA, 655 bp, Homo sapiens
gttttgagattaaatgacaagatgggatcttaaaagtgatttaaattatttggagctagaactagactggaactccttcatagactgtgtgttttatctcagcttcccagtgcctcacgtagcacatggaaaacagtggttactcaacacattcttgtcggctgggttcaaaaggctgaacgacatcaaaacaagtgtaactcctcttgtagtcatggacttcagatcagaaatttgatatttattgttttccctttatttttagtattcaatattcaaaagataattcagaagacagcagtttaccttattcaaacattgcctcatgcagaaccaccagagatgaagatgtttatttattttttttaagttggaagttaccagtttatgtaaactataatacacctctgacacctgtctgtacatgcatttagtaaaggcttattaaattaatctgtaaatatattatacagtggtaagcatagtcaattttataccttacaaactaagattgtttaaaatccaacaatttaaaaatagatttcaagtggatgctagatactttttttctttctttcttttttctctttctttctttctttccttcttttcttatatttttcccagggtctcattctgatgttggagcggccgc

SEQ ID NO: 603354 - DNA, 430 bp, Homo sapiens
gatcctgtgtcctagtgactgttcctggcaacctgtcttctgttacctcagctgtcatcagcatttgctgctccctgaatcttctactgaacatcttgctatgtactaaggctacctgtacaacgactctgcctcttagatgatagactgaacctgatgactttgagctgcttttttttttttcactaactctgcatgcctctatctcagaactctgcatctgcggaactgttttaattacaattatactaacaatacacatgagaatagatattagaaactaataatgaaaaagcatagctgttaaactgacttgatttttttcttatcaatattttctatatcacaaaaatggcaacatcttttacataaagaaaataagtttgtaagtgatatttcttaaaagaatcaataaatattagcaatttct

SEQ ID NO: 603355 - DNA, 672 bp, Homo sapiens
taaagtatggtttttaattaatgttttgttttttttgaggaaatttaaatgctaaagatcacctacgtaatgtaaaaggtatcaggaaaaataagatccggaagttgtattccgggaccaatcttttgtttaaataagtagttttgttgaggttgcaagaattgctggccattatcaagagatagagctatattaatggctttcatcacgttcaattcatgtatttattgagcaccctatcttaattatggtgctccaccacttgttactgccagctaccctggatgttccccacgagtggtgccctactctgttttttctgatatggtcttcccattcacgtgtgtgtgacactacctcgttgtttatcacgcccttgtaggtggctgtgtctgttgcactcactcataagaagagtttatagctttgtgctctgataaattgtgttctgttaaagagggttatgtaggagtgaagaacacgccaaacccataattgttttcacagccaagttgtaaaattataagaaaaagagttggtttgtgtaccaccattttaatgattcccttggtcatttttgcttcgtgaaatgcactgcaaaaaatcctccaaatgagttatagttcctgtgttgggaaaaatgaccaataattaaaactagaggaccaacca

SEQ ID NO: 603356 - DNA, 1643 bp, Homo sapiens
  misc_feature (281)..(281): n is a, c, g, or t
  misc_feature (1601)..(1601): n is a, c, g, or t
gtcctaattcacgagcagctccaacttctcctatctctcccagtcctagctgactggctatcactatactatctatagcgagacgcgcaagctcaatcacccaccgttgcatatcgactcccgaccgagaaggaaaggatgcataccctactttcttatactcaatccatcctattatcatagattttccttcgagtctaactcacatgaatagttaagtacttccatgtaatctcatatccatggtcttcggacactaacatcttcgccaatcatatgtnaacattcactaactctcggcataatacacatacgacaccccatattggagagtaacaataagggtcatggagtcgtcgagcatacatgcgatgatcacaaattacgtgctctctccataacggagttctccactctggtgtggagccaccctctactactaatttaccatggtcagcgaacctatgaaccgatatgcaaccccaacagacgccaatagtcttccaccatacacggacttacacaaattaaatccaatcgccttcaatccgcccacacgggacgcttcaatatcagataacttctcatggattgcaacataccgacaccatctaacttcactagcaggcgtaaaggctataatcaatcgaccactaatggcattccttgacttggctaagatagccgagcctcgcattgcctctcctaaaggggaattttcactacctttttactgatattcacccggtaaaaggctcggcgactcgtgagcatagggccgacttcggtcactggccaggcgagaaacaaatactaattgctaatttcaagcacccattcaggtcaacctccaccatcgggaaacacactggatgagcatgagccgtaatggtgacccctttccaataatttgcccttacctaaaaaggttccccataaatctcacaaacacgccgcaagcttgggctatatcgggcccaattccaattcaagagacagcgcctttccctttggcaactgggaattccccccccctggtaagggcccattacagggagcttatcaacaaccggtaagtacacactaatagccctaaacggcaccaacaattcgaactttaacacattatactccattcagtttcgccactgaggccggcttaacacacctcagacccgtttccttattccccccaacggagaattaatacatggcgccccttacttcccgggcaaaaaggccccccggagagaagagacaactacgcgcggggtaaacaccaggaataggccataaaacccccggcgcaacgagagcgtctctcaattccgccccgcgacacgggccaccatggccgcacagcccacaacacgccgccgccccaaacatcacaacaccccacgccccgcgctcaccgaaacgacagcacgtctcctccgcggcgcacaaccgaaccacacgtcccccaccatccaacagaagaacaccgccgcagacccaccaccgcacgacacacgcacacaagacgagcacccccacccctcgccaacaagcagcacacgcgacgcccctcagcagacgcaaccaccacaacaccgacnaacatccaacacgcgcgtgccgacaccccaccacgcgcgaac

SEQ ID NO: 603357 - DNA, 209 bp, Homo sapiens
gtatatgaggtgtagcagggacatactgagctgttcgtcttcttctaagattcagggaaggagcctatactgcccttttctggcttctgggaggtagctagcattctgtggcaattccgtaaactcattgctgcagtagggcaagatcctaacctccactttcctgaggccaatctttttgtccatccttcttataagctacaccaacc

SEQ ID NO: 603358 - DNA, 336 bp, Homo sapiens
gaaaaaaaaagaggagtcatcagcagttaaacatcaaaaacagagtcagggactggagtggtggctcacgcctataatcccagcaccttgggaagccgaagcaggaggatcactcaagcccaggagttcaagaccagcctgggcaacacaataagacctcctctttacaaaaaaaaattaaaaacttggctgggcatggtggcatgcacctgtggtcccaagatattcgggagggcaaggcgggagaatttctagagcctaggcggccaaagctgcagtgagctgtgttcacgccactgcactccagcccaggcaacagagcaagaccctatctca

SEQ ID NO: 603359 - DNA, 870 bp, Homo sapiens
  misc_feature (368)..(368): n is a, c, g, or t
ggccttttctttggcaagatggcggattacgacttgactactcgcatcgccgcactttttggatcggcgatctattctttccgcttcttgaatttctctctcgtagacaggagatatataattgagaagaggagattcattacaacggtaaattgtggaccttcttcagtgataccatagcactggtagtacttatgctatggatgtctacgagaaaagcctgttattcctgatgatattgcctcatgcttggagagatgacaacagaaccacagtggttggcacaactgaataccttcaggccatgaaacgggtagatccacattgtgaaggactgtttgaagatcctacgagaatctactagaggncaagatgcgagtgcaagccgagggatggtaggatgctctttgactacctggctcggacaagcatggttctctacggctggagtatttagaatacacttctactgatatgtcctaagttccagtatgaattgtgggaactcacgtcaggagcagcatgattatctttcatttctgagagtgctggttccagcaacgagatagaagatgctttaagttcactctgggggaaagctgtgctctggaactcttagtgcagaattgggatgcaaccatgggaacgacctttacatcgggtttacttagagaccatatgataataattctggtgaagttcgcgcactttcagatcctcttttagccagtagaaacattgttccattcactgggtctcctggtggggtttggcgttcaattctacccccaaattgtgagagattaagattttttgggacctcattcccttgattcaggccccaatattctttagtggcgattcagaaca

SEQ ID NO: 603360 - DNA, 1049 bp, Homo sapiens
  misc_feature (11)..(11): n is a, c, g, or t
  misc_feature (13)..(13): n is a, c, g, or t
  misc_feature (18)..(18): n is a, c, g, or t
catcgcgacangncgctnttcgcacgccaggaaggtcccctctatgtgctgctgagccggtcctggacgcgacgagcccgccctcggtcttcggagcacgaaatcgcaaaaacggaaggactggaaatggcagaccatatgatggccatgaaccatggaacgacttccccagacgcgcacgcatatgggcatgcaccgatacaccctgacctcaccgatatggcgacatggggcagtttcccgagcccccatcacgcgacctagcagtcagacagccccagcacgccttcaacgccctaatgggcgagcacatacactacggcgcgggcaacatgaatgccacgagcggcatcaggcatgcgatgggcgccggggactgtgcaactggagggcacccctccgagcgcgctggcccccgtggccacgtttcactgactcccagttcagtgggtccccggtggccagccatggggaggctccctgccggccagcatgcagctgcagaagctcaacaaggcagtatttcaaccatcacccctacccccacgaaccagtacatgccggagtgtgcaccctgtctgcaaggccagcagatgaacgggacaaaccagcacttccgagattgcaagcccaagcacagcggcggcaccagcacccccggaggctcggtgcggaccaaaagcaacacccggcggctctggcaccagctcgaacggcggccacggagtcaaccagcaacagcgagctgcaggcagccgagcacacagaccaacattgcccgccctcacgaggcgcccaagtaccacgatgccaatgcttgacgccccacatgttcatagacactgcatgacgtcgaccgacggcaaggtcataatacccacggcgataccaactgggctaggcccgactcaaggcagccagaccgacacccgcgtggcaacaaaccgagatgacacacacgacggcaccccgcgggcaaatcgcacacccagccgacgacaccactgcaccgaccaaacacccgagcaacgacaccacccccaccaacc

SEQ ID NO: 603361 - DNA, 165 bp, Homo sapiens
  misc_feature (124)..(124): n is a, c, g, or t
  misc_feature (133)..(133): n is a, c, g, or t
tagagacagggttttgccatgtactcccaggctggtctcagggactcctgggctgaagcaatctgccagctttagcctgccaaagtgctgggattacaggtgtgagccatcatgcctggccttntttgtattntttgatattttattttaggtagtaagtcttag

SEQ ID NO: 603362 - DNA, 204 bp, Homo sapiens
tcatttatagaataatttcagataaacaaaatcaaaggctgtattacctaattttggcatgaacccccccttgtaccaaatgaagacggcatcacgaagcagctccagaaggaaaagcttgggcggtgcccagcgtgcccgctgtcccatcgacgtctgtcctggggacgtggagggtggcaccgtccccgcctgcaccagtgc

SEQ ID NO: 603363 - DNA, 147 bp, Homo sapiens
tatatatgccatcgtattaggccagcctgggaaagagtagcttcttcaggacttccaaaaagatagctcgattctcctcctgggggcatcatggacctggagccggcgcggccgccctcgctatccgggacctggattcgcgaccga

SEQ ID NO: 603364 - DNA, 366 bp, Homo sapiens
caaaaaaaaaaaaaacaaaggaaaaagaaaaaaacacttgaaaatgcccccaaccccaccccttttccaccccacagttgctattacgcttacggtgcatagcctctaggttatttactttatggttgtgttttaaaattgtacagtttcatcgacaccctattttcactggcaacactgtgaacacctttatcccttgttacatgtatctaccccaccatttttaatgcccacgcggtgttaggttgttgagaaggactgtgatttatttaataaagcctgtattgctgacagtgcttcggtgaatattattacacacacacatcttttcattgtcgtttatttaataaagcctctgttgctgac

SEQ ID NO: 603365 - DNA, 658 bp, Homo sapiens
  misc_feature (591)..(591): n is a, c, g, or t
gtgcgtgcgtctagaactatgtggatcccccgtggctgcaggctgaagtctacactcgttcaaacttccaaacttcaacctctcaaccccaaccaaacaaccaaaccaccacccccaaaacaaaccaccaaaaaccatcaaaatgcgtgccgccgctgttgtcgctatcttcgctgcctccgccatggcccagaccggcggctctgcctctcccaccaacggcaccagcgtcacccacaccggtgctcccaccaccgcccctaccagcggtgccaactccctgtcccagaacatcctcctcggtgtcggtgctgctgccgtcctcgctgccagcctctaagcaacttcaacttttttttattcgaaacctttctctctcttccctgataatttgaggggctttcggggatgtctagctcaagtttgctaggcttcctgtgaagctccttaccgacttcttggggaggggaccggaggaaaagaatatatcatggatctggacgggatggggatggagggggaaaagaaggtcaatttagtttgacggcattagaagtcttgggaggaagagagaagagcggtactttttcntcgtgctttattacgaccacagaaaatgggataagggatatacctatggctataacatcagtcatca

SEQ ID NO: 603366 - DNA, 349 bp, Homo sapiens
gcctgtaatcccgagtagctagtactacagatgcatgccactattttttagtacaaaaatattaaaaatttgggtcgggtgtggtagcttacgcctgtaataccagcactttgggaggccaaggtgggtggatcacaaggtcaggagttagagaccagcctggccaagatggtgaaaccccatctctactaagaatacaaatatcagccaggtgtggtgcagggtgcctgtagtcccagctactctggaggctaaggcaggagaattgcttgaacccagcaggtggaggttgcagtgaggcaggatcacgccactgtactctagcctgggccacagagcaggctccatc

SEQ ID NO: 603367 - DNA, 568 bp, Homo sapiens
ggtggacgccgccgaagaagcatcgttaaagtctctcttcaccctgaccgtcatgtctaagtcagagtctcctaaagagcccgaacagcgtgaggaagactcttcattggtagggttgagctttgaacacaactgactggagcagcctgtaggagcccattattgagtcaattggggcaacgcctcatcgaggactcgtgtgcgctacatgaagcagcagtccaaaagcacctcaatgacgcctccaggggccttcgggctaatatgtcacatatgccatctgtgcgacggacgagtggacttgcagccttaatgaactgcaaaggccatcactacaggctggcaatgcgaacgagttcgtggaaccaaagacggagctgtctccacgcagaacgattctcaaagacccaggctggcccagctttaacctgtgcacaatagagccatactttgtctgcgtggccatcaacaggacgccacactgcaagcaaacattcacccttacagagcactcatctccgacaacagcccactggcacaaaccttggaccctgcctctgaccaatcg

SEQ ID NO: 603368 - DNA, 128 bp, Homo sapiens
taagctaaatttggttgaatatttggataggcaatacaggctatatggtacaaatttaaaagatgcaaaagggttatgcacaagagaagtacttttcttaggctttccttggccttccattttccctt

SEQ ID NO: 603369 - DNA, 301 bp, Homo sapiens
gtcgacgtcatggcagtgcatgcccgttagtcccaactactcaggaggctgaggcaagcaaattacttgaacctgggaggtggaggttggaatgagctgagattgcaccactacactccagcctgggcaacacagtgaaactccatctcaataaaaaaaaaagtacatatatataccaggcatgatgtctcacacctgtaatgtcaacacctcaacactttgggaagccaaggcaggagggttgcttgagcccaggagttagagaccagcctgggcaacatagcaaaaccccatctctact

SEQ ID NO: 603370 - DNA, 481 bp, Homo sapiens
  misc_feature (26)..(26): n is a, c, g, or t
  misc_feature (77)..(77): n is a, c, g, or t
  misc_feature (80)..(80): n is a, c, g, or t
  misc_feature (82)..(82): n is a, c, g, or t
  misc_feature (92)..(93): n is a, c, g, or t
  misc_feature (95)..(95): n is a, c, g, or t
  misc_feature (97)..(97): n is a, c, g, or t
  misc_feature (191)..(191): n is a, c, g, or t
  misc_feature (204)..(204): n is a, c, g, or t
  misc_feature (208)..(208): n is a, c, g, or t
  misc_feature (221)..(221): n is a, c, g, or t
  misc_feature (241)..(241): n is a, c, g, or t
  misc_feature (243)..(243): n is a, c, g, or t
  misc_feature (245)..(246): n is a, c, g, or t
  misc_feature (248)..(248): n is a, c, g, or t
  misc_feature (271)..(271): n is a, c, g, or t
  misc_feature (280)..(282): n is a, c, g, or t
  misc_feature (285)..(285): n is a, c, g, or t
  misc_feature (291)..(291): n is a, c, g, or t
  misc_feature (293)..(293): n is a, c, g, or t
gttcccccccttacacgcacgccggngcggctttggaataatttcacagagcacgcagctagccttgaagctctctntgntnctttgtccanntncntcggtccttacagccgctcgtcagactccagcagccaagatggtgaagcagatcgagagcaagactgcttttcaggaagccttggacgctgcangtgataaacttgnagtngttgacttctcanccacgtggtgtgggccttgnananngntcaagcctttctttcattccctntctgaaaannnttncaacgngntattcttgaagtagatgtggatgactgtcatgatgtcgcttcagagtgtgaagtctgcatgccaacattccagtactgtaagaatggacctaaggagccagaatagactggagccaataagggctcgtggccaccattgatgacttagcctaagcatgtctgctgagcatagccagccattgggttgt

SEQ ID NO: 603371 - DNA, 456 bp, Homo sapiens
agtatttttttcccatctatttaaagaaagttggagtagatagggttctgcaggcgtaattggggctgcaaatgtaaaccatcatccttgcactgggaaacctatgaaaacgagctaccaaataattttttttttttttgagacagaatatcactctgttgtccaggctggagtgctgtggtgccatctcagctcactgaaaccacctcctcccagtttcaatcagttcttgtgccttaacctcccaagtggctggaattgaaggcaagtaccgccaccatgcccagataatttttgtattatttttgtgtttttagtagagatggggttttgccatgttggccaggctggtctcgaactcctggcctcaggtgaattgccgacctcagcttcccagagtgctgggattataggcatgagccaccacacagtagtgaaacttgacagataattttt

SEQ ID NO: 603372 - DNA, 647 bp, Homo sapiens
gagtaggtcatagctgttcagagtgacctggtatccggtaggatgctatccaccagatatgcagttacttctttcaatagagtcttgaacttctctaagtcatccatgaacgttgtaattgacttcttttaacttctgtaactattaatattttgacctcctcctgtgaatgacgaatgttcttaatggcatcttgaacagtaaatcctttccataaagttttcacttatatttggcccagatccatcagaggaatcactatctatggcagttgtggccttataaaatgtattttttagataactcaaaagtcacaattagtcttggatccatgggctgtaggggtgcctttggtcttagcgagcatgaaactattaatctttcctgacatcttcatcagagctcctgcgtaagcagggcacatcataaacaaacagtagtatttggaattgggatcgtgacttcttgagcaataggtctcagtagtgggctgagcatattcagtaaagcaatgctgtagagagatgtgctgtcatccatgcttgtgtgtccacttacgagcacaggcaaagtacatatagcataattcttaaaaatcctaggactttccggatggtaaatgagcactggcttcaccttaaaacccg

SEQ ID NO: 603373 - DNA, 843 bp, Homo sapiens
  misc_feature (29)..(29): n is a, c, g, or t
  misc_feature (40)..(40): n is a, c, g, or t
  misc_feature (70)..(70): n is a, c, g, or t
  misc_feature (97)..(97): n is a, c, g, or t
  misc_feature (159)..(159): n is a, c, g, or t
  misc_feature (215)..(215): n is a, c, g, or t
  misc_feature (225)..(228): n is a, c, g, or t
  misc_feature (247)..(247): n is a, c, g, or t
  misc_feature (262)..(262): n is a, c, g, or t
  misc_feature (281)..(281): n is a, c, g, or t
  misc_feature (289)..(289): n is a, c, g, or t
  misc_feature (298)..(298): n is a, c, g, or t
  misc_feature (325)..(325): n is a, c, g, or t
  misc_feature (354)..(354): n is a, c, g, or t
  misc_feature (408)..(410): n is a, c, g, or t
  misc_feature (432)..(432): n is a, c, g, or t
  misc_feature (781)..(781): n is a, c, g, or t
  misc_feature (818)..(818): n is a, c, g, or t
ggcgctgaccccctcaactctgcaggacncggcgcgcgangaccccacgacccgcgggcgcctgcgcggnccccgcgagccccggcgcctgcgcgantccccgacgccgcccccgcccccactcaccgggccccgcagcaggggccggagccgccggcngcgtggcgggggggggcgccccgatgagccctcgagtgcgaggagccgccgccccncctcgcaggnnnntatgttttggaatttttanctgcacacaagctcncacctggacacgctgctgnagcgggangacctgagnctgcctgagctgctggtcgagtgaagnttttttgcaggattgctaatgtcgtcaancgcaatttgctggtacttcctgcttcagccacaccatcctgcaagcaatggtgnnntgggtcacccaggagccgccanatagcggtgaggagcggctgcgctacaagtaccccagtgtggcctgcgagattctgacctcagatgtgccccagatcaatgatgccctgggtgctgatgagtcccttctgaaccggtctctacggcttcctgcagagcaccggcagcctcaacccactgctggccagcttcttcagcaaggtcatgggcatcctcatcaaccgcaagacagaccagctcgtgtcctttcttcggaagaaggatgacttcgtggacctgctgctgcagcacattggcacctcggccatcatggacctcctgctgcgcctgctcacctgtgtggagcggcctcagctgaggcaggatgttngtcaattggctcaacgaggagaagatcgtccagcggntgatttagcagatccacccgtcgaa

SEQ ID NO: 603374 - DNA, 285 bp, Homo sapiens
ctcagtcattactgttaaatattttttctatttctcgactctctttattctcctttggtattcctattacacatatattatatctttgtacttgtcccatagttattgaacattctgttctgcttcttcaggtggttgttattgtgtgtgtgggtttttttttttttttttttccagtttgggaggttcctacggggatatcctcaaggccagagatactttcctcagctatgccaaatctcctattaagcccagaacacaaggttatcacattacggtaacagt

SEQ ID NO: 603375 - DNA, 104 bp, Homo sapiens
ggcacgaggtctccctctgcttctacagatttatagtactccttggctctcttgagtctacacttttactcactgtctctgggtattttcaagatacatttcac

SEQ ID NO: 603376 - DNA, 1050 bp, Homo sapiens
  misc_feature (327)..(327): n is a, c, g, or t
agcgaactatatagtttggcactggctcactaagaagatggagagagcgcctacagaaattgactgtgcgcctagtgtagaggccatgcatcagataggaaaagatatgagatcagccagaataacccagggatgatgaactctcttatcgtcgaacataagtctggagagatagagtatgtgcactccatggacatcgctctctctggacataccagtcttcctcgcagacggagtcacaagacacttagtgtcaaggttagtggattcgagaggcgctgcgatcagtatgacccgcgtgactggcacttgtaaagtttttctatncgtccccccaagaagaaggcctagctatgacgtacgtcaaccatgcataaattgaaccgtgttaccatacttggtagtacctagcataaagacgctatctggtattagtagacttccaagggtaccaagcagctacaagggaaggcagacggtcgcaggcgcctcaacacgttccaacgtcagaccccaaggttaatactggcaggagtagaattggggacagtcataccgagacctcggtttgcctagagctcttggtagtgcgacccccgatacgccatcctagaactcgtgcccttgcgaaggtcagcgttctagtggcaggctaatctcgcaagcatgatcgtcatcatagtccgtgcatggagtacttatatttacctatgtcaaaattagttccatactaaacgaaccgaacttccgtagcatggccttgcctagggggatgcccagcatccttattccaagttcccaaacatattggctcgggctgagtaattgccgggcccaggggtgcctccgtaccaaccgaacagttttattaactgttgcagaatccccgatctctacagccgggtgtcccggagtctttgttctacacaaaccgatgtggctgagacagtttctccaggaacaatgggctccgtccagaggtattcggccctgaggaaaaacttctttccacggtcccaaaaaatatgggagcggaaccgcaacaaaaaa

SEQ ID NO: 603377 - DNA, 319 bp, Homo sapiens
tcggatgcaaagtgtcaggatacaataatcaatgtgcaaaaatcacaagcatttctgtacaccaagtaatagacaaacagagagccaaaatcatgagtgaactcccattcacaattgctacaaagagaataaaatacctaggaatccaacttacaagggatgtgaaggacctcttcaaggagaactacaatgtgagccattttaatagatgtgtagtggtaactcatttaggttttacattaggagttcccaaatgactaacgatgttgaacatcttgttcatagacactttgcatccaaggacactttgcatccagag

SEQ ID NO: 603378 - DNA, 302 bp, Homo sapiens
  misc_feature (207)..(207): n is a, c, g, or t
  misc_feature (267)..(267): n is a, c, g, or t
tgtgctggcatggtgggttctagtgaggactttctttcaggttgtggctggccatcatccccctgtaacttcacatggcagagagagtgccaggcagctctctggggcctctttcataagtgtactaatcccattcgtgagggctccacccttatgacccaatcactttccacacatcggggggtaggacttcaacatataaatttnggggggacacataatggggtatcctatgtgtagtaaggacagaggggtgcttaaaggctntgccacattcttcacataatggggtatccgggtac

SEQ ID NO: 603379 - DNA, 1158 bp, Homo sapiens
gcaggtaagcacttgtagtacgtactctgccaaggcgcagtcttgtgcgagaggagtgccgtgcgaggtagattctgcagttgagaatctgacagaagttcaagttgcccttggtcttctgcatcacgagtgatgacgattgaatactaactacttcattcacacatataggcatgatggttactaatgtatatggcgcacatctgtatgattatggacacagttattgtaagataaggactgtatatgacttgtgactgtagggaaaagtactaatagtaacttcacgaaggaggttatgccgtgagagaaggggcaaagggtttagatatgcgtgtgcttgaaaatacaagttgagccgtgaagcgcttggactgtaatgaaaagcttgtcttgtacagtagggaagattgaaactcaagtagtgaatagggaagacatggaaactaatataggaaaacgcaagaggcgaacttgacgctgtagacactctcggtagatttaaattcactccacttgatgtagaagggtcgaatggtctatcctggggaattttagaagctctgcaaaggggtacgtagtttgaacaacctatgctattacacaggtctttggaggtatttgtaataaggttcagtatagatgtttgaatttaggccagcaagaaaaaggctaccggtcacagggcgaatgacgttttttacaccatatactgcaggcaattcaacgaggttctgtacaagtggtggtactggtagataaaccgaagtccctttttgcaaaataccacctccaagtgtggcattcaggcccaagtggggaacagaattattttggccagatgcagaatcgttacatacactgccataagtgcgtttagaaaccggacacatttggtaagcttaattataagggccgggcaagtggacaagatttagagtacaagacggattctatatgaaatgggggccaatgcaggaggtcagggaagtggaaaggtccatagtttgggggaaaggagaagaaatttgtagtatttggtttggggaccgatggtaattcacacttgggggaagtgatatgaaaagagttatcaggacagaggggtgcaaagtaaggcaggacacattatgaagaataagattgtgggggaaaaaa

SEQ ID NO: 603380 - DNA, 103 bp, Homo sapiens
tgacagcagctgcttcagaccctgagcagaaataccagagtgagcacagctggcagcaccagatgactgatcttggctccagtgtgcctcctctgtgctgggt

SEQ ID NO: 603381 - DNA, 357 bp, Homo sapiens
ggtccgtggaggattatatttgcccttttatgagcatgctcattgagatcttcatcatctcacctcaaaatcgcaatagccagccaggcgctgtggctcatgtctgtaatcccagcactttaggaagctgaggtgggcagatcagttgaggccaggagttcaagaccagccaacaacaaaaccccatctctactaaagatacaaaaattagctgggtgtggtgacttacgtctgtaatcccagctactcgggaggctgaggcaagagaatcactgaagcccaggaggggaaggttacagtgagctgagatcgcaccattgtactctagcctgggtgacagagcgagatccttgtctc

SEQ ID NO: 603382 - DNA, 1277 bp, Homo sapiens
cggtatggcaagaacaagcgccttacgacaggcggcaaaaagggagccaagaagaacgctgtgttgatccataattctacgaacagattggtatgatgtgacagcacctgctatgttcaatacgaaatattggaaagacgctcgtcaccaggacccaaggaaccaaaattgcatactgatggtctccaagggctcgtgctgttctgcacagtgcagtctatgctgcatttgccatcacatgcatgcacagttgccatttcagcaacacttccacagcttgcattcactgcaagcatgtactaggtgtacaaaactgcctgaccataaccattccatgtgcactgtgactctctaccccgaagcacacaaactgtgtctccactggctcaaacaacagtggccacgaccacactgagtttgagacgctcaccgcttgactgtcaccccgacctaaccgcatggctctactttgcattccgctcttgtatcatgctgatatggctctttaccctaactcatactctgccaaccaacctcacgactaccggacacgaccctctatactgctacagcagacacacaagcacggggtaccggcgcaacacttcctgtgacacgacaagacttgacattgtgacacaactcatcttgaccccctgactgaacggttgacatcgactcagctacttggaacgctatggaaacgagaataccgatgtgtacaacatactcactttagacttccccgaatgcaatcaatggcgaatatggcgaacacaatggactaacgttacgaacaatagactgtgcactagtgccccaaaaatgcctatcctgatagttccaccatcccatccccacattggactctgttccatacacaggattaaagcaacatgacagggtaaagacacaactagtgcgttggcaaacgcaacgcccaccaaatggcatttggcacccttcggacaacacaacaggctacaagtggagacagcacactccaacagggcctgaaccggacagacaaagcaagaccagggccaaaccaagcaacaacgatggttgcaaccccgacccaccacggcgcgacacacaacacctcagcacaacgcacgcccgcgagcgggacaacaatgaaccacccaccgaggcaccaacacaacacacggctctcacaacacgaacaacaaacgcccccacaccacactggcccccacaccacaccgctcgatcacacggcgaaaccacccccgcacacgccacagaccagcgca

SEQ ID NO: 603383 - DNA, 281 bp, Homo sapiens
ctctgagggtggcatgccaggagtcttatcccatcgcttaggtgcaggccaagtttgtccaggacgagcaagtgaacatgaggccatgggatgactcagtgacacatagcccttcaagattagttccgttgtggtcatttttggggatgggcaaaagggcgccagtggttttgagaagcaccatcaactcagcgtgaaacataattattttttgcatgttgagaccaccgaaggacaatggtcagctcagtacagccgatgacgacagttttgtagtttga

SEQ ID NO: 603384 - DNA, 338 bp, Homo sapiens
ttttttgtatttttagtatagatggggtttcaccgtgttagccaggatggtctcgatatcctgacctcgtgatccgcccgcctcggccttccaaagtgctgggattacagggtagagccacggcgcccggctggaaccatacatctttcaaaacctacggctgtaggtaaccaccttaatattagagttaaagcccttagatttttgtgcttagcaaagcagtcaactttcagatgtaactagtccacaaaattagtatctggttctgacctaaaagactccaattctttccttatgataaagaattcaacatatgaaacataaaccatgcgtcgacg

SEQ ID NO: 603385 - DNA, 311 bp, Homo sapiens
actgcatagggctcggcgtggtgttcagttgctgctcacaagagttgatatcccatgatttagacttgcaatgggtaatagtaattgttggttactgactacactgttagtaaattgaggaccacctaaatggagaatcatgataaaacagatgtcagatgcctcataacagggtgcagggttgtttatacttcatttctccttcaggacatggacttaaaccatttgatactaagtttatgaagcttttgcttgaaaaagtgaatatcattcccacttattgccaaagcagacatgctggataccagaga

SEQ ID NO: 603386 - DNA, 800 bp, Homo sapiens
gtcatggaggccaggggtggctgaaaccagcttggggggttcgattccttcctttttgtctagattttatgtatacgggttcttggttttctgtatttttccccctctctttaaaacatcactgaaatttcaataaatttttattgaaatgtcaaaaaaaaaaaaaaaaaaaaaaaaaaaaaaaaaaaaaaaaaaaaaaaaaaaaaaaaaaaaaaaaaaaaaaaaaaaaaaaaaacaaagaagaaacaagaaaaaaagaaaagaaacagaacaagaaaaagcaagcagaagagaaaagaaagaaaggagagaagagcagaaagagcacgcgcataccagcagccgacaatcacagaagagagaagaggagaggaggctagactaatagcgcagaatcaccagagcggagtctgggggcgaacgattagaggagaaggccagggccagggcagagagctacagcgaacagcgagaacagacagaagcagtcacagcggcaggcaggagaggaaaaaagtagagtcaagacgagagcgaggagaactaggcgagagagcgctagccgcagtcaataacagagagaagggttgattactagagcgacgcacgagcagtagagagcagtcagagcaaaagaagaagagagagagagaagtaagtagaacaagaaagaacacgagacacgacaaagaaaggacaccagcagaacagaaagaggataagagagaaaagagagaccactgtagccgcgcagcgagagaacaaagagaacagaaggaagagcaaaagaacagaaaagc

SEQ ID NO: 603387 - DNA, 122 bp, Homo sapiens
atttcactgttggaaaagaaataactatttaatattatgaaaactaatggtccactaattttaagcttcttccattgttccgacatttaaacttattttacttgaaggggaggattattttg

SEQ ID NO: 603388 - DNA, 486 bp, Homo sapiens
  misc_feature (144)..(144): n is a, c, g, or t
cggccgcccccgaagcgctgctgtcaccccggccgcgccccccaactttctgcacagtcgcggagctggaagtttccgggcttcgcggacacgctgggctgggtttcagtcgcggctccgaggttggcaacaaagagggaaagnaggaggaaaagcaggccggggaggggaggaagagaaccgcgcggaggccgcggcgccgagagccccagaacttccaattctacccagaagcttttttcgtcgtgtttttctcttcagacatgatcctctctgaggttggtcctgggcttccatacgtgattcatggaagaggtctcagccccaagagcccctgagggtactgtccactccccctggaaacttccagaacctgacgtggggctgaagacatagaggctctgagagttacataattgattctgactttggctgttggtcaacagtgtcataaggctgttgtagaatctgctcagcccaggaagg

SEQ ID NO: 603389 - DNA, 4950 bp, Homo sapiens
  misc_feature (144)..(144): n is a, c, g, or t
  misc_feature (2495)..(2495): n is a, c, g, or t
  misc_feature (2529)..(2529): n is a, c, g, or t
  misc_feature (2624)..(2624): n is a, c, g, or t
  misc_feature (2798)..(2799): n is a, c, g, or t
  misc_feature (2850)..(2850): n is a, c, g, or t
  misc_feature (2907)..(2907): n is a, c, g, or t
  misc_feature (2912)..(2912): n is a, c, g, or t
  misc_feature (3580)..(3580): n is a, c, g, or t
cggccgcccccgaagcgctgctgtcaccccggccgcgccccccaactttctgcacagtcgcggagctggaagtttccgggcttcgcggacacgctgggctgggtttcagtcgcggctccgaggttggcaacaaagagggaaagnaggaggaaaagcaggccggggaggggaggaagagaaccgcgcggaggccgcggcgccgagagccccagaacttccaattctacccagaagcttttttcgtcgtgtttttctcttaggtaaacaagcaagttccacgccccagtcctgctggggccttcgccagccaccgctctgggctcatctcccggcgcctcctcggggcacctgagcgttttaagccccactgccaagtgttttggacacaggtttttttgcggggtggtgaggttgggcacaagatgcttcctaaaaggttgttggcacgcagaccatggccccagtgacggagcggcaggcaggggcttgaggaacacgctgtctttgtctcgtccccaaagcacccggccgtgggtcacccgtgatccctggagtggagggactgttgtgacccctggtgctccaggagaaggggttccatgctgggtcccgggcccaggcccacggtgccctcagcctgcagttctccaccttgcggaatgatttgctggcccggcccagctccccggcaccaccattttctgccctcttttccctgcctggcttcaaaccctcccaggccagggtcccgaggagacacctgggctgggggaggcaactgagtgagcccaggcctgggaatcggcaaaagtggccaagccacatctctcgagactgcaagggccctggaggcgctgggaggcacagatctggctgccagctgggcctgaggcctccctttgtccgtccttcctgttcttcctcaccaggtgtgtttacggagaagacactccgggccaggccagctcctccagagcactatttcaggctggggagaatgcggatttttttgttgttgttgttttttaaagaaaaatgaacaaggagcctggttggggattggggtgggaggaatatttgtcttttgtcccacaaacgtgtgtgatgctccaaagggctggagaacctctctcttaagtggatatttttcccctcaaacgacttctcagacatgatcctctctgaggttggtcctgggcttccatacgtgattcatggaagaggtctcagccccaagagcccctgagggtactgtccactccccctggaaacttccagaacctgacgtggggctgaagacatagaggtaatggggatgggctggtggggcgctggctgggacaatgtgtggagcccttgttttcagagctacagatgcttgtcagctgacagttcgtttccagcatccacagtggacctcctttgggggagcatttacctgccaatgaaccccaagatcctttctcagaggcggcgggatgaagttttcctttttttttttttagttaatatattttatttaaaccaatatatccaaaatattatcagttcaacatacgatcaagataaagattaatgagatactttacattttcatactaaatctttttttaaatttttgtgagtacatagtaggtataaacatttagggatgaagtttcttactgtgttttcccagtaacaagcactggcatcagctgtcatgatttctccccaaggcctaggatggtcagcctcgcacgctccacagcagagtgactgaagctctatcgaggtgtggcacgagcgtgttgtcatttcaagagaatctgcagcctccctggtttttaatgaaagctcctatgcagggcctggccctttcctggggagggaagcctggctgtgtctcccgctgcatcctcactgggaacttcattcctgagctgcgaccgctattttttggattggaaaatgccttgggaacggctcatcttcctgcggcttgagcccatttgttttctgactggtggtcactggtgattagagtgtgtcccaaagggaaccgtcaccttagttctatcatacactatcaataacttgtccagggctgactttgtggctgtgtggcttgcccagtggcagagggccggtgtgcaggagggccccacactcaatgtttggctgtccccggtcttaaaattcttagtcattcttgaacaagggaacccatattttcattttgttctaggctctgagagttacataattgattctgactttggctgttggtcaacagtgtcataaggtaaaataaggtaaaaatctatgatttttatatttctttttttctttctttttccttttttttttttttttttttgagacacagtcttgctctgtcaccagggtggagtgcagtggcgcagtggtgcgatcttggctcactgcaacctccgcctcccgagttcaagcgattctcctgcctcagcctcctgagtagctgggactacaggtgngcaccatcatgcccagctaatttttgtatttttngtagagacgggatttcaccatgttggccagggtggtggtctcgatctcctgaacttgtgatccgcccacctcggcctcccaaagtgctgggattncaggcgtgagccaacgtgcccagctgatttttatatttcttttactaaattctgtttacagaaataattccagattctatgtaagatacaaatattttaactgaagatcattgtatttagggaaaatgttcacctttaagagacaggggctgggcgttgtggctcacgcctgtnntcccagcactttgggaggccgaggctggtggatcgcacgagcccaggaatnccagaccagcctgggcaacacggcgaaaccctgtctatgcaaaatatacaaaaattngccangcatgggggtgtgcacctgtaactcccagctactccagaggctgaggtgggaagactgctcaagcccgggaggtcaaagctgcagtgagagaccttgtcttaaatacaaacaggcaggaagtcgttataagcataatacaatcctggatgttggaatcatccctgtccagccttggctctgccacgtgggtgctgaatgctgcctcagggaccctggtgcccagctcccacctgcagggtgttctgaggagccagcacgctgggagggcctagcaggagatgtggcatgaaccaggtattcgataaataaaaagtgcctttgattgtcacgtttatcatttgacatgtaggcacaggtgcagtttgattatttttaatgtaagtctattttatctcttcccgttataaaagcaatacacactgtgatagacggtttggagaattcaggaaagaaaaagaaaaagaaaaaaaattcctcctaggccctctgctccagagcctccagccgtcacatgacagtgtatttctttacaattacagaaatagatacgtgactgttacattttgaaactttttcttttaccttgacttatttttaaatagaaacactagtgaggccccacagaactgagcagaactaatggccccccatgtggtggaatagttcngagctggccccactttggatgcagccttccccggcaagtctaaacccagtctctgtggctgcctgttcacagggaccgtggactgtgatgtttacagtacgaaagcactgggagagaacgctacatcacaaagtgtccttaacctgctgccgcctcagctttcccatttgtgacttggttaaaaaaattttttttgacagttttaagctcttattttaatttccacaggctgttgtagaatctgctcagccagggaggggaaaggagtcggcaatcaggtctcctcctgggcacctttgtgaggccagctggcgagagtgcggggtgacactgaggtcccagcagctccaaatgcaggcagagccctgtcctcagagaaggtcacagcctagccaagcccagccaggtggatgggcccacggaacgcacaggaacactggaacggaggttgaaagcaggaagcacagtctgtgactccccagcccactctgcattcgaccacttggggcccagaagcttcaggaaaggtgcacaaggtcactgggtcccagtactcccaacaggaaggtctggtccagggacagggctcttcccgactccccttagccacacgcaccagaagttctgcagtgcccagtgggcatagcagtccccaagaatgacccagcactgaagctgagccaaagaacttggggagcgagccacaccccctcactccctcttcgcctgctccagacttgccaggcggttgcttttcgtgggaaccgggatgtcctcaccaccctgtccagggcccagccccatgtccctggcctgctacagctggaaagaaaaaagagagatgtttgtttttatttgtttataaaaagaaaagtgttatatatataacatattatacctcatgaatacatacaattatttgtcaattaacaataaagaaaaatacagcaagcaaaaaagactctcttccacaaaaatagtgttcattacagaaaagtacaaaaaaaaaaaaaaactaagaggatatttagaattaagaaaaaactaagagggtatttagaattaaaaaataaaaagaaaacaattacccatgaggtaattactgaatgcatttggttgaaagtccttctgctatattttccaaactgtatgtgtatatatgtgcgcatgcatatatgtgtttgtgtgtgtgtacacatatctatatgaatggaccatatcgtaagttataaatgcatacatatattcatgtatatataatcattagatcatactataggttattttacagtctttttgttgaatacgttgtgagcattttatgtcattattttctacaagatttgaaaaataaagtataaataccagtt

SEQ ID NO: 603390 - DNA, 1463 bp, Homo sapiens
tgttggtggggcccccattttttttggtgggggaacacctcccctgagtgtgtaaaaaaactgaggagaaaaaaaacgcgggggagaaaaaaccccccacacaacacacacgagggacgagggggggcgcccgagagggcaccacagagaacaaaggggcgtggtgccccgcccagagggggggggctccctccacccaccgccgggggaggagaagagggggtccgcgagagagaagagagggagagagcagggaggggtggcggaaagagagagcccacaccccgcgggggggcccccgcgcggggcgccgcggggcgggggtgtcccgcggggggggagaaaacacaataggggggagggagagaggggacgcctcctctccacacccgaggggcgcgaggagagggggcaggggagagagacccggcgcagccaccatgagagggaggagagaaaaaacatccgcggaggagagacacccgcgagggaagagaagagagggggggggaggagagaagacacacgcgcggaggagaccaaccacatccgcgagaagagagtggtgccacacctctctaacacgacaacgagcggagagagtaaagagagagagagaaacagagagagagaggggcgcacaccgcgccgcgcggggaccacccaccacgaggagaaaaactagagaggagaacaccacacacgtggaaagaaaaagagtgagtgtggggaaaacagcgcgagagaaacacccacacgcgcggaacacagagagagagaggagagagccccacccaacagaaaaaaagaaaaccccccacaagaagagaaaaacaaaaacagagagtgaaagagagcacccacaaacaagaggtggggggaaagaagaaacaaccaaaaagcaggtgacccacacaaaaacaaaaagaaggagtgtacgcaattgagcgaaagacaaaagtgaagaggaaaacaagaaaaggagagcccaaaacaaaaccgcgcgggggggagaaaaaaaaccccaaccatttcaacaaaacaacaccccctgaaggaagaaagaacacacaaacagtgtggtactcaatgatggcgggggggggacgcacaaccaacaaaaccagaggggggagaaaaaaaaaacagagagggcagaaagagaaaaccaccaaggcggcaccgcgagacaaaaaaaacaatacagacaaggaggggaaaattatattagaaacacaacaaaacaaagtggggtgacaaaaacaaagaggaggaaataaagcaacccccccagaagatcaacagcaggatgaaggacggcagcacaacaacgaaccgagggggaaacgaagaacaacagacaggaacgaacctatgtggtggagaaaaaaacaaagaaggactcgtgtcagggagagcaccaccacccacaacacagtagggaagaagtactcaaccagcgg

SEQ ID NO: 603391 - DNA, 484 bp, Homo sapiens
  misc_feature (5)..(6): n is a, c, g, or t
  misc_feature (433)..(433): n is a, c, g, or t
  misc_feature (448)..(448): n is a, c, g, or t
  misc_feature (471)..(471): n is a, c, g, or t
ttgcnntagtttactgagaatgatgatttccaatttcatccatgtccctacaaaggacatgaactcaccattttttatggctgcatagtattccatggtgtatatgtgccacattttcttaatccagtctatcattgttggacatttgggttggttccaagtctttgctattgtgaataatgccgcagtaaacatacgtgtgcatgtgtctttatagcagcatgatttatagtcctttgggtatataccgaaattttgcttttctaaaatactgccagggattacactggaaacaggaatctgggcaagaggatttaaaaggacggatgccaggcttaggctggggaaattggaaaataaaagcccaatttcttcaatttaccccgttaaatagccttggttttgatggatttttggggggaggggggtgtgngggggggtattaggncttcctttagtttaccatttttntgtgctccttctc

SEQ ID NO: 603392 - DNA, 4710 bp, Homo sapiens
  misc_feature (144)..(144): n is a, c, g, or t
  misc_feature (2255)..(2255): n is a, c, g, or t
  misc_feature (2289)..(2289): n is a, c, g, or t
  misc_feature (2384)..(2384): n is a, c, g, or t
  misc_feature (2558)..(2559): n is a, c, g, or t
  misc_feature (2610)..(2610): n is a, c, g, or t
  misc_feature (2667)..(2667): n is a, c, g, or t
  misc_feature (2672)..(2672): n is a, c, g, or t
  misc_feature (3340)..(3340): n is a, c, g, or t
cggccgcccccgaagcgctgctgtcaccccggccgcgccccccaactttctgcacagtcgcggagctggaagtttccgggcttcgcggacacgctgggctgggtttcagtcgcggctccgaggttggcaacaaagagggaaagnaggaggaaaagcaggccggggaggggaggaagagaaccgcgcggaggccgcggcgccgagagccccagaacttccaattctacccagaagcttttttcgtcgtgtttttctcttaggtaaacaagcaagttccacgccccagtcctgctggggccttcgccagccaccgctctgggctcatctcccggcgcctcctcggggcacctgagcgttttaagccccactgccaagtgttttggacacaggtttttttgcggggtggtgaggttgggcacaagatgcttcctaaaaggttgttggcacgcagaccatggccccagtgacggagcggcaggcaggggcttgaggaacacgctgtctttgtctcgtccccaaagcacccggccgtgggtcacccgtgatccctggagtggagggactgttgtgacccctggtgctccaggagaaggggttccatgctgggtcccgggcccaggcccacggtgccctcagcctgcagttctccaccttgcggaatgatttgctggcccggcccagctccccggcaccaccattttctgccctcttttccctgcctggcttcaaaccctcccaggccagggtcccgaggagacacctgggctgggggaggcaactgagtgagcccaggcctgggaatcggcaaaagtggccaagccacatctctcgagactgcaagggccctggaggcgctgggaggcacagatctggctgccagctgggcctgaggcctccctttgtccgtccttcctgttcttcctcaccagacatgatcctctctgaggttggtcctgggcttccatacgtgattcatggaagaggtctcagccccaagagcccctgagggtactgtccactccccctggaaacttccagaacctgacgtggggctgaagacatagaggtaatggggatgggctggtggggcgctggctgggacaatgtgtggagcccttgttttcagagctacagatgcttgtcagctgacagttcgtttccagcatccacagtggacctcctttgggggagcatttacctgccaatgaaccccaagatcctttctcagaggcggcgggatgaagttttcctttttttttttttagttaatatattttatttaaaccaatatatccaaaatattatcagttcaacatacgatcaagataaagattaatgagatactttacattttcatactaaatctttttttaaatttttgtgagtacatagtaggtataaacatttagggatgaagtttcttactgtgttttcccagtaacaagcactggcatcagctgtcatgatttctccccaaggcctaggatggtcagcctcgcacgctccacagcagagtgactgaagctctatcgaggtgtggcacgagcgtgttgtcatttcaagagaatctgcagcctccctggtttttaatgaaagctcctatgcagggcctggccctttcctggggagggaagcctggctgtgtctcccgctgcatcctcactgggaacttcattcctgagctgcgaccgctattttttggattggaaaatgccttgggaacggctcatcttcctgcggcttgagcccatttgttttctgactggtggtcactggtgattagagtgtgtcccaaagggaaccgtcaccttagttctatcatacactatcaataacttgtccagggctgactttgtggctgtgtggcttgcccagtggcagagggccggtgtgcaggagggccccacactcaatgtttggctgtccccggtcttaaaattcttagtcattcttgaacaagggaacccatattttcattttgttctaggctctgagagttacataattgattctgactttggctgttggtcaacagtgtcataaggtaaaataaggtaaaaatctatgatttttatatttctttttttctttctttttccttttttttttttttttttttgagacacagtcttgctctgtcaccagggtggagtgcagtggcgcagtggtgcgatcttggctcactgcaacctccgcctcccgagttcaagcgattctcctgcctcagcctcctgagtagctgggactacaggtgngcaccatcatgcccagctaatttttgtatttttngtagagacgggatttcaccatgttggccagggtggtggtctcgatctcctgaacttgtgatccgcccacctcggcctcccaaagtgctgggattncaggcgtgagccaacgtgcccagctgatttttatatttcttttactaaattctgtttacagaaataattccagattctatgtaagatacaaatattttaactgaagatcattgtatttagggaaaatgttcacctttaagagacaggggctgggcgttgtggctcacgcctgtnntcccagcactttgggaggccgaggctggtggatcgcacgagcccaggaatnccagaccagcctgggcaacacggcgaaaccctgtctatgcaaaatatacaaaaattngccangcatgggggtgtgcacctgtaactcccagctactccagaggctgaggtgggaagactgctcaagcccgggaggtcaaagctgcagtgagagaccttgtcttaaatacaaacaggcaggaagtcgttataagcataatacaatcctggatgttggaatcatccctgtccagccttggctctgccacgtgggtgctgaatgctgcctcagggaccctggtgcccagctcccacctgcagggtgttctgaggagccagcacgctgggagggcctagcaggagatgtggcatgaaccaggtattcgataaataaaaagtgcctttgattgtcacgtttatcatttgacatgtaggcacaggtgcagtttgattatttttaatgtaagtctattttatctcttcccgttataaaagcaatacacactgtgatagacggtttggagaattcaggaaagaaaaagaaaaagaaaaaaaattcctcctaggccctctgctccagagcctccagccgtcacatgacagtgtatttctttacaattacagaaatagatacgtgactgttacattttgaaactttttcttttaccttgacttatttttaaatagaaacactagtgaggccccacagaactgagcagaactaatggccccccatgtggtggaatagttcngagctggccccactttggatgcagccttccccggcaagtctaaacccagtctctgtggctgcctgttcacagggaccgtggactgtgatgtttacagtacgaaagcactgggagagaacgctacatcacaaagtgtccttaacctgctgccgcctcagctttcccatttgtgacttggttaaaaaaattttttttgacagttttaagctcttattttaatttccacaggctgttgtagaatctgctcagccagggaggggaaaggagtcggcaatcaggtctcctcctgggcacctttgtgaggccagctggcgagagtgcggggtgacactgaggtcccagcagctccaaatgcaggcagagccctgtcctcagagaaggtcacagcctagccaagcccagccaggtggatgggcccacggaacgcacaggaacactggaacggaggttgaaagcaggaagcacagtctgtgactccccagcccactctgcattcgaccacttggggcccagaagcttcaggaaaggtgcacaaggtcactgggtcccagtactcccaacaggaaggtctggtccagggacagggctcttcccgactccccttagccacacgcaccagaagttctgcagtgcccagtgggcatagcagtccccaagaatgacccagcactgaagctgagccaaagaacttggggagcgagccacaccccctcactccctcttcgcctgctccagacttgccaggcggttgcttttcgtgggaaccgggatgtcctcaccaccctgtccagggcccagccccatgtccctggcctgctacagctggaaagaaaaaagagagatgtttgtttttatttgtttataaaaagaaaagtgttatatatataacatattatacctcatgaatacatacaattatttgtcaattaacaataaagaaaaatacagcaagcaaaaaagactctcttccacaaaaatagtgttcattacagaaaagtacaaaaaaaaaaaaaaactaagaggatatttagaattaagaaaaaactaagagggtatttagaattaaaaaataaaaagaaaacaattacccatgaggtaattactgaatgcatttggttgaaagtccttctgctatattttccaaactgtatgtgtatatatgtgcgcatgcatatatgtgtttgtgtgtgtgtacacatatctatatgaatggaccatatcgtaagttataaatgcatacatatattcatgtatatataatcattagatcatactataggttattttacagtctttttgttgaatacgttgtgagcattttatgtcattattttctacaagatttgaaaaataaagtataaataccagtt

SEQ ID NO: 603393 - DNA, 1707 bp, Homo sapiens
  misc_feature (733)..(733): n is a, c, g, or t
cctttaatttgggcctaactggggccaaagggggttaattcaggtctctccataaaagagaggggacaaaaggggcacaggtggggtctccggtgaaagaagggagggctccaagaagctctcacaaagaagaagccttctttgtgagaaattgtgcacccctctccactcccctctctctcgagggagagggtgtggtggagagatcacagtgtgggcctctcagagtgggataagagagccacagatgggcacaagacaaagtgagagtagaaaacctccacaacacacacaggcgtgggacacaaacagagctcacagagaggggcgcgagagaagagggcgagccacaagacggttctcgtgacgccacacacaaaggggccctatatatacagcgacacatgtgggagccacatctcggcgagaaaagtctcgcgagtctctctcacacaagtgtgagagagatgtgtttgtgagcacacacaaccggcgcgtgtgtgtgtcgcgatctatgctgagacacgttgtaggcgtgcgtgtgggcgccactatctggtgtaaaagacacaccctgtgtgagacacccacactgtgagaactctctgcgcggtgtatacaccacccccagtgatgagaagaaagccaagacacagaggcacccccgcgggggaccccccgcaccagagaaactccccaatgattgggagtgtgacgcctatgtggataaaanaaaaacaccgaggagggtgtaaggagcccacaagggggccaccaaaagaggggcccacacagcgtgtttgtgcgtcgtgtactcccacaacgaaaaagagaggggtggcaaaacagcggtgggagtacccacacgcggagagacaaaacaacctgcgtgggtggtggattacaccaacggcccacaagagcacaacatcaataatctctacccgcacctactatcatccaacgagaaaggagggtggcgccccaatacatcaacacaccaggatggggggaagaaaaacattccatctatgcacggtggatgtatcttcttcatcagacaaccgcaaccaagacttcgttggtgttctattcttccaagaaacatctttgtcccagaaataattagatacagacgtggctgttgttgattactacctccccaacaaaacaagaggggagtcgctccgctaggataccacccccaccaaaaagacgtactcaacgggagggcccaacacaacgaaatgaagacgactgctcgttatcaaacataggaccaatatgcttgatgttggtagagcacgcgccgaagtaatacacaaccataagtattgttagtttgctgcccccccaccaatgagctgatgttgtacaacacaataattcgtgcgttgtatgaacccacccaacaatagtactaactccacaaggaaaaaagagttcccaccaaagagaaggggggcccccaccaagagtgagcaaatccagacagcacaccacaagcatgcaccacgaagtggaggggagggcgcccacccgcagaggacggagacgatattgacgataacccaccaccgaaaaagtagacgggtgagtcataccagataaagggtgtcgcccacccacaagacgaaagatagtcatcacagccaggcccgccacatataatacgcacaccaagcacccacacgaagaaacattatg

SEQ ID NO: 603394 - DNA, 408 bp, Homo sapiens
  misc_feature (44)..(44): n is a, c, g, or t
  misc_feature (59)..(59): n is a, c, g, or t
  misc_feature (158)..(158): n is a, c, g, or t
atggttcttgaacttcctgggcttcaagcttatcttcccaaacntgggaatcttacccnaaagtggcctagggattaatagtttatgagcccacccacccatgcctggccaagaacattttcattatcaccaaaagttctattacaccagtgctgacntaaatgctttatgaaaatacataacaaatattttcaaaaatgattttctcttttttcttcttctctacaaatatgcttggtgagaaatccaggaaatataagaaatgcatggaatataagatgtaggctgagcgtggacgttcacgcctgtaatcccaggactttgggaggccgaggtgggtggatcatgagatcacgagtttgagaccagcctggccagcatggtgaagccctgtctctactaaaaatc

SEQ ID NO: 603395 - DNA, 3179 bp, Homo sapiens
  misc_feature (144)..(144): n is a, c, g, or t
cggccgcccccgaagcgctgctgtcaccccggccgcgccccccaactttctgcacagtcgcggagctggaagtttccgggcttcgcggacacgctgggctgggtttcagtcgcggctccgaggttggcaacaaagagggaaagnaggaggaaaagcaggccggggaggggaggaagagaaccgcgcggaggccgcggcgccgagagccccagaacttccaattctacccagaagcttttttcgtcgtgtttttctcttaggtaaacaagcaagttccacgccccagtcctgctggggccttcgccagccaccgctctgggctcatctcccggcgcctcctcggggcacctgagcgttttaagccccactgccaagtgttttggacacaggtttttttgcggggtggtgaggttgggcacaagatgcttcctaaaaggttgttggcacgcagaccatggccccagtgacggagcggcaggcaggggcttgaggaacacgctgtctttgtctcgtccccaaagcacccggccgtgggtcacccgtgatccctggagtggagggactgttgtgacccctggtgctccaggagaaggggttccatgctgggtcccgggcccaggcccacggtgccctcagcctgcagttctccaccttgcggaatgatttgctggcccggcccagctccccggcaccaccattttctgccctcttttccctgcctggcttcaaaccctcccaggccagggtcccgaggagacacctgggctgggggaggcaactgagtgagcccaggcctgggaatcggcaaaagtggccaagccacatctctcgagactgcaagggccctggaggcgctgggaggcacagatctggctgccagctgggcctgaggcctccctttgtccgtccttcctgttcttcctcaccagacatgatcctctctgaggttggtcctgggcttccatacgtgattcatggaagaggtctcagccccaagagcccctgagggtactgtccactccccctggaaacttccagaacctgacgtggggctgaagacatagaggtaatggggatgggctggtggggcgctggctgggacaatgtgtggagcccttgttttcagagctacagatgcttgtcagctgacagttcgtttccagcatccacagtggacctcctttgggggagcatttacctgccaatgaaccccaagatcctttctcagaggcggcgggatgaagttttcctttttttttttttagttaatatattttatttaaaccaatatatccaaaatattatcagttcaacatacgatcaagataaagattaatgagatactttacattttcatactaaatctttttttaaatttttgtgagtacatagtaggtataaacatttagggatgaagtttcttactgtgttttcccagtaacaagcactggcatcagctgtcatgatttctccccaaggcctaggatggtcagcctcgcacgctccacagcagagtgactgaagctctatcgaggtgtggcacgagcgtgttgtcatttcaagagaatctgcagcctccctggtttttaatgaaagctcctatgcagggcctggccctttcctggggagggaagcctggctgtgtctcccgctgcatcctcactgggaacttcattcctgagctgcgaccgctattttttggattggaaaatgccttgggaacggctcatcttcctgcggcttgagcccatttgttttctgactggtggtcactggtgattagagtgtgtcccaaagggaaccgtcaccttagttctatcatacactatcaataacttgtccagggctgactttgtggctgtgtggcttgcccagtggcagagggccggtgtgcaggagggccccacactcaatgtttggctgtccccggtcttaaaattcttagtcattcttgaacaagggaacccatattttcattttgttctaggctctgagagttacataattgattctgactttggctgttggtcaacagtgtcataaggagaatctgctcagccagggaggggaaaggagtcggcaatcaggtctcctcctgggcacctttgtgaggccagctggcgagagtgcggggtgacactgaggtcccagcagctccaaatgcaggcagagccctgtcctcagagaaggtcacagcctagccaagcccagccaggtggatgggcccacggaacgcacaggaacactggaacggaggttgaaagcaggaagcacagtctgtgactccccagcccactctgcattcgaccacttggggcccagaagcttcaggaaaggtgcacaaggtcactgggtcccagtactcccaacaggaaggtctggtccagggacagggctcttcccgactccccttagccacacgcaccagaagttctgcagtgcccagtgggcatagcagtccccaagaatgacccagcactgaagctgagccaaagaacttggggagcgagccacaccccctcactccctcttcgcctgctccagacttgccaggcggttgcttttcgtgggaaccgggatgtcctcaccaccctgtccagggcccagccccatgtccctggcctgctacagctggaaagaaaaaagagagatgtttgtttttatttgtttataaaaagaaaagtgttatatatataacatattatacctcatgaatacatacaattatttgtcaattaacaataaagaaaaatacagcaagcaaaaaagactctcttccacaaaaatagtgttcattacagaaaagtacaaaaaaaaaaaaaaactaagaggatatttagaattaagaaaaaactaagagggtatttagaattaaaaaataaaaagaaaacaattacccatgaggtaattactgaatgcatttggttgaaagtccttctgctatattttccaaactgtatgtgtatatatgtgcgcatgcatatatgtgtttgtgtgtgtgtacacatatctatatgaatggaccatatcgtaagttataaatgcatacatatattcatgtatatataatcattagatcatactataggttattttacagtctttttgttgaatacgttgtgagcattttatgtcattattttctacaagatttgaaaaataaagtataaataccagtt

SEQ ID NO: 603396 - DNA, 288 bp, Homo sapiens
agctggtactgtaggcacacaccaccatgcgtgggtaattgttttttttttactcgaggacgcgggtgttcgccatttggccgagattggcttaatcttcttataagaaccgattcgcctaatgaaaaatcttttatctgagggcacaggtgacactaactatcgccgtgttgatggccaagcttgcgccacttaccgtagctcttgtcgtgggagaaagcgttgatgaagatactgttgtccctgaaaccgggaaactatagtcgggataccccgccagtctcagga

SEQ ID NO: 603397 - DNA, 605 bp, Homo sapiens
ggacgccggcctgcacagcgccatgggtcttcctcaccgcgcagctctggctgcagatagtcgtgtcaccgaccgtctactttcggatccatgaggtgctgaagcacgccaggcacttccggggaaggaacaatcgcgtgctacaggttggcggctcatgtaaccgatgattcgatgcctttgtgaaattgcatcctaagagcccgtataccgctgtagatgaaaaatgagacactgaggacccgtaagcggtggacccgggacacccgccggccagcgcactcgcgtgtccctgcgtttctgcgcctgcgacccagctagtgtgctagccgccctgggcaccctcagccccgttcctttcataccttgcttcgaatactccgacgatattatgtcgccccgtcaggcaagactgtgggacatccgttctctcgcgcggggcaggcgctccagcgaacaacaacggacaacagaagtttgaccttacaagttaccgtttgttacgcttgagcgactattattcattttcgtttacaaaggaatataattttcttctaatcaaaaaacaacatccaacaaagaaaaaaaaaaaacacaacacagca

SEQ ID NO: 603398 - DNA, 843 bp, Homo sapiens
  misc_feature (69)..(69): n is a, c, g, or t
  misc_feature (97)..(97): n is a, c, g, or t
  misc_feature (132)..(132): n is a, c, g, or t
  misc_feature (189)..(189): n is a, c, g, or t
  misc_feature (194)..(194): n is a, c, g, or t
  misc_feature (210)..(210): n is a, c, g, or t
  misc_feature (225)..(225): n is a, c, g, or t
  misc_feature (228)..(228): n is a, c, g, or t
  misc_feature (249)..(249): n is a, c, g, or t
  misc_feature (254)..(254): n is a, c, g, or t
  misc_feature (258)..(258): n is a, c, g, or t
  misc_feature (263)..(263): n is a, c, g, or t
  misc_feature (266)..(266): n is a, c, g, or t
  misc_feature (277)..(277): n is a, c, g, or t
  misc_feature (280)..(280): n is a, c, g, or t
  misc_feature (290)..(290): n is a, c, g, or t
  misc_feature (301)..(301): n is a, c, g, or t
  misc_feature (312)..(312): n is a, c, g, or t
  misc_feature (314)..(314): n is a, c, g, or t
  misc_feature (324)..(324): n is a, c, g, or t
  misc_feature (335)..(335): n is a, c, g, or t
  misc_feature (337)..(337): n is a, c, g, or t
  misc_feature (350)..(350): n is a, c, g, or t
  misc_feature (355)..(355): n is a, c, g, or t
  misc_feature (363)..(363): n is a, c, g, or t
  misc_feature (367)..(367): n is a, c, g, or t
  misc_feature (369)..(369): n is a, c, g, or t
  misc_feature (375)..(375): n is a, c, g, or t
  misc_feature (378)..(378): n is a, c, g, or t
  misc_feature (389)..(389): n is a, c, g, or t
  misc_feature (391)..(391): n is a, c, g, or t
  misc_feature (400)..(401): n is a, c, g, or t
  misc_feature (406)..(408): n is a, c, g, or t
  misc_feature (412)..(412): n is a, c, g, or t
  misc_feature (419)..(420): n is a, c, g, or t
  misc_feature (427)..(427): n is a, c, g, or t
  misc_feature (435)..(435): n is a, c, g, or t
  misc_feature (444)..(444): n is a, c, g, or t
  misc_feature (452)..(452): n is a, c, g, or t
  misc_feature (457)..(457): n is a, c, g, or t
  misc_feature (459)..(459): n is a, c, g, or t
  misc_feature (468)..(468): n is a, c, g, or t
  misc_feature (476)..(476): n is a, c, g, or t
  misc_feature (486)..(486): n is a, c, g, or t
  misc_feature (490)..(490): n is a, c, g, or t
  misc_feature (492)..(492): n is a, c, g, or t
  misc_feature (546)..(546): n is a, c, g, or t
  misc_feature (750)..(750): n is a, c, g, or t
  misc_feature (802)..(802): n is a, c, g, or t
agtataatattcatctccctggagttatgttgaaggcagagttttcatagggttagatttttttatccntttctagttcagttaattcatcctgttnaattgcaccatcgtgaaagatgggaaaaatcgtgntgatgggtaaggggaaaacttcccggaaggcaatggggcaaggaaaaagaaagcctntgggnaatggctgtgctcccnacatagctttgcagntgntgtgggttttttttttttttngggtngttngtttnganagagagtctgntcngtctcccggntagggtgtggnggtgtgatctngntcacggagcnttgccctcccngntcaagcagtcttnatctnagctccanagtngngggacnacnggcatgtgatntnatgctcggnngattnnngttnacttttnngagaganggggtctngccatattngccaggcnggttngnactcctacnactcaagnattcctcccncctngntctcccaaaatgttgggaccacgggtgtgagccaccgcgcccggcttgctcctntgttttgtttttgttttgttactttggttgatgtttaggccctccattttggaaagcaggaaaacaggattttttttttttttcttgttccctggaggatccagggatgaggatagagtggccttagggcagggcttggattcagcctcctgctgggtccttctgctggaaacaggcacccagaggcgggggtggggcagggantgcgccttcctggggtgcccggtggtgtgtagagaaaagctgcttgtttacnccttaagtcaatgtattggtcactgttgatttgttgaacaa

SEQ ID NO: 603399 - DNA, 665 bp, Homo sapiens
cacgagcttgctgtcacccaggatggagagcaccgtgatgatcatggatcactgtagacttgaccatgcaggctgccaccttagactcccaagtagctgtgaccacaggcacgtgccagcatgcccagcttatatatattttggtagagacaaggcttcaccatgttgactaagtaggcatcaaactgccggactcaagtgaacctcctgcctcggcctttcacagggatgggattacaggaataagccactgagcccggacctttttatcttctgttacagaggccagtactggctagctagcaggttatctgagcctcacaagtgttgaggcaaactctatactatatgcttactctacagagttgcagaatactgtatttttagagataaacatacatacttgattctgcccagtatattctgttgaactgtacaagctacgatattaattctctttggagaggaggcatctgttaagatcgaaagggggatattttctcataacggtcattgctgagaggtcgggacattctcacttaacgagaggcctttggggctcctgtgactaagtttagtcacatggggcatggttttatgggactcattcacactgtgctaggggcttgcaataactctgtgtaacacagaaggtacttcttccc

SEQ ID NO: 603400 - DNA, 342 bp, Homo sapiens
agaaaatagcactttaaggccaggcaaagtggctcaaacctataatcccagcactttgagaggccaaggtgggaggatcacttgagcccaagaggtcaagaccagcctggacaacacagtgaaacctcatctctacaaaaaataaaaattagccaggcatggtggcaaaatcctgtagtaccagatactcaggaggctgaggtgggaggattgcttgagcccaggaggttgagggtgcaatgagtcgtgattgcacaactgcgctccaacctgggtggaatgacagagtgaaaccgtgagaaagagggagtgggtgagagtgagaccgtgtctcaaaaaaaa

SEQ ID NO: 603401 - DNA, 960 bp, Homo sapiens
ggcggaggcggaggcttgggatgcgtcgcggattcagcttcacccgcttaacccatcgccatggtcgaggaaggttgctgctggaggtgtagtggacgttaatacatgctttacaagaggttctgaagactgcgctcatccacgatgggctagcgagtggaattcgcgaaggtgccagatgccttagactagcgccaagcccatcttgtgtgtttgcatccaattgtgatgagcctatgtatgtcaagttggtggaggccttcgtggtgaacacgcgaatagtcgatgcctaattaaggttgaatgacaagcaatgaaactaggagaatgggtaggcgctttgtaaaattgacatgagaggggaaagcaccgtaaaagtggtaggttgcagtgtgtagtagttaaggagtatgggaggagtctcagggcacggtatgtgatggaagagtgatgtcaggatgcaaggacatgatgatgtaaatgttgggtcactggtatcgacctggctgtggggagacgggtggtgactgttagttgagtataaactgcgggctgtctcccagaaaggagttgaaaagaaactttggatgtcaggaagagaaggaatgcctcatacggaaagactctggatcaagaattttaattcaggggagaattagagcgggcagcggaaacacgttcgaccgaagatgggcttgcgcatagtggaaatgcagcggcccaagtcgcggtggcccggaccgggttcggaggggcaacgttcacgagccactatgacatcaaggtgatggaagtccagccgcactgggtgttgcgcacagaggcaccttgagcccagaacgtgcacgctcaagaggacgcgtacgaggagccaagagggagtacgataagccacaggtagaacacgcgcgacacgctgaagaagagacccaagcaaaaggccgcggtataaccatccca

SEQ ID NO: 603402 - DNA, 113 bp, Homo sapiens
actggaagagcagaaattaataaaactgaacatgcagaaaatcaactgaaacgacaagaacttacttcttgtgttgttgtatgtttgtttggctaacaaggagcatagtcttg

SEQ ID NO: 603403 - DNA, 124 bp, Homo sapiens
gaggcagttaaggaggaggaagccttaaggggaactggcctgcgtgcactccgaacctcgggaacataatagcgcgtgaacgctgctcttgaagactatagccagaggaaagatgtttggttta

SEQ ID NO: 603404 - DNA, 149 bp, Homo sapiens
tctggcggggtgcacagattagactctcatagaaaaaaacaacgaagagcgcaagacactgctcagcaacctacgaagaagcccagaagaagaaagaggatgccctaaatgagacccggggaatcagagcacaaagctgaaggagctcc

SEQ ID NO: 603405 - DNA, 544 bp, Homo sapiens
  misc_feature (274)..(274): n is a, c, g, or t
  misc_feature (450)..(450): n is a, c, g, or t
  misc_feature (459)..(459): n is a, c, g, or t
  misc_feature (505)..(505): n is a, c, g, or t
  misc_feature (531)..(531): n is a, c, g, or t
ggaacagggagtgtactgatacaaagttgtttgtcaggaattgtccttgatttacagaaacaacattggttcgtgattggctatccattgttgagctatgcattattaggttaatttgcagctgcttgtggcaatagcaatcagtttcaacagttgaagacatagctcaaaagggagggggagtagaaagtgattgctgtatcgttttaatgtctctctgggcctgataataaagacttgcatccctcagatgttatttctcagtaacttagcntaaagtattaagttaacagagttttgtcgtacaagtgtatatgtttgaagagtaatagattgttttgtcaattaacttgaacctggcccgaaggagaagccacagttgtcccattctgccccaccacctttgggctgattgtcatggtcaaagaagctagtggtaagtgtgagccnagcaactcncctttccctcctcccagttctgagaccttagtagagctttggagantgaatgagagtgttgagttatggtcncatgtgctgacgg

SEQ ID NO: 603406 - DNA, 819 bp, Homo sapiens
tttccggtttgccgcgtgcgcctctaacgttggggagaccgccgggggtgggccaaaaaacgtgcccggtgtgtggccactctccgagggggcattcctggaccgcggttttgtgcccaccaccgctggggaccccctgttgtcgtggccccgtgggctggggcgaaaatcctggaccacgaagttggggcccctcgtcctgtagtgacgacagggcgaggatccgccacccaccacttcgggtgcgctcacccgcgggcttcttgtgtgcacaccgccgggtggtggtgttttccccccgatagggatcccctcgctggtcttctttgggggccacaagacaggcgccccgcacgacgtgttctgtgggggtttccactctgaggacgcaccaaacctccattcaccccggcaaagtgggggagacaatctactctccagcaggccgccggctggtggtccaccgcccagtagcccgcgtcctcacttctgtgtgtcgcaccaccacagaccccgcactcacattcactaagttatggggcgtattatgagcagggagaagaaatccatgtccagggaaccccggagcccagaagcgtatcctcggccaaccccaccaggcgcgtagaaccacccacgcgtcgcccacgacaggggccaggtgctgcagtacaggcccaacagagcgtgttgcgggtgtcaacaggcgaccacaacggggcggcgacttgggcacagggggcacagggcgccagcccctacgaacagtttcgggccgaccgccttcccaaagataaaaaaaaactcccccacataaca

SEQ ID NO: 603407 - DNA, 624 bp, Homo sapiens
aatcctccttacttgaaacactgaaagcatggcagcatttatactttgtttgatagcatttcttattgtatagtttcgtttctgttattgagatggagtcttgccctgttgcccaggctggagtgcagtggcgcagtctcggctcactgcatcctccacctcctgagttcgagcaattctcctacctcagcctcttgaatagctgggattacaggtatgcgccatcacacctgactaatttttttacttttagtagagacagggtttcaccatgttggcccggctggtcttaaactcctgactttaggtgatctgcccacctcggcctcccagattacaggtgtgagccactgcgcccagcctctaataactttttataattagacaagaaattattaatgttttcccttatattgctagggaagttcatttcatcctgtgcaatccttggggaaaaaacatagtcttatctctaccttggctcttcatagcattcattcagcacatctttattgagcacctactgtgtgctggacactgtgctaggccctgaggctgcagaagtgcatagcacagaacagtactgcccaggctcatgagttagtgaaggagaatctcggggct

SEQ ID NO: 603408 - DNA, 356 bp, Homo sapiens
ccatccaagcttttccatgtctctactatcagtaaactaactagagacataactcacaatatgcagaccccactgagatgtacaccataatttgagattcttggcatgttaccttcacattatggaatattgaataataacaatattattcatacataacttgatgttcacacatacacaaaaatagaataatgaaactctacccatcacccagctgcaacaaatatcaatactttaccgttcttaatacatccaaccccttactttttgtttgtttctgttggtgacgtatttaattgtactctctttttaaatagacaggatctcagtctgtcacccaggccagagaacagtgg

SEQ ID NO: 603409 - DNA, 617 bp, Homo sapiens
  misc_feature (520)..(520): n is a, c, g, or t
aggctgcctagatttcccactgttgagcagcatgtgttttagaaacgttccacacttctggatagacagaaggtaacagagtggatagcaaagatgagggggaggagagggaagcatctggacagcagagtaaaataaaaggggtagaattgcaggaggctagtcatatgggggcctggaatttacccagtatattccaccccaagataggggtaggacactaagggataactaagaaggagtggatgaagggggtattgaataggttgcataataggggaccagtatgtgcctagaggggattccattgactctcacaatagagatagaagaactgaggagggtcaagaatattctgataaaactgagtaactagtccccagatctaaaaggaagagcatgggcttaccaaagactgacagcgttaccctgggttccgaggtggtgatggcggtgggggcagcggaccctgggccccgtcagtcttcagcagccaggtctacaatgcttgcaagactgnaaccagggttgcaggacctgtttgagtcagaggtggcaagcgggggaagagtctgtggagtgcatctgacttccaggtccctgatacacagataggc

SEQ ID NO: 603410 - DNA, 133 bp, Homo sapiens
  misc_feature (8)..(8): n is a, c, g, or t
  misc_feature (73)..(73): n is a, c, g, or t
catatttntagccagctccatgatgagctgctggtccgcagatcatgcttgcaggttttaaccagagtcagtnttggttagagagtcttgaacacagccacgtggtggaagaagatttatggacaggaaaagg

SEQ ID NO: 603411 - DNA, 555 bp, Homo sapiens
  misc_feature (111)..(111): n is a, c, g, or t
  misc_feature (122)..(122): n is a, c, g, or t
  misc_feature (130)..(130): n is a, c, g, or t
  misc_feature (555)..(555): n is a, c, g, or t
gtcatccaagctaccagctcagcgatgtggatggagtcacctgtgaagacatcgacgagtgcgccctgcccaccgggggccacatctgctcctaccgctgcatcaacatcnctggaagcttncagtgcanctgcccctcgtctggctacaggctggcccccaatgccgcaactgccaagacattgatgagtgtgtgactggcatccacaactgctccatcaacgagacctgcttcaacatccatggcggctttcgctgcctggccttccagtgccctgagaactaccgtcgttccgcacccacccgctgtgagcgcttgccttgccatgagaatcgggagtgctccaagctgcctttgagaataacctactaccacctttctttccccaccaacatccaaaccccccgcggtgggttttccaaatgggccccctccaatgcttgtccccggggacaggattggcacttggcatcacccggcgggaattgaaggagggttttttcaccaacccggaaggtgaggcccccacagggggggggtgggccctcaccaan

SEQ ID NO: 603412 - DNA, 615 bp, Homo sapiens
ggaggaaggaaggagctccaactcgccggcctgtgccacgggattgcccccaaattcccagactctgtggaggagctcctgctgccgcctggcacatgagatgtttcctgcaacggcctagtacgccgatggcctcctgcgctctactggcctgcgctgctgcgggtgctgcatgtgcgcaatggttcttcatacccaagaagaacgaaagtgttctcgtacttccagacctgagcagcatgtcacattgaatggatggaaactgcagagactgcatcgaaagattgcacttcagcactggccttggttcccttcagcattaatgcccctgtcttgcgtgcgagcatctgcttatgatgtgctctggatgaagtacacctattggcctatgtttgactataaggaacttgtgctgcagattgatgataatgtgacgtcagccgtagaaggcatcaacagaattgaccagagctctcatggactctcttgggcctgagttggtgcctgaagacttgccctcaatccccttggtgcctgtttcatgctcagaagaggtggaattccttggcttcggagaaccacaaagagatggtaaaagcagatccaaggaaccac

SEQ ID NO: 603413 - DNA, 587 bp, Homo sapiens
ggcgctgccctgtgtgacgaggcatccaatgctctttgaagagccatgaaggagccccaggtaagccgactcattcttcgtcggaaatcagtctcctccgtgctccgacgtgatagttcagccacagcggtcgctacactgctcacccgggactaccttacggtcaaggtctgggacctgaacatggaggcgagacccatacagacctaccaggtccatgactaccttcggagcaagcgtctgttccctgtacgagaacgagctgccttttcgacgaagtttgaactgtgcctggaacgggagcgactagcgtcgtcatgaccggggccgtacaacaacttcttccgcatgtacgatcggaactccaagcgggacgtgaccctggaggcctcgtgggtacagcagctggccccgggctgttgctcatgccgcggtgcgtgtgcgtggggggcaagcgccggcgtgatgacatcagtgtgggcagcttggacttctccaagacgatcctgcacccggtcgggcacccggctgagagcctcattgtcattgtcgccacctggagcctgtacatcttccaggacgaggta

SEQ ID NO: 603414 - DNA, 151 bp, Homo sapiens
tcttcagcgtctggattgtagcgttctcaggtccttcggatgaacctatcccgtaccgtgtacatgtagacggactacatcgaagtgataggcagacgtcgactggtcgtcgcgcacggggcgtgcgatcgaccggcagagcgactgacag

SEQ ID NO: 603415 - DNA, 823 bp, Homo sapiens
cgagtggagctggctaatcaagaggtaatgagagtagtagctcggtgctagttattgtggcgatcaatacgtaggccactgagtcgtcaggttgatggcgaacgacgcataccgcagcctggtggcatatgcatggttgggctccacgatcagagatactgtgaggacgaaacatttaaagagtgtgctcgctacgaggaacccttcgtgaaaatcgcccgttgtacaattgtgaagctgtttagatccgagagagtaggaacagcttcatgggtccactaactagggaacatgaattcgttgtttgcaggagagtccatcacattgataagccctatgaagtgagggatcttagaaaagactggcctagcaaatgccaaagaaaacggcgtttgccaagacatgcggacatggcgcatgtaaaactggagaatattccccaaactatcactagtagatggtgagagcttcgcattccaacatccgcaaagtgtgtgaatgcacccattcgtaatccatcccctgagtatgagaagaaagcatacacatgtttgaggcctaacggttacaccattggcagtaccaatatctaccattcgcgtggataaagtctctggcggtccagaaatttaggagaccatttgatagcgtgactaatttagacgagtccccaaatatgctcgcgaattcaaacaccgaacagacagtgcctttaattagccgctgcagtggtacaaagcccaagcacaggggcatgccgtccatagagcgcacagggtgtaagaacaaggtaagggggaacctcgggaaaattcctaacacc

SEQ ID NO: 603416 - DNA, 106 bp, Homo sapiens
gtttttcttcgtgcgggttgtgcggcaccctcggcgtgcgctggaagccaagggcgaaaaactcgcgcacctgtttatggtggccgccgagggtggccgccacaaa

SEQ ID NO: 603417 - DNA, 722 bp, Homo sapiens
gtgttgatgtggcgatacattcacacagaacagttgactgatacgaattatacgaccactataggaattggcctcgagccaagattcggcacgagggaagagttgcttttgatagatcagcaaagaaaatggtttcttgagatgaaatctactactggcgaagatgctgtgaacattgttgaaatgacaacaaagggtttagaatattatgtaaacttagtttataaagtagcagcagggtttgaaaggattgacttgattttgaaaaaagttctgctgtgagtaaaatgctctcaagcagcatcacatactagagcaaactctattgttaaaggaagagtccatcaatgcagaaaacttcactgtcatcttgagagattgccacagccacctaaccttcagcaaccactactctgatcagtcagcagccgtcaacattgaggcaagcctctctaagactcagtgaagactcagataatcattagcaatttttagcaataaagtatttttaaattaagctatgctcattatttttaaagacataatgctatttcacatttagtaggctacagtatagtgtaagcctaacttttatgtgcaatgggaaaccaaaaaatttgtatggctctgtttattgtgatacttgctttattgcagtgatctggaagaacctgcaagatctctgagttatgcctgtaataaaattttttagaagtcctgca

SEQ ID NO: 603418 - DNA, 143 bp, Homo sapiens
  misc_feature (25)..(25): n is a, c, g, or t
gggggggggggggggggggggggtncccccccccccttcccccccccctggggggggggttttttccccggggggggggggggtttttttttggggggggggggcccccaaggggccataaaagggggttttttggggggtta

SEQ ID NO: 603419 - DNA, 327 bp, Homo sapiens
  misc_feature (43)..(43): n is a, c, g, or t
  misc_feature (50)..(50): n is a, c, g, or t
  misc_feature (56)..(56): n is a, c, g, or t
  misc_feature (60)..(60): n is a, c, g, or t
  misc_feature (66)..(66): n is a, c, g, or t
  misc_feature (68)..(68): n is a, c, g, or t
  misc_feature (101)..(101): n is a, c, g, or t
  misc_feature (103)..(103): n is a, c, g, or t
  misc_feature (191)..(191): n is a, c, g, or t
  misc_feature (199)..(199): n is a, c, g, or t
  misc_feature (210)..(210): n is a, c, g, or t
  misc_feature (229)..(229): n is a, c, g, or t
  misc_feature (233)..(233): n is a, c, g, or t
  misc_feature (282)..(282): n is a, c, g, or t
  misc_feature (323)..(324): n is a, c, g, or t
  misc_feature (326)..(326): n is a, c, g, or t
ggaggcttcagggccagtccttctggacactgctcccagaatncctcccntcttgngggngttctngngggtgggcaaggctgggagggatatcaacttcngnggagaacacctagacccaaggacttttttctgcccaaggaacacagtttccttcagcttccatccctatgcatgcatcatggtccccncaaaaggnggatatgtcgnctcggtgggagggctgggngcangggccagatagaaattattggttttgttttttaattttgtttttcctgntttctgagaataaaggttttgttatatcaccacacaccacnngng

SEQ ID NO: 603420 - DNA, 138 bp, Homo sapiens
acagctgccctggaggttaccataggcactactgatgcgagtgtggaggctgtcagccccagagaggagaacatcgttgtcgattgcggatgatgtgcaaggggtggatccgcacccggctatggaagccatcttgga

SEQ ID NO: 603421 - DNA, 124 bp, Homo sapiens
tgacgggttccggtaagaagagcgaccctcacatcaagctacaacttccgtgcaaaagagagaggcagttgtgtctatcaacaggagtgtgtgctaaccgttacctggctatgaaggaaggggt

SEQ ID NO: 603422 - DNA, 476 bp, Homo sapiens
tcgtaaggaggcgagtgccctcaatgctccagcaacaagtctgagcagccattgcttgcatgacaggagtgagtatagaacataacgacacatgcccaacgctgtaatacagttgctagaaggtctacatgtccaacaaatgaaagattggcctccttttctttgaatattagattacatgttacaaattttcgtgggttttttcggttggtgtagctatcattttgtactgtagtgtgtgtacaacaacaggaaaagtccatggcatggatgtcccgtgttagcagagttaggatgtcatctggtccgactgttggaggatctgcgtgtggtacagcgtccagtggtgtgattcacgcctgatgatctcgctgttgttcagtttcaggcgtggttacagcatacaggagaacgagtccagtctgggtagcccgcgcgcacacagaagggtgcagtgctagtaatacggtcgccga

SEQ ID NO: 603423 - DNA, 800 bp, Homo sapiens
  misc_feature (5)..(5): n is a, c, g, or t
  misc_feature (102)..(102): n is a, c, g, or t
  misc_feature (104)..(104): n is a, c, g, or t
  misc_feature (114)..(114): n is a, c, g, or t
  misc_feature (126)..(126): n is a, c, g, or t
  misc_feature (174)..(174): n is a, c, g, or t
  misc_feature (176)..(176): n is a, c, g, or t
  misc_feature (197)..(197): n is a, c, g, or t
  misc_feature (218)..(218): n is a, c, g, or t
  misc_feature (252)..(252): n is a, c, g, or t
  misc_feature (258)..(258): n is a, c, g, or t
  misc_feature (293)..(293): n is a, c, g, or t
  misc_feature (296)..(296): n is a, c, g, or t
  misc_feature (306)..(307): n is a, c, g, or t
  misc_feature (329)..(329): n is a, c, g, or t
  misc_feature (333)..(333): n is a, c, g, or t
  misc_feature (342)..(342): n is a, c, g, or t
  misc_feature (350)..(350): n is a, c, g, or t
  misc_feature (370)..(371): n is a, c, g, or t
  misc_feature (374)..(375): n is a, c, g, or t
  misc_feature (382)..(382): n is a, c, g, or t
  misc_feature (396)..(396): n is a, c, g, or t
  misc_feature (398)..(398): n is a, c, g, or t
  misc_feature (404)..(405): n is a, c, g, or t
  misc_feature (409)..(409): n is a, c, g, or t
  misc_feature (432)..(432): n is a, c, g, or t
  misc_feature (442)..(442): n is a, c, g, or t
  misc_feature (460)..(460): n is a, c, g, or t
  misc_feature (474)..(474): n is a, c, g, or t
  misc_feature (503)..(503): n is a, c, g, or t
  misc_feature (515)..(515): n is a, c, g, or t
  misc_feature (607)..(607): n is a, c, g, or t
  misc_feature (724)..(724): n is a, c, g, or t
  misc_feature (734)..(734): n is a, c, g, or t
  misc_feature (761)..(761): n is a, c, g, or t
aattngggaggttactactttagttcagagactgtaaactaaacctctgttgagcaggggtgtgtgtgtgtgtgtgtgtgtgtgtgtgtgtacgtgcacaangnggagcaaggngggatgattggngcaggaatcacgtcttcaagtcttcaacaacttcccactgcaatccananggccacgccataccctttgangtcaatcgcaatgctctgtgntatccactaccactgccttcttccagctgacggngaagtntcctgtaccggcccctgctgctcctgcaatgcagnggnccccgttgtnngccatggagatgagcatcccgnagtngcttatggncacctggntgttgtgcagctctgtttgnnggnngtgtggnttgtttagtttttntngctctnntgtnttgtgtgtgtccataggggtggntccttttggntctgggagaggggtgggnttgtggcgagtgcngggttgtgacttacgcagcaggctctctngggctatcttgngtgcttcatagagcattgctagtgaaacactgccacaaaagctccagccatttctccagctgtattgatcaccaaaccggaaaacagtagtnccacattcttaaagccaaagtagaaggtcataggcatcatcatcatgctgctgtctcctccaccatgggagtgtgaggctgaagtggttgggtgatggtgagaaggttgcatggtantgttggagtncatatagctcatccccatatggtgggnatgatccattttttcaggaaaagttgagagtagcagaag

SEQ ID NO: 603424 - DNA, 137 bp, Homo sapiens
  misc_feature (11)..(11): n is a, c, g, or t
ccaactcaggngcgagctgctacagaagcttgggcagagatgatggtggcttccacaggatggcagtgagtgccctcactctgctttcttctttgaatccttgcaaggtggacaggtagacagcagctcgcccagtt

SEQ ID NO: 603425 - DNA, 342 bp, Homo sapiens
ccggtctctgtaacttagattgatgggcatttgggttggttccaagtctttgctgttgtaaatagtgtagcaataaacacgtgtgcatgtgtctttatagtagaatgacttatattcctttgggtatactcagtaataggattgctgggtcaaatgggatttccggttctagatcagaggctaatagtctagctggctttgcagaatcgcgtcctagtgggtcccttgcctgtcctgcccaccagtgcctgggtcattgagtgatcacacctgtcaatagttctggcttctcacgaacttcccaggcctaagttcagagccaggcgtaagttcagagccagg

SEQ ID NO: 603426 - DNA, 82 bp, Homo sapiens
gtaagactgacatagaggaggagagaggcgtccacctggcagcttgaaatcacctcttcccaaatgcaaggcactgggtgag

SEQ ID NO: 603427 - DNA, 436 bp, Homo sapiens
acagcattatgtcaaaaaaagtatgcaccttaacttaaaaaaaatgctaacattaaatgctaaattaaaaaatgctaacaattatctaggcctttagtgagtcataatctttgctgtagagtgtcttgcctccatgctgatagctgctgactgatcagggtggtggttgctgaaggttggggtggatgtgaccatttcttaaaataagacagcaatgaagtttgcaatgtctgttgactcatcctttcatgaatttatctgcagcatgtatgcagttcgatagcatgtgacctatagcagaaattctctcaaagttggagtcagtcttctcaatccctgccaatgctttgtcaactaagtttatgtaatattttaaatccttttttttgtcatttcaacatggttcacggcatcctcaccaggattacattccatg

SEQ ID NO: 603428 - DNA, 121 bp, Homo sapiens
  misc_feature (82)..(82): n is a, c, g, or t
gtactacaaacctattttatttatataacttcttatgaagtagattttgtacacatggtaggctaaaaattaaaactgctcnctccgcggtttctgataaattactagattcttggttctt

SEQ ID NO: 603429 - DNA, 216 bp, Homo sapiens
tgatgcagctctctctgatgaactcgcagtacagcataaattactgtaatagcacataaccagaaattcacatgtagttccctttttttttttggttggagacagattctccttttgtcacccgggctggagtgcagggcggtaatctcagctcatggaaacttcaaccctcaaagtccaagggattctctggcctcagccccttgagtagctgga

SEQ ID NO: 603430 - DNA, 925 bp, Homo sapiens
catggcggatactgcatctgcagcacgaacccatctccagcctggagcctgacagcctgactgccctgggcctgaggagcagcctgcagcagccgccaccagtgtgccgagtgagcggagcctgagtttgatggcagctgcctagcggtgaatctggggccctcaccatgagttcctcgcctgttaatgtaaaaaagctgaatgtgtgtctggagctgacagaggagctcaagaagcgacgccttatctgacaagggtctcaaggccgagctcatggagcagactccaggctgcagctggacgacgaggatggcctgggggccgacccgaccatggagccctgggaactggcagactagacctgggcggggattccgctggtgcgctcgtggagcaggcctcgagcaggaggcacgcggcacggcggcgatgaaagaggaggaggaagcaggaagaggaggaggcatggaatctccgcatctggacggcgaccagatggagctaggagaggagaacaggggccgcaggggtgcggacgactcgggcccgatggaggaggaggaggccgactcggaagacgagaacggcgacagaatcagggattaccacggacagggcggcacgatgacgctccggggaacgaacagtgacagggacgcggagcgaacgaagaaacggggaaccggggagccagccaggcatcaaacggacgggcgacgcacacaggcaaacagccccaaaaagaaagagacagtgtgacgacagaaggagggaccgcagggtgaacgaagcacgacgggaccacacacatgacatgaataagcgggaagaacgatggaggccaccaggggcgcgacgggaagggcacaaaagcacagaaggaaagggggaagaaagaaggagacagagacaaaggagagaaaaa

SEQ ID NO: 603431 - DNA, 100 bp, Homo sapiens
tcagcctggtacagcaagacattgctcaaaaagcaaaaaaccaatcctctcaaaaggcaaattttaagaatttcctaaacccttcctttttttgcctggt

SEQ ID NO: 603432 - DNA, 336 bp, Homo sapiens
  misc_feature (112)..(112): n is a, c, g, or t
  misc_feature (135)..(135): n is a, c, g, or t
  misc_feature (158)..(158): n is a, c, g, or t
  misc_feature (201)..(201): n is a, c, g, or t
  misc_feature (247)..(248): n is a, c, g, or t
cgatccccagccttctaggacacttaactgcagggcactccctgccagtttggctttggggtctatgggaccacctgctagtggcttccagcagccaagagaatatccctgntccgacctttttcgtgccctgcngttttctagggcgctttttttcntcgccacggaaggtccgtgccactctcgcaggccgctcccgcncaagtggctccggccggcggcgggtctctttcttcctctgggccannctcccgcctccgcgctctgtgtgactgggagctagcgggccggctcttgcggcggctctctttctccccggcgtccgctcatgcccat

SEQ ID NO: 603433 - DNA, 326 bp, Homo sapiens
cgtgctactctgctctgggttcaagccattctcctgctcatgctcctgagtagctgggattataggcacgcgccaccatacctggctaatttctgtatttttagtgaagacagggtttcaccatgttggccaggccggtcttgaaatcctgacctgaagagagctgcccgcctcggcttcccaaagtgctgagattacaggcgtgagccaccgcacccggctcagacatatgttccttaacgtacactctcagaacagccgttgagacactttttccacaatgtacgctccttgagcacccaagctctccaacgggttctctgcat

SEQ ID NO: 603434 - DNA, 1404 bp, Homo sapiens
  misc_feature (530)..(530): n is a, c, g, or t
  misc_feature (944)..(944): n is a, c, g, or t
gacaggaacatcgataagtagtgtaaaaacttgtcacaatcgaacatcctgaaatgccacagaagggatggacgaggaggaaagtctacatgactagctttcaaagaatccagagtggaatgacatcagggttctgtaccagtcctcttgtctgtctgggagaaggcacagagtgtcagagtcacacagctcagaacagcttaacatgtatgatatccgaaagctctaagagatactcgacgactgctggcatcctagaagagcacgtgggccacgggatcttatccaggtagagtcttcacgtagcgaggcagttcgcacgaagtcagacgttccagtcgtaccgtatcttacaagatcttgcctggtgcctcttcatacccctgcacaaatggtgttgatacaattgccatggtgacgaattagctgtcggttcttccaggcaggtcgactctaagcgacaaatgggccagactgactcacctgatggcagtcacatgggctggggaagttgtcactcccctctaaangaagcttcaggttgcgaaggcacgaaaaggctacgttacatgtcttcgtctgactcgcttaacaatcgagcgatcgagggggaggcacgtccgttcgacgcccttgaggaaggaaacctatctttggtttcggcaaaaggggctaccccaatcgagaagaggtaaggacaaggaattggatcttccttcgtggtaccgcctaaccccaaagtccccccaaagtccaaagtcctcaacagccaggtgaatctcttctgactttgccaatcagtctttcccaaggcctaaaaaccacggggctaaagccattgcagcatgcaataggcacacacggaatggccagtgtacagaagaatgggcctttgatactttggggacagcttggtactgaaccctatatgcaggggcccatgnacatgaaagttggtcacaccttccgccgattgggggtccaagaaaagcggaaaagcaatacccaacaactttgaacgggacataacgttcgttcagagtgcggctgacaacaggaccgagagaaaacgttactgcgacatggggcgacatcccccaccggaaatcaccgtaggtccataggacgacaaaaaggcgacccgaaggcacctaaccgggggcgaattgcaataggttggacaccgagtaggaggggacgcctggtacaacgagggggaaccactgagagcagaacaaatgtaacagttggatgactaattggccacacaggaacaacatagagctcaaacattgcgcagaaaatgcgagtgggacagccacctgtaatacaccacgagaaaagacaataaacgcagagcgacacacacaacaacaagaagaaagcgcggggcacacaaacagg

SEQ ID NO: 603435 - DNA, 292 bp, Homo sapiens
atccccgtcgggtacctgtactaatgcctattatccctgcctttctggttaggctgatgcatgttgatcacttaggtcatggagttcgagaccagcctggccaacatggtgaaaccctgtctctactaaaaacagaacaagtcgccgggcattgtagcatgcgccggtcatccctgctactcaggaagttaatggcacaacaagtgcttcaacccccgaggcagaggttgcatttagccgagattgtgccatttgcactccactctgggcaacaagagcgaaatgctctctc

SEQ ID NO: 603436 - DNA, 751 bp, Homo sapiens
  misc_feature (197)..(197): n is a, c, g, or t
  misc_feature (255)..(255): n is a, c, g, or t
  misc_feature (666)..(666): n is a, c, g, or t
tttacagtatttgagatgtgtgaaatttcaaaacaaatcactttaaattttttatagtattgatttcatatgtataatgaaaatgccttaaaacttgtacattaggagatcttagtacaatttacaactggttaatttaaccatgtatggtgtaatattatggttaccccattccaatatgtcaatgggaggacttnaatgagatatattcttttttatgtcataatcctctaaacaggtaaatacaaacctggnctatactcagatagaaatccggaaaatctcatattttatggatatttcccaataagtggacctcattaacatatatcttacttattaactcgaatgtgagttgtataccacggttgctgtatgtgcaggcatagcgtcctactaggctctttggaaacacgcagtttaaacttggaaggtttacaacaaatatctccacataccgctatagtcacaccactgtgtaagcggcgatcatatcatagtccggcgtatcacgaaagccgggaatcattccacttgtggtcacgttctcaaactacggtgtgcaatcaaactctctcgaatatacttcaccgccaaacactacccacatacgacacaccccaccaacacaacaccatcacaccaccccacaaacccccgcggggnggcccggagcccatttcccccaaataaggccgcacacacacaccaaggcgcgcgggaaccgcctgcccgggcccgcgggtacccc

SEQ ID NO: 603437 - DNA, 346 bp, Homo sapiens
catcgtagctagtgtctcgtagctgccatccagtgtctgggactagcgggcgcccgtccaccacgcccggctaattttctgtacttttgagtagagacggggtttcaccttgtaagccaggatggtctcgatctcctgacctcgtgatccgcccgcctcggcctcccaaagtgctgggattacaggcgtgagccaccgcgcccggccaaatgggagtataagtttaagacctgacaaaagaactaaaaatggtcattgatttgtcatgctgcagaggattcaaattgaagacaccagcacttacatataattggcttataaaagcaagcagttaattaaaacaaag

SEQ ID NO: 603438 - DNA, 294 bp, Homo sapiens
ggtttattttggacacaccctgaagcttttgttttgaattaagaaatgagttccaggaattgacaaaccatttgttaaccagctgtcctggctattgaagagattcatttccgcgcatccacttgttgcagtcaagtctctagtgcacgcatacaaatataagatttctatgcacgtgatacattcatggagtcctaagcaagatagtaattcatataaggggtaaatgattcttactactatagtagtcagtatacttgcatcataatgagctctactgcaatcatgtcctaa

SEQ ID NO: 603439 - DNA, 157 bp, Homo sapiens
cagtatatggagatcactgccctggcacccagcacaatgaagatcaagatctttgcgtcctcctcgagcgcaagttctccgttgtggtatcggcggctccttcctgtgcctctgctgtccacgcttccagccacgatgtggtatctatgcaacgcac

SEQ ID NO: 603440 - DNA, 178 bp, Homo sapiens
cccaaaccactccaccttactaccagaaaaccttaaccaaaccatttacccaattaaagtataggcgttagaaattgaaacctggcgaattagatatagaaccgcagggaaagatgaaaattattaaccagcttatttagcacggactaaccctattacctcttgcatattgattaac

SEQ ID NO: 603441 - DNA, 751 bp, Homo sapiens
  misc_feature (5)..(5): n is a, c, g, or t
  misc_feature (11)..(12): n is a, c, g, or t
  misc_feature (22)..(22): n is a, c, g, or t
  misc_feature (24)..(25): n is a, c, g, or t
  misc_feature (32)..(32): n is a, c, g, or t
  misc_feature (34)..(34): n is a, c, g, or t
  misc_feature (260)..(260): n is a, c, g, or t
  misc_feature (262)..(262): n is a, c, g, or t
  misc_feature (272)..(272): n is a, c, g, or t
  misc_feature (308)..(308): n is a, c, g, or t
  misc_feature (345)..(345): n is a, c, g, or t
  misc_feature (347)..(347): n is a, c, g, or t
  misc_feature (368)..(370): n is a, c, g, or t
ggcgnagctcnngcctcggagncnnagctgcngncctgtattgagctgagatggctcgagcctaacattccatgatccaggatcgtgacagatgtgcacaggctgcgtgctgttgctgctgtgggtaatttggaaccacgaggcaccccaggaccagaagacgaggcattctgtctgcctggatgtgtgggaactctctgccaacttgattggtggatctggggggggatccacccccaccccacgaggaaagcacagtntnatttctgtgngtggaggcttcaggtgccagccagctgaaggatggncacccctgtggtcaccaatgacagcctggaagttgcnangagatcgtcgacgcatgccannnacgtgtcctcacctgtgtgctgtgcaaagcctccgggcggctgctggtttacatggcggggatgactgccgcgtcaagctgtggtccatcagcaaagccctaactgcatcatgagcctgacggggcacacatcccctaggttggagagcgtcttcgcctcaacactcccgcgaggagctcaatcgtggccgtgcatcctcagtcggcgctcccatccgtagctcgtgggagctgtcaagcatgccaagaaattcttcgcacactctatggggacactgaaggcaacaatcgtgcagactgggatttccaccccgtacggccgaagttcgtagtctctggcttcccgggagacaaaatcaaagctctggggacatcaggagg

SEQ ID NO: 603442 - DNA, 1331 bp, Homo sapiens
ggtggtaatctagttacatggatgactaaacatggagacctcatcgtctgagaggatggacgtcaggaatcgtattctcccagcatagttggcatgctgctggcctgctgtctagtcccgggttcatacacgggtcaatcaggtctgagatggtgttaagcgcaacggaacgtgtttcacagaatgactggcgactacatgagcatccgtcatgttaatacaaagagagctgcgagctgatcttgtgaacagagtgtccaaaacggagatcgttgagagacactggtcacgtacatacggtagcctctgtctccctgctacctcccatgatcgggacacctgtgtagactgactctacccgagggagttagtcgtgcttctcattcatttcaggaccaggtcaacggtggtagctgtccagtgaagagagacggcgctgtgtagttgacgacaaggaggtgatagagcaatggatactggcagtgctatgtaatagtccgtagatgaaccataagctcacccgtaagggacacatgccactaggggctcagtaccactagccaaatcaatggtatgtatgtgatccgaaactttgtcagagtttgagtcactacggcgtcgaagatgggagtgaatcaacaaacgaattcgggatgggaacccacactttgggggcaccatgtaacttggtacggtgctgggagaggcatcccaccgttatttaagccttccacattctagacttggcgtggttaaaacagtgtgcaagcaaaaaaggcgattataccaacagggtaaaggacatcaattgggaggaatttgaactaggttggagatcatcgcttatttttgttaggaacactgtcacgaatccattcccagatcacagaggcaatgaggagtatttaaccagaacggctcgtcacaatacgatgggcgatttctccgttgacccatttccgttaccatggggttggggcgctcccagggaaaacattgagtacggggggaccgcaccacaggttgccaacgtcaggacttttggatcccgttgcatgggcagtaagacactcctagacggctatttggatgatgcgcaggtgacagttcgaccacgggacgagatgctggaacactctgacatacgtaggggtcccacagaccatatgtccttaggctcttagtatccgcacgtggggggacataggagcacgagggaccaggtacaacgtgcgcagcaacatcataggcaccttcgttcaggggtggacacgacgcactgtataataagacgccactgtggctctaacgaggagaccgccctgtgggct

SEQ ID NO: 603443 - DNA, 471 bp, Homo sapiens
agacccagcaagagtccaagtttcagtttgagtccaaaggcagaaaaaagctaatgttctagtttggaaacagtcaagcatgaagaattgtcttttacttgggggagggccaccctttctgttcagctttcactcgattggataaagcccacccacattaggaaggccaaagctttattcagtcttccaatttaaatggtaatcttatcccaaaacaccctcacagacacactccgaataatgttctacctactgtctgggcatcctgtggcctagtcaatttgtgaaataaaattaaccatcacgctgactataaaacctcttgactataataatggatgcttgaaaagaaatcttcaaaggagtatcttcaaagtgctaaataataatatctgtgagcgaagttttgtaatctacaaaaatgtcctttaaaatgtagataaaataaagttccttatgttaaaacttaaa

SEQ ID NO: 603444 - DNA, 748 bp, Homo sapiens
cagttaggagctttaaagcctttaggtcttcggaaggtgggaaggagtgctatactgccctgtcgtggcccatggtccgggggtgtacacggccgaggcctggcaacgtatcgacagtatctcggattccttttggtttagtgttaatgttttgatactttggtgtttgcacttcatgctctgaatactgaataagccatgaatgactgaatagtttagtgccagatttgttacagaggatacatctattggtatcattatttggggttttgaaaaagtgggttgtgttggtacaccttctaagtgtcgtttagtttctgcaaagcagataagttcttctgtgtgaaaatgttttcgtttttgtgtaatttaaggtattaaaagttccttgttccaaatcatgttgattttgctctttgctttttcgttgtctgagaaattgttggcgtagatttggcttctggtatgtgtcttctgatatgcttcgctgttgagcatcaaacgtgagacgctgccatctgagcagacccatgccatggcggtagacatgttatcacggactgtggcatcgcacagcgcggcctgctctgcaaaccaacgggctgggggcaaaggggcatgagtccagggtccaccagggtgggctcagctccagggagaggccacccacgtggcagcccacacctcttgagagcccccagtgcaggagcagaaagatcctgaccagagttaatcctgggggtagtaa

SEQ ID NO: 603445 - DNA, 424 bp, Homo sapiens
  misc_feature (11)..(12): n is a, c, g, or t
tgctcagtttnncgggacgtaggccggcctgggcactgggaggagtaaaaatctcgggataccggatctaaggagcccagaggcaggacgatttcattctccgggtcagtggacaggaggggctggaagcctggtgccagcatggtctcgggaacggtggtaatctagaatacacaaactttactaagaggttaaagaagcaaggaccaaacattggtaacaagacagtggtcaaaggtcctagaagaggtgaaaaacaggtgagactggggaaggcactttggagggtggaccagatatagtggggggcagggccctggttatatctatgtaactaggtagctggctcatagatcttttgaatgttaacctcaaccggtccagagttaatatatgtgcgtcccgaaactgagcagggtaccga

SEQ ID NO: 603446 - DNA, 160 bp, Homo sapiens
ggttgtaagagtaaatgtttcaccttaagataaccatgggcaatatattaaactctagtctgttttcttgcctttaagtaaggctgcactgattatatttgatctttgtcgtaatacatgggacgccagctaagttggtgaaaacgcgggatccaaagac

SEQ ID NO: 603447 - DNA, 752 bp, Homo sapiens
gcttcgatgccaagaacatgatggctgcgtgtgacccccggcatggccgatacctcaccgtggctgctgtcttccgtggtcggatgtccatgaatggaggtcagatgagtcaagatgtcttaacgtgcagaacaagaacagcagctactttgtgcgacatggatcccctaacaatgtcacgacagccgtctgtgacatcccgaccgtcgtggcctcaagatggcagtcacctttcattggcaatagcacagccatccaggagctcttcaagccgcatctcgagagcagtgttcactgtccattgtttccgccgagaaggccttccgtccatctggtacacaggcgagggcatggactgagatggagtttcaccgaggctgtagagctaacatgaacgacctcgttctctgagtatcagcagtaccaggatgccagcgcacgaacgaggaggaggatttcgcgtgagcgaggccgaagcagcgaggcctacaggccagagacccccatacacctcaggcttctcaggttcccttagcgcgtctttactcaaggatggcccatttccatcttcccgtcagaaatacgatcttggcgtgaccatctatcttgatcactggtttaatacttcctgggaggagggtctatgacacacgttgcctggtcgacatatgtcaggcgctcgattaaataactggctaggatcgaacacacaccctacaacctcgctccgaaaacacaccaggacgagacaa

SEQ ID NO: 603448 - DNA, 217 bp, Homo sapiens
tcgtctttactatgctggccgcaatcatcctaggtcctcatcgccctcccatccctacgcgtcttcagatcagagacgaggtcaacgactccctacgcttagcatcgaaatcaatgtggccaccaagtggtactgaagcctactagtacaccgacgtacggcggactaatcttcaactcctacatacttcccccagttattcctagaaccaggcgag

SEQ ID NO: 603449 - DNA, 241 bp, Homo sapiens
ttggtccgtatcccctttgtgttatagatatgtctttgtgtgaaaggattgttttggattttcggaaagataagacctatgttcgatatcttgtgctgtcagatgcacgccatgttattgttcatttgcattttcgagagccaccaccttcctctggtttttgtatagtttattgttgggtcggatagataatgggggaaacgtgtaatgtttaatgctggattggaaacgactttttggg

SEQ ID NO: 603450 - DNA, 961 bp, Homo sapiens
gtgatttatttaagcctgcaagacgcagggcttagagaggagggtggctgatcaagtccttagaacatttactaggaagtcacacttaggccaatgtgagcacagaatatattttcttcatgaaacgctcgttagtcacagctacaacaatagttactatgtattgagtgctgctctatggcaaatgcttacattcattatctcactgcatccttaccacaatctagggagatcgtgttattttctcagttttgtaatcgataaaggtgaagttcaaaaatgttaaatggctttccccaaatcaaagatctactgagtgtcagaactgggataggtggcatgttcaatcgctattcaataattcaatcattatttctgaaggaagaataagcaacagaaaggccaggtctgtacgactttaagccttagctgttaatcattcatttgattttttatatactgcaagtactctgaagaagtgacggccaacacgtttcctccaaagaaatctgggtaaaggcatgctaagttccaaactcatcgtatttcaaatagtttacgtctacctcttgcaattacagaaaataaccaaattcaggcacggagacaaaagttactgagattttataactgtctctggattgcactaaagggtgtcctaatttacccaaaggtgggttttcattggcatcattcctcttggaagataatccaatatgatatttctgtattaatttatgccatgggggctttaagtggtcatgggcaactagagattacacttatttatttctttattattgggctaaatctctctaaaatttctccttcctgaagtaaaaagaggcccctttgggaccgccctgaccccatctgggggggccttttggggggggctgggcctccaaaaacgggtgtgtgcctcaaggcccagaaaaggggggaaagggccacatcggac

SEQ ID NO: 603451 - DNA, 259 bp, Homo sapiens
cttgcaggtgagtaaagtgacataaacataaacatattcattgaagcatttatttcttaaataaattacagtacataccaatagtggcatattttgcagctgagaaagataatgaaatagctctttaagcttggcaccgtggctcacacctgtaatcccaacactttggaaggaaggctgaggcaggaggattggaggatcccttgaggccaggagttccagactagcctgagcaacatagtaggatcctgtctttgca

SEQ ID NO: 603452 - DNA, 584 bp, Homo sapiens
caactcaaagaacacgatcgtagaggccccaaatattgccgatcggttcgactctctacgaacgaattatcaccctaagttgtgataaataagcatttgcgacatccaccgatagattgtttttggcacaaccgcattcggtcattgatggatgtgtgtaagttgtagggaagggtaagtgttagcatatagagatctggccatgcttcatattgcattgttactcagcacctcaaccatggccgtccttaactgggaaacaagcgaaacaaggtgcggcagacatcgaggaaagaaaggaaatcgaaatcaggattatgcaagtaaaaattagaagacatgctcaaaactaccaaactaattgccattccaactaaaataggcatgcgaagcaaactaaatctttgggaggctagtagatcaaggtgggggagagtggaggcagaaccaaattccttctaaccaaaagaacttcaagatcagaggatcaactagtatgataaactttcaaggaaaagggatcatgtgagaaaagaaatgcatgccaacatataagaaggtgctcattcaggaatccagagtac

SEQ ID NO: 603453 - DNA, 256 bp, Homo sapiens
  misc_feature (13)..(13): n is a, c, g, or t
  misc_feature (40)..(40): n is a, c, g, or t
  misc_feature (60)..(60): n is a, c, g, or t
  misc_feature (63)..(63): n is a, c, g, or t
  misc_feature (101)..(101): n is a, c, g, or t
  misc_feature (140)..(140): n is a, c, g, or t
  misc_feature (142)..(142): n is a, c, g, or t
  misc_feature (144)..(144): n is a, c, g, or t
  misc_feature (210)..(210): n is a, c, g, or t
  misc_feature (212)..(212): n is a, c, g, or t
  misc_feature (221)..(222): n is a, c, g, or t
  misc_feature (226)..(226): n is a, c, g, or t
cgaccctcccggnggcgcgcgctccgaaccccggcccggnccccgccccgcccccgcccnggngccgttccgggcccgcacccccgccaggcgcatgtctncacctccgcttgcagaggccctcggtcagcgactggatncncnccatcaaggtccagtggaagttcttcaagaggaaaggcgcccccgccccaggcttccgcgcccagngntcgccacgnncagngcccgttttaccaataaactgagcgacccc

SEQ ID NO: 603454 - DNA, 439 bp, Homo sapiens
gaggagccccccccctcgcctgtataaattttacacacccctggaaacatttccaagaccctgtgacggcgaggcaaatgttccttaaagaaggtgtgggctctttcccaacctgaggatttctgaaaggttcacaggttcaatatttaatgcttcagaagcatgtgaggttcccaacactgtcagcaaaaaccttaggagaaaacttaaaaatatatgaatacatgcgcaatacacagctacagacacacattctgttgacaagggaaaaccttcaaagcatgtttctttccctcaccacaacagaacatgcagtactaaagcaatatatttgtgattccccatgtaattcttcaatgttaaacagtggcagcctctttcgaaagctaagatgaccatgcgccctttcctctgtacatataccctacccggggagggg

SEQ ID NO: 603455 - DNA, 482 bp, Homo sapiens
tatgcctgggccaagtatagaaaatcattatatgtacgatggactggatctagccatgttgcccagtgctagtctcaaactacctgtgcttcaagcaatcctccatgcctcagtcttccacagcactagaattaggcatgagccactgtgcccagcccaatattgtattttaaataaatgcagtttttgattttctttcttggacatgatagttacttaggaagctttgctgatttaaaatttccaaattttctaccttctacttttataactgtatccacagtttcatggtatggtgtcgtcaaagaattcggccttactacttctcagaaatgtctattattcagtacttataaaagtttttttgggcctcccatgtattccatcatttggtggcttaaaagttggaaacctacttactctgcaatgtaaaggctccagtggacatttattagacaacctgattcatgatactaaatcct

SEQ ID NO: 603456 - DNA, 121 bp, Homo sapiens
tgccctgtcctgttggctatgtgttttgtcagtgtggttgagaatgagtgtgagtgctgtattataccatagcctgcctagttttaagagtacttgctgtgcaatgtactatatgacccat

SEQ ID NO: 603457 - DNA, 179 bp, Homo sapiens
caggatccccagtcagtgtaagccatcaaagaattgggtgaccacgtgacctacttgcgcaacgatgggagcgcccgatatctggcttggtcggaatatctctttgacaagcacacccctgtagacagtaattatgaaagctaagcctcgggctaatttccccattgccgtggtgtgac

SEQ ID NO: 603458 - DNA, 1003 bp, Homo sapiens
  misc_feature (806)..(806): n is a, c, g, or t
  misc_feature (809)..(809): n is a, c, g, or t
gagtcgatacactcatgcctgtcagctcgattcaccggcctgtcatccagtcctgtggatgtgctggtgctgacgtccgtttggctctctttccaaatggtgacaggtatgtagagcagctccaccatagggagctctgatgggtaggaatttgctctgccatccttgtccctgtgttctcctggtccgggactacagcaacgcacgaattggttatacctgcaaccagtcacgtacccaagtgagaactaggggtctcctaggaagggtatacttgcgatcgcgactaggggggccaaaatttcgctgcgcatcaggtataaggaagggaaaagcgacgctgaatcctaacactggaagagtacatccctgcggtgttgtaatatcacgatcccatgcccttatgtcgaggttatcgcatgtacaggagcattacgttggagagcctcatgccgtctgctaccttcggcacactggtcaaagtatctgctgagtcttcttgtgcctgcaaggatgctagaaatagtgctgagggtccatgggaaagaacatgacaatgaggcagtaggaggtgtgggaagaaggggaggacagactgctcctagtggatacttactgcactggtgagacgatcatggccccccatctcagggaaaagaaaggtatatggggaggaggggctgggcatgggtctcacagtagtaagactctacgatggtgggcgtagccgcctgagggcctgtgtgctgaatttgcacatggagacgtcgactgcatcccattcgagttgtatcccacgctggacngtngatgggtcgttgccccgttacgtggtccccttgggaactgcccaggtagggcactcaacacgcagaaccgtggcgggacctgggcggaagaatgtgaaccctcaaaacgcgcccgcaagggggagaagctcgccttgtctttcaccgggaggggccactagaacccccagcacggtcatacatgcgacaggtcc

SEQ ID NO: 603459 - DNA, 1006 bp, Homo sapiens
ctgctgcctggaggggctcgcggaagaggcctgagccgcagtgcgccgcctggagcggggacagtggcactgtttcccagagccacagcagctgcctcggggccgtgggacggacgaggtgcgctgtgaggactgtgcgcgccgggccgcgacctgcctgctgcttcgcctgctgcctgctgcgggctactgcctgcctgcctgtctgcccggtggccggggcgctgggcccgaggtcggatggccctggactgcgatgcctaggaggacctgcttacccagagtggacgagttcgtgggcatgctggacatgcttcgcggcgactcgtcccactgtcgtcagcgagggcgtgccgtgcattccacggcgaaggccgccgacgattgcggcgcatctacagcaggatcgaccggctggaggccttcgtgaggatggtgggggtgccgctgtggccaggatggcaggagcagtgtcaccaaggccgaggaccgagcttggggcacctttctcccaggggcgttcaagaagctcctgcacaacgatgaaacggtgcccatcggcatcttttagcaaaggtcattgcttcccttcagagggacacagcagagcctggctaccgaaagccccctgtaccatgtttcgggaccgaaagagactactttccccttgttttgcaggttgaacgggcgcctcaggcttcttgacgggagcctgaacacactggcggccacgaagtaactcccattcttggggttcgcttacctcccagctattgaagctgaactttgccaaaacttcctttccatttcctcgaccgacttctctttacctgctccgcaaccctgccttcccaccttctcccaccccttcaccacacccatacccacttcccacctaccaccacgcacaatgtcaatgcagactcactctcagtcactctcaacatacgcacactaccacactaccacactacaactgaccactacctatctccatcatgacaat

SEQ ID NO: 603460 - DNA, 919 bp, Homo sapiens
aacactgagctggtatatgctttgctgtagatcatggtgatccatgcattcattcagttcataagaatatccagtgatgtatgtactgtgtgactggtctgcatgtgaaagacaactaggctggagtgagctctataagacgttgtgtgagacatagatcatataggcgaattacggaggcttaggaatcgcagtcgagaatgagagttgaggataatgaggagaatgtatatataattagtgactgatgtcgatgggtgtgatgatgggggcagagtagtgcagaggacacatgagtgatgtgtaaacggaaggaagaaagaagttgattttgagtgcgtagtagtgtctccagtaccgtggtagaccaggaccgcgacgatgtatgtctcttgctaacgattggccatttgaaatcttacgttcacacatgcgtacatctgccatctctgccaatccacactagcataatgtggcaaagatgcgttgagagccatgctatgattgagctggttacccgtattgaatcaggtcagaagtagattcttctcaatcatcgccagaccagtgcatactatgataccaaggagtctcattccctagatgcatacattaaggcacgtacaggatgcacttttctcgaacacgctcagcgcatgttatcactcattggtccagttgatcggtagtattcggaagtcctggggggtctatggagaattcactcaatttagagcataggagcaaaacatgcatccaaggaaattgttgctgtcatgttgcgcaagggggcatatagccgtataatctccccgcatggtcagtatgcccctctctgtcatctgaactggtaatgtcaccgattatctacacacaataatgaggcgcaggttgaaagggcatggatatcaaatacaag

SEQ ID NO: 603461 - DNA, 188 bp, Homo sapiens
tagggagattgggtagggtggaagatgatagtacaacgaatcgagaatagtccagtagttagagttcctattccgaaggaagaattctctcatgtgtgcacaggaaaacatggaccaagatgttagttggtttgtttatttatttatgtatttatttttgagacagagtcttgctctgttgctcaggc

SEQ ID NO: 603462 - DNA, 81 bp, Homo sapiens
  misc_feature (39)..(39): n is a, c, g, or t
gacgacgtcgacgaggagcgcgaccacgcccggcacgangcccacgagcagccacacgcagtcgaggacgatcgcgaaaac

SEQ ID NO: 603463 - DNA, 784 bp, Homo sapiens
  misc_feature (11)..(11): n is a, c, g, or t
  misc_feature (28)..(28): n is a, c, g, or t
  misc_feature (30)..(30): n is a, c, g, or t
  misc_feature (43)..(43): n is a, c, g, or t
  misc_feature (48)..(48): n is a, c, g, or t
  misc_feature (60)..(60): n is a, c, g, or t
  misc_feature (69)..(69): n is a, c, g, or t
  misc_feature (79)..(79): n is a, c, g, or t
  misc_feature (82)..(82): n is a, c, g, or t
  misc_feature (103)..(103): n is a, c, g, or t
  misc_feature (121)..(121): n is a, c, g, or t
  misc_feature (123)..(123): n is a, c, g, or t
  misc_feature (155)..(156): n is a, c, g, or t
  misc_feature (158)..(158): n is a, c, g, or t
  misc_feature (161)..(161): n is a, c, g, or t
  misc_feature (181)..(181): n is a, c, g, or t
  misc_feature (203)..(203): n is a, c, g, or t
  misc_feature (207)..(207): n is a, c, g, or t
  misc_feature (211)..(211): n is a, c, g, or t
  misc_feature (213)..(213): n is a, c, g, or t
  misc_feature (226)..(226): n is a, c, g, or t
  misc_feature (230)..(230): n is a, c, g, or t
  misc_feature (236)..(236): n is a, c, g, or t
  misc_feature (279)..(279): n is a, c, g, or t
  misc_feature (304)..(304): n is a, c, g, or t
  misc_feature (316)..(316): n is a, c, g, or t
  misc_feature (319)..(319): n is a, c, g, or t
  misc_feature (364)..(364): n is a, c, g, or t
  misc_feature (369)..(369): n is a, c, g, or t
  misc_feature (373)..(373): n is a, c, g, or t
  misc_feature (388)..(388): n is a, c, g, or t
  misc_feature (411)..(411): n is a, c, g, or t
  misc_feature (525)..(525): n is a, c, g, or t
  misc_feature (530)..(530): n is a, c, g, or t
  misc_feature (545)..(545): n is a, c, g, or t
  misc_feature (555)..(555): n is a, c, g, or t
  misc_feature (621)..(621): n is a, c, g, or t
  misc_feature (626)..(626): n is a, c, g, or t
  misc_feature (666)..(666): n is a, c, g, or t
  misc_feature (694)..(694): n is a, c, g, or t
  misc_feature (700)..(700): n is a, c, g, or t
  misc_feature (716)..(716): n is a, c, g, or t
  misc_feature (721)..(722): n is a, c, g, or t
  misc_feature (758)..(758): n is a, c, g, or t
tcaagtattantatctttattatggtananagcagtattttanaaatnagctcattttanagtaaaaanatttatgcanaantgtagagaaactgctgcacanaaagctccaacttaaatnanaaaaaattttctttgtagaaaaaagtaaaaannanaanatttaccaagcaaacccaanaagttcatttaaaccaaaaagnagcnaaananattaaacatttanaaanacaggntgaattctgggatccaggagaaactttagtcctttattgaaanagccatgttttaagttatgtgaagngaaatttctatnaancttctctcttactcttaatttatgccagattatttttctttaggntaaanccanaatccacaacaaggntttagctgttcttttctaaaggncggggaccaaatccttttaatctgcttgaaaagggacccatgcctatccaaaaaatgaaatggttcagttattattaaagcatgcccagtatttgggcaaaaccagaatctaanaaatnacactgtcacctaanaccacatggnttgatgggaagccatgaggaacaagggtaaagtgataaaactggcaagtggatcaaggaataaaanccaanagaattctgagaccagagggcaagaaatatctagtcgggnttcaaggacagaactgaagttcaaatanaaaaanaatgttgcctcaaggnttagnngctgagctggctatcagagctcctagtacatggtgntcaaataaggggcagttagagataaa

SEQ ID NO: 603464 - DNA, 222 bp, Homo sapiens
tctggagacgggttcactttctttcacccaagggcaaggggtgtgacctcggctcagggcaacctccaccttgggggctcaagcaatcctcccacataagcatcctaagtagggggaccacaagctcaggccaccaggcccagtaaattttggtatttttgggtaaaagacaggggttttggccatttgggctcagggcaggtctccaattggggagagctc

SEQ ID NO: 603465 - DNA, 1153 bp, Homo sapiens
tgtgtgttgctgcctgtggatgtctctgggtgcgcgcaggccgtgagtgtgcgcttttgagagtcgcggcggaagtgagccctggccgccgcccgccggcatgagctacgaccgctgccatcacctgtcttctcgccctgacggccaccatcttccaatgtggatgtactgctgcatggatggcctgtcaagaagtggctcgacctgcggttggtgttcgaggaagagacattgttgttcttggtgtggagaagaagtcagtggccaaactgcaggatgaccgaacagttgctggaacgatcttgtgctttggatgacaacgtctgcatggcctcttgcagtgccctcacgcgccgcattcgcaaggcataggtcagtcaacatgtgtgcccaggtgttggatgttgccagatgccacctggctgactgtggacggaccctggtcactgtggagtacatcaccctgctacatcgccagtctgaagcagctgttatacgcagagcaattgggcgcaggccgatttggcatctcttgccctcatcgtgggtatcgactttgatggcactcctaggctctatcagactgaaccctcgggcacataccatgcctggattgccaatgacataggcctgggtgccaagtcagtgcagtgagttccttggaggaagaactatacttgacgaagcattgacacagattatctgaccatcaagcttgtgatccaggcactcctgaaggtggtcagtcaggttggcaaaacattgaattgctgtcttgggcgaaatcaatcccatcaaggatttcaatccttaaaaatttagcactatttctctctaacatttgcaacacactcatactaaaaccactagaactattacggttggaaaacagagtctacatctgcctgtgctactactatcatagacacgactttttttaaaactagaacttacagaccccaattagccgaactatcaaaacacgacttatagataacaacaaatagaatataaaatacaaattatcaacaagaataactaccatagcagtacacaactaacatcaactaatcctacttactacacaaatcatcaaaacaacataatacctaacatacacaccgactcctactctctctctaagtgaaaaatt

SEQ ID NO: 603466 - DNA, 260 bp, Homo sapiens
gttctccaagactgattccgcgactccatcgcttttcaggggtcaataaaaatctgccgtagattctatagtgacgatgatcatttcaggaaagagtttgcaggatcagccatgctcagctgtgacgcctgaataactgtctactttatcttcactgaaccactcactctgtgtaaaggccaacagatacatactgtggttatcatatcacaagatcatgtagggataaacttgccttttaccccaaaaaataaactctc

SEQ ID NO: 603467 - DNA, 1793 bp, Homo sapiens
  misc_feature (280)..(280): n is a, c, g, or t
  misc_feature (803)..(803): n is a, c, g, or t
  misc_feature (1268)..(1268): n is a, c, g, or t
ggccagtatgcacaacaagtgtgtggacagagtgtgtctcgctatcaacaccagaagggtggccaaagtagtccgccgcgctcgcacgatgtgccccagcggagctatagtggtgctggtggagcgccccgggatgttctcgcccaggacgcaatgcgtatttgtttgcagaggacccccacaccgtgttgaccctgtggtggagattggttgccgccagtggatgcggagttggcgccagaaatggagacccgccgatggtgctcccacgggcgggcgngcgcctttggggcgcctttgagaaaagcagtcccgttggtggagcagcttctcgcggcgggggttagaaaaccgtgttgttgtgccgccacatggagaagtagtggggtgtttgcggccacacagaggggcgccccgcgcaaaggggcgttttgttctttgacgaagagaggaaaaggcgggggaggagataagtttgtggggtgctcaagtgtggttgaggctgggaaagccccgcggagttgggtgccgccacctctctgatggggggcttgaaccgacaggggtgtttctacccgcagatatccaacgacctcaacaagagccgctttggttgtgtggtggtatcacacttcggctggaccccccgctgtggtaggtggtggagaccgccccctccaccggaggggccccgccgcgtgtccgcgtgtgtagcagacgggccgcgcccgccgtgggtgggcggccccagcagcccccgcgcgcctgtggtgtgcgccctcctcaacgtgctcctcaactgntcgccgacgttgtattggggggcctcgacgacgccacagacggcgccgtttgggtgtaagggaggagaccttctcggcaccttcttccttgggggggcgcgtcgtgtgatgaacaccgctggggggcacaccacctcgggtttatagagcttttgggggaaaccacaccaccccgcggcgagaaagaaagtggagggttgctcacgacgcgcgcgtgccacgcgctggtgatagacacacttgggcccgctgcgtggggtggtgtggcacgccgcccgtcgcgccgtcgttaataggttgtggggacgacacagcgccctgcacgcaggagcgccacgctggcgggcgtgtggcagcccacactaagaagagtgtgaggccccgccacacccgccgaagtccacaaagaggggtaaagataaagaggcagagtaaatagtactttgtgagacactgtgagagagnccccccgctggggtgagacccccagagattagtgccacagacgagagagggtgacgacacagccgagtttctcagtgttgctctactgtgtggtgggtgagactttctggtgtcgcacgatgtgtctctcttatagagaaagaatatgggagagagtgccctacagagagagagactctctccacacaccctgcggctcttgggcgtgtcacacagagaaccacacctcacgctcacaagaggtgttaagagcggctctctaaggcgcacactgggctggttggtttccacttgaaagccgcaacttctgggccctgggcccttaacttggctttcttctaggcttcttgtaggcgcttcttccacgctttgcacacctgttccccacccctcccaccttcaggctgttcctgcacgccacaacactccaccctccaccttcccttttccccccctcccgcagcacctcccagcctgttgctatagagcctacctgtaagtccaataaaccaccactgaacacca

SEQ ID NO: 603468 - DNA, 445 bp, Homo sapiens
gtgagggtctcctacctagaagctgctttagtactatgtgctgcactgccctgcgagcatcggcaccctaaggctcaaaagaatgaggtatctgttccgctctcttcaaagccaccagattctatcagtccacaaagctggactgggtgtaggttgggctccaggtttgccgcctagggttactacatgctcaatgcttctcattcaccgcatatatctcgactaccctcacgctagactacaagtttcaccttgagcctgtgaaaacgctcactacctagtgcacgaaagacatctcgctaaggcgaatgcttcccacctatgtcgggaagcttctgcgtatgactaagctggtgttgcctagtcgcgtgccgtatcggctgggcaatgtggataccttccagctgcgagatggatggcaggatatttgtgcccattttgggca

SEQ ID NO: 603469 - DNA, 534 bp, Homo sapiens
  misc_feature (37)..(37): n is a, c, g, or t
  misc_feature (47)..(47): n is a, c, g, or t
  misc_feature (99)..(99): n is a, c, g, or t
ggggatttggcccctcgggcccaggatttcggcacgnggacttttcncccataaaaaggattgagaccctgtcattgcaccattatagatggaactagngatcattaagtgaattaagcccaggcacagcaagacagaccatccacatgttctgacgtatttgttggagctaaagatgaaaacaactgaacttatagagggtagaaggatgtttaccagaggcgggaaaggcagtgagggcatggtgagggggaagtggggaatgttaacgggcacaaaatgtagaatgactaagacctagtatttgatagcacaaggttactacagtcaataataattgtgcattttaaaggtataattgaattgtaacacgaaaggataaatgcttgaggttatggataccccatttaccctgatgtgattattagacattgcatgcctatatcaaaatatatcatgtaccccatagatatatacacctagtatgtacccacaaaaattaaaaataaagtaaaatttcaatgattaggaaga

SEQ ID NO: 603470 - DNA, 187 bp, Homo sapiens
gactgactatcctagagctggtactaggacacaggtctgcagtgcggaatattgccgatgctgtcccgcaagtctgtttggtgccatcactgggccggcacgccgtacaagcctctagtcatgttgaccaccgaactgtcggcgcactatgctcgagagcattatgactcccctcctactggtcctg

SEQ ID NO: 603471 - DNA, 374 bp, Homo sapiens
tcatgctcagtgttcataggtagattctttgggggctttggtggcctaccctttgtgaggcactcatttttcctaaagtgttatatactatatgtttattttttttaattaagaatacatatttctttttctgtctatagtaaaaaacaaagtttttactgacacctgtaattctggtggtatagcacagagttccttccagcctccttcctttttatatttgaaactgcctattcaacattaagaaatctgctctggccacgcaccattgttcatgcctgtaatcctagcactttgggaggccaaggtggatggattgcttgagcccaggagttcgagaccatcctgggcaacatggtgaaaccttgtctcta

SEQ ID NO: 603472 - DNA, 878 bp, Homo sapiens
agcggggcttcgggccctgcacctgtgactctcggccgcgctcgccctcggcccgcccggcgccgcaggccccatggccccgtccaggctgcagctcggcctccgcgccgcctactccggcatcagctccgtggccggcttctccatcttcctcgtctggacggtggtctaccgagagccggggaccgcgggcatgggagggctcgcaggggtgctggcatctgtgggtcctggtgacgcacgtgatgtacatgcaagattatgaggaggacctggctcaaggggctgcgcggcttctgtctgtcgtgggcggtcctcttctcggcacgatctgccatcgcgtgcgctgtcgtgcaccattccctcgtgactggcgcagtcaccgcggacagtccgagagcctcaacagtaccccgacgcaggctactagcgctcgtccagacgatctcggagcttcagtgttccgttcgaagtggagccgttccgtgctcagccgtctatgcccaccggttaccgggctgacttggctgagatcagcatcctcagagagtttctgacccagggggtgagagtctctgcagccatgggggggccttaggacctggactcagcctctgagatgtcgggagaggctactcggcatcgccctggtgagcccgagaactgtggctgaaaatacagaggaggacgagtgtggtctcccaggaagctgtgctgggcgtccctttcgacggaaacctgagtgtggtagagcaggggatcctgcgatgttgctcctcgtcagcctgggcagagggcagcttgagaacttgttccattgactctgggtcttgtgcggctttaatggagctcttaaaatattcgagggagaagggcac

SEQ ID NO: 603473 - DNA, 301 bp, Homo sapiens
ggccggaagtcttctccctgcacttcgtgcaggaaaatattcttatttggaaaaagaaaactttttggataaatttttgaaactttgagcaagctatcaaaagttgtctgcctcctccttctccccagccccaaaatacacagacttaacaacagaaaaatataactgttatcctatgttaatttatgaaagcagataaatatggggtatataataagataatttcattatttaattcaatgaattgcttgttttagtgctctgtaagtatttgaacaagtaaactttttgagttaacaaa

SEQ ID NO: 603474 - DNA, 150 bp, Homo sapiens
  misc_feature (8)..(8): n is a, c, g, or t
tataggcnaagagagttgatcacttccagggtctctgacttctgtgacctggaaatcagcctggcttgggattgcatgttgttgcatctttaattatttgaattattctttgaataatcttctatttgcttgaatctgagccgacgagag

SEQ ID NO: 603475 - DNA, 348 bp, Homo sapiens
ccccttggtggagggttgccgctcatgcgccccgcgcgcggactcatggtacgcgggcacctggtgctgggtgcagtagctggcagccgctgttgacgtggttgaggactttctgcttgagctgcgccacctgctcgcgcagcaggctcgccgtggacgccagctccgtgttctgactcttgagggtcttcactttctcttccaggcgcgagatgcgctccagcttgcgcttgcggcacttggaggcggcgatgcggttgcgcagccgcttgcgctccgccttgatgcgctcctgcgtgtccatgtcgatgggcgacaacggcgggctctcgccgaagctcggcacgt

SEQ ID NO: 603476 - DNA, 113 bp, Homo sapiens
caaagagacacacggtgaggagatcgggttagtaatgcagtgtagcaaagaccagtgagcgagaacttttgcagtagagctgtattacgaattccggaatgggatttaaatca

SEQ ID NO: 603477 - DNA, 213 bp, Homo sapiens
cacacgccgattgggttgaccagtgatttaaagatgtgggtagagaagtcccgtcgtgcgcagtggtaacaaatccgactaggaaccatgaggttgcgggtcggccctgcccttctcagtgggttgacgatccggtgttgccgcgagctgtggtgcaggttgcagactcggcttggatcacgcgttgctgtggctatggctccgattagaccc

SEQ ID NO: 603478 - DNA, 122 bp, Homo sapiens
tggggtttttcccctttttcccctttttttttttccccccccttttttcccttttttccccgcccccccctgttttttgttttggtttttgggggcccccccttttttttttggggccccca

SEQ ID NO: 603479 - DNA, 113 bp, Homo sapiens
aattttcaatggcaagcacattttcaggtccagtttcttcaagctttttcaaagcaaagtccttattttgaggctgggtgcagggcccacgcctgtaatcccagcacttcagg

SEQ ID NO: 603480 - DNA, 439 bp, Homo sapiens
tcccccaaatggaactcctagttacaaagaactttaccaactcagaattgatataattttaacaactgtctatcaaattctggggcttcaagcatatacatgtttgactcttcaaaaaaagaaagagagagagagaataataactctcgagctgagtggccaggcacggtggcacatacctgtaatcccgacactttggaaggccgaggtaggcgtattgctttagctcagaactttgataccagccggtgctgcctgttcccaccctgtcgctactaaaatacaaaaaattagctgggcatggtggtgcacacctgtagtcccagctactcaagaggctgaggcacgagaattgcttgaaccaaggaggcagaggctgcaatgagctgagatcacaccactgcactccagcctgggcagcagagcaagactctgtctc

SEQ ID NO: 603481 - DNA, 799 bp, Homo sapiens
  misc_feature (29)..(29): n is a, c, g, or t
  misc_feature (775)..(776): n is a, c, g, or t
agaggattccgtcgttttcaactgcggtncaagctatcctcccccactacaaacgcatcctccaaactgctgatctggattccacccttgtccgccagctcccagaatctcttctccacatagccacccaaacaatactttagaattgtgtgtcagctcatggaactcccctgaataaaacctcctgatagattcctgtcatactctaattgagatctgaaagtgctagtggtccctgcccgctggaacacttgctggacaccagcctcttgactgtccctcaaatacaccaagcacctacaagctccagggccttctcacgaatgctccgtgtgacccggatgctccttctgactggagtgctccctcctagggtgctccctctgaccaggataatctcttcacactcattcttggcattttctctttcacatctttcaggtcttttctcaaaacccatcatcttacaggggtcttccctgactgcctgatctaaaataacagcccagtcacactttcatcccagtaccctgcttttctttttccctgcagagccagataacattaccttatgtatctttgtctattatctgtctcttccactggactataaagtcctgtgagggcaggagatttgtctttttgggtacactgatgtcatcccagagttcaggatagcacgaatcacacacccatcagatgagtgagtgaatgaataaatggatcagataatgaatgaaggaatggatcaactggctatcaccgcagttgaaanncgcgggatcactctagagtcgcc

SEQ ID NO: 603482 - DNA, 1003 bp, Homo sapiens
  misc_feature (979)..(979): n is a, c, g, or t
ctgccgatcaccgtttattctgttgtttcaaggccaaagcgcgctcggcatttgttaggagcgctcaagtctgttatcggaggaagtgaacggcaaggatttaggacacattccctgtgttcattggactgtcccggctgcttgtcccttttcctcttcttcttctttgcatagttatcccacagcggaccagtccggggtacgagttgcatcgtgaagtctgtcgtctccttcacgggcgcatctctgtagagatttgagcttagctcttctcgtggactagtgctatgccacccttcgcccaagagatactaggttgataggctcgcgactttcttctcagcagagcatctcatgctacacaccatcttgctactcattgtccttacatataccaacactgatatgcacttaaggaggttatctcttatgatgggagctctctctctgtttcttacttgccttgtttggagcacctgatggctcttgaaactatgagagtgagcccgacatacactcttgggagcgattacctgttgtgacttgttgggtgtgactattagccagggatgccgaactgcaccggggtgttgtaatgtattgacgctggagggaccttcatgcgggaggggaaccctggaccatgggaaccatttgactggtcacacccttgtggaggatacggcgagcctgaaatccttcccgctagtgaaccgggtaccactagggtcgaccttaggtgggagccctaacccctcctaaccggatgggggagagttaacctagacgtgccaagcgatccggcgggcacaccgggagtatattctgagaggttgcggaggaagggggattccctggttagtggccctcttccgcactggaagtgcggagatgtgtctcccgggaggaacggggaatacaccccccgacccatgcgtagaggggacgccatgacacggcgcgaacccaggccctttcnaacatctcaacaggacacgacacg

SEQ ID NO: 603483 - DNA, 106 bp, Homo sapiens
ccctgatgtatgaaaaatgaaagaaaaagaaaatgaaaagataataaaaaaaagaataaagaaaaatgaaataataaaaaaataataaataaaattaaaaagaaaa

SEQ ID NO: 603484 - DNA, 846 bp, Homo sapiens
  misc_feature (247)..(247): n is a, c, g, or t
  misc_feature (348)..(348): n is a, c, g, or t
  misc_feature (365)..(365): n is a, c, g, or t
  misc_feature (435)..(435): n is a, c, g, or t
  misc_feature (472)..(472): n is a, c, g, or t
  misc_feature (526)..(526): n is a, c, g, or t
  misc_feature (545)..(545): n is a, c, g, or t
  misc_feature (564)..(564): n is a, c, g, or t
aagttgcataagataatgctttacatttcacatacctatatttatctgagtgctgtctaaaactgtgtgctagccaaagtaatgctatgaaatcattgcagaattaacccgtgagttaatgttaaatgcactgttatgccatgtgaagaggcatcgactttgataccaccatcatgttcagaccattttatacatttcagtggccttttttttttttaagggaaaaaaaagcgcaaaaccaagtacntagtgacgatggcttttattgggacaaatagctttatattttcattaaaccatgcaaaaaatactacatctttcgggcacataacggtctccttaaccacngaacagttcagccattngaataaatggtacatggtaaagcttatagtagctgatggtatatggatggtatggtatactatattaaangtgaattgtaccccttcattttaaaaggtcatgtgtnctactgcctatttagattactggggtggggaagggtgttggtaagcaggatttnaagtcctctctctctcgangggttatgaagatataggntatgctcttactaccaagctcaggattctgattttaagggtacagataggttgcgggagttcattcgggtatacttgactggttgatggaggggctggaatttgggaatccagggcttatggggggtaaaatatccgataccggccttgggggctggcctgttttggtgccccacgttggtgctgtctatttggaggggggcggggaaaagaaagagtctcaaataagggggggggggagaccggtaaaaacgacggatttatggtgtgcaacgtctgaaac

SEQ ID NO: 603485 - DNA, 791 bp, Homo sapiens
ggtccctgtgccctggcctgggggaggggaacgcggaacatggggtcgggaacacagccgctcccctctgctctgcaccccactcgtgggggaacacagccgctcccctctgctctgcaccccactcgtgggggaacacagccgctcccctctgctctgcaccccactcgtgggggaacacagccgctcccctctgctctgcaccccactcgtgggggaacacagccgctcccctctgctctgcaccccactcgtggggggaccacggttgcagcccaccgcggacccccctggtgctccaggttgggtgagtctgagccggaaggggtacgtggtgggcgcccctcattgtggctggggagacctcataccccatcgcccacccccgtcctcctggtcatttcctcccagacactgttttgccccagcgcccttcggaatcacagtcccgccgtgtcttagaaactgctttggccgatgcaaacagccccctacccgtccccctcgctcacacggtccctctccgaggccgaagaagaccttctgttcctgtaaatacagccagcaagtgcaaacctgtgattttattttccacgtattcctgaggacggactgaccgtctatgtttttcagcccttcatagggggtcttcatcgggagggggtggggtggacttaagagtaaagctgcacttggaataagctcgtggtcgctgtcagagcccctctctcaatctgtgacctgataatgtttctagaaaaagaaccaggccaaacggaggaaccactaca

SEQ ID NO: 603486 - DNA, 148 bp, Homo sapiens
acatccttcatttcttcttcctcatcagaaccgaacatcttcaagttacaggttagtcttccgactcttgctctctcttatatgctattccctatctttctttgtcttcctttctcttcagcctacatcatcgattactatctttatc

SEQ ID NO: 603487 - DNA, 707 bp, Homo sapiens
gtggggatctggctactgtggtgcctgcatgaagacaggggcttggtcgggtgcctgtgacgtacaagtaccacttccgctgttcacggtaaagtccgccgatcagaagactgaaggagttgaagagaccagtagacgactcctgctactgctttgagagcatcactgggcctatagataaagtggggttaatgaaaagaaaataaagaaatatataataaaaaaaaaaggagaatgggcggcgccgcgactggagacctatggagaaacgagcctttgagaacaccaaatccggatgaggagcgacgcagggggcgcccacagtaggggcacagggcaacagggggccaaaaagcggggacccgagaggagaacccgggggcacaatgaacaatagggggcgaagggggaatcgtctgcacagccaatatataacagacacgcgccaggggggaggcaacccgcggaagcggtctcacagtgacacaaaaatctccaaaatgagggggatactgagggggagccacgcaaggggggggagctccaagcacaacagagggggggtgctcccaagggaggagacgctcgcagagtatctcaaaatgttagccgccccgaaacaggggggaagtcccataacaaagaaaaagcagaaagcacagaagaaggcagaagagacccaaactgctcgaccgggcaggggtgcg

SEQ ID NO: 603488 - DNA, 295 bp, Homo sapiens
taccccagaggagattgccattgcatctgtcactgcccctgcgtcgcactgtgcccccagctgtcccaggagtgaccttctgtctgggggtaagagcgagaagaggatcgctcaacctaaatgccatcaaccgctgcccccttccccgaccctgggcggttaccttcttcctatgggcggtgcctgcaagactttgaactaatgcctggggagggaacggggaaatgctggggctgcaataggagttataagcgggctgaggtgaattggttcaagcaacggcaagattaaggca

SEQ ID NO: 603489 - DNA, 115 bp, Homo sapiens
acgacgggttacattcactactgacacaaactacgatagcgccttatgaaacttagcggtcgaaggtggatttagcagtaaactgagagtagagtgcttagttgaacagggccct

SEQ ID NO: 603490 - DNA, 117 bp, Homo sapiens
ctgtgctcggaaacaggttgaaagtggcagtgaggctggccttgtagtggctgagacactgcgggcatgtgttgatgctgatagggagtatgctaggaggaccctcgcggtacctga

SEQ ID NO: 603491 - DNA, 428 bp, Homo sapiens
  misc_feature (270)..(270): n is a, c, g, or t
  misc_feature (272)..(272): n is a, c, g, or t
  misc_feature (274)..(274): n is a, c, g, or t
taagaaggaggtttgcagaccatggcaaagactggagctagagattcgctggccttgaagaagcaagctgtcatgttgcgaactgcctatggagaaaactaaatggcagggaactgcagacggcttctagaacttgagcgcagcctgcagctgacaaccagtaagaagccagggccctcagtcacacaaccacaaggaaatgaattctgccaacaacctgagaggtggcctccagatgagagacccccccaaaaaaaaggggggggggtncncncccccccccccccctttttggggaaggaaagccgttttgagaagagccctgtgatagcagttttgtgagaccctgagcaaagaaaacagataaactgtgcgtagactcctggtctacagaaactgtgagataataaatgtgtcttaagataaaa

SEQ ID NO: 603492 - DNA, 188 bp, Homo sapiens
cgagtggcctggctgtaattcactcgccacatgccagctcatttttgtatttttagtggagatggggtttcaccatgttggccaggatggcctccatctcttgaccttgcgatccgcccgactcggcctcccaaaatgctgggattacaggcgtgagccatcaagtctggcgagtgaaattacggcca

SEQ ID NO: 603493 - DNA, 1064 bp, Homo sapiens
aagagatgcttagataccctatcatagaagagcttatgaagatgctcatgatggatctgtcatgatcaatctactgtataatctgtttcccaaatcgtggatgcattttgattagcagacgtaagatatcgatgaaatagtaccatctcgagaggctcgaggcgattgacaccgattgaactattgtgcccggcgtcatcctatgggctcatcaccctcccgtggctacgcatcctatagaataagaagacgaagtgcgtagcgagttgctcacgtagcgatgtgaattcttggggactaccaatggtaggtgaacttgagtgattgactatgcagagtttgtgcggactaaatcttgcgaaatcgatacatgtcgttcccgcgattatgaccttaaaatgcatgccgaacgtgacgactccgtgacgtacgacaaatcgactcagtatctcccgcattagaggtccctgcataacgctatacataatgtacatacatcaagagttattgaaggcgataagatgtctgaaaaataaagcttaatatactggtgtcaattccggtcagtctgaataactcatgttcatcgtgtggtaccgggagtgtagtaaggtcagagatctgatgttctgggtatcatacgagatgattagctgcccgatcgtggtagagtgtaatctaccctaaagaatctttgtaaataggtgaccgatatattaagcctgatatgcatagaagaaaataaggcaccgtggtaggattcatagatgtcatgaggagagtattagctggaaggaaggacaaaaaaagctaaaggaagcgcaatatggagtgggtagagagatggaagttagggaacagcgtatgaggtaatgatcgtaaaaggacagtccaagacattggggtgtattagagaacaaaaggggggggagcgggtcatacaggtgcgtcgtgataaaacaaaaaggagagagcgcgtgtgagcaaggatggctcaaacaaaaaggaagtggagtagaggaaggcggaggatattgtgtggagagataggaacctcgagtgga

SEQ ID NO: 603494 - DNA, 215 bp, Homo sapiens
gtggagaggtgattggtgtctctggaagcccaccagcgttccagccgcgagcccttcaaggcctccagcacaaagggtgcgcatggtgatgtctcgaggtggggagctagtaatggtgcccagtgttgaagcaattccctggatggacctttgcgttgtgcttgtggctgacaggctcctgagtgctatgacgtgtggacggccctgcaccgtga

SEQ ID NO: 603495 - DNA, 463 bp, Homo sapiens
  misc_feature (379)..(379): n is a, c, g, or t
  misc_feature (433)..(433): n is a, c, g, or t
taaaatcaaaattaactatcatgtcatgaaaagatatggaggaatcagcacattgctaagtgaaataacccaatctgaaaaggctccaaactgtatgatttcaactatgtgacattctggaaaaggcaaaactgtggggagagtaaaaagattggtagtttgctcaggactggggagggaggagaaaggagggctgaacaggattacgggagattttcagggcagtgaaactgatctgtatgatagtattaatataattgtggatacattcattatatatttgtctaaacccatagaatgcacaacaccaagagtgacatctaatgtactttggggtaacaatgacgtgtccaatgttgggcttatgggttgcgacaantgcaccacttctgggaaggtgtttttatttgacatgccctgtttgccccgggcnggttgggtccgagtctacggggagaagggt

SEQ ID NO: 603496 - DNA, 125 bp, Homo sapiens
  misc_feature (24)..(24): n is a, c, g, or t
  misc_feature (89)..(89): n is a, c, g, or t
agggggcccccttattcttgttgnagtgggggggccattctgttggggactttccccaaccctgggtccattattaacttctggccagncttgtttaaggaaattgttgccgccccttggggggg

SEQ ID NO: 603497 - DNA, 163 bp, Homo sapiens
tgaacatccagtgtccgcaggggggtcggcagtagtaacctgcaggcgggctgaagttcactacagtggtacgtgggggcacaatttgcgctgacgagtggcaaaattctgatgccattgtcttctgccgcatgctgggttactccatatgtgaagggccctg

SEQ ID NO: 603498 - DNA, 188 bp, Homo sapiens
tactatggaggtacttcacttcctcacaacaaacccaattaggtagagcaacatataactgtcccaattttactggacacaggttcgcagaggattcctcactggcccagggcatcaatctggagggcataacggaaagcgtatggcagtagcccagtccacgtattccatctgaacccggtaccacc

SEQ ID NO: 603499 - DNA, 215 bp, Homo sapiens
  misc_feature (194)..(195): n is a, c, g, or t
  misc_feature (198)..(198): n is a, c, g, or t
attcgagccggaccggaaggtagctgttactgtagtcaattataagatgatatatacattattttacacacatataaaacaacttttcattaacagattaaatggatgatataaactgataaaaaaagattttaaaaaaaactgaaattaagtatctttgtacccttcaatacataattaagtgcagtacaacnnccntccggtccgagcatcga

SEQ ID NO: 603500 - DNA, 515 bp, Homo sapiens
  misc_feature (181)..(181): n is a, c, g, or t
agtcatttaaattatcttgcatccaagtttcgctgtgtaatagtatatgtatcaaatctactgattagttttatcttgtgcctcaggtttaagcaagaaaagaggccaaaaaatgtcttcgtttctttattctgccttatttatactattttattttttctttcttcttcttttaaaaaanatttgttaggtggttgattctccaggccttttatctttctgtctcaagggggcaaaatttcttttctcccattttgccttttttaattgatcagtttgttcattttcagaacctaaacttctaactttatgataatatttgtcaccttttaatcactaaacattaaacttacaggtttttgctggtctcctttgtagatacactggtttcttgtttagaatttgtttaattctatagcaggcagtacttctaggaattcatctttcagatctatttggccttacacacagaaatttgcatacaaagatttttttccaccatattgtttgaaatt

SEQ ID NO: 603501 - DNA, 885 bp, Homo sapiens
gcctctcaagcttggcgttcgtctggtggggttacacgcgggttcaacatgcgtatcgaaggagtgttattcctgttcggtggcccatctatcctggacacggcatgatgttcgtccgcaatcgattgcaacggtcgtctgcaagattctctgcataactctagaatgtcatacacaaatctttaaagaagaagcgcaatcctcgcaaagttaggtggaccatagcatttccggaaagcatgctggatgataggagcgttaccagtcgcgcataacttgcagtatctggaatttgacaggaacgtataagatgaacctaatcaaagtaccagcgagagctatggactaaaactattgatgcgatgaagcagcagtcgaacgaaattcaaacatgaagcgccaagcctaacatttactaagtgacacaggacttcgaacgaaaacctcacactgagctacccgacaagttcacggactatctacagaagtcaacgcaaatacagtccatcttatccgagcccctcttgcaggcaacacgggaaacagttggaagatgaacatggtacagcagttacgaagaggatgtggacatggaagatgctccttaaataatctctagtaagcatggtctttggatgtacctttgaaaatgccctttggatacttggaactgctaaattatttcatatttcacataacggtccttaactgccaagcgattacagagacattctttacctgcgcttgccatctacctaagtatccgactattacggattgttgagattgcctctcagggattacatcttaactggtacgatgttcttcactgaaagtccattacccattctacttgtcactattgaactgaattgtggacgtcaa

SEQ ID NO: 603502 - DNA, 294 bp, Homo sapiens
  misc_feature (139)..(139): n is a, c, g, or t
catggacgcaaactcaagggggctttcaagcccgcgagcctagcccaggcgcatgacagatttgcgacaggaaggcctgtcaatccaaagcgtcaccataaacttcatggagttgacaccgagcctacatagcctgagnttggacaaacaagtcgaccggccggtaagtggccggcactcggagattcgccatgactcagatcgcccgcatcagcgacaccggcaatgaacgccgtctgcaagccgaacgcctggttggcgcaaggctttgcaggaagcccaggcgattcagag

SEQ ID NO: 603503 - DNA, 453 bp, Homo sapiens
  misc_feature (422)..(422): n is a, c, g, or t
caatcttggctcgctgcaacctctgcctcctgggtttaagcggttctcctgcctcagcctcccgagtagctgggattacaggtgtgcaccatcatgccgagccaatttttgtatttttagtagagacaggatttccccatgttggccagactggtttcaaacttctgacctcaggtgatctacctgccttggcctcccaaagtgctgggattacaggtatgagccactgtgcccagcctcaagtcacccttgttagtttggcttaccaactttaaagttttgggattgcttttgtcaagccactgggttgcaagttcagatgggtctttcttgtttttcttaggctaattgtaaggtaaaattcactttgggtaatttattgtgtcacataggattggaagttttttctcttggctaaatanttattccccatttttccaaattttggggggg

SEQ ID NO: 603504 - DNA, 1765 bp, Homo sapiens
atgcaggtgtcagcatgatagatgctgtacaaatttatggcgagacgtaaggagcagtttggctggcctgatgagcccccagaagaattcccttctgcctctgtcagcaatgatctgcccttcagaatctgaacctgagcaacggtcactgggagatagcgactcagcgtgtcccccactacgaccaggtggaactgtcctggagaggctgggtggtgagttgcgtttagaagcccgtggaaagctgctttgccgataggaccatatcatcgaggaaggagagaaacaagaatgctgctcaggagctggccactttgcatgttgtctcctggcagcacgcgtgccagttgtccacgcagcagtccaatgagccttctggccagtctggactaccagccgctcggcgtaccgactagcactgaggatcaggccttgcggagcaaagctgtgcaagtgtctcagaccacagtctagcaaagagggcaaggatttggaccctgaggtgttccagaggcatagtgactcacagctcgctccattgccatcatgcggccaccaataagcttgtccactttactggagtcaaagctgcgcgcagatggaaacagactgttcattatcctagatgtgctgctggagtctagagataggggcctactgatggggcccacttgaactccttcccaggaatggttgacgggacggaccgaggaacatggcaggagaatgggaagacataccactgtgtaccttgaaagctcgtcttcaagccagaagtgtttggcagtgagcgaccagaagataccatagcacgtgagctggtacacccacgacattactagccgatgataaccacaccaaataaactgtacaaagtagaatatacacatatgcacaaatactccacacacgaacataatcacttctcttcacttttcttcttattatatccgaaaaaaaacaaaaaattaacctaaaatacaaccaacaagagatgaggactaaacaagatgagtagagcgcgcagacacgaggcacacagacgagcaacgactgaaagagacaggagtaaggaaagtacactggggaaacagaagagagctagaatagaagaggcacaaaaagacagagcgagaagacgataaagaagcaggcaagagagcaggaagagcagagatgtgaaggaagaaaccgggcagaaagacagagagccagcacaatcagagagaacaagacaacacgcagataatacaatatccactaacaacacctaacaaaccacaaacaactaaagcaccccacatacaacccaaacaataacttacaaacatcaacaaaatcacacaaactcacacacaacaacaacacacaacaatccaacaatacccacaaccgaaccaacaacacaaaaagaacacaacaaaaaaaaacacacaacaaactcacccacaaaaataaaaactaaatagacatataacaatataatgataccaaaaaataacaatccaaaacaacaatcagaacacaataacaatagacaaaacataaacatcatacacacaatttccagatactgcataaaatataaataatagtaaatacatacaatacgaaatatacaaaatacaacgcaatacaaacctacaacaacaaccaaataaacaaacaaaataataataaaaatcaacaaataatagaaacttaataatatacataaacaccataaatacaatcgaacaccaaataaaataacgacaccaaaaca

SEQ ID NO: 603505 - DNA, 347 bp, Homo sapiens
gaccacagggccaaatataaatcctaatacttaaaaatatgtgtgtgtgtgtctgtgtatgtgtaaatgtatagatatatacacacatatatacacatacacatatatacacatgtgtatatatgtacacgtgtgtgtatatatgtatatattttttttcttcgaaaagatgtacaaacagttaaaaaaaaaaaattcagacagtacaatacgggatgtccagtgaataagtctgcctcccacactggcctccttctgcaggcttcaccttaagagaaaatgctgttactaggttttgtgtaatttgccagaatatcctatgttatataacatgtatgtctatactt

SEQ ID NO: 603506 - DNA, 838 bp, Homo sapiens
ggagagaactagtttcgagttctccgtgtttttttctttttggcccacaaagggggtaaagggggtgcctatggggtaaccatcacgggcccatattttcacacaatttctaagggggaactcaattcctagtgacgactggtgcttgaaccggcgtggttggactccaaaagatttcaagagctttgaccgacatctataccccgggatacgtgtaccggatgacagagcggggccttgcggcctacaacaggctcgcgggaaaactgcgacactcgtggcacaacacaaaccacaagtggggcggacacagccacagagacagcgggcccaaacacgaccctgggaggcaccctcaataacataattcgcacacagaggggggccctcaccacacctcgcagaacaaccaaacccatcacctcacgaagagaggccacacaccgacgtcaccagggcaaatcctccgccaacgggcatcagccccccgtgggcctctcaccaacgcagaacaccatcccagttgggggcgcagcacaccaacactcgatgccagcgacagaaagggaaaacaaaacacaccaaagccacccagcgaccagcagcaccacagcggaagaacaaaaccacgcagcgagggagacaccaagaccacccacaccgtgcacgctggacacacagcaacagacggccaaacaagcaacgataacaaagacgaggacagagcgaagagcgcaacaggactagaaacaccgcgcggccccagacgggaaacctgagccgaaaaccagcgagtagcatacgcgctatcaacgcgagacagattggaagacacggc

SEQ ID NO: 603507 - DNA, 171 bp, Homo sapiens
atcaccggtgtcggccaggcgggtctcgaacggctagcctcaaggtgatccatccacctcagaccatcacaagtggtgacgtgggattacagggtgtgagtaaccataccggccatgggaagtctattatctgaagagagtagactcaaggatgtgtgggggataacatag

SEQ ID NO: 603508 - DNA, 196 bp, Homo sapiens
cgacactgtactcagcctggtgatggagcagactccatcagaaaaaaaaaaaaaaaaaacctatctctggcaagtctctccctttttcttatgcctctccggacccctttttttcccaaactgggactcatactataagtaattttataattggctggtcccacccttaacagcctggacccttttcctcttggtc

SEQ ID NO: 603509 - DNA, 170 bp, Homo sapiens
ccagtatactctttcaccacagcaccaatctcatcgggtgatgatagccaaggtgggcatgagagtgtcggaaggagtgatgagatgtcggaaggggaaatgagagggcgatgagatgttggaaggggcgatgagatgttgatgttggcaggagcgatgagatgttggaa

SEQ ID NO: 603510 - DNA, 149 bp, Homo sapiens
ccaaccactcactatacagacctagcaacattaccaataagatagcgtagaattgaactgccaatactatagtaccgaggaagatgaaatataccagatatatagcaggctaccctatactctgcatatgatactagaatacttcaggg

SEQ ID NO: 603511 - DNA, 335 bp, Homo sapiens
ggcaagctatcacggttcaatgtccggagagtatatatgttgaagaggatagctattagaaggattatggatgcggttcgcttgcgttgagggaaatacttgatggcagcttctgtggaaggagggtttattttttttgtcatgtgcagaagaagcaggccggatgtcagagagggtgccttgggtaacctactgggactcacgcagtgaacagggggctattcctaagttttatatgctatatgccattattgattattaactgatgagtattgatatggtagtatatggttataggttcatatgtccggacgagtatattatatgaaccggat

SEQ ID NO: 603512 - DNA, 223 bp, Homo sapiens
gcgttgtagctagctgatagtgcttcgggcacaattaaaagattctctctgctaataggataaaagccagctgtgtatggcctgtgttcttaaatgtcgattgtatttattccttggtaatttattcatactttacgaccaccttcctcttccctggaatccttatccctagcttcaccaacaaatcagtcagcagcagacctaccgacgctctacatacgtc

SEQ ID NO: 603513 - DNA, 461 bp, Homo sapiens
atctagaggatcccaccatagagctctccgctcagctatagtgagcctgactaccccctagatctactgtgcttcctctgttcacgtgctcatctaaatagtgggagacaccaacagatccctgcagcactctccagatcctcttggctgtgccggccttttcggcatcctccttgatttccatagctcctccacctgcagaattctcgttgcaggccgagctctagcacgaccctgtcaccgtcgagcccagcatgactgaggccctgctcagtcacggtgagtcacgcccagtctgctccatacccctggtgctgtggatgcggactcttggacaagatttgggccccatcgtagaaatttcgatgactgtcataagagagcctgatccttgtgacttccgtggctttgtacagatcttctctcatcgtccctattttaatcatctcaagatgtaccag

SEQ ID NO: 603514 - DNA, 284 bp, Homo sapiens
ggcctggacaagcaactgctcgaactgctgaaccagcgcgcccgcgttgccgagcaggtcggcgagatcaagcgcactgagggcacgccttcttccggccgatcgcgtcgccccaggtcatcgacaagatccgcgccgccaaccgcggcccgctgaaggcggaacatgtgtcggccatctggcgcgagatcatgtcggcctgcctggccctggagtcgccgcagcgcgttgccgtgttggggccgatgggtaccttctgcgagcaggctgccctcgaatatttc

SEQ ID NO: 603515 - DNA, 320 bp, Homo sapiens
caagaacaccaatgaagccacctcctgccagatcactaattccacagcaacaagtcaaatcgaaagtcagatatctacagtctagcaataatctccttagcgcacaatgtagcagcacaagggaagtacattgctatagtatagaccacctgtggaaaccaaggcgccttgagacagagaaactcagaccagctataggagctcttggacaccaattgaaccgaaaattagtatagcatcaagtgacctcctggtcccaaaagacttgagaacagaaagccagatcattatatcccgcacatataatgccaccactcata

SEQ ID NO: 603516 - DNA, 710 bp, Homo sapiens
tgttttatttttactactttatcaaaacatgtcccttaaggtgtgtaggattcatttttaaaattctccctagaaaataatatacaaaggagaggcatattatatccccaatcacacttctggaagatagcttcccggggtcgagaagggtcttctctcttctttatcacgtggtagttatgggccttagcatgtgttaagatgtgagattatcaggataagtgtgactgagcaaacttcttattacaaccatcgaaggggcacacatagggccgtgtctccggatagtggatcgcacatgtgttgtgtgcgcaaatttgaagctccaggtgaaacagcgtttcccacagcctatcgaacggtgcacgtgaaggggcttcatcctccagtattgaaccagttgggggttcgttaagtttggaactctcaacaaaagcttgccactttctgcacagacgtggactcgtgggcaccgtgggtgtcgccgatgttttctcatggccgaggttctccctgaacatcttggtgcagcctttagtgagggcagctatggtcctgtggagcatcactcttcttaaattatcctgggttcattctagccaaattctgcccgttgtttcgggatctggaaaaggtcaatgccagggtatacccccggagagaagttcttacccggacaattttccggaaaacccggaaggagagcacac

SEQ ID NO: 603517 - DNA, 531 bp, Homo sapiens
aacggcgtacacctgtgcgacgacgaatgcgcaggctggcagagaccggctcggcggtggcgttctgcccgacttcgaacttcttcctcggtagtgggttgttcaacctgccgatggccgagaaacacaacttgaacgtgggcctgggcaccgacgtgggcggcggcaccagcttctcgctgctgcaaaccctgaacgaagcctacaaggtcatgcaactgcaaggtgcgcggctgagcccgttcaagtcgctgtacctggcgaccctgggcggcgctcgagcgctgcgcctggaagacaagatcggcacgttgcaaccaggcaccgatgcagacttcctggtgttggattacaacgccacgccgctgctgagctaccgcctgaaacaggccaataacattgccgagacgttgtttgtgctgatgacgttgggggatgaccggacggtgttgcagacctatgcagccgggcagctcgttcaccagcgctgatctcagagcccccccacgaaaccaagactcaggtggtgtg

SEQ ID NO: 603518 - DNA, 223 bp, Homo sapiens
cccccccccccggggggccctttttgggggaaggccggggttttttttggggtttaaaaaacccttgggttttttccccccccggggggaaggggaacggccccgggttttttttttttttttttttttgcccctggttccccccccgggggggggcccccttttttaagggggaaggggggggggtttttttttaaccccgggcgggggtttggccccccca

SEQ ID NO: 603519 - DNA, 274 bp, Homo sapiens
cttgagagataaccaaattgcggtaatttgtccaaagttgtgttgactgtctgcctcatgagcgttgaggcgacctgacagtgtgctgtgacagatcaggacagcacctgaccccaggttgcagggtggtcctggagctgtctctgtggccgtcgtcaatgggggtaaccttgactcccaaggaataccatggggtactccttgggagaggagacagagagtgggtgacgggttcttgggcttggggccacagaggccagccccatcaagacac

SEQ ID NO: 603520 - DNA, 1004 bp, Homo sapiens
ccgatccaacacgtggactacacataccaacctctagctatacgtgtaacataccactctacagcttcaggtgaattgtaatgtgactctcgtggcctgaatgctggtgtatgattgctgtctatgaactagaagtctgtcgcacccatgttcactacacttggattacaccactgtagagattcggtgttgtggctgaataaaaactaagcgtatgcaatagggatattcgaaaaatgcgcaatgaccacgctgaataaacaagattggagcaaatgatgaagattaagctatgcaagaagtgaaacatgttgaatagtgagttatactttgtcgtgagcaaataatgactatggtatgaggaacaatcaagaattatatttagaagacgattgtggtttaagcgtagtggagtacataagattaaaaatcttaagtttctctcttctactttttggggtctcaatcagaatatctcgcgtcctttaaattctccccatttgattgcatataatcgcgattaagtcccaggcacgttgatcaaagtccttattagagatctatctataagagataaaattaccttgaatagaaacgagagtaaaaaaattttagggggccgcgactaggtagtgcctatatatccgcatggcagggagcccaaagaaaatgccgttggtacgcctcgaattatcccgagtaccataggggcactcccaatagatatgtaacgtgaaactccctccacaagcgccatagtgtggaggccagttctaatcaccccttagtaggactggagacctaactgtgcggtcacttagctagaaccactgtcggggccaatggcatcccctccacgtataaggccggtggcggtccagtattttggccctgatacctcgacaagttaattatgcccggtctctgcgtatcaattcaaacattgtcattggtgtaccctttggttggttcaacccccgatgcaatgtgttttgccctttgca

SEQ ID NO: 603521 - DNA, 455 bp, Homo sapiens
tatttatcgttctgaccatagggctagtgtggttcttgattttgtatgagaaagccatcgtttacagatacaggtttgtaaaagtgtcgccaggttacagacttacaggtttttttttttaacaccaaaagttcaaatgctgcaaccatgacaagtcagcatcataagggcatcctcggtgttccccgagaaacattcttatcaaagatggcaccacgttcaaagagacgctacctcaccgatcaacgtgtggcagggtggcatttccttttttcagctatgcaaagtgcattatttacaaaccagctaagtgcatggaaccacagaaccaacacgttaggaattccagaaacaaagtggaagacagaagctttaacaacattgggagagtgccgtgtgcacttccacgggaaggccgtggccagagaagtaataacatcgtcaaacaataaata

SEQ ID NO: 603522 - DNA, 1081 bp, Homo sapiens
  misc_feature (1081)..(1081): n is a, c, g, or t
tggtggtcacctgagtgacttatagtctcgtggctgccagcaggattccactgcgaagctgtggctgctgtaggaggcggatgctatctttctgggcctggctctgtggcttgtgtgctactgctggctgcaacctacactgctgctgtggagacccaaccctgaacagagtggacaggacccagagtctacttacctcagcaggggtatacagctgcctcagaccctactgtacgtcacagaacctttaattcccaaggtgtaaggctgatggcgtagcttcgccagtggaagggacgaaggtgaacggagtcctcttgaaggcaggatcatgacccaggcccagcgagaggatgcgagagtgacgtgctgggcaggaaggcaggcgaggggagtaaaccctaaacgaattggtgtctgtggatctccactgcatctacagcaacgagtaggggatgccttctgctggggccgtgggatccacgggtatggtgctgaggtgggggcaccagggactgccttcagggagttcacagtgaatacgatgagaagggcgagcgccctgcaggatcagactagccccaattacgtacagaagacacttcttgggaggaagagaaggactaccttgtacttttaccccgcgtgtgcaccggtattagctgtgtgccccaaaagattcagctccctccctggccactctaaaatgattggtatagggggctttcccacccccttaggatgccctaatctaggctagtaatgactcaagggttctggttcactatgaattgttctctctcttgccccatctccatttattccagtcgtgcagcctaatttacacgcttgctgatatagatgcaaggaacgcgtccattcctggaacctggacaggaccggacacgtagctcagtcctattagacgccgaccggaaaattaaagcgagaggggccaacatgtggccgcaaacgtggatataagaggccgtgtgtcagaggacacacatgcgtggcgtaccaatatttagcacgaactgaaagtaacaatggataataaacgaaccgtgttaatataatn

SEQ ID NO: 603523 - DNA, 894 bp, Homo sapiens
tgcggctcgctggcgatctgccgcagcgttgtctttccacgctgccactccgatggcgaacagctcgacgccgataagcccgggcccgcgctagacacgatctgcacgctgtcctggaggcctcccgtcgtgtcaccacgatgacacacctgcgacacgcggaggcagttgtgacacctgtcgctcccggatagcccaacagggacgtgtccagcgagaggatgtgcttgatggccctggagacggcgtgtgaggacttgccgggtcgcactagctcaggcgaggacccggtgggacagaggacccgtgctggccgtacagaggagaccctgtttcactctgatctgagagcacgtggactggcggtggtcatttccagtcgtgtcttctgctcgtcgcctcgtgtgacagtgctagccatctagagcattgcgccgggagggcatgctgactgcgcgccatcgcgcaaaattggcggtcgtcatagaggcgtatgagaagttggccagccctcatcgggaggccatacgatggggacattcaaacgtggtcttgcgaagggcaaatgcttcagtaagcttcacgagccgggatggcctccgaaactaggccagcaattcgctagccgaggggttaggcagttgcacgggtagcctttgccttgattgctcaccggggaccgcttggaaagcggaccgagccgcgtcttgcaagtcaggccgaaacgggccgttatgggtgactcaggcgaaacttggcattgggcccatggcccggggtccattgggatgccctggtgggaccaggcggactttggattacgggcagcaacgagccttgcaagcaaggtgccgaggctttgggaagaaccattgaggccccggcaagcgagca

SEQ ID NO: 603524 - DNA, 312 bp, Homo sapiens
acccatgcctgctggaaatcaaaaagcggtttgtgcctggtcgctctgtgcccatgcggcggaatctcaatgatcgacagcaccccttaaaggccggctgcgttggctgttgctaggaggggcacatggagtgggccaggagggggcccttctccagatgatgtccctggtgggggcaggaggtaccctcgctctccctctcctgggggcatttgagtctgtggcttttggggtgtcctgggctcccccatctccttctggcccaatcttgccttctgccctgaggccccgggttctgtcaggggtccctaa

SEQ ID NO: 603525 - DNA, 789 bp, Homo sapiens
atgtgggaactgcggtcagcctccttttggagggccatatttgctgagttctttgctaccctcttctatgtcttctttgggctgggatcctcactgcgttgggcccctggacccctacatgtcctgcaagtggctttggcctttggcctggccctggccacactggtgcagactgtgggtcacatcagtggagcccatgtcaaccctgcggtcacttttgccttccttgtgggctcccagatgtccttgctccgtgctttctgctatatagcagcccagcttctgggagctgtggctggagcggctgtgctgtacagtgtcaccccaccagctgtccgaggaaacctagcactcaacacgctgcatgctggggtaagcgtgggccaggccaccactgtggagatcttcctgacgctccagttcgtgctctgcatctttgctacgtatgacgagaggcggaatggccgcatgggctctgtggccctggctgttggcttctccctcaccctggggcacctctttgggatgtattacactggcgcggggatgaatcccgcccgctcctttgctcctgctatcctcaccaggaacttcagcaaccactgggtgtactgggtgggcccaatcatcggcgggggcctgggcagcctgctatacgactttcttctcttcccacggctcaagagtgtttctgagagactgtctatcctcaagggagccagacccagtgactccaatggacagccagagggtacaggggaacctgtggaactgaacacccaggccctg

SEQ ID NO: 603526 - DNA, 357 bp, Homo sapiens
ggaaaatgtattgaatccaataggaagaagttgcagggaaccaatattgcaccactgcactccaacctgggcaacaatgcgaaactctgtctcaaaaacaaatgcaaaagtaacatgagaagcaaaagaaaagataattagggactcggaaagacaaagactgaaggatcggtggcaatgatatttggggaaaaaatatgtagatgaaccacagacaatgacccagactgaaagaatattcgcgcttcgaatgctcaccaaactatcatcaggaaggttctgaaatagatatgaaggcatgcaagctatttcaccagacactacattgctagctctagccatgtcggactttaccct

SEQ ID NO: 603527 - DNA, 212 bp, Homo sapiens
tgggcgacggctgagcactttgccaggacagagagatatcttcggatgacctagtgcgccttagagagtgtggcggagtatccatatggtctccaaggtgtgtatatggttgccagctgcgatgacagcttcaaatattgttgagatgaattctaagccaccaccgggagcgaacgcagcctctgagaaggaacgcagctcatccattgcag

SEQ ID NO: 603528 - DNA, 347 bp, Homo sapiens
acgatcccttacatatggcaaggcaagatagcagatgtagaaacaagcgccttcactccagctgagagaacaaaaaatacaaagccagcaatatcttagaactcacatatgaggaggatatatttcctaggggcacagagaaatttaaaaaactgtgaggaggtggtaagataactgaacttccatatccttgattctgctgtctccaatctacccggcaccaagtgcatggaaaatttctgcctgactcagggttactacactggaaagagtaaaatcaaggtggataactagcctccccaccttcttgggttccctggcaggagacttggccttgccatatgcaa

SEQ ID NO: 603529 - DNA, 257 bp, Homo sapiens
aatataactgttaatagggctccagaacttgtgcgtggtgaccagcttcgaacctaggcataggtattcttcggtgccggaaagtccccagcggcggcgcaagcgaaatgcgatccaaccctccaaggcagcgcggcattgcggatgtcagcggatctcgtaaagtgagtccagccagcggcgtgttcagctagtctttccacaccagttactcaaggacgatccctatgccagataactctgaagccagtcgacgc

SEQ ID NO: 603530 - DNA, 649 bp, Homo sapiens
  misc_feature (271)..(271): n is a, c, g, or t
  misc_feature (299)..(299): n is a, c, g, or t
  misc_feature (303)..(303): n is a, c, g, or t
  misc_feature (388)..(388): n is a, c, g, or t
  misc_feature (390)..(390): n is a, c, g, or t
  misc_feature (419)..(419): n is a, c, g, or t
  misc_feature (454)..(454): n is a, c, g, or t
  misc_feature (550)..(550): n is a, c, g, or t
  misc_feature (563)..(563): n is a, c, g, or t
  misc_feature (597)..(597): n is a, c, g, or t
  misc_feature (604)..(604): n is a, c, g, or t
  misc_feature (615)..(615): n is a, c, g, or t
  misc_feature (632)..(632): n is a, c, g, or t
  misc_feature (645)..(645): n is a, c, g, or t
taccctttttctccttaggccaagtttagcttattcttatctttccacccaaacacctacacaacgtttaggcttcctgtaagtttgaatgagacagatgtactctgaaggctggtggtaaatgtgtttgatgaccagactcttcatacagtcggcttgggccactttaaaggacaaaagccagagctcagctttatccctctcccagtgctgggagccaaaaaactgttgacagttttttgtgcagctcaagaaaactttgaaaagaacntgctttaactgaagcattggactctgcngctntctgtgtaaggcccgtgtactcccactggcagggtgaggaccaaaaatctgaaactcttatgaatctgacatattatatgggaantntatcttgtgaccggcttcaagtgcatggncttaaaattccatgaggggctaaatgtggaggganaggtggatttaaaagaggccagaccttaaccaaagatgcctggggatacagccattctggccccccctggcccaaggaacccccaaaaatgctggncaaaaaccccaancattgctgatggctttctggcatggccagcaggnccagggngggtggctttntggccccccctttggcnccccaccttttcnaaaa

SEQ ID NO: 603531 - DNA, 221 bp, Homo sapiens
tggacccgcggtatgtttacgaagctgtttgtgccggtgctgcgcacggaggtcggcgctaatcggccagctggctcaggatgcatgctgtggtctgggcgcagaaggccttcccgcgcccaatcctgcgttccccgcgaaggagaatccgtgtgcagtgtgattcgggtgccggaaacccccagcaaagcaggaggacccacgtaagagataagcgcgtg

SEQ ID NO: 603532 - DNA, 423 bp, Homo sapiens
atggctctatttggacgctggagggtggggcggttcttagagctaagcttggggcagggtcctgggtctgggctgggacgactcagctcagaaatagtgtttgcttatcctctggcgactatacgggcccctccctggggttgggggtgtgacaggcacagaagccgacccaggcggtccctgtgagcccaggggcaggaggatgcctgggactgcatctgcttacagaggggcctggacagggagggggccagaccacagcgggccctcctccggtcattgtgcgggcctctgaggctgtggcaggtgcgcggtgctcacagctcatcgtggtgccgggtcaggtcctcgccatagttggtggcctggctgcccacaaacatgttccaattacccaggatttccgctttgctcaaccaccag

SEQ ID NO: 603533 - DNA, 402 bp, Homo sapiens
gtaggactgcggtagtacgttacggatactatacatagttcactacggaataggttatgttagtcgttgtcacggtagaactgctattattcatcctacgtgggtacttgaggcgtatgctaacgattttgcgtagctgggtttggtttaatccacctcaactgcctgctatgatggctacgattgagagagtgcaggagcaaggcttcacgtttaatgagggcagagatttggtcatcatgattgagatgggggctcagtttttgtcatgtgagcaagcaacaggccggatgtcagcaagggtgccttgggtaacctctgggactcagaagtgaaagggggctattcctcgttttcattgctatagccattatgattcttcatgatgagtattgattggta

SEQ ID NO: 603534 - DNA, 349 bp, Homo sapiens
  misc_feature (302)..(302): n is a, c, g, or t
  misc_feature (314)..(314): n is a, c, g, or t
  misc_feature (319)..(319): n is a, c, g, or t
  misc_feature (324)..(324): n is a, c, g, or t
aagtgtttaaactaaaaaccacaaacctggactctaacaagggtgtcaagaatttggcctgggtgaactaagaccagctcctctatcagcatttttggtgtctcccagtgatcaaaaacagagtggttgtgaaacctgttggcccagttggtttcaaaccaaaaacattcaaaaagtttttagctctatatttgcatggtactgcgtaaacgaagaacccctctgaatcctaaaacccctcttgcctctcttccaagaaaaagggcatgggccccgtgaagcctcagtgcccgtttggcctnctgctctcactnacaanaaaangcccttgcgttgcaaaaaaaaaaaa

SEQ ID NO: 603535 - DNA, 945 bp, Homo sapiens
agtgaggagcgcctcttcctggccgccatcccatctagtgaagtgagggagtgtctctgcccggctgcccatcatctgagatgtggggagcacctcagccccgccgccccgtctgggatgtgagtgagcgcctctgcccggccgcgaccccagtctgggagtgtgaaagcgagcagcctagtctcgactcgaagcaaccgcgcggccatgatgaacgtaatgtgcagagcctctcgtgcgcaattagaacacagggcgagaaatagatggagaaaatgatacgacgacaatccacatatagttgccgctgtctttgtgtaagaaagaagtaagaccatggcgacgactagcatgttgcagtatctttgtaactaaaacgaaaaaattcttatctagcgcaaatgacgagaatagctagtcgtacgtcttgaagcaccatataaccccacaaaacccagatgctcttactttgaacatattgtctgctagtagtacacaaatacaacggttaaaaaaagggatataaaaggtgcagatagcaaaaggatcgatgcatacactgtataacaacaaagaacttgcataatagtaaaaggaaagagatcgacaacccgattacatggatggtcagaatccaaacaaaacaaccccagttatatcgtcacagtaacccaatgggtatctcaacatacactaaacttgtcgtgaacatggccctgtcagggggacagactcagacgccataagcggaaaaaacaaaaacaaccatataggatacaaccatgtattatacatcatagacatgaaactaaaacatccaactaataaggtacaatattgaaacatgtaacaaataatcaccacaaatgcagacaaaacaacgcaaataaatgaatcaaataaaaaagacaatatcaaaaagaaaacaacaaaacaacactcagc

SEQ ID NO: 603536 - DNA, 224 bp, Homo sapiens
  misc_feature (2)..(2): n is a, c, g, or t
angctgacccgggaggcagaggttgcagagagctgagatcatgccactgctactccggcctaggtgacagagtggaaactccatctccaggaaaaaaaaaaaacccaatttgtgataccaaatttaatcaactaaatttggagctatactggccttaactctatagtaagttttacagtactgtgctaggacacccactttttcaaaacagcaaatcacttgtg

SEQ ID NO: 603537 - DNA, 834 bp, Homo sapiens
cggacgcgtgggcagacctcttctgatttgtctagctgcttttctaatatctattcaccaagctcttccaataatagcataaggccctaattaatattaaacttttatcattataatacataggatgtcttctgttttcctgatcaaattctgactactattaaaatataaagaattgtccagaaatatataaaaaaagaatcacacattgatcttctttaaatgaaaatataacaattgtatggactaggatgattacagttgttcagttctgactgttatttgaagaaaaaagcaataagaagcctcagcaacttaacagaaggagctgccatttactaggagaaaagattgtggatgagagtgtagcaaaggtcagaattctgtgaagcttgagatgtttattataatgaattatcttttatactcactacaatttcctaacaattttggggtttatatttttgaaagagatatacctttaattttctttctttgtactattgttaggtaactttaatgtgcagattatactacagtgaaagttgccaatgacaaggcaaagtcacttacatcagaccaaagcaaagtggagccgggtcatgaacaaaggggatcttgtgtgtctgtccacgataagcactatcacaaggactttctattaaactcacaagaaatttctggccacccagcacaccagtttgtccagctccatccggtaggggtctcctatattaggacctatcttaaaaaatcttcaaaatggggcatttgaataagccctctaaaaaaattgtctcacaggcgtttctccccatttaaccgtctttttac

SEQ ID NO: 603538 - DNA, 155 bp, Homo sapiens
gcgtggttggcagtatgagagttgtaatggcccgacttttgagtgagggggaacaggggatcccaacggcttgcgctgcctttgcgcagaacccgggcgggcggccacagtcgaggccttgctggggtaggagaggcggtccccagtacaattgg

SEQ ID NO: 603539 - DNA, 607 bp, Homo sapiens
  misc_feature (607)..(607): n is a, c, g, or t
ttgttcgggtgactttgccatggacattgcatgcctgagcactgcgcacatcatagactacttgacctgcgtccctgcccggccccggcccgcatggctgagctgatccagaaggccaagctggccgacagccgagcgctacgacgacatggcacctgcatgaagcaggccgacagggcccagctgtccaacgaggagcgcaacctgcttccgggcctacaagaacgggcggggccgcaggtcgctggagggcatcttagcatgacagaagaccgacacctcgacagaagtgcactgataagactatcggagaaagggagtcgactgaaccattgaccagggctggaatgtggataatttaatagccatgcactatcagagagtaggctttattgaaagaggtgatactccgtcctgctgagtgctggggagacgaacaacatgatatccaaggctacagagcttgttagcagaaagtgaccaaaccatcgctgggtgtctactttgattcttggactaaaccaagtgctgcctgtaacgcttgtagcatgtgctgtcctagaacttcagcgacctattgcggtaaacacacatgcacgcgggtcgn

SEQ ID NO: 603540 - DNA, 759 bp, Homo sapiens
gggttgcttagctgtgagtgaggcggcagtgtctgagctgggggggagtgggggactcttatttttgttagtgagggacctgggcctgatgtgcccgacctggcctggcagggctctgccctggttggcctgtgcgtcatgtctcatgcgtgccgaaccagctcgggatggctgtagaggccagcgcggagggccctcgagccgtgtacgtgctgttggaggagcgcaggcaggacgactcggctcagctgctcagcctgaactctttgcttccggaatccgggatttgttgctgaacatagaattagaaaacggtccttgatcactgacagacttctacgagctcaaaagccaaagcactttaccccattacgctcaaagcactcccaatatcacatgcagggccaacaccaaggcaaccccagctacgagctctctagcatccgtctttcttgcaaggaggggctccagggacccctgacatgtcggtcattctttcttcaatcgaaggagttctttgcatgaggggcaacaggttaaatgcgggaccaggctgcaggagacagggagaaggcgtaagcggtcagaggaaacagtgccagctgaggggatccctatcccacagatctgcaaacctgcgtattcctgacgataccatgtggattggcagtattctgaatggaggcacaaattgaggccgtcaaaccccaggccagggtgccagggaggtgataaaggtgcagacccatctggagaacc

SEQ ID NO: 603541 - DNA, 586 bp, Homo sapiens
  misc_feature (520)..(520): n is a, c, g, or t
catctagaggatcccgggggagagggggtctcagtaacgtagactcggctggtgagaataagataaactagaagtgctggctcataatgtaagggttcaagtctgtaagaccgaatgagtagagtagatgcagctaagggtcaggaaggcttccgggaggaagtggcactagagctggggcaacagaagagacttagggagtggagagggaggccattctaggtccagggtaactagagtgtaagaagggtcttagagaactttttaaatgggaaaatggaagtcccaagggggcaagcaagggctccagcctagcactcccttttctctcccacatagcatgagggagaggggaaaggtaggagggggtgggaaagtgtggcacccagcctttccactccaaacctcgtatggcttcctggaggtgggcggtgaccaggatgtctcatgtaaggtggctccaatctaactatcaaaggacacgccaagggtgtggcatttgtcaagagctttaacctgnctatgctgatgcggggaggcgggggttacaccattcgtaacgtggcccggtgctggacatatgaga

SEQ ID NO: 603542 - DNA, 152 bp, Homo sapiens
tccccttagcactatcaacgttttaccttccctctacacttatcatctccacaattctaatcctactggactatcctaagaaatcggctggtcggccttaatccaaggcctacgtttccacactttctagtaaggccttatctggcgcatac

SEQ ID NO: 603543 - DNA, 208 bp, Homo sapiens
accccccccgggggggggggccccccccccccccttttccggggctgtttggggttggcctttccggccccccccattggggtccaaaggggccccaaaaggggggggaaaaaaaaaccaaaaaaaatttttccccccccccccctcccttttgcccgggggcccccccttttttttggggcccaataaaaaagggtttttccccgga

SEQ ID NO: 603544 - DNA, 298 bp, Homo sapiens
gccaagcactatatgagcatagtgctcaaatatctgctgaacaaaccaacctttgaagatgcttgagaaaacttctggatgaagcgaagattacgtggcccctattgaaagtcttgttcaggaagatgccaggtagttctgattaacatgttacagctatagcagaggcactgaatcagcggactactgtttctgtgtataacaaaaggtgacacttaattttcctcattctatacattaattttaaatatagtagtaatgcatggctttaatattacactttgctttggaatcattc

SEQ ID NO: 603545 - DNA, 960 bp, Homo sapiens
agcggatctgccggcgggattcgatggcgtgatgtctcacagaaagttctccgcgtactccagacatgggtccctcggcattcctgcctcggaaagccgcagccagcatggcagtcgtgggaagggtgatacgagcttccactagaggactgtacccgtaccatgctcggtgccagctcaacagaccttcctgggatagcaaggctgggcattgacttcacatcgtgctgggaagtcgacaggccgggatccaaggtgtaacaagaaggacggtggtggacggctgtgaacacttgtagaagacagcacgccatggtggttgtggtgcattagtgagagctacagtggaagagcgcaccttcgatgtcgctccggatccttcaatgatctgtctcttgcgtgacgcacaattccgtggatgaactggcggagtaggcgtgtactattacagaattctggacatcaagatctctatgcacatgaaggcctttaccaatgttactcgtcgaagaacatggccggatggactgatggcaagaatgccaggctggtagcaaggacttccgtcaagcgactggataggacagtagcgtgaccgaagtcagtccggtgtcaaattgcccaggggccagtattgcgcctgactttccgtcttgacgcccaggaatagaatgggccaccctgatggaagatcgcaggtgaaacggtagcggcacttgctggctcgaagcaagtctggactggtgcccgacgagaggcttgatgcagcgagggtacctgatggaatcctgaagtgattatggggccacggaatgcagtattgactccggacgtcaatcgcagggttgaccctgaaggggcaattgggtcttacaaaagggggtccaccaagtcgctggggcaccaccgacagatgggctgccattgcacagaaccacccgaggcccggcgcaaaggtgg

SEQ ID NO: 603546 - DNA, 192 bp, Homo sapiens
cttttccctcttttccctctacaaaaaacttaaaaatgtagcgcaggcatggtggcgtgcctgtaattccagcgactctggaagcttaggcaggaggatcacttgactctaggagttggaggctgcactgagctatgattgtgccactgcactccagcctcagtgacagagtgagaccccatggccgggtac

SEQ ID NO: 603547 - DNA, 394 bp, Homo sapiens
tgtgcctcgccagtagactggaaggtcccgaagagccagagagatctgtctgtctctcgcgggctccccatacagcaaggacgtctgtctgtctcactgggggctccccatacagcaaggacgtctgtctgtctcactgggggctccccatacagcgggaatgtctgtctgtctcactgggggctccccatacagcgggaatgtctgtctgtctcactgggggctccccatacagcgggaatgtccgtctgtctcactgggacctccccatgcggctgagacatctgtctctcgcgggttcccccaccagcaaggacgtctgtctctctcaggcccctcatacagctgggacatctgtctgtctcgggctcctcatacagctgggacctcgttg

SEQ ID NO: 603548 - DNA, 275 bp, Homo sapiens
  misc_feature (69)..(69): n is a, c, g, or t
  misc_feature (87)..(87): n is a, c, g, or t
  misc_feature (206)..(206): n is a, c, g, or t
  misc_feature (242)..(242): n is a, c, g, or t
atgctttggaagctttgttcttttgctcttcacaataaatcttgctgctgctcactctttgggtctgtnccacctttaagagctgtnacattcactgcaaaggtccacagcttcatttttgaagtcagcaagatcacgaacccaccagaaggaacaaactccgaacacatcctgggggcttgttggggatttcaccacatggaggnaaactagtgtttctgctactgcttcagtgagcgcanctaaatctgatcagcatggtccagggacagttg

SEQ ID NO: 603549 - DNA, 340 bp, Homo sapiens
aataatttgtaagttttaaactgtgcactgttctatgtaatatgattaactctcactctgtcctgctctgctggggatgtgaatcatcctttggtccagtagatgctacctgcctgttagtcacttggtgccatctctgttatctgattgaaaaacagtatgtatggggttggtactatttgtggtctcaggcatccactggtggtcttggggtgtatccctgccggtagggggactacttgtggactgtctttcccatcattaactgaccagtgtggagaaaggcatacatttcgtaggcagtaggttaagacttagcaagtgatgtggggctcttagg

SEQ ID NO: 603550 - DNA, 282 bp, Homo sapiens
catcataactaggcacagtccctatacaccctctacatattaccacaatcacaatgaggctcactcacccaccagcattatacaacagtaaagaccctcattcacacgagaaaacaccctcatgttcatacaccacccccacgcccatcctggttatgtgcgtactatttatgtgcgtactagttatgtgcgctactatttgtgtgcgtactatattatgtgggtactaattatgtgcgtactatttatgtgggtactacttatgtgggtactagttctgtg

SEQ ID NO: 603551 - DNA, 7226 bp, Homo sapiens
cgggcgcgggcgcgtccctgtggccagtcacccggaggagttggtcgcacaattatgaaagactcggcttctgctgctagcgccggagctgagttagttctgagaaggtttccctgggcgttccttgtccggcggcctctgctgccgcctccggagacgcttcccgatagatggctacaggccgcggaggaggaggaggtggagttgctgcccttccggagtccgccccgtgaggagaatgtcccagaaatcctggatagaaagcactttgaccaagagggaatgtgtatatattataccaagttccaaggaccctcacagatgccttccaggatgtcaaatttgtcagcaactcgtcaggtgtttttgtggtcgcttggtcaagcaacatgcttgttttactgcaagtcttgccatgaaatactcagatgtgaaattgggtgaccattttaatcaggcaatagaagaatggtctgtggaaaagcatacagaacagagcccaacggatgcttatggagtcataaattttcaagggggttctcattcctacagagctaagtatgtgaggctatcatatgacaccaaacctgaagtcattctgcaacttctgcttaaagaatggcaaatggagttacccaaacttgttatctctgtacatgggggcatgcagaaatttgagcttcacccacgaatcaagcagttgcttggaaaaggtcttattaaagctgcagttacaactggagcctggattttaactggaggagtaaacacaggtgtggcaaaacatgttggagatgccctcaaagaacatgcttccagatcatctcgaaagatttgcactatcggaatagctccatggggagtgattgaaaacagaaatgatcttgttgggagagatgtggttgctccttatcaaaccttattgaaccccctgagcaaattgaatgttttgaataatctgcattcccatttcatattggtggatgatggcactgttggaaagtatggggcggaagtcagactgagaagagaacttgaaaaaactattaatcagcaaagaattcatgctaggattggccagggtgtccctgtggtggcacttatatttgagggtgggccaaatgttatcctcacagttcttgaataccttcaggaaagcccccctgttccagtagttgtgtgtgaaggaacaggcagagctgcagatctgctagcgtatattcataaacaaacagaagaaggagggaatcttcctgatgcagcagagcccgatattatttccactatcaaaaaaacatttaactttggccagaatgaagcacttcatttatttcaaacactgatggagtgcatgaaaagaaaggagcttatcactgttttccatattgggtcagatgaacatcaagatatagatgtagcaatacttactgcactgctaaaaggtactaatgcatctgcatttgaccagcttatccttacattggcatgggatagagttgacattgccaaaaatcatgtatttgtttatggacagcagtggctggttggatccttggaacaagctatgcttgatgctcttgtaatggatagagttgcatttgtaaaacttcttattgaaaatggagtaagcatgcataaattccttaccattccgagactggaagaactttacaacactaaacaaggtccaactaatccaatgctgtttcatcttgttcgagacgtcaaacagggaaatcttcctccaggatataagatcactctgattgatataggacttgttattgaatatctcatgggaggaacctacagatgcacctatactaggaaacgttttcgattaatatataatagtcttggtggaaataatcggaggtctggccgaaatacctccagcagcactcctcagttgcgaaagagtcatgaatcttttggcaatagggcagataaaaaggaaaaaatgaggcataaccatttcattaagacagcacagccctaccgaccaaagattgatacagttatggaagaaggaaagaagaaaagaaccaaagatgaaattgtagacattgatgatccagaaaccaagcgctttccttatccacttaatgaacttttaatttgggcttgccttatgaagaggcaggtcatggcccgttttttatggcaacatggtgaagaatcaatggctaaagcattagttgcctgtaagatctatcgttcaatggcatatgaagcaaagcagagtgacctggtagatgatacttcagaagaactaaaacagtattccaatgattttggtcagttggccgttgaattattagaacagtccttcagacaagatgaaaccatggctatgaaattgctcacttatgaactgaagaactggagtaattcaacctgccttaagttagcagtttcttcaagacttagaccttttgtagctcacacctgtacacaaatgttgttatctgatatgtggatgggaaggctgaatatgaggaaaaattcctggtacaaggtcatactaagcattttagttccacctgccatattgctgttagagtataaaactaaggctgaaatgtcccatatcccacaatctcaagatgctcatcagatgacaatggatgacagcgaaaacaactttcagaacataacagaagagatccccatggaagtgtttaaagaagtacggattttggatagtaatgaaggaaagaatgagatggagatacaaatgaaatcaaaaaagcttccaattacgcgaaagttttatgccttttatcatgcaccaattgtaaaattctggtttaacacgttggcatatttaggatttctgatgctttatacatttgtggttcttgtacaaatggaacagttaccttcagttcaagaatggattgttattgcttatatttttacttatgccattgagaaagtccgtgagatctttatgtctgaagctgggaaagtaaaccagaagattaaagtatggtttagtgattacttcaacatcagtgatacaattgccataatttctttcttcattggatttggactaagatttggagcaaaatggaactttgcaaatgcatatgataatcatgtttttgtggctggaagattaatttactgtcttaacataatattttggtatgtgcgtttgctagattttctagctgtaaatcaacaggcaggaccttatgtaatgatgattggaaaaatggtggccaatatgttctacattgtagtgattatggctcttgtattacttagttttggtgttcccagaaaggcaatactttatcctcatgaagcaccatcttggactcttgctaaagatatagtttttcacccatactggatgatttttggtgaagtttatgcatacgaaattgatgtgtgtgcaaatgattctgttatccctcaaatctgtggtcctgggacgtggttgactccatttcttcaagcagtctacctctttgtacagtatatcattatggttaatcttcttattgcatttttcaacaatgtgtatttacaagtgaaggcaatttccaatattgtatggaagtaccagcgttatcattttattatggcttatcatgagaaaccagttctgcctcctccacttatcattcttagccatatagtttctctgttttgctgcatatgtaagagaagaaagaaagataagacttccgatggaccaaaacttttcttaacagaagaagatcaaaagaaacttcatgattttgaagagcagtgtgttgaaatgtatttcaatgaaaaagatgacaaatttcattctgggagtgaagagagaattcgtgtcacttttgaaagagtggaacagatgtgcattcagattaaagaagttggagatcgtgtcaactacataaaaagatcattacaatcattagattctcaaattggccatttgcaagatctttcagccctgacggtagatacattaaaaacactcactgcccagaaagcgtcggaagctagcaaagttcataatgaaatcacacgagaactgagcatttccaaacacttggctcaaaaccttattgatgatggtcctgtaagaccttctgtatggaaaaagcatggtgttgtaaatacacttagctcctctcttcctcaaggtgatcttgaaagtaataatccttttcattgtaatattttaatgaaagatgacaaagatccccagtgtaatatatttggtcaagacttacctgcagtaccccagagaaaagaatttaattttccagaggctggttcctcttctggtgccttattcccaagtgctgtttcccctccagaactgcgacagagactacatggggtagaactcttaaaaatatttaataaaaatcaaaaattaggcagttcatctactagcataccacatctgtcatccccaccaaccaaattttttgttagtacaccatctcagccaagttgcaaaagccacttggaaactggaaccaaagatcaagaaactgtttgctctaaagctacagaaggagataatacagaatttggagcatttgtaggacacagagatagcatggatttacagaggtttaaagaaacatcaaacaagataaaaatactatccaataacaatacttctgaaaacactttgaaacgagtgagttctcttgctggatttactgactgtcacagaacttccattcctgttcattcaaaacaagaaaaaatcagtagaaggccatctaccgaagacactcatgaagtagattccaaagcagctttaataccggtttggttacaagatagaccatcaaacagagaaatgccatctgaagaaggaacattaaatggtctcacttctccatttaagccagctatggatacaaattactattattcagctgtggaaagaaataacttgatgaggttatcacagagcattccatttacacctgtgcctccaagaggggagcctgtcacagtgtatcgtttggaagagagttcacccaacatactaaataacagcatgtcttcttggtcacaactaggcctctgtgccaaaatagagtttttaagcaaagaggagatgggaggaggtttacgaagagctgtcaaagtacagtgtacctggtcagaacatgatatcctcaaatcagggcatctttatattatcaaatcttttcttccagaggtggttaatacatggtcaagtatttacaaagaagatacagttctgcatctctgtctgagagaaattcaacaacagagagcagcacaaaagcttacgtttgcctttaatcaaatgaaacccaaatccataccatattctccaaggttccttgaagttttcctgctgtattgccattcagcaggacagtggtttgctgtggaagaatgtatgactggagaatttagaaaatacaacaataataatggagatgagattattccaactaatactctggaagagatcatgctagcctttagccactggacttacgaatatacaagaggggagttactggtacttgatttgcaaggtgttggtgaaaatttgactgacccatctgtgataaaagcagaagaaaagagatcctgtgatatggtttttggcccagcaaatctaggagaagatgcaattaaaaacttcagagcaaaacatcactgtaattcttgctgtagaaagcttaaacttccagatctgaagaggaatgattatacgcctgataaaattatatttcctcaggatgagccttcagatttgaatcttcagcctggaaattccaccaaagaatcagaatcaactaattctgttcgtctgatgttataatattaatattactgaatcattggttttgcctgcacctcacagaaatgttactgtgtcacttttccctcgggaggaaattgtttggtaatatagaaaggtgtatgcaagttgaatttgctgactccagcacagttaaaaggtcaatattcttttgacctgattaatcagtcagaaagtccctataggatagagctggcagctgagaaattttaaaggtaattgataattagtatttataactttttaaagggctctttgtatagcagaggatctcatttgactttgttttgatgagggtgatgccctctcttatgtggtacaataccattaaccaaaggtaggtgtccatgcagattttattggcagctgttttattgccattcaactagggaaatgaagaaatcacgcagccttttggttaaatggcagtcaaaattttcctcagtgtatttagtgtgttcagtgatgatatcactggttcccaactagatgcttgttggccacgggaagggaaatgacttgttctaattctaggttcacagaggtatgagaagcctgaactgaagaccattttcaagagggacggtatttatgaatcagggttaggctccatatttaaagatagagccagtttttttttttaaatagaacccaaattgtgtaaaaatgttaattgggttttttaaacattgttttatcaagtcactgttaagtagaagaaagccatggtaaactgatacataacctaaattataaaagcagaaacctaactcactcgtcaagggaagttaccttttgaggaaagttaaagtacttttttccctatctgtatctatagcaacaacccagaacttacaaacttctccaaagattttattgattgttatatcaaatcagaatgtaaacatgaactcttgcatatatttaaaattgtgttggaacatttgaacatgaatgctgtttgtggtacttaagaaattaattcagttggattatcattatgtgatactggcagattgcagtgcaaccttatgccaataaaatgtaatttaacagccccagatattgttgaatattcaacaataacaagaaaagcttttcatctaagttttatgctttaattttttttctttttttttctttttcttttgtttccttggtactaattttaatttttatttggaagggagcagtataaagcttatttgtatttagtagtgtatctcatagatacagacaaggcaagagatgataagctgtttaaatagtgtttaatattgattgggggtggggagaaagaaaaagtgtattacttaaagatactatatacgttttgtatatcattaaatctttaaaagaaatgaaataaatttattgtttacagaaaaaaaaa

SEQ ID NO: 603552 - DNA, 686 bp, Homo sapiens
  misc_feature (17)..(17): n is a, c, g, or t
  misc_feature (192)..(192): n is a, c, g, or t
  misc_feature (278)..(278): n is a, c, g, or t
tcccctcaactgcaganaccaactctcatcccgagatgttccaccaagtttgggcagctctgctctctctctatggccttctctttaactccatgaatcagtgccctgagcacagtcaactaactgcgctgggaatggacgacacagagaccccagagccccacctgggcctgtggtactttattgcggganagccgtccaccacggaagagttggcaacttttgatccggtggacaatattgtcttcaacatggctgccggctctgcccaaggagcntccagcttcgtgctaccatccgcacgaaaagtggggtctgtgtgccccggaagtggacataccgattgactgaagggaaaggaaacatgaactcagaactgaagggcgcccagacatgaaaacagacctgttctccagctcgtgcccaggaggaatcatgctgaaagagacgggccagggctaccagcgctttctcctctacaatcggtcaccacaccctccagagaagtgtgtggaggaattccagtctctgacctcttgcttggacttcaaagccttcttagtgactcccaggaatcaagaggcctgcccgctgtccagcaagtgaccagtgacttcacccgtgtcctagacagacaagataggagcccagcttcgagtggagaagccagcgactcctgccccctc

SEQ ID NO: 603553 - DNA, 521 bp, Homo sapiens
gaaacaaactgctcctcaaggccaatgtgaccaggtgctctctgctaccaggcttctgcaggcagttgcccgtctgacgccccagcccctggcccatggtgggcctttgccctttgcccactggttctcccttcaactcatttgttcactcagcaaacactcactgaccacccaccacgtgctgggccttgtgctgagtgctggtgggatggtggtggatcagacgatagtggttcctgccctctcggagatgataatttagtggcaaagacagacaagaaatctagccattaatcttgcatccatctcaaatccagtatgagatgcaagattagatgggggacggccagtgttcttgggagtttggtgttcagagaagattcctaaagaaaatatatttaggagctgggcgtgctggctcaagcctgtaatcccagcactttgggaggctgaggcaaaacaattgctcgaacccaggagttcaaaatcagcctggacaacatatcaataccctgtttcta

SEQ ID NO: 603554 - DNA, 98 bp, Homo sapiens
  misc_feature (8)..(8): n is a, c, g, or t
ggctccgngggggtgggcggcaggtaacgtgtcattgcctctcacgccacctggtaggctggactacttcctcctcccaactgcggggtcccagaaat

SEQ ID NO: 603555 - DNA, 583 bp, Homo sapiens
  misc_feature (14)..(14): n is a, c, g, or t
  misc_feature (75)..(75): n is a, c, g, or t
  misc_feature (154)..(154): n is a, c, g, or t
  misc_feature (238)..(238): n is a, c, g, or t
  misc_feature (299)..(299): n is a, c, g, or t
  misc_feature (357)..(357): n is a, c, g, or t
  misc_feature (366)..(366): n is a, c, g, or t
  misc_feature (375)..(375): n is a, c, g, or t
  misc_feature (422)..(422): n is a, c, g, or t
  misc_feature (468)..(468): n is a, c, g, or t
  misc_feature (483)..(483): n is a, c, g, or t
  misc_feature (490)..(490): n is a, c, g, or t
  misc_feature (497)..(497): n is a, c, g, or t
  misc_feature (501)..(501): n is a, c, g, or t
  misc_feature (522)..(522): n is a, c, g, or t
  misc_feature (528)..(528): n is a, c, g, or t
  misc_feature (534)..(535): n is a, c, g, or t
  misc_feature (538)..(538): n is a, c, g, or t
  misc_feature (544)..(544): n is a, c, g, or t
  misc_feature (576)..(576): n is a, c, g, or t
aggtcccgggaggngctccagggtgaagctcatcactagcctttccagcagcactgtccctggagaccagaagcngtgggagccccttccctgtggcaccacggactcccaccaaggcacgtatcatgaacactgtacttgtaacacgtttatnacccttgggtgtatggggaatctaaagagcacctctgaaatccatacttgattcctttttacattgaggaaaagtgagattcanacacaaaataaccaagatgaccaaatgaaatggtggcctcgctgagcaaaagcacgaccanttgacaaggataaaccaaattgcctccctagcatttctgaaaacccattgggcttaanggaaaagantaagtaaanatttacttttttcaaatttcactctcaaattactcaaactgttgttncatttaaaaaaaacaagcaaactaatattgacacgagaactaaaanagaatctcaattcanacctgcnaagcccnacanagggggactctccgtaacccntttcangaagannttntggggnaataaaagccaaaaatctgatactttaaatanggtagtg

SEQ ID NO: 603556 - DNA, 85 bp, Homo sapiens
agcggggagcgcagggcgcagggctggacccggcgcgagctggctgagtcggagcgcagcgtcctttgtgcccggcggcgccacg

SEQ ID NO: 603557 - DNA, 272 bp, Homo sapiens
tgcgggggcgagaaggacccaagagcggttcgacataaaagtatcacgccgcgcggggacctcagcactcagtttacatggtgagaacatggtagagtcctcatgcagacaacgggtccaagaaacttgaagaagaagcttgaggggcaacatatgcttgaaaatcacggaggattttaaccctggaattaggacacggcggggggactcgacggggccaaatccggagcaaggggaaacccggagacagtagcgcggcagaaaggagcccg

SEQ ID NO: 603558 - DNA, 121 bp, Homo sapiens
gagacagagtcttgctctgttgcccaggctggaatgcagtggtgtgatctcagctcactgcaacctctgcctctcgacctagggcccggtctcttattcgccctatagcgactcttgatcc

SEQ ID NO: 603559 - DNA, 373 bp, Homo sapiens
aactcctgctatgctctccctaaagatctggtgatgagaggactacttgagctgaataatatggatctcagatactagtcataagcacatacatgattcagacaggtaatcacatatgatttccaagacccaatttttaagacactgtactcacgtagatctcttagctgctctgactatatggtctgaaaaggaaaacattttaagcctttggaagccattttggatggacatttcattgtgttctataattactcacataattgaatttccttcaagtcaaagtctgtataaaattaaattaagaaatatttttgaagttccatcaggcaggtgactttgtttacagctagatttgtgctgcattcacatg

SEQ ID NO: 603560 - DNA, 428 bp, Homo sapiens
  misc_feature (10)..(10): n is a, c, g, or t
gaagctatcnggtcatcaagtatcctctagaataggactgtatgtggtcttgcacgtgagcacaggcagtgctcgagactctgctgtcatctctgttgaggcgcacgctggctatcagggacatctcagtggattgctccggtgcgacataggagtgatacgctgtttctgttagagggaatacctcactccttttcttctttctcctttcctccccaaaaaaatcctccattcaccagcttatttgcaaccacgtgccaaaaccggcttttatatttcctttctttttttgtaaaggaggacaaaaaggtagatgactccctcaggttaaagagttgtgctattcaacaaataaacttcctcttccggttcttctctctcctcatctgtgagattcagttgaacattattgaaccggatagcttgcc

SEQ ID NO: 603561 - DNA, 353 bp, Homo sapiens
cttgtggtctcatattcaggtatagctctaagactcctgcagccatcttgttatgtcactggctttcctaggctgtggcttgagctaagtaaagaagccaaggagtgcagatctaagatcgcagagaagtaagtctcattcttaaaaacattgcaactactgttagagtccaccccatgaagctgttgcagattgtgtatctttgactgaattctactgacgtttgtgttgttcagactaaaacaaatgttgctagctaggtgggctgtgctgtctcagtaggacattgacagtcgccagctatcaccctctgcagaccttggacctgagtgccacatgcattatgagacccg

SEQ ID NO: 603562 - DNA, 497 bp, Homo sapiens
tgatatcacagcagttacataattaatggcatatttcaaaatagttataaaaacaattgtagttaacaataattaattgcttgtttcaaaatagctagaagatttggaatgcccccaacacaaataaatgataaatgtttgagatgatggctatcccaattaccctgatttaatcattacacattgtattcatgtatcaaaacaccacatgtagtcccagcaatttgggaggccaaggtggatggatcacgaggtcaggagttccagacgagcctagctgatatggtgaaaccccgtctctactaaaaaaatgcaaaaattagctgggcgtggtagcacatgcctgtaatcccagctactcaggaggttgaggcaggagaattgctggaacccgggagtcagaagttgcagtgagctgagatagcaccactgcactccagcctgcgtcacagagtgagattccatctcaaaaaaaaacaaacaaaacaacaacaaag

SEQ ID NO: 603563 - DNA, 1444 bp, Homo sapiens
  misc_feature (109)..(109): n is a, c, g, or t
ggaacgggaagcggtggaatcgggaggagccggagagcctctgtgtgaaagcgcaaggttgaggaccctgggctcgctcggaagtcacggaacacacgtacataactgntgcgtgtgagatgacagagaaattccgcaagcagtggacagaaccatgcacagaaggtgaagaatgagccgtggagcgcggctccaggacccgagtgcaggagatggctcgtcgcgagtggaggagctctccacgagaaaggcagtcgccgccgtaggtgagcaggtgctatcgcgcagcgatgcagatctcatcgagagtgagcgagttctcttcacgtgcatgtgacgctcgttggcacttggagacgtccctgtgcgttgagtatgcatcacgtcattcgagcagatggagactgcgcgctaccaggcacgagagggggttctgtatcgcaggtgtacaggaggagccgtagtttgggaagggcgggctgcaccatacgccaattgtggagtcgatgtcttccctttgttggtgaacgctatggaaaataacaccttgaggcctttgcacagagacggcaaaggcggttcttagcaagtagataggggtctagggcatccgtctcttgcggcaccactgccaactttgtacgaacgtgggacgattagcacttggggacgcataacagtgtaccaggcaaagttgacgcggatgagtggatctcgaagagccaagcgacgaatagaagtctcattacagaagtagttgacctagggagtacctagaacacagagctgaagagactgatgtgtccctgggacaaagccagacaggggcagcgcgtgtccaagaatcccctaatttaacatgttgcatgcgtgctctgggaactttctagtaccaagccgctgagacacttcgctattaggtccgagatgggacgagcgcctgtgaccatttcgtgtgagggagtatagacataaagggaccatatatccccagatattcagggaaatataagcataaggggtggaaggcgttcattgcagcaatgtctagcatgttacgtcgcggttacactagagggtttgcccactaaacaattaccaagagtacacataaaaaaataatggagcctaacgattgcatgcaagcatgccttcaacttgtggtacagcaaaagtacaacaagggtaagaggagcacactggtaaaagggcactcaaataagtgaaggaaaccagtgaggaagggagacaggcgtagacacaacgagcaacaggggcaagaagactgtcgacgcacctgcgaaacttacaacaaagagacgatgcagggaacgaaaagcagtgagagtcatttccgatctttccttcttatcgggctagatcgacctacaacgaacaaccaagcgacagcatgccaatcagacaagcgagccacaggcaacaa

SEQ ID NO: 603564 - DNA, 508 bp, Homo sapiens
  misc_feature (18)..(18): n is a, c, g, or t
  misc_feature (72)..(72): n is a, c, g, or t
  misc_feature (85)..(85): n is a, c, g, or t
  misc_feature (108)..(108): n is a, c, g, or t
  misc_feature (116)..(118): n is a, c, g, or t
  misc_feature (137)..(137): n is a, c, g, or t
  misc_feature (235)..(235): n is a, c, g, or t
  misc_feature (275)..(275): n is a, c, g, or t
  misc_feature (282)..(282): n is a, c, g, or t
  misc_feature (299)..(300): n is a, c, g, or t
  misc_feature (312)..(312): n is a, c, g, or t
  misc_feature (328)..(328): n is a, c, g, or t
  misc_feature (335)..(335): n is a, c, g, or t
  misc_feature (346)..(346): n is a, c, g, or t
  misc_feature (351)..(352): n is a, c, g, or t
  misc_feature (355)..(355): n is a, c, g, or t
  misc_feature (373)..(373): n is a, c, g, or t
  misc_feature (389)..(389): n is a, c, g, or t
  misc_feature (401)..(401): n is a, c, g, or t
  misc_feature (426)..(426): n is a, c, g, or t
  misc_feature (506)..(506): n is a, c, g, or t
ttcaacaaatcaacagtnaccaattcattgacttaaggagtaaacaagcagcttttataaacacaccaccgnaaaaaccaggaangcgcactccctgctcctcccccncctcttgnnncctgtatccagcagaaggncccagcaggaggctgaatccaagcactgctctcaggccactctatcctcatccctggatcctccagggaacaagataaaaaaaaaaaatcctgttttntttttttccaaaaaggagggccttaacatcaaccaaagtnacaaaanaaaaacaaaacacaggnnctagctgggcgnggtggctcacacccgnggtcccnacattttgggngaccnnggnggggggggtgcttgggtngtgggggttcaaaccngcctggcgggtntggcaaggccccctctctcttaaangtaaaccaaaatccgccgagcatcatatcacatgcctgtggtcccagctactctggaggctgtgatgaagactgcttgancc

SEQ ID NO: 603565 - DNA, 240 bp, Homo sapiens
ggcgcggaggacgcgcgcgcgggagggccccgccttggccggctctctcccttccccctccgtccccggacggcggctgggggggggggcttttcttggaaccccacaccctgagtgcccacactcctttttgtcaccgagctgctgaggcccctttgcgggcccgccgagcggttccgggtttagggtaccacagcgtcagagtttgactccctggaaaaggtgcgagcggttttgaaa

SEQ ID NO: 603566 - DNA, 334 bp, Homo sapiens
ggcagggagggaaaaagttggtttaattaaaaattgggcatttcctagtgacaggggccaaaaggttataaaacgggttttttgggtttaatgcccagggggaaaaaaagcttgcagcttttagcttttttttgatcgatgaagcccttttttattaaaattttcctttgttaaaggaggacccgtaactttccaaaggtggaaaaaaaacccttttttcctaaaaaggagtcaggcagggctccaaaatttttcattttttgtcaaagcaaaaagtaaaaactttaaaattgtttaatatataaataaagcaaataaagttgagtgttcccca

SEQ ID NO: 603567 - DNA, 286 bp, Homo sapiens
gtattaacaactacatcagtaatggcagcaaaacaaacagtcccatcataattacaggatcggatgcacatataacaatattagccttaaatgtaaatgggctaaatgccccagttaaaagacacagactggcaaattggatcaagagtcaagacccatcagtgtgctgtacccaggagacccatctcatgtacaaagaaacacataggctcaaaagaaagggatggaggttgatctaccaagcaaatggaaagtaaaaaaaagcaggggttgccatcctggtctc

SEQ ID NO: 603568 - DNA, 864 bp, Homo sapiens
tggcctcaagaaaaatttcaaatatccaaattaaaacacagtagcattggaacctgggaccttaccatctctttaagtaaagcgtggagtggatttctctactaaataacagaaacctcagtttttcactcccatggtaagtaacttttatttaagtaagtaaaatcgggtaggaaatcaccttggacttagcttccagtagtcattaccaccttttacggcacaattcacaagcatgttcccgggtgaatgggactgaaaatacatttggacaactttttttccttttatccccaattttggccagaaagcagaaaaatgctctatttttataaagaaagattaaatcctccaaggatattttaaaaaatatcaacctacatgcacttatagaaatgtaaaataccaatgactatttaaaactcgaagacccactatttggagtattttttatagacttaaatacggggtttttccctccttacaatctcaggctttctccatctttaaagcagcctctgtaactccctttggtccataggtgtgcgtgcctctcatctgggggaagtatccttacataccttctgtgccggatacttattaagggatgggtggctataccaggttgtttttttctttaaaaacgtcaaattctctattaattgttggaattcttcaaagcaggaattttaagaattgtcttcaaacaacggtagcctcatctcagaacggatggcttcacccgtgataaggctaaaaaaacaaaagaggggtatctgggcaagacctgtagacaggataagaggagagagttgctcgctggacgattgtgattgttcgtcctcacaggtctatacaaaaaaa

SEQ ID NO: 603569 - DNA, 471 bp, Homo sapiens
  misc_feature (10)..(10): n is a, c, g, or t
  misc_feature (27)..(27): n is a, c, g, or t
  misc_feature (54)..(54): n is a, c, g, or t
  misc_feature (83)..(84): n is a, c, g, or t
atttccaganttagataggcctcttcngaagtcaataaaaagaagaaaaaaaanccatttctccttgccatagtcaaaggaannaatgcttaagcaaaatgaaaaagaacatgaaaagcttctttctccgtttatggttgaatgtgtatctatttgagtctggaaataaactaatgtgttgataattaggttaggttgggcctcatgggaactcccctgtaactaaaagcctccagggtaagtttaaggtcctttcatagaaaaaaagccaaccatccccggattttaaaatttggtattctctcatgaatagaaatttatgtagacgccaaccaaatacttttacccccttaaaaagagaatataaccttttatggccctataattcttttgttttttaagtaagggtatattttgttgggaatatccttttgggggggtgaataaatcttttatcttgaatgtaataag

SEQ ID NO: 603570 - DNA, 107 bp, Homo sapiens
agctcgaatgtaccaacgcacacgtattgcccgagcgcgtgggtgcgacgctcaggacatgttccggcccatcatgtcggaggtattggtcgtcgtgattggccgag

SEQ ID NO: 603571 - DNA, 165 bp, Homo sapiens
acctagcgtactgtcataattttcttcttgaaacttgaggtggaggggtggatattaatggggtaacttgtatagcaatgtaaagagaacgggtcttaacttttgtcaccaaggctggagtgaagtgacatgatcatggctcagtggggcctcaaatttccctgg

SEQ ID NO: 603572 - DNA, 131 bp, Homo sapiens
  misc_feature (3)..(3): n is a, c, g, or t
ttntgtcagcatcattcagctcagcaaacttgcatgcatgtgagccgtgtggcaatccaatacaggtgcattgccggcgcttatttggcctggatggttcatggataatcacctgaacagtgaagccagga

SEQ ID NO: 603573 - DNA, 137 bp, Homo sapiens
  misc_feature (75)..(75): n is a, c, g, or t
ggggaggagacatagatggagagcacgactaggcacggaggtcagacaggcagccgggccaggattgttagtggnccagtggagagctgcaaacctggggacgcatgtggctggtcggcaagtgcccccaatgtctg

SEQ ID NO: 603574 - DNA, 275 bp, Homo sapiens
  misc_feature (1)..(1): n is a, c, g, or t
ngaaaatatggtcagctctatggtggtgataggagtgtgggagaacaaatcgattaggatgagatttggctgcatgtgattgaaaacccaaattaacagtgggttaaatgtgacataatttttttttttttttgagatggagtcttgctccgtccccaggctggagtgcggtggtgccgtctcggctcattgcaacctctgcacccaggtcctggttcaagcggttctccttcctcagcctcccgggtggctgggattgcgggcgcgcgccacca

SEQ ID NO: 603575 - DNA, 381 bp, Homo sapiens
ggaggagggggccacagcttaggtttggagctctggatgtacatacataattaggagcagggtgacgagtttttgtcataatgcacgcttgaacggtggagcgaaggcaagcaataagtatcacgtttgcttcagctcagccatgttattaatgtacggagcagatggtacagcctcactgatgcgatatgacgagacctcacttttgaaaggatcgccaatcctttaatgctctactaaacaatgtgctctattactcttatattctgatgattaaattatgtacgggcctgatattgtgagaaccatggctacaaagacgggctaccgcgcattattatagatcatccgagtgctaccctacactacctagccgccctt

SEQ ID NO: 603576 - DNA, 385 bp, Homo sapiens
  misc_feature (100)..(100): n is a, c, g, or t
  misc_feature (114)..(114): n is a, c, g, or t
  misc_feature (183)..(183): n is a, c, g, or t
ctagaggatccctgatttacgcaggcatggcacatgcagcgcgagtaggtctacagacgctacttccctatcataaagagctatcacttcatgatcacgncctcataatcattntccttattctgcttcctagtcctgtatgcccttttcctaacactcaaaacaaaactaaataaatactancaattctcagacgcctcaggaaaatagaaaaccgttctagaactattcctgccccgccaatcattccctaagtcctcattcgccctcccatccctacgcatcctttacataacagacgaggtcaacgatccctcccttaccatcaaatcaattggccaccaatggtactgaacctacgagtacaccgactacggcggactaa

SEQ ID NO: 603577 - DNA, 437 bp, Homo sapiens
gggttctgagcgtcctatgcttctctcttagcgttttgccagctcgtaggccatcggatgccgcgagtaccatgaccgtgggacggcagttcagccggcgactgtccggagaagtctttatcctcgtcttgaccactatgaaaaggggcatcgtgatgagatctcttcaagaagtattatcgcggcattttgcgtgaaaatgggaaacctttgagtgatagtttcaaaccgataaacaggacctgacctctttaaggatgtttgttttatagagagtgtttagttaaaaccacctagtaagcctaaagggcgtccaaggaactggttcaaaaggaaacggacttgtggaagtacaaaattttcccgatcaaggattccaaatcttaaaactggtcggaaccttttactgggttagtcccaaaaggcaaaaggccccg

SEQ ID NO: 603578 - DNA, 150 bp, Homo sapiens
tggttgggtggaagaggaaattggtgagaaggtctcaaaggtcacttcccagcagtttgaagctgaagctactgatgagaaggatgtagttgacaacgatgaagggactggcttcttcctttaaacgtggaaagaattcctccttgaagg

SEQ ID NO: 603579 - DNA, 262 bp, Homo sapiens
tatccctcagctggccccagggctacaagggagagaagggggagtcaggagctctgggaccctcaggactcccaggctcaacaggcgagaagggccagaaaggcgagaagggcgacgtgagtgcatcaacggtgctgtgcctgggaaatgccatggcctgggactggactggacacggacgagatcttttgtcatttgggcccaaatgggcagaatgggagaccctgtgctttgtttgggccttgggtggccacgctggatg

SEQ ID NO: 603580 - DNA, 126 bp, Homo sapiens
ttgataccactcaccaaggacagtatgattacgacggtagaaactagagatagacaggttatcaacgaaacttctcagcatcacagatgaccttgcatacaattgcacacactcagtgcagcaata

SEQ ID NO: 603581 - DNA, 115 bp, Homo sapiens
  misc_feature (78)..(79): n is a, c, g, or t
gtgaaaagccatctttgcattgttcctcatccggctccttgcccgccgcagtcgtctccggctgcgcgcctgcttctnncgtcgagagcttccggcaagctttattcagccagag

SEQ ID NO: 603582 - DNA, 196 bp, Homo sapiens
aaactccgtcgactaggctacagcctcatggccgagaacaataagtacacacagttatctagagtaaccatactagattaaagacatacaattactttcttctaaagacaattatccagaaagacctgcctttccctatgggtacttgacacataggtcccagacacaggctaatacgctgatatggtttcttacg

SEQ ID NO: 603583 - DNA, 239 bp, Homo sapiens
tatttttcctgatgttctcccttcctccagtccccgacctcccacaggccccagtgtgtgttgttcccgttcctcgtgtccgtgagttctcattgttcagtgcccattctgagggaaaacatgccagtgctttcgcgttcttcctcgctctcacccacctctcagcttatcgcgtcgcgcgcgcagtatattcgtctctctctccagtctctctcgcgacacacatctctcttttgtaa

SEQ ID NO: 603584 - DNA, 440 bp, Homo sapiens
acatgaaaatatttttaaagaataaatttctttaaattacaaaaaaaaaaaaaaaaaaaaaaaaaaaaaaaaaaaaaaaaaaaaaaaaaaaaaaaaaaaaaaaaaaaaaaaaaaaaaaaaagaaaaagaaaagaaaacaaaaaaaaaagaataggagaacaaataggaaagatagagaatagaatgagaaattaaaagaatgaggcgtaacaaggtgcaaaattgggaaaactgggaagagattgaaaatcaacgggatggggaaaacgccgatgtagccagttggaaaagtggggaagaaggcagaaattggggcagctggcgacagtggaaaaagggggaaagcgatgggggttcgcaaaagttgagatcctgaaaagaatgccgaaaaaggtgggcgaaatgagctaagtaggccaaccagtaagccaatagggaaa

SEQ ID NO: 603585 - DNA, 807 bp, Homo sapiens
ttcttgggaatacaaatgtctaacttgttatcaacggtctggctgcgtggtggtgtgcaaaactccgtacattggctattttgccacaactgctaacaccttgacatcactgtggaaataatgtcgaaatttgtggcatcaccttatgactactccgtaaactccgtcgagaggagtattatattcatcgaattggatagaagatgctcgcagataccaaaacacatggcatgacgcaatagcacctttgcttgtaacaccatagaataatcgataaaacgcacagtagagcagaacattagtctcgtagtgtcttcgttgaacgtcgtaattcgacaggcaatatcaagtcgctcacacgttgacttacagtctgtgtacgataggacctggaaggttttccatgggtacacggactgagatgcatgaggacaagagttgggtagctatacggaatgatcacaatacgtgttgcatctacaaaaatacccaatattaaagatgggtaattggcacggggtcgacgtttaataactcctcgcaattgtagtacaccactttgctaggcttgaaacgaatatttgtgagacaaagccagttgtaaacgaccctaaaccagtgcacattacgactccacgtttctcattttgctgggtcccaacaaggtgaactttggtcgttctcgttaagaacataatagtttggagttcccaattttggcccaaatatgtgtcttcgttgaagcagcggttcgaattacccaagtgcccgatcagaagagatgagcattgaacagggattgtaacc

SEQ ID NO: 603586 - DNA, 953 bp, Homo sapiens
ccgcagaaggggtcctggtgacgagtcccgcgtgctctccttgaaatccactacgccagcccgccgacctctgccgccgcacctgacacccgcccctctgcctgtgccaggaaattgctaataccaccaccatgccctaccaatatcgcagcactgaccccggtagcacaagcagggagctgtcctgacatcgctcaccgccatcgtgtggcacctggcaacggtgcatcctgagtctgcagatgtagtccactggcgagcattggtcaagcgggtgcagtccattggcaatcgacgaacaccgaggagaaccggcgcttctaccggcagctgcatgttggactagttgacgatcgcagtaaacccctgccatttgggggtgtctatcctcttccatgattacagtctaccataaggcgcatgatgggcgtccctttctcccccaagttagtcaaactcacaagggtcggtgtgtagtgcgcgcactcaaggtatacaacggtcggtgatccccctgagcagggacgaactggggacgagctaacacccaacgggttggattgggctggctgaccgctgagcccagctcaaataaggacggagcgtgacttcgccaaagatggcgatcgtgttgctcgaacaaattggggactacacgccccttcagtccctcgccaatacgatgcacaatatgcccaatgttactggtcctgttgatgccaagaatctagacccgtggaaatgtctttttgtggcccattcgaggaccgctgagtatcctaccttgattgcgggacccatgaacttggatcgcctgcgagaatgtgcaccgggaaaggggaggagctgctgctaaaggggtgatagacacgatttacttgatggccggtatccactgcttcccagccggttcatggatttccaaggaatcacggcggaagacgccaagcccg

SEQ ID NO: 603587 - DNA, 355 bp, Homo sapiens
  misc_feature (345)..(345): n is a, c, g, or t
tttgaaactggacaccttgctttacaccatatacaaaaatcaattcagtacagattaaagacttaaacgtaacacccaaaactataaaaaccttggaagacaaccaaggcaataccattctggacataggagggggcaaagatttcacaaaaaaagacaccaagagcaattgcaacaaatgcaaacattgacaaattggatctaattaaacttaagagcctctgcacagcaaaagaaactatcaacagagtaaacattaaccttattaggaatggggaaaaaattttttgcaaactatggcattttgatggaaggtcttaattttcccggcatcttttaaggganctttaaacca

SEQ ID NO: 603588 - DNA, 387 bp, Homo sapiens
ttttttttaaggacttttccggatgaggtattggaggtaataatccttcttttctttttaaatggtttctttaggccaggcatggtgggtcgtgtttgtaatcccagccctttgggagaccaaagtgggtggatccctttaggccaggagttcaagaccagcctggcccacgtggtgattccttgtctttacgccaaatattaaaattagccaggccatggtggggcatgtctgtaaccccagctacttgggagggtgaggcaggagaatcgcttgggcctaggaggcagaagttgcagtgagccgagattgggccccttccctccagcctggggggcagagtgagaccctgtttccaaaataaaaaataaaaaatgttttttttta

SEQ ID NO: 603589 - DNA, 124 bp, Homo sapiens
ttccaccaagaaatctactccacctaccaaagtccagtaactttatgagatcttctggaacagtgtacccaaagcgacctgaaaaaccaggtcctcccaccaccccgcagctcgctcctgagtt

SEQ ID NO: 603590 - DNA, 241 bp, Homo sapiens
  misc_feature (241)..(241): n is a, c, g, or t
attaatatgctttgaagtgtgtaagtcggaaataatctaaatccaagcaggctgattccaggaccctgctcttaaccgctgtataacagaggtgtaccatgtaaattagagaaacagagaaattatttttatcatatatatgcacatatatagagtatatacgtctagaaactcgagttatttcacatatggccttagatgaagagtttggggaacacctctatatatattatgcagcacn

SEQ ID NO: 603591 - DNA, 764 bp, Homo sapiens
  misc_feature (544)..(544): n is a, c, g, or t
  misc_feature (551)..(551): n is a, c, g, or t
tgtccttgtgtcgggttctcgttccccgggattcccccgagctgtcctgcagctgtgaccccttgaggactccgacccacttggagctgatcaccaaccccggcccaccaaaggccggcgtttctcccggtggcctggtgggttagacttacccttgcaccgtggccctaagccgtaagcgaatgtttgcacctctgcttgttttctgggcccttcggaaccctttattaccacgaggggcgtgaagtgaaaatccacggatgaaagttgtgacccacgcggagtctgctggttcaccccaatgagaggttcccctctacaaggaatctcgacggccgcgggaaattgtgaggaaagaattcgggcactgggtgctgtgatgagagaaggagcgcgcaccacaggcgccacgggccacacggaagattcagatcctgaccaccccgtatcaccgcgccgtcacaagcgacccaggccccgcctttctaagatacacccacaccccgcgtttctggaaagagcaccttgcctcctgcaccttttnttatatntggtcacgctgatccacagatagtattttagaaaagtttctcaaagttataaataatgtttttctgcccctaaaaaaaaagattttttgggcccggcgtggtggctcacacccgtaatccccgccccttgggaggctgaggtgggaggatcatttgaggcccggagtttgagacccgcctgggccaacataatgaacttcctttcccgggaga

SEQ ID NO: 603592 - DNA, 109 bp, Homo sapiens
agcgcttctgggtcaaaatccctgtgtagctgaagcgcgccaagccctgcattgtacagcccccctctcccctcaccacctaataaaggaatcagttaacactcaaaaa

SEQ ID NO: 603593 - DNA, 775 bp, Homo sapiens
  misc_feature (705)..(705): n is a, c, g, or t
cgaaactcctggatctcaggtgatccaccgcggctcgcgtgctcgccaccatgtgctgggattacaggcttgagtcccccgcgcccagccatcaaaatgcttcggatttctgcatatgttgaatacttgtgacaatttaaaaaacatgatcatgtctgttggaaggcaaagattgcaagaatcattgagaagttatgcaaggccaaacaatgttagaaggcagtcagggaactatgaaatcgaagtatttgggcacgtgaaggacgaagctataatttgcattcatgatccactaaacgttttatacatcatttctggtatataccattgtgttgtgttctcttcatcaaagggatagtagtggcatccaagaattagtcgcaccattgtgggaacgactgtttccgttgactcagtccaatatattctatgagatcagtgtgagatacccgtgggtccatacagcgctacataacgtaggggctcctgagtttcgtggcatggtagatagttctttgtagcatacctagcgcgtcgatcgagcacacatagaacacttttgttgaagagacactagactactcgcgcccgaaggtcttctagttgctgcactggttcagcacgacgtgatagctgtagagtagtaccaagtagatctagatactggccagcagtagtgcttgagtgaccaagagtcctttgttntccagtcttgagaacaactacatgtggaacacacacagatcgaagcagtttgtgaagctactgtgtgtct

SEQ ID NO: 603594 - DNA, 369 bp, Homo sapiens
gtcgacatataaacaaccagcccatatgctacatcaaactgaaccatcagaacagtaggacattaacatggatctgaatgacaagtcatccatgatataaacaaccagcccatatgccccaacaaactgaaccatcagaacagtaggacattaacatggatctgaatgacaagtcatccatgatataaacaaccagcccatatgctccatcaaactgaaccatcagaacagtagaacattaacatggatctgaatgacaagtcatccatgatataaacaaccagcccatatgctccatcaaactgaaccatcagaacagtaggacattaacatggatctgaatgacaagtcatccatgatgtcgacgcg

SEQ ID NO: 603595 - DNA, 126 bp, Homo sapiens
ttaatcaagcatgaaaattaaaatgtttttgtcaggcattaccaaagtggcacagaatgtgatatgccagcctggttttggggtcctttctcatactggattgatatgcataaaaccttctaaaaa

SEQ ID NO: 603596 - DNA, 2338 bp, Homo sapiens
cccaagcgggggtctcggtgcctgcgaagcggcagtggtcgctcgtgggcccagtgccctctacgtcccgtccgggtcccagctggggcggggcgcgcccagtgtttccgggatggagcggcccgggcgcgcggcaggtgcggcggcgcaactcgcaggtcttctccactggcccctgagattgccatcacctccagctcctcctctcctgaagttggcagcccctcctgggttccagcctcctgagatgccagacccactggggcagtacccacaggccctgagcctacatcaaccaccccagtgacaccccaagcctgcagcattttccacccccagccccctggtcccaccttgccttccgcccaccttcccacctgctgcagggagggccctcggctgagccttcagacacacttgcaccccatccgctcccctcctgaatttcttctgaccctcccttggcttcacagcacctgaaggccaggctgaggccccctgctctcatggccagccctggaaagcctggggctgatgaggcccaggaggaggagggggaactcgaggggggctctgcagggccgcgggctgcaatactggagcaggctgaggagctgtttctgctgtgtgacaaggaggctaagggcttcatcaccaagcacgacctgcagggtctccagagcgacctgcccctcacgccagagcagctggaggctgtgtttgaaagtctggaccaggctcacactggcttcctcaccgccagggagttctgcctgggcctggggatgtttgtgggggtggcgtcagcccagggagcgaacccctgcaggactcccgaggagacctttgagtcgggcgggctcgacgtgcagggcacggcgggctctctggatgaggaggaggaagaggaggagcgattccacactgtgctggagcagctgggggtggccccggtcctgggcgagcagcgggctgtgaggacgctctgggccaggctgcagcgcgagcgccccgagctgctgggctctttcgaggatgttctgatacgcgcgtcggcctgcctggaggaggcggcccgggagcgcgacggcctggagcaggcgctgcggaggcgcgagagcgagcacgagagggaggtgcgcgctctgtacgaggagacggagcagcttcgggagcagagccggcgcccgccgagtcagaacttcgcccgcggggagcggagaagccgtctggagctggagctgcagatccgcgagcaggacctggaacgcgcgggcctgcggcagcgggaggtgagcacccggcccctgccctgtccccacggtcacccgtgcactctccccctgtgccttagcgtccccgggttgtcgggagcctggggcacgcgcagcaccccggggaagagggggcgttcctcgccggtctccatccttccaccctccagttagagcagcagctgcacgcccaggctgcggagcacctggaggcacaggcccagaactcccagctgtggcgggcgcacgaggcgctgcgaacgcagctggagggggcgcaggagcagatccgcaggctggagagcgaagcacgaggccgccaggagcaaacccaacggtgccgtgggacggggctgggcgggccccggtgcgtgtcccgggggcggggccgacgggcgctcaggtctgggccactttcatccccatttcaagtcccaggcccgccccgtgggaaggaggatcttctagggggtccgggggctccccaaggagccttcctgcagccgggtcaccacctcccatccacagagacgtggtcgccgtctccaggaacatgcagaaagagaaagtcagcctgctacggcaactggagctgctcagggagctgaatacacggctgcgggatgacagggacgcctgcgaggccaggcgggcgggcagcagctgcaggaaggctctgacaacagcccgcctgcctgggcccacctgctgctgctgctgttgctgggctcggccccccagacgcggctctggccaccttcccagtgcccggtgaccagccccgagtgactcacggaccatgagctagaagctgcccttgcaggaggcttgtcatgggtcgggggtgcccactcaggatgcaggctctccccagggggccccaggctcgcctgactgaagacatgaaggacctagcctaggagtggtcagggtcccgggagtggccagggtcccgtgtgtgccctctgccagtcttcgctctgtccccgttcaatcaaccccatctcagttcagcagaaaaccccctcgtcaaataaaacccactgactgcaaaaaaaaaaaaa

SEQ ID NO: 603597 - DNA, 2418 bp, Homo sapiens
  misc_feature (31)..(31): n is a, c, g, or t
gacaaggtggttgtgggtagggaggggccgntgggcaggagggagaagtctgccctgcctgccagctgtcatgaggctgggccacacaggcccaggccagggctaaggacttggtccaggactggctgagccctcacttgggatcagatctccagttgcagagtgtgaggggctcctccctcactgaccccaagcctgctcctctcagctttcaggaccccaccttccttatcaccaggtcttctccactggcccctgagattgccatcacctccagctcctcctctcctgaagttggcagcccctcctgggttccagcctcctgagatgccagacccactggggcagtacccacaggccctgagcctacatcaaccaccccagtgacaccccaagcctgcagcattttccacccccagccccctggtcccaccttgccttccgcccaccttcccacctgctgcagggagggccctcggctgagccttcagacacacttgcaccccatccgctcccctcctgaatttcttctgaccctcccttggcttcacagcacctgaaggccaggctgaggccccctgctctcatggccagccctggaaagcctggggctgatgaggcccaggaggaggagggggaactcgaggggggctctgcagggccgcgggctgcaatactggagcaggctgaggagctgtttctgctgtgtgacaaggaggctaagggcttcatcaccaagcacgacctgcagggtctccagagcgacctgcccctcacgccagagcagctggaggctgtgtttgaaagtctggaccaggctcacactggcttcctcaccgccagggagttctgcctgggcctggggatgtttgtgggggtggcgtcagcccagggagcgaacccctgcaggactcccgaggagacctttgagtcgggcgggctcgacgtgcagggcacggcgggctctctggatgaggaggaggaagaggaggagcgattccacactgtgctggagcagctgggggtggccccggtcctgggcgagcagcgggctgtgaggacgctctgggccaggctgcagcgcgagcgccccgagctgctgggctctttcgaggatgttctgatacgcgcgtcggcctgcctggaggaggcggcccgggagcgcgacggcctggagcaggcgctgcggaggcgcgagagcgagcacgagagggaggtgcgcgctctgtacgaggagacggagcagcttcgggagcagagccggcgcccgccgagtcagaacttcgcccgcggggagcggagaagccgtctggagctggagctgcagatccgcgagcaggacctggaacgcgcgggcctgcggcagcgggaggtgagcacccggcccctgccctgtccccacggtcacccgtgcactctccccctgtgccttagcgtccccgggttgtcgggagcctggggcacgcgcagcaccccggggaagagggggcgttcctcgccggtctccatccttccaccctccagttagagcagcagctgcacgcccaggctgcggagcacctggaggcacaggcccagaactcccagctgtggcgggcgcacgaggcgctgcgaacgcagctggagggggcgcaggagcagatccgcaggctggagagcgaagcacgaggccgccaggagcaaacccaacggtgccgtgggacggggctgggcgggccccggtgcgtgtcccgggggcggggccgacgggcgctcaggtctgggccactttcatccccatttcaagtcccaggcccgccccgtgggaaggaggatcttctagggggtccgggggctccccaaggagccttcctgcagccgggtcaccacctcccatccacagagacgtggtcgccgtctccaggaacatgcagaaagagaaagtcagcctgctacggcaactggagctgctcagggagctgaatacacggctgcgggatgacagggacgcctgcgaggccaggcgggcgggcagcagctgcaggaaggctctgacaacagcccgcctgcctgggcccacctgctgctgctgctgttgctgggctcggccccccagacgcggctctggccaccttcccagtgcccggtgaccagccccgagtgactcacggaccatgagctagaagctgcccttgcaggaggcttgtcatgggtcgggggtgcccactcaggatgcaggctctccccagggggccccaggctcgcctgactgaagacatgaaggacctagcctaggagtggtcagggtcccgggagtggccagggtcccgtgtgtgccctctgccagtcttcgctctgtccccgttcaatcaaccccatctcagttcagcagaaaaccccctcgtcaaataaaacccactgactgcaaaaaaaaaaaaa

SEQ ID NO: 603598 - DNA, 2333 bp, Homo sapiens
  misc_feature (38)..(38): n is a, c, g, or t
ggcgcaactcgcaggtaggcgaccgctggtcccgccgntgaggcccctccactgccgcccgcccggcaccccctccgggccgccgtggcccgcgccaaacctgagcgtctcggtcgggaactccggttaccccctcggggcgcaaggcggcaggtcttctccactggcccctgagattgccatcacctccagctcctcctctcctgaagttggcagcccctcctgggttccagcctcctgagatgccagacccactggggcagtacccacaggccctgagcctacatcaaccaccccagtgacaccccaagcctgcagcattttccacccccagccccctggtcccaccttgccttccgcccaccttcccacctgctgcagggagggccctcggctgagccttcagacacacttgcaccccatccgctcccctcctgaatttcttctgaccctcccttggcttcacagcacctgaaggccaggctgaggccccctgctctcatggccagccctggaaagcctggggctgatgaggcccaggaggaggagggggaactcgaggggggctctgcagggccgcgggctgcaatactggagcaggctgaggagctgtttctgctgtgtgacaaggaggctaagggcttcatcaccaagcacgacctgcagggtctccagagcgacctgcccctcacgccagagcagctggaggctgtgtttgaaagtctggaccaggctcacactggcttcctcaccgccagggagttctgcctgggcctggggatgtttgtgggggtggcgtcagcccagggagcgaacccctgcaggactcccgaggagacctttgagtcgggcgggctcgacgtgcagggcacggcgggctctctggatgaggaggaggaagaggaggagcgattccacactgtgctggagcagctgggggtggccccggtcctgggcgagcagcgggctgtgaggacgctctgggccaggctgcagcgcgagcgccccgagctgctgggctctttcgaggatgttctgatacgcgcgtcggcctgcctggaggaggcggcccgggagcgcgacggcctggagcaggcgctgcggaggcgcgagagcgagcacgagagggaggtgcgcgctctgtacgaggagacggagcagcttcgggagcagagccggcgcccgccgagtcagaacttcgcccgcggggagcggagaagccgtctggagctggagctgcagatccgcgagcaggacctggaacgcgcgggcctgcggcagcgggaggtgagcacccggcccctgccctgtccccacggtcacccgtgcactctccccctgtgccttagcgtccccgggttgtcgggagcctggggcacgcgcagcaccccggggaagagggggcgttcctcgccggtctccatccttccaccctccagttagagcagcagctgcacgcccaggctgcggagcacctggaggcacaggcccagaactcccagctgtggcgggcgcacgaggcgctgcgaacgcagctggagggggcgcaggagcagatccgcaggctggagagcgaagcacgaggccgccaggagcaaacccaacggtgccgtgggacggggctgggcgggccccggtgcgtgtcccgggggcggggccgacgggcgctcaggtctgggccactttcatccccatttcaagtcccaggcccgccccgtgggaaggaggatcttctagggggtccgggggctccccaaggagccttcctgcagccgggtcaccacctcccatccacagagacgtggtcgccgtctccaggaacatgcagaaagagaaagtcagcctgctacggcaactggagctgctcagggagctgaatacacggctgcgggatgacagggacgcctgcgaggccaggcgggcgggcagcagctgcaggaaggctctgacaacagcccgcctgcctgggcccacctgctgctgctgctgttgctgggctcggccccccagacgcggctctggccaccttcccagtgcccggtgaccagccccgagtgactcacggaccatgagctagaagctgcccttgcaggaggcttgtcatgggtcgggggtgcccactcaggatgcaggctctccccagggggccccaggctcgcctgactgaagacatgaaggacctagcctaggagtggtcagggtcccgggagtggccagggtcccgtgtgtgccctctgccagtcttcgctctgtccccgttcaatcaaccccatctcagttcagcagaaaaccccctcgtcaaataaaacccactgactgcaaaaaaaaaaaaa

SEQ ID NO: 603599 - DNA, 124 bp, Homo sapiens
gttacgtatgtatcaaatgtcttcaatatagttacaactgattaaagttgatagacattgtatctatttaaagacaaaaaaattcttttatgtacaatacctgtctagagtctagcaaatatag

SEQ ID NO: 603600 - DNA, 180 bp, Homo sapiens
  misc_feature (4)..(4): n is a, c, g, or t
  misc_feature (58)..(58): n is a, c, g, or t
  misc_feature (149)..(149): n is a, c, g, or t
aganatatggggggagatggttcttttcaaatacttgaactactaccatgcagaagantgtttagaatgtatcccaactcccggccggatgcggtggctcacgcttgtaatcccagcactttgggaggccgaggcagacaaatcatgtnaggtcaggagtttgagaccagcctggccaag

SEQ ID NO: 603601 - DNA, 2331 bp, Homo sapiens
  misc_feature (19)..(20): n is a, c, g, or t
  misc_feature (22)..(23): n is a, c, g, or t
  misc_feature (25)..(26): n is a, c, g, or t
  misc_feature (28)..(29): n is a, c, g, or t
  misc_feature (32)..(33): n is a, c, g, or t
  misc_feature (90)..(90): n is a, c, g, or t
ggcatgtaccggcccgaanncnngnntnngtnngtcgcacgctggatccaggcccttcctgaaaagcagaggccttgtaccccccaggtngcgggcgggacagtgattccagccctttcagctttcaggaccccaccttccttatcaccaggtcttctccactggcccctgagattgccatcacctccagctcctcctctcctgaagttggcagcccctcctgggttccagcctcctgagatgccagacccactggggcagtacccacaggccctgagcctacatcaaccaccccagtgacaccccaagcctgcagcattttccacccccagccccctggtcccaccttgccttccgcccaccttcccacctgctgcagggagggccctcggctgagccttcagacacacttgcaccccatccgctcccctcctgaatttcttctgaccctcccttggcttcacagcacctgaaggccaggctgaggccccctgctctcatggccagccctggaaagcctggggctgatgaggcccaggaggaggagggggaactcgaggggggctctgcagggccgcgggctgcaatactggagcaggctgaggagctgtttctgctgtgtgacaaggaggctaagggcttcatcaccaagcacgacctgcagggtctccagagcgacctgcccctcacgccagagcagctggaggctgtgtttgaaagtctggaccaggctcacactggcttcctcaccgccagggagttctgcctgggcctggggatgtttgtgggggtggcgtcagcccagggagcgaacccctgcaggactcccgaggagacctttgagtcgggcgggctcgacgtgcagggcacggcgggctctctggatgaggaggaggaagaggaggagcgattccacactgtgctggagcagctgggggtggccccggtcctgggcgagcagcgggctgtgaggacgctctgggccaggctgcagcgcgagcgccccgagctgctgggctctttcgaggatgttctgatacgcgcgtcggcctgcctggaggaggcggcccgggagcgcgacggcctggagcaggcgctgcggaggcgcgagagcgagcacgagagggaggtgcgcgctctgtacgaggagacggagcagcttcgggagcagagccggcgcccgccgagtcagaacttcgcccgcggggagcggagaagccgtctggagctggagctgcagatccgcgagcaggacctggaacgcgcgggcctgcggcagcgggaggtgagcacccggcccctgccctgtccccacggtcacccgtgcactctccccctgtgccttagcgtccccgggttgtcgggagcctggggcacgcgcagcaccccggggaagagggggcgttcctcgccggtctccatccttccaccctccagttagagcagcagctgcacgcccaggctgcggagcacctggaggcacaggcccagaactcccagctgtggcgggcgcacgaggcgctgcgaacgcagctggagggggcgcaggagcagatccgcaggctggagagcgaagcacgaggccgccaggagcaaacccaacggtgccgtgggacggggctgggcgggccccggtgcgtgtcccgggggcggggccgacgggcgctcaggtctgggccactttcatccccatttcaagtcccaggcccgccccgtgggaaggaggatcttctagggggtccgggggctccccaaggagccttcctgcagccgggtcaccacctcccatccacagagacgtggtcgccgtctccaggaacatgcagaaagagaaagtcagcctgctacggcaactggagctgctcagggagctgaatacacggctgcgggatgacagggacgcctgcgaggccaggcgggcgggcagcagctgcaggaaggctctgacaacagcccgcctgcctgggcccacctgctgctgctgctgttgctgggctcggccccccagacgcggctctggccaccttcccagtgcccggtgaccagccccgagtgactcacggaccatgagctagaagctgcccttgcaggaggcttgtcatgggtcgggggtgcccactcaggatgcaggctctccccagggggccccaggctcgcctgactgaagacatgaaggacctagcctaggagtggtcagggtcccgggagtggccagggtcccgtgtgtgccctctgccagtcttcgctctgtccccgttcaatcaaccccatctcagttcagcagaaaaccccctcgtcaaataaaacccactgactgcaaaaaaaaaaaaa

SEQ ID NO: 603602 - DNA, 2300 bp, Homo sapiens
  misc_feature (19)..(20): n is a, c, g, or t
  misc_feature (22)..(23): n is a, c, g, or t
  misc_feature (25)..(26): n is a, c, g, or t
  misc_feature (28)..(29): n is a, c, g, or t
  misc_feature (32)..(33): n is a, c, g, or t
  misc_feature (90)..(90): n is a, c, g, or t
ggcatgtaccggcccgaanncnngnntnngtnngtcgcacgctggatccaggcccttcctgaaaagcagaggccttgtaccccccaggtngcgggcgggacagtgattccagcccttcaggtcttctccactggcccctgagattgccatcacctccagctcctcctctcctgaagttggcagcccctcctgggttccagcctcctgagatgccagacccactggggcagtacccacaggccctgagcctacatcaaccaccccagtgacaccccaagcctgcagcattttccacccccagccccctggtcccaccttgccttccgcccaccttcccacctgctgcagggagggccctcggctgagccttcagacacacttgcaccccatccgctcccctcctgaatttcttctgaccctcccttggcttcacagcacctgaaggccaggctgaggccccctgctctcatggccagccctggaaagcctggggctgatgaggcccaggaggaggagggggaactcgaggggggctctgcagggccgcgggctgcaatactggagcaggctgaggagctgtttctgctgtgtgacaaggaggctaagggcttcatcaccaagcacgacctgcagggtctccagagcgacctgcccctcacgccagagcagctggaggctgtgtttgaaagtctggaccaggctcacactggcttcctcaccgccagggagttctgcctgggcctggggatgtttgtgggggtggcgtcagcccagggagcgaacccctgcaggactcccgaggagacctttgagtcgggcgggctcgacgtgcagggcacggcgggctctctggatgaggaggaggaagaggaggagcgattccacactgtgctggagcagctgggggtggccccggtcctgggcgagcagcgggctgtgaggacgctctgggccaggctgcagcgcgagcgccccgagctgctgggctctttcgaggatgttctgatacgcgcgtcggcctgcctggaggaggcggcccgggagcgcgacggcctggagcaggcgctgcggaggcgcgagagcgagcacgagagggaggtgcgcgctctgtacgaggagacggagcagcttcgggagcagagccggcgcccgccgagtcagaacttcgcccgcggggagcggagaagccgtctggagctggagctgcagatccgcgagcaggacctggaacgcgcgggcctgcggcagcgggaggtgagcacccggcccctgccctgtccccacggtcacccgtgcactctccccctgtgccttagcgtccccgggttgtcgggagcctggggcacgcgcagcaccccggggaagagggggcgttcctcgccggtctccatccttccaccctccagttagagcagcagctgcacgcccaggctgcggagcacctggaggcacaggcccagaactcccagctgtggcgggcgcacgaggcgctgcgaacgcagctggagggggcgcaggagcagatccgcaggctggagagcgaagcacgaggccgccaggagcaaacccaacggtgccgtgggacggggctgggcgggccccggtgcgtgtcccgggggcggggccgacgggcgctcaggtctgggccactttcatccccatttcaagtcccaggcccgccccgtgggaaggaggatcttctagggggtccgggggctccccaaggagccttcctgcagccgggtcaccacctcccatccacagagacgtggtcgccgtctccaggaacatgcagaaagagaaagtcagcctgctacggcaactggagctgctcagggagctgaatacacggctgcgggatgacagggacgcctgcgaggccaggcgggcgggcagcagctgcaggaaggctctgacaacagcccgcctgcctgggcccacctgctgctgctgctgttgctgggctcggccccccagacgcggctctggccaccttcccagtgcccggtgaccagccccgagtgactcacggaccatgagctagaagctgcccttgcaggaggcttgtcatgggtcgggggtgcccactcaggatgcaggctctccccagggggccccaggctcgcctgactgaagacatgaaggacctagcctaggagtggtcagggtcccgggagtggccagggtcccgtgtgtgccctctgccagtcttcgctctgtccccgttcaatcaaccccatctcagttcagcagaaaaccccctcgtcaaataaaacccactgactgcaaaaaaaaaaaaa

SEQ ID NO: 603603 - DNA, 752 bp, Homo sapiens
gccgtgctcccaccacaccacacccaccgagccctcgttacgcctcttctccgggagccagtccggccaccggcgccgcccaggccatcgccaccctccggcagccatgtccaccaggtctcgtgatccctcgtacctcctaccgcagggatgtatcgaggcggcccgggacaccgtgagccggccgagctccagccggagtctacgtgactacgtccaacccgaacctacagcctgggcagcgcgctgcgccccaagaaccagccgcagcctctaccccctcgttcccccggggcagggagttgtactgcacaacgacggctcacctctgcccggggccgccttacagaaagaccacgcgtggcccgggggatagcaagagactcacttggcacaggacctccggaggggactcttacctcgcactggggcccgatagcctatccacataccagtgagtttcaacgaaactacccccggcaagccaacggagaagggtgacacgcgggccacggaagcctcgacacgtgacccggcgtatgccgccccacacatacactcggcaccacgggtgccgcctacccgggacaccgcagccgaacgtacgaattccgtggcctgggccggacgcgtcgaagtcaagcttccacgcgccccacggcccaggactcgccgccccggggggcaaccatcataccgagcgcaccgaaacatgcgagcacacggcccccggacaagctggccccaagcta

SEQ ID NO: 603604 - DNA, 291 bp, Homo sapiens
gaacttggaaactaaggttactcgtgtgcataaaaatctaaatgaaagggtgtgtccatcaatctgatgctgcaccttgatggggtctttgtggatgggcaggagtttcagtgtgttgggtgttgctccttcctatgtgtcttttgaatctgagctgacatttgctgaagcaacctgtcataagaggcatgcaaaggcatagcagctgtgagttggacagtcagtaatgtgtgcattgtcttatgtgtgtctcagtgatacacggtcgtctgcacccgcttcacacaatag

SEQ ID NO: 603605 - DNA, 2364 bp, Homo sapiens
  misc_feature (38)..(38): n is a, c, g, or t
ggcgcaactcgcaggtaggcgaccgctggtcccgccgntgaggcccctccactgccgcccgcccggcaccccctccgggccgccgtggcccgcgccaaacctgagcgtctcggtcgggaactccggttaccccctcggggcgcaaggcggtcagctttcaggaccccaccttccttatcaccaggtcttctccactggcccctgagattgccatcacctccagctcctcctctcctgaagttggcagcccctcctgggttccagcctcctgagatgccagacccactggggcagtacccacaggccctgagcctacatcaaccaccccagtgacaccccaagcctgcagcattttccacccccagccccctggtcccaccttgccttccgcccaccttcccacctgctgcagggagggccctcggctgagccttcagacacacttgcaccccatccgctcccctcctgaatttcttctgaccctcccttggcttcacagcacctgaaggccaggctgaggccccctgctctcatggccagccctggaaagcctggggctgatgaggcccaggaggaggagggggaactcgaggggggctctgcagggccgcgggctgcaatactggagcaggctgaggagctgtttctgctgtgtgacaaggaggctaagggcttcatcaccaagcacgacctgcagggtctccagagcgacctgcccctcacgccagagcagctggaggctgtgtttgaaagtctggaccaggctcacactggcttcctcaccgccagggagttctgcctgggcctggggatgtttgtgggggtggcgtcagcccagggagcgaacccctgcaggactcccgaggagacctttgagtcgggcgggctcgacgtgcagggcacggcgggctctctggatgaggaggaggaagaggaggagcgattccacactgtgctggagcagctgggggtggccccggtcctgggcgagcagcgggctgtgaggacgctctgggccaggctgcagcgcgagcgccccgagctgctgggctctttcgaggatgttctgatacgcgcgtcggcctgcctggaggaggcggcccgggagcgcgacggcctggagcaggcgctgcggaggcgcgagagcgagcacgagagggaggtgcgcgctctgtacgaggagacggagcagcttcgggagcagagccggcgcccgccgagtcagaacttcgcccgcggggagcggagaagccgtctggagctggagctgcagatccgcgagcaggacctggaacgcgcgggcctgcggcagcgggaggtgagcacccggcccctgccctgtccccacggtcacccgtgcactctccccctgtgccttagcgtccccgggttgtcgggagcctggggcacgcgcagcaccccggggaagagggggcgttcctcgccggtctccatccttccaccctccagttagagcagcagctgcacgcccaggctgcggagcacctggaggcacaggcccagaactcccagctgtggcgggcgcacgaggcgctgcgaacgcagctggagggggcgcaggagcagatccgcaggctggagagcgaagcacgaggccgccaggagcaaacccaacggtgccgtgggacggggctgggcgggccccggtgcgtgtcccgggggcggggccgacgggcgctcaggtctgggccactttcatccccatttcaagtcccaggcccgccccgtgggaaggaggatcttctagggggtccgggggctccccaaggagccttcctgcagccgggtcaccacctcccatccacagagacgtggtcgccgtctccaggaacatgcagaaagagaaagtcagcctgctacggcaactggagctgctcagggagctgaatacacggctgcgggatgacagggacgcctgcgaggccaggcgggcgggcagcagctgcaggaaggctctgacaacagcccgcctgcctgggcccacctgctgctgctgctgttgctgggctcggccccccagacgcggctctggccaccttcccagtgcccggtgaccagccccgagtgactcacggaccatgagctagaagctgcccttgcaggaggcttgtcatgggtcgggggtgcccactcaggatgcaggctctccccagggggccccaggctcgcctgactgaagacatgaaggacctagcctaggagtggtcagggtcccgggagtggccagggtcccgtgtgtgccctctgccagtcttcgctctgtccccgttcaatcaaccccatctcagttcagcagaaaaccccctcgtcaaataaaacccactgactgcaaaaaaaaaaaaa

SEQ ID NO: 603606 - DNA, 476 bp, Homo sapiens
  misc_feature (189)..(189): n is a, c, g, or t
  misc_feature (203)..(203): n is a, c, g, or t
  misc_feature (241)..(241): n is a, c, g, or t
  misc_feature (249)..(249): n is a, c, g, or t
  misc_feature (280)..(280): n is a, c, g, or t
  misc_feature (293)..(293): n is a, c, g, or t
  misc_feature (301)..(301): n is a, c, g, or t
  misc_feature (303)..(303): n is a, c, g, or t
  misc_feature (375)..(375): n is a, c, g, or t
  misc_feature (398)..(398): n is a, c, g, or t
  misc_feature (429)..(429): n is a, c, g, or t
  misc_feature (440)..(440): n is a, c, g, or t
cagcctccaaaagtgatgggattagaggcatgagccacaaagtgctcaaaaaatctattaattaaaaaatgtgtatgtagccgtctttaatctaccatgtccattagcagataaatactataagcaaaataacagcaatgaaagaaacatagagtagatactctgatttatttaataaaaatttgaaantagaccaaattatnataaaaaaaaaatctgttactattgaggatgagggttngtgtttgnaaaggggcagaagtatcactatttttagtantgttctattttcntacatggntntaagcaaatacatgtgttaagctatccatatttaatcattgtacttttctgcatgtatgatatatgtcaatnaaataaattatatacagcaaaantagacaaaacccccaagaagacatacatgantgttaaacctngagggggaatttgaatataagtaagtcctctgaatg

SEQ ID NO: 603607 - DNA, 1995 bp, Homo sapiens
cccaagcgggggtctcggtgcctgcgaagcggcagtggtcgctcgtgggcccagtgccctctacgtcccgtccgggtcccagctggggcggggcgcgcccagtgtttccgggatggagcggcccgggcgcgcggcaggtgcggcggcgcaactcgcaggtcttctccactggcccctgagattgccatcacctccagctcctcctctcctgaagttggcagcccctcctgggttccagcctcctgagatgccagacccactggggcagtacccacaggccctgagcctacatcaaccaccccagtgacaccccaagcctgcagcattttccacccccagccccctggtcccaccttgccttccgcccaccttcccacctgctgcagggagggccctcggctgagccttcagacacacttgcaccccatccgctcccctcctgaatttcttctgaccctcccttggcttcacagcacctgaaggccaggctgaggccccctgctctcatggccagccctggaaagcctggggctgatgaggcccaggaggaggagggggaactcgaggggggctctgcagggccgcgggctgcaatactggagcaggctgaggagctgtttctgctgtgtgacaaggaggctaagggcttcatcaccaagcacgacctgcagggtctccagagcgacctgcccctcacgccagagcagctggaggctgtgtttgaaagtctggaccaggctcacactggcttcctcaccgccagggagttctgcctgggcctggggatgtttgtgggggtggcgtcagcccagggagcgaacccctgcaggactcccgaggagacctttgagtcgggcgggctcgacgtgcagggcacggcgggctctctggatgaggaggaggaagaggaggagcgattccacactgtgctggagcagctgggggtggccccggtcctgggcgagcagcgggctgtgaggacgctctgggccaggctgcagcgcgagcgccccgagctgctgggctctttcgaggatgttctgatacgcgcgtcggcctgcctggaggaggcggcccgggagcgcgacggcctggagcaggcgctgcggaggcgcgagagcgagcacgagagggaggtgcgcgctctgtacgaggagacggagcagcttcgggagcagagccggcgcccgccgagtcagaacttcgcccgcggggagcggagaagccgtctggagctggagctgcagatccgcgagcaggacctggaacgcgcgggcctgcggcagcgggagttagagcagcagctgcacgcccaggctgcggagcacctggaggcacaggcccagaactcccagctgtggcgggcgcacgaggcgctgcgaacgcagctggagggggcgcaggagcagatccgcaggctggagagcgaagcacgaggccgccaggagcaaacccaacgagacgtggtcgccgtctccaggaacatgcagaaagagaaagtcagcctgctacggcaactggagctgctcagggagctgaatacacggctgcgggatgacagggacgcctgcgaggccaggcgggcgggcagcagctgcaggaaggctctgacaacagcccgcctgcctgggcccacctgctgctgctgctgttgctgggctcggccccccagacgcggctctggccaccttcccagtgcccggtgaccagccccgagtgactcacggaccatgagctagaagctgcccttgcaggaggcttgtcatgggtcgggggtgcccactcaggatgcaggctctccccagggggccccaggctcgcctgactgaagacatgaaggacctagcctaggagtggtcagggtcccgggagtggccagggtcccgtgtgtgccctctgccagtcttcgctctgtccccgttcaatcaaccccatctcagttcagcagaaaaccccctcgtcaaataaaacccactgactgcaaaaaaaaaaaaa

SEQ ID NO: 603608 - DNA, 570 bp, Homo sapiens
ggagaactagtctcgattttttgcgttgtttttctctcgggtacaatattcatttgattcttattcagacgtatttccaaaaaaagcaggggggtcgcggttttcctaaaaagtatggcctttactagaattctcagtatatggttttttattaaaatgccattacatggtattgaccgttggatcggcctacagtacaaaagttacacgcactggggcgtatggtccacattctacagggtacaatctctaggccggcgacatcccgtgctggggcgttccccgacggtgagggagggcagggaaaccgtgaatccggtggatagagcagccgtgagggcatggcgcggagccagggaagagcctcgtgaagtggggagccgtggagaatggacggaggaagggagtcggcattgcgaaacggcaggcacgcagaaagcacacgtgacaggctgtcgtgaaggacaggaaggacagacatctgtgggaggctatccggagaagcacatcccaccatccccttccaaccccgaggagtgccgtgttgcgtgccctcaaagagtgggagat

SEQ ID NO: 603609 - DNA, 126 bp, Homo sapiens
  misc_feature (91)..(91): n is a, c, g, or t
actagacgtacacagaccagtcagatcatgcccatgagagacatcgcccttggcaacaaaaccaaaccttttgtgggcgtcaagatggtangtgcccaccagtcagatcctgtgttacgtctaggt

SEQ ID NO: 603610 - DNA, 1827 bp, Homo sapiens
cccaagcgggggtctcggtgcctgcgaagcggcagtggtcgctcgtgggcccagtgccctctacgtcccgtccgggtcccagctggggcggggcgcgcccagtgtttccgggatggagcggcccgggcgcgcggcaggtgcggcggcgcaactcgcaggtcttctccactggcccctgagattgccatcacctccagctcctcctctcctgaagttggcagcccctcctgggttccagcctcctgagatgccagacccactggggcagtacccacaggccctgagcctacatcaaccaccccagtgacaccccaagcctgcagcattttccacccccagccccctggtcccaccttgccttccgcccaccttcccacctgctgcagggagggccctcggctgagccttcagacacacttgcaccccatccgctcccctcctgaatttcttctgaccctcccttggcttcacagcacctgaaggccaggctgaggccccctgctctcatggccagccctggaaagcctggggctgatgaggcccaggaggaggagggggaactcgaggggggctctgcagggccgcgggctgcaatactggagcaggctgaggagctgtttctgctgtgtgacaaggaggctaagggcttcatcaccaagcacgacctgcagggtctccagagcgacctgcccctcacgccagagcagctggaggctgtgtttgaaagtctggaccaggctcacactggcttcctcaccgccagggagttctgcctgggcctggggatgtttgtgggggtggcgtcagcccagggagcgaacccctgcaggactcccgaggagacctttgagtcgggcgggctcgacgtgcagggcacggcgggctctctggatgaggaggaggaagaggaggagcgattccacactgtgctggagcagctgggggtggccccggtcctgggcgagcagcgggctgtgaggacgctctgggccaggctgcagcgcgagcgccccgagctgctgggctctttcgaggatgttctgatacgcgcgtcggcctgcctggaggaggcggcccgggagcgcgacggcctggagcaggcgctgcggaggcgcgagagcgagcacgagagggaggtgcgcgctctgtacgaggagacggagcagcttcgggagcagagccggcgcccgccgagtcagaacttcgcccgcggggagcggagaagccgtctggagctggagctgcagatccgcgagcaggacctggaacgcgcgggcctgcggcagcggggagacgtggtcgccgtctccaggaacatgcagaaagagaaagtcagcctgctacggcaactggagctgctcagggagctgaatacacggctgcgggatgacagggacgcctgcgaggccaggcgggcgggcagcagctgcaggaaggctctgacaacagcccgcctgcctgggcccacctgctgctgctgctgttgctgggctcggccccccagacgcggctctggccaccttcccagtgcccggtgaccagccccgagtgactcacggaccatgagctagaagctgcccttgcaggaggcttgtcatgggtcgggggtgcccactcaggatgcaggctctccccagggggccccaggctcgcctgactgaagacatgaaggacctagcctaggagtggtcagggtcccgggagtggccagggtcccgtgtgtgccctctgccagtcttcgctctgtccccgttcaatcaaccccatctcagttcagcagaaaaccccctcgtcaaataaaacccactgactgcaaaaaaaaaaaaa

SEQ ID NO: 603611 - DNA, 933 bp, Homo sapiens
gcatgtatcacccccgtccggtcttctccacccgaccccgctccgcccgggcccactcccagcccctggccctccgtgtacctcttttgcatggccgagcggccggcggaggctcagtggtcctccgtgcgtcccagaacttcgcccgcggggagcggagaagccgtctggagctggagctgcagatccgcgagcaggacctggaacgcgcgggcctgcggcagcgggagttagagcagcagctgcacgcccaggctgcggagcacctggaggcacaggcccagaactcccagctgtggcgggcgcacgaggcgctgcgaacgcagctggagggggcgcaggagcagatccgcaggctggagagcgaagcacgaggccgccaggagcaaacccaacgagacgtggtcgccgtctccaggaacatgcagaaagagaaagtcagcctgctacggcaactggagctgctcagggagctgaatacacggctgcgggatgacagggacgcctgcgaggccaggcgggcgggcagcagctgcaggaaggctctgacaacagcccgcctgcctgggcccacctgctgctgctgctgttgctgggctcggccccccagacgcggctctggccaccttcccagtgcccggtgaccagccccgagtgactcacggaccatgagctagaagctgcccttgcaggaggcttgtcatgggtcgggggtgcccactcaggatgcaggctctccccagggggccccaggctcgcctgactgaagacatgaaggacctagcctaggagtggtcagggtcccgggagtggccagggtcccgtgtgtgccctctgccagtcttcgctctgtccccgttcaatcaaccccatctcagttcagcagaaaaccccctcgtcaaataaaacccactgactgcaaaaaaaaaaaaa

SEQ ID NO: 603612 - DNA, 89 bp, Homo sapiens
attccaacaaagggttttaatgtagatttttttttgcaaccccatgctggtgattgctaaatgtaacagtcttgtcgtgacgcttctgg

SEQ ID NO: 603613 - DNA, 1940 bp, Homo sapiens
cccaagcgggggtctcggtgcctgcgaagcggcagtggtcgctcgtgggcccagtgccctctacgtcccgtccgggtcccagctggggcggggcgcgcccagtgtttccgggatggagcggcccgggcgcgcggcaggtgcggcggcgcaactcgcaggtcttctccactggcccctgagattgccatcacctccagctcctcctctcctgaagttggcagcccctcctgggttccagcctcctgagatgccagacccactggggcagtacccacaggccctgagcctacatcaaccaccccagtgacaccccaagcctgcagcattttccacccccagccccctggtcccaccttgccttccgcccaccttcccacctgctgcagggagggccctcggctgagccttcagacacacttgcaccccatccgctcccctcctgaatttcttctgaccctcccttggcttcacagcacctgaaggccaggctgaggccccctgctctcatggccagccctggaaagcctggggctgatgaggcccaggaggaggagggggaactcgaggggggctctgcagggccgcgggctgcaatactggagcaggctgaggagctgtttctgctgtgtgacaaggaggctaagggcttcatcaccaagcacgacctgcagggtctccagagcgacctgcccctcacgccagagcagctggaggctgtgtttgaaagtctggaccaggctcacactggcttcctcaccgccagggagttctgcctgggcctggggatgtttgtgggggtggcgtcagcccagggagcgaacccctgcaggactcccgaggagacctttgagtcgggcgggctcgacgtgcagggcacggcgggctctctggatgaggaggaggaagaggaggagcgattccacactgtgctggagcagctgggggtggccccggtcctgggcgagcagcgggctgtgaggacgctctgggccaggctgcagcgcgagcgccccgagctgctgggctctttcgaggatgttctgatacgcgcgtcggcctgcctggaggaggcggcccgggagcgcgacggcctggagcaggcgctgcggaggcgcgagagcgagcacgagagggaggtgcgcgctctgtacgaggagacggagcagcttcgggagcagagccggcgcccgccgagtcagaacttcgcccgcggggagcggagaagccgtctggagctggagctgcagatccgcgagcaggacctggaacgcgcgggcctgcggcagcgggagttagagcagcagctgcacgcccaggctgcggagcacctggaggcacaggcccagaactcccagctgtggcgggcgcacgaggcgctgcgaacgcagctggagggggcgcaggagcagatccgcaggctggagagcgaagcacgaggccgccaggagcaaacccaacgagacgtggtcgccgtctccaggaacatgcagaaagagaaagtcagcctgctacggcaactggagctgctcagggagctgaatacacggctgcgggatgacagggacgcctgcctgggcccacctgctgctgctgctgttgctgggctcggccccccagacgcggctctggccaccttcccagtgcccggtgaccagccccgagtgactcacggaccatgagctagaagctgcccttgcaggaggcttgtcatgggtcgggggtgcccactcaggatgcaggctctccccagggggccccaggctcgcctgactgaagacatgaaggacctagcctaggagtggtcagggtcccgggagtggccagggtcccgtgtgtgccctctgccagtcttcgctctgtccccgttcaatcaaccccatctcagttcagcagaaaaccccctcgtcaaataaaacccactgactgcaaaaaaaaaaaaa

SEQ ID NO: 603614 - DNA, 114 bp, Homo sapiens
cctataggagccttctcggagttgctggccaggcaggcggagcatgcaggctgagctcactgtatgcccgagcatcaccaccacaggacagtccttttctgggaacgtcagcac

SEQ ID NO: 603615 - DNA, 723 bp, Homo sapiens
taagggatggcgagtgctgcagctctatcagcagaacctttctctccgtgtgaggaagagcttttttccggccctttccttttttttttgtttacttttccccttaatcaggaagcactgattgaaagccaatcagagagagctcgccccgcttttccttcggttcccgtggctgtccagagtaaaaaggtgatgctgagaaagagctgagttagatggaagttaaaactcttgtgatagaaaataacagccgaaaacaaacaaaagggggacatagtgacaatttctccggggtaatttgggcgtggaaccaatttccattatccagaagcgtgataaaaacgcttggggaaccatgaccaacaacatggattgaaagtgtgggaaaccagttgaaacacagtaaaaaccaacggggctaaaattaggaccacttctcttcatctacaccggggcatggtcacgaacgttgacctattgacaattatatctcaatattttggcatacgtgtttcataattcggggatatgcctgccaacatttcgtgctatcctccagaaataatgtgttcacgacagcgaccgccggggtgcccacaggcaacagcaacttttcacgtttccacggtgtccccagggcagttgagggcaaattctctaccttcgtcaaacatcggtggtgggcatgtgcgaattcaacttttcctttcctctgacgacctt

SEQ ID NO: 603616 - DNA, 528 bp, Homo sapiens
  misc_feature (1)..(1): n is a, c, g, or t
nccagaaaattaagtgtgttaccactaatgttatgcaagattgccctagttttccatagggagaaaataaagtccatttacccattattgaaaaaattcattattttttaatatccgggctttttctaaagtacaagaaatagctctagcaagctatgggtcatcaaataagaatgattatcataaaagtaaatttaaagtctttttaatccattgtgtttaatctggacctggtcctctaaattgaaaatgaactcatgaagtataaatgggcccaggcactgtggctcacgtctgtaatcccaacactttgggaggccaaggcgggtggatcactttaggtcaggagttcaagatcagcctggccaacatggcgaaatcctgtctctattaaaaatacaaaaattagtctggcatgatggcgcatgcctgtagtcccgcctcctcaaaagactgaggtaggataattgctttaacccaggaggcagaggttccagtgagccgagattacacctcaaacctccagcc

SEQ ID NO: 603617 - DNA, 1176 bp, Homo sapiens
agcgggggggcgcctttggagaatcggcgggctgcgctccgctggggctggtcgcggagtggggggaggggatgtctggtcagtgcgagatccgctgctgcttgaggagaggagcggtcgaaccagcagcaccactggattctcttctgtttggcaaatctggaacactggaatgatggaaactgtgttctcttacaaagtagctcaacagaagaaccttgaaggctatgtgggattgtgccaatctcccaaatcaggtatacagaaaatcggtgaagagaggttgtgcattcacgcttatggctagtgggtgaagtctggactgggaaagctcgacattaatcgagctcattattcctcacagaacttgtattctccagagtagtccaggtccttctcatagaagttaataaagactgtacaggtgtgaacaatccatagttgtgatcaatggaaggtggtgtgcagttgctgctcacaatagttgatagcccaggatttggagatgcagtggataatagtaattgctggcaggctgttatctgactacattgatggtaaatttgaggactacctaagatgcatgaatcacgagtgaacacgacgtcagatgcctgataacagggtgcagtgtcgtttatacttcagtagctccttcaggaccactggacttagaccattggatattgagttcctgaagcgttgcctgacaccgtgaatatcatcccacttgttgccaaagcaaacagcatctgcaccggatgaatgccagcagcttaaatgactgatactgaaaggaaatccaggaacctaaacttaccatattcgaatttcagaaccagatgatgaacaaggcaatcaccttgtcacagactcaggaccgtacccttgctgggtatggtacaataccttccctgtgaaattaaagggcgacaggcgtcgcaaggaaggggcctatccttgggcggatgtgcacctgtacacgtggccacccatggtgcatttgcaccctctatgaaaatgtttgcatgaacagccagttccggagctcacaagctgctacacagtccctttcaaacctacatacacgactgccatgtgcagctctcggcttgctacaccacgaatgccccgtatatcccttcgtcattttcttaactgccctttttccaccgt

SEQ ID NO: 603618 - DNA, 167 bp, Homo sapiens
caggactatgcactgtagatcgctcactgtctgctctattctcgcagaaagagtgatggcagaaggctcagtcagagctccactactgctgctttcaccggactcttcatagtctgggttgcgtgggtgggcagagacatctcggtgtcgcggcaggtacacctgca

SEQ ID NO: 603619 - DNA, 525 bp, Homo sapiens
atttctcatcacttcttgctaagactgacagcaggtaattgtaatgcagatagatgcggcgatccccaccttcagtcatgtgatgccaaggcccccaacacaccatgtgcagaagagctggtggcagtgaatggctgatgctttcttggggagctgggccatcttcttcggttttaccttcctgaggaattcacacggcttccagcgaggggggaggttgatcacttttttcagattagtaatgcctgcgacatactgtggtcccaaagtatttttcatatgttgttttgccatggaacctggccagacactcagtgttgctcattgaacagaaggttttgggtttcagactggaataagcagaaacttgtccgggcagtcagatccatttctcccaaagtttagcctgttggtggagcaacacctgtttcaggcgttccaccttatccatccgagacaccacggcatgattcggggccatggcaagatggcagcttctagcctcagtcacaggcttccgtttgc

SEQ ID NO: 603620 - DNA, 321 bp, Homo sapiens
  misc_feature (213)..(213): n is a, c, g, or t
  misc_feature (249)..(249): n is a, c, g, or t
  misc_feature (260)..(261): n is a, c, g, or t
  misc_feature (267)..(267): n is a, c, g, or t
  misc_feature (273)..(273): n is a, c, g, or t
  misc_feature (280)..(280): n is a, c, g, or t
  misc_feature (286)..(286): n is a, c, g, or t
  misc_feature (295)..(295): n is a, c, g, or t
catttaggtaccgtgaagcctttcgcgtttttttacggtgcatgatccgatattttgatttgagagagacactccattctcgaaggtacgtaagaagacacatacatctaatatcttttctcgtcgcatctctcttgtttaacatttaatactggaattaacttttatgcaaggtgtgggaccatgattcaattctatcattttatattctcnaatcattacccagtattttaataccataaatggacnatccctcttgnnttgtgnatttanacgtacnctgtantagataaantacactcatttctgtgcccatttcaa

SEQ ID NO: 603621 - DNA, 1425 bp, Homo sapiens
  misc_feature (124)..(124): n is a, c, g, or t
  misc_feature (453)..(453): n is a, c, g, or t
  misc_feature (603)..(603): n is a, c, g, or t
  misc_feature (700)..(700): n is a, c, g, or t
  misc_feature (726)..(726): n is a, c, g, or t
  misc_feature (1002)..(1002): n is a, c, g, or t
  misc_feature (1047)..(1047): n is a, c, g, or t
ggagagatctcaggctgacctgatgctggtgctgtagtcgtctgtcatgctggtcgtcggatgaaataacgaagctggtatctcctggaattagggacggatcccgaagaagacagtagccctntcgtgagtctatcagcatcaactgagggtagatgagacccacagtgaattccgtccggtagtatacacaaccagtggctccctgatgagcgcacctctaacgaggactacgcataagaggtatatcgatgcgcaacattccgtctaaggggtataccctgcgaggaccatctttcacgattgaagagacccgattagggctctatcgaagcccccgcatccagcagggagctcgttgggctgtccaagtctatctcggttcttggaaaggtgcgctaggacatggcagttggcctagtgtcggccaatgaggtcgcatttaacctagtnggcccatttggtgatctgctacacgtgggtagtcgcgaagagacgctacagctccccgggtgagaaagtggagtggcgacaataatcgaccgcagggtgggcggtataccgctagccgtcgtggcactattgcaccgtgacctaccgtcnaggaaacttggcaagtccccttgatcccaaacacgagacacttcagggtctgccgacagcgttggcacttagaggctccccgttgtgtcgcgtcccntagactcctatcggttcccaggacgngtgaagtggccttctttccaccaagaaagtcctcaaggggctagggggtcatagtgcgcgggtcaacccttgtcttacctcctgtgcgcataaagcggtccacggaaattgactgcgccaagaaccggtcgcgctaagcgtgttcggttcccctcaggagcgcctccgcgttttaactggggggttggggggttacctaacttcctctaatggccattttccgcaaaagggtgccaataagccaggattgtaaaacccagacaagcttgcgggaanaacggtaaaaatgaacactccctttgtgttccccgcacactgtgntgtccagctcggaagtctgggaaaggggcactcccccgcaaggcttcggacacggcccatttcctccttcgcggttcgggcggtggcagagccagactgggttagcgttaaccctgtaacgacattttgttccccacgtaaaacatcgtgaggtttcgttcggtaccaacccgggcgattttgtgttcccgcttccggtaagggacccagatcggttgtaaaggcctttgggcttggcgctggggacctaccaagtactttggtggcccgcccactcgccaaagtgggggccaaatcgctcggcgtcttggggacgtatcacctttgcgcggcaccggggtgagaactccaattcccccttaaaaaacgcatccccga

SEQ ID NO: 603622 - DNA, 142 bp, Homo sapiens
aattaacattcgtgccactccatcttcaaaccccctcactttcccatcctactcctgtcatgcatgagtcatgcattctgggggtgagctctgcggtttaggtggcccgctctatcattctcaacccatgaggtgccgtagc

SEQ ID NO: 603623 - DNA, 285 bp, Homo sapiens
  misc_feature (126)..(126): n is a, c, g, or t
atatattaatgttctccgcaggttagtgaaccaaatttccaaataaaagaacttagttgctacccaaacattcgtaactgcagaatcaattctggatttgccaaacgtgttcgacaagataattcnagtgaggagcgggtgcgagaaaacaaaccaacaactggaacataaaagaaacatcgtgtaaaataaatccaagcatgggttagaaaatttggaagaaatatttcaaaaggaaatctaagataaatcacttcaaagccaagcaaaatgaagttgatcatt

SEQ ID NO: 603624 - DNA, 849 bp, Homo sapiens
  misc_feature (33)..(33): n is a, c, g, or t
  misc_feature (69)..(69): n is a, c, g, or t
  misc_feature (80)..(81): n is a, c, g, or t
  misc_feature (87)..(87): n is a, c, g, or t
  misc_feature (170)..(170): n is a, c, g, or t
  misc_feature (175)..(175): n is a, c, g, or t
  misc_feature (184)..(184): n is a, c, g, or t
  misc_feature (193)..(193): n is a, c, g, or t
  misc_feature (204)..(204): n is a, c, g, or t
  misc_feature (211)..(213): n is a, c, g, or t
  misc_feature (218)..(218): n is a, c, g, or t
  misc_feature (220)..(220): n is a, c, g, or t
  misc_feature (225)..(225): n is a, c, g, or t
  misc_feature (276)..(276): n is a, c, g, or t
  misc_feature (307)..(307): n is a, c, g, or t
  misc_feature (310)..(310): n is a, c, g, or t
  misc_feature (313)..(313): n is a, c, g, or t
  misc_feature (316)..(317): n is a, c, g, or t
  misc_feature (323)..(323): n is a, c, g, or t
  misc_feature (333)..(334): n is a, c, g, or t
  misc_feature (380)..(380): n is a, c, g, or t
  misc_feature (397)..(398): n is a, c, g, or t
  misc_feature (424)..(424): n is a, c, g, or t
  misc_feature (469)..(469): n is a, c, g, or t
  misc_feature (488)..(488): n is a, c, g, or t
  misc_feature (505)..(505): n is a, c, g, or t
  misc_feature (573)..(573): n is a, c, g, or t
  misc_feature (765)..(765): n is a, c, g, or t
  misc_feature (783)..(783): n is a, c, g, or t
  misc_feature (785)..(785): n is a, c, g, or t
  misc_feature (821)..(821): n is a, c, g, or t
gataccttctgaaatgtttcaggcttttaaacncttctatttacacttatctgacatggaattaaaacnaaaatggtcanntaccangataatagaaagcaaccagccaacatagctaggtcttctcttaaatttgctgatcaacattagcagtagttaccttaataatnaattnttcattttnaaatccgtngtaactttagncaattcnnnaatangngtgcnctgtgcaatttacacgtttaatatcctgtggatactaaaagcttgtatatngtcaggtttgcacattattactttatcaaanacngtnagnnttcccnaaggggaggnnggggcaacttgagagggtattctggggggtctctggggggttatcnaagctctgcctgctttnngggaggaggttccaatttacgcgagngggcagttaaaatctggttgaatttctcatatctctctgtctgantgacttgtgcacctttgcngccccatagcaatcgcntttgaaattcagtcttgcagatttcattcatttcttcatctggttgaaaacctgccaggatcctctcngcattcctccggtagctgtctgccgcctcggccatgaatcgcgctgttgccaaatggttcagcatgatttcacagctctggtcgtttttttcccacatgtcggttccttcaaaagtcacagcctggcgctccattaacgtcacaagcggcatcagcagtgggactgatacattgtttgggggaacacatgtngactctctgccttcatgnangagtttgctgaagggcttcagctgtttctcataganaatggcagtgtgggtgtactggtgccgc

SEQ ID NO: 603625 - DNA, 398 bp, Homo sapiens
atgcttgctcctgtgaatgtgcttggctctacgattgggcctcctaatactctgaagactaacatccctttgatgctgacctcccagaaggttcttcctcctctgaatgaccatgttcctcaaccaaacttgggtccttgacacaatcctactgacggggactatcctcttgaagaggcccttccggttccacgggcccccttggttcacagaccgagcttttatcatcaacctcattgttatcctaacctgcactgtacccaaagcctgggggataggatcctgcatactggggaagtagcccctccatggaaagctcactttctccagcgaaatggttcacctccattgcctgaaccacctacggtcccacgatcgggtatagacaagggatcctc

SEQ ID NO: 603626 - DNA, 280 bp, Homo sapiens
tattctgttgaaaaccaaccaggaactatttattaaaaaactaaagcaatgtttatccccaagaaggttgaagcaccgctggtgggttctgactattcgattcaggctgaaggcacggcaactcttccagcctcttgcggggaaatgtcctacccaggccacgggcagtgccccagtgcagtctggttcccctaaaagcccccaaacacttgttccccccaagggcttgaccagagcaattctcatcaagcaggcagggcccaccccttgagacacaggg

SEQ ID NO: 603627 - DNA, 159 bp, Homo sapiens
aatgacctacccccggttaagacctggaaaacatcatcgccactgtaacacgaggctgcctgagttctcagagctgcagggctgtttccgggaggagctcatgtactccttcaccagtgtgcagtgtgcaatggcctcacatgagctcctcccgtgaaa

SEQ ID NO: 603628 - DNA, 895 bp, Homo sapiens
agcgggcggctgcaggcgggctcacctccgcggtccgcccgggcgccccgggacccgttagtgaccagactgcgtggtcgaacgggagccctcgaccggcgcgagcttgctcccagaccgtcatgctcgatgactatgacgccagatcagtgccaactggctcactagatgactgggcggaccgggcgggagccggcgcgagagaggcaggcaggacagggagtgcgaggagggagaaggaagggccagagctcgggcggtgacggggggagaccctggttctatgaaagcccggcgttctctggcccggatgcttgagagctctgtcggcccaagcggcacatatttctgttcctgctatgggacctatggtcccaactacaggttttgcgggatgccaatcgggtgtacactacgccctcactggggatgcaatacttgtggcctttctacttctagtgcaagtgtagcaaaatataatatgcttggacacgaggtacttggtacacatatgtaagataagtcatttcaccggactgcgaccgtcagcgaggtacgttagattcctgattgccacgctacctgcattcatcgctctcttgctgcctgtctacaaagctgggactaggtggccacgatggcatctggatttcttggaaccgcatgggagagaacgtgctacataggggtcggaacaatagcatggaagaagggtcgtcagaatcttttagaggaacgccaaaggtggatacgtagcgaaaagtgaagacatcacatgagtaggaatgaaagagaaagagaagaccatgaatgggaaggaaggaagcaggagctgatagccaacattgaggcgtcagggagatcttgcgtgtttaagaagaatttgcgtagaaga

SEQ ID NO: 603629 - DNA, 81 bp, Homo sapiens
gggtggcctcgtggtgctgtcgtgggtgctgtgtcttggcgtgttctcctacgtgaaggtggcagccagctccctgctgca

SEQ ID NO: 603630 - DNA, 1209 bp, Homo sapiens
gtatctgggaactgtgcctttgagtttcctcaggcgtgctggatgtgaaaactgagactcagacaggaaagggaaggccccacatgacaatggtagccctaggccacgcaggctatgtattatgatctatttgtgtttttactagaggtgtgtgatatcccatatgcatgcctaggcatagaccattgcaactccatgtggctcaagcagatctacacctatctctcagcactccgtgatgatacgctgggattcatagatttggagccaccatgcccagctcagagggtttgtatctcctagactgaccctgatcagtctcaagcatgtggtgtgggacgtcctgccacctggggcaagtcacctgaccagatcccagaaggacctcactgagacgactgactcaagatgtctcagtccacactgagctgccatccagggatgccatctgtgggcacagctgtggtgccggtgagagatgctcagaaacatcaagcactatgggagagatctcggtagtgtacagtggatagaggattacggtgcatgaagaaaggatagagtggaggcattgcctggacccccagcctgcaggcgataccaggcagaagagtacacagccacaaggaccggcacagtcccccgacgacacaaacatggagaaacaggacgcccagcgaaacacgaatgacacccacaagcaagcacaactgggcgcatcggatacaaacaagcaacacacaacgaatccgagcgaacggatgacacgggcacccagcacagccaccatgacacacaacataacacacggtgagaacacataacacgcacaactgacaaacaaaacaaaccaaagacaaacagacttgcaaaaaaccggaccaaaacaaaaggcggactagaaaccccaatgaaacgagccacgtaacattaacagagacagccacacacaaaaaacaacggccaaatctacccatagaaactaagaccaacaaccaggggagccaacaaaccaaccaatcatatgacaccagtgtgacgaagcagtgccataaaagacctgagacaagcaatagaaaccgatcgggacccaaaagcaaaccacaaatagaccagaagtgacaacaaaaaaaaaaggaaacaaaagagacaaaacaaaaaagaaaagaaacgagaacatgaagaccaagcaaacaccgcacaaagcaa

SEQ ID NO: 603631 - DNA, 163 bp, Homo sapiens
tggtatctacaggattgcgacgggatcagtcgatctgaagactgagaacggtacactcagaaggcagaggcgcgcaattaccactccgaccggaggtagtgacgaaatacatacaggatctcgaggcctgtatggaatgagtcactttaaatccccgcgtcga

SEQ ID NO: 603632 - DNA, 100 bp, Homo sapiens
tgcacacttttgtgcatcatggatttcctaatatatcatgcgactgaattaaggagaatggcctaagtgacttccctagtttgttctgctttatcattgc

SEQ ID NO: 603633 - DNA, 782 bp, Homo sapiens
  misc_feature (782)..(782): n is a, c, g, or t
tcccaccaggcaacccgatccgtatcctggtcaagccctgatggagcgcatcacgggtgccgtcgcgattcgttgtggcggcaccttcgcgttgggcggcatcaatccatgcagctgtgtgcaacctctgtgtctgagcgaaggcctacaattcaagggttaagtcccggatcgaccgggattgctgcgacgcgcatcctgccgtcgcggcgggaacgtcggcacgatgccaggagcttcatgacagtactgaccgactttcttgccacgcatcaactgctgacgatcctgatcgtcctggcctccggcgccttgctaggccaaatcaagtttggcccgttgagatttggtgccgctggagccctgtttatggggctggtcgtcggggcccttgatcctcgcttcggtcaaaacctggggatgatcaaaggcctaggcgtcgtgctgttctgctacaccgtgggcctggctgctggatcgaccttcttatctgacctcaaacgtcagtggggcctcatgctcgccggtgtcgtcgggttggcagtgatggccgcagctggactcggcctggggcgactcttcggtttaaccccggctcacgttgcgggtctgtacgccggtgtcctcacctcaccagccattgacgccgcatcgatggctacccatggagccgcagatactcttgtggggtatgcgctgtcctatcccgtgggcgtcgtcgtcgggctcattatggtcgcaatcattgctaagagatgctgggccgcccacaaagacaaacn

SEQ ID NO: 603634 - DNA, 1001 bp, Homo sapiens
gatggtaggtaattctctaggatccgacaatgcgtacgttgcgagtcgcccctgagtatcatggccagatgaatactcacgcattgcgcattgaggagtgaccactcggacgcctcgatgctttacgaaaaaaagagtttcttgattaaagtctcttgacactcagatgtgtatgttccttgaacagggcactacggtcatgtgggaggcattccggtgcctcgtctggtatacatgccgtggtcaacaacttgaaagaacgttgcagcaagctgggcacgcacttcatgaaggaaactttgtggggagatgccactgcaggcttatgaaacacatcctaaggccagagatatacctctagttcttgaaccaatcagtagcaatagctttacaagtaaccgttggtgagactggcctacataacgcagtttaaccaaccaggaatcttgttccgtcaacagttgagaccagtggtgttagtgtgccaagattgcttcctttgtgcggcttgatagaggagagcagagcgagcaagagaccgagttccacaaactcctgttgagaacgctcggctggtgaggcctaaaattgtcacccgttcatattaacctgaactatggaaacctgggacagccactatgttaaacgaacgagtcttgtgttggccatatagcgtagactacagagttgtccccggccgttaattttgcgcctttttgcttgcgtgacctgtttcctaggtatagagttatcaaaacttggcctgtgggactttagattaactggcaaagttgcaggattataattttatcatcctgggaagtccatggggaaatcatcaatagacacaagaaggggtaacgggggagacccgtcatagggtgctgaaattcttagaacattctggtggagggtatcccttggcgttcaagacggcatggggcgactttccaagggtcaaaagtttgacccatttggagggagttggtttaaacgagtag

SEQ ID NO: 603635 - DNA, 871 bp, Homo sapiens
cactcattcttcatctatgagaccttctacaagctggtgaagatcttccagcgagcaccccctgtcatggcgtgctcagcctccaacagctcatgaggtggacggcggtgagaacatgacatgggccggggcaagaacgccacgctggggccgggcaacaggagcttggttgggcagtctgggcaggggaagccccgtgcggccatgtgccatagcacggccctgctgctccgccgtggtgctcatggcgcggcaccgttcttcactcgccttcgttcctgcgcaatagttcgaagagatcagccgggttctttcctggccgggactccggcgggtgattggggactttggggtgcccagtcgcgcatcctcactcatggtgcttgtggattacagtattgaatggacacctatacccagtaagctgtagcgttcccagtggattctcgtgtgactgccccagtaaaagaggggctgggtcatcaactcccctgggagagaagagccccttccctgtgtggatgatggttgccagcctgctgcccgcctatccgtggtcttcattgctcatcttcatggagacacagatcaccacgtccgtcatcatctgcaagaaggagcgcatgctggggaagggctccggcttccacctggatctgttgctcatcgtggcctatggtgcggcatctgtgccctctttggcctgcctggttggttggtgccactggtcgtctggtcactcagcgaacgcgctcactgtcatgagcaagggctgtggcactggggacaggccaagatcccgacgtcaaggcaccgggggaacgggctgtggttgcctgttgtggccctcccatacgggatggcgggaccc

SEQ ID NO: 603636 - DNA, 387 bp, Homo sapiens
aatccgcgcagctacctgaagccaacgcggcctgtttaccggcaagtcagagcaaggcgtgagtttctgggctgcgatctatatcccgattgtggtggcgatggctgcccagcaaaacgtgtatggcgcgatcagtggtgggcctatggcgattctggccgggaccctcgccgtgctgctgggctttgccctggtgcccgtgctggtgcgtatcggtcaccgcgagccggttgcggttgctcccactaaagaagcggggtgatcgccatgtacgaatcgatgatgaaagtgatcaccggctacggcttgatcagtggtttcgccgtgatcggcctgaccatgtgggtgtcttattggatctccgataccttcaccaagggccgcctg

SEQ ID NO: 603637 - DNA, 782 bp, Homo sapiens
  misc_feature (16)..(16): n is a, c, g, or t
  misc_feature (34)..(34): n is a, c, g, or t
  misc_feature (49)..(49): n is a, c, g, or t
  misc_feature (51)..(51): n is a, c, g, or t
  misc_feature (60)..(60): n is a, c, g, or t
  misc_feature (79)..(79): n is a, c, g, or t
  misc_feature (95)..(95): n is a, c, g, or t
  misc_feature (106)..(106): n is a, c, g, or t
  misc_feature (118)..(118): n is a, c, g, or t
  misc_feature (124)..(124): n is a, c, g, or t
  misc_feature (130)..(130): n is a, c, g, or t
  misc_feature (154)..(154): n is a, c, g, or t
  misc_feature (156)..(156): n is a, c, g, or t
  misc_feature (166)..(166): n is a, c, g, or t
  misc_feature (169)..(169): n is a, c, g, or t
  misc_feature (185)..(185): n is a, c, g, or t
  misc_feature (188)..(188): n is a, c, g, or t
  misc_feature (191)..(191): n is a, c, g, or t
  misc_feature (194)..(194): n is a, c, g, or t
  misc_feature (202)..(202): n is a, c, g, or t
  misc_feature (204)..(204): n is a, c, g, or t
  misc_feature (207)..(207): n is a, c, g, or t
  misc_feature (217)..(217): n is a, c, g, or t
  misc_feature (221)..(221): n is a, c, g, or t
  misc_feature (227)..(227): n is a, c, g, or t
  misc_feature (229)..(229): n is a, c, g, or t
  misc_feature (235)..(235): n is a, c, g, or t
  misc_feature (247)..(247): n is a, c, g, or t
  misc_feature (255)..(255): n is a, c, g, or t
  misc_feature (263)..(263): n is a, c, g, or t
  misc_feature (267)..(267): n is a, c, g, or t
  misc_feature (276)..(276): n is a, c, g, or t
  misc_feature (280)..(280): n is a, c, g, or t
  misc_feature (291)..(291): n is a, c, g, or t
  misc_feature (306)..(306): n is a, c, g, or t
  misc_feature (310)..(310): n is a, c, g, or t
  misc_feature (321)..(321): n is a, c, g, or t
  misc_feature (324)..(324): n is a, c, g, or t
  misc_feature (328)..(328): n is a, c, g, or t
  misc_feature (354)..(354): n is a, c, g, or t
  misc_feature (358)..(358): n is a, c, g, or t
  misc_feature (363)..(363): n is a, c, g, or t
  misc_feature (374)..(374): n is a, c, g, or t
  misc_feature (398)..(398): n is a, c, g, or t
  misc_feature (403)..(404): n is a, c, g, or t
  misc_feature (409)..(409): n is a, c, g, or t
  misc_feature (431)..(431): n is a, c, g, or t
  misc_feature (446)..(446): n is a, c, g, or t
  misc_feature (452)..(452): n is a, c, g, or t
  misc_feature (467)..(468): n is a, c, g, or t
  misc_feature (482)..(483): n is a, c, g, or t
  misc_feature (501)..(501): n is a, c, g, or t
  misc_feature (716)..(716): n is a, c, g, or t
  misc_feature (719)..(719): n is a, c, g, or t
  misc_feature (781)..(781): n is a, c, g, or t
tggagctttgcctctntaggccggcagcgctctnctccatggtcctgtntnttagcgctntttttggagcccgccggtnaggccgggccacgctnagacactttgnttgttgagtttnttactnggcatngcgggttagttttgcagctatgtntnggacccgctnctnatttttttgcagattnttnttnttnagaccgtntnttntggcttgctnggcnttttgntngcgctngttgacgggctnttgcgaanagcccctngctngaccagatntttnacgccgagatntttggcttttttacncctncaggccggctnttnattnttttttttttttttaacgcccttacntttnccctnggctttttttnttttttttggcgaggaaagcagtnttttnnttttntttttattttttattttttttnttttttgggctgttngttttncagtttccgttttcnnttggcgctgacctnntggttggttcaagccgtntgcattgcactcatggctgtcatcggggagtacctgtgcatgcggacggagctcaaggagatacccctcaactcagcccctaaatccaatgtctagaatcaggccctttggacatcctgctgacacttgggccccttaacaccttgggctgctcagaccctccagatgaggtccagcccagatctgagaggaaccctggaaatgtgaagtctctnttngtgtgggagagatagtgagggcctgtcaaagaaggcaggtagcagtcagcatgacagctgcna

SEQ ID NO: 603638 - DNA, 359 bp, Homo sapiens
tatatgtgatcaacagtgccggttaaaatgggcatctcgactggggctgcgctctcgatgatcaactgcgcttttttgtcagccatgtggcctcctatttatgcttcaaatcatcagacagaccccccacgcagtggcccgcaccactatatttgatataaatccagattgtcaatttgcctaaagtcttgcgccataaggctttaaccgtactttctcgtcgaaattgactgccatttacgccttttatcccgacagcgcaatcagctattcgtggccagaaggatccttctggacacgctgataagctgtacccgctcagtgtattactgggatattgtcgtccagagagttgggta

SEQ ID NO: 603639 - DNA, 123 bp, Homo sapiens
gcggccgcctactactactactgctcgaattcaagcttctaacgatgtacggggacatgcttgggttttgtctttaaccttgtaacgcttgcaatcccaataaagcattaaaagtcacgaaaa

SEQ ID NO: 603640 - DNA, 137 bp, Homo sapiens
aaaatacaaaaattagtcaggcgtggtggcgcacgtctgtggtcccagctacctgtgtctgtccatacttttgcaggatatatccataggataaatgtcaaacagtggaatcattgtgtcaaagggtagtatacatt

SEQ ID NO: 603641 - DNA, 108 bp, Homo sapiens
ccccactaaatactaccgtatggcccaccataattacccccatactccttacactattcctcatcaccaaatatctcatcaacaaccgactaatcaccacccaacaat

SEQ ID NO: 603642 - DNA, 191 bp, Homo sapiens
tcactttatcttcttctatgatctaaccatattacttcagacctcatacatcgcttacttctttatcacgttccttctccaccataagagtaatgagatatccaataaactgagaatgtatcttcacaatctcctatattcttcgttcctccaagtactcagttaggtcttccgtaatacataaccgtctg

SEQ ID NO: 603643 - DNA, 370 bp, Homo sapiens
  misc_feature (79)..(80): n is a, c, g, or t
  misc_feature (284)..(284): n is a, c, g, or t
  misc_feature (324)..(324): n is a, c, g, or t
  misc_feature (355)..(355): n is a, c, g, or t
atttttattttttgagatggcgtttcaccctgtcacccaggctggagtgcagtcgcacaatcctggctcactgcacctnncgcctcccgggttgacgccattctcctggctccgcctcctgagtagctgggactacaggcccgtgcctctgcgcccagctaattttttgtattttttagtagagacggggtttcaccgtgttagccaggatggtttcgatctcctgacctcgtgatctgccctcctcggcctccctaagtgctgggattacaggcatgagctgncgcactctgcccaggttcttatttttaatagaaaagagancagggaaggaacacaggtcagtgtgaggaanggggtcatggtagac

SEQ ID NO: 603644 - DNA, 332 bp, Homo sapiens
ggatccccaagcagttatacagactcaaactgcctagggtggggaggtgggggtcctgcctctgccattgccagacccaccacctatctgggccttagtttagacatccgtaaaatgcagacagtagtttctatctcagagggtagtgatttaatgagcaagtgcatggtgaattgcttagcaaaatgtctggctcgtgctgagcagtttttggtcaaagtctgtatattgggctacgtacagatgatgttctagatattttatgatttaaccattaagaactaatttggcatatttgagcaaaagaaaagtgagtctgtattaactgcttg

SEQ ID NO: 603645 - DNA, 104 bp, Homo sapiens
tgatgcgaggcgactctaagatcccttcacaactgtacaagaagcacgtatctttaaatgtgtgtcttcacagtattaagtatagctattatatatggacctga

SEQ ID NO: 603646 - DNA, 133 bp, Homo sapiens
tatggtgtcatccccatctgtgaacatctgtggtcaccaggtgcttctgagcaatgtgaactcaggggccaggaaagcgaggccttgccctccgggagtccctttcccaaaggggcattactgggagatattt

SEQ ID NO: 603647 - DNA, 303 bp, Homo sapiens
ccggagtatttgggaccgggagacacagaagtacaagcgccaggcacaggctgaccgagtgaacctgcgggaaactgcgcggctactacaaccagagcgaggacgggtcttacaccttccagaggatgttttggcttcgaccttgggcccgacgggcgcctcctccgcgggaataccaggttcgcctacgacggcaaggatacatcgccttaacgacgatctgcgttctggaccgcgcgaaacgcgctcagatcaccagcgaagtggaggcgccctgagcgacagcgagagctactgaggcac

SEQ ID NO: 603648 - DNA, 267 bp, Homo sapiens
ttttttttaacccccccattccccggggggccccccccccctttttttttccccctttaaaaccccggggggcgttcccccccccggctttttttttgggggggggggggggttccttttttccccggggaccccctttgccccttgggccttttttggggccccttttaaccagttttttccaaaaaaccggggggggccggggcgggtttttccgggttttttttcccccccgggccccccccgggggcccccccgggggcccga

SEQ ID NO: 603649 - DNA, 1540 bp, Homo sapiens
  misc_feature (1092)..(1092): n is a, c, g, or t
tggaaaaagtctggggggccagggggtgggttgtgaaaccagtcttggggggggttcgaattcctttcctttttgtgggtcatagaatttaagtggtatatagcgggtttcttcgaagtggtggtggataggggtgggggcgcactccaatattagctcacctccgagggttaagtgggagggtttcttcatacatattaataggagacatattctcggcttctcgagaagcgcgagaagggtgttctttaaaaattctaatagaaaacactttatttaatatatttacgtggcgtggtgataagagagaaaatgagaatggagggccatacagagatgagaatagagagaaggtggtgtcacagtgtgtggggtgtgtgatgcgccacctcgcgagggggataagctcccgagagggataaaccgggtgcggggggggccattactcccgggagaaatagtgcggccccgagaagacaagcgcgtgtgctggctgggcgacaagaaaacaggtgtaagaatattacaacccgcgcgagactgggatatactatgcgcatagcagggggaaaagagggggggcatacgagggggggctccaagcgccaaggggggtcccaaaggggtgggttaaacgctcggcggagaaaaatcgacggggcggagaaccaaaatccccgagggcagcaattatacagaaaaacgccctctctcccaaatacgaggagaggtggggagccacaatattgaaaccaacgggcttcgcccctaaaattgcgggaacagaggcgggaccaacatcaaagaggggggcacccaggtgcgggggcgcctaaaaaccacaagcggtgtaaggatacagccggcgtgggtcaccgaggaggtcgaagaaacaagcggcaagaggtccccaaaagcggtcggcacgtggaaaggtaataggcgcgcgaaaatttttaaccaacaattgggggcacccaaggacgacagaggcggcccacacccaccataaacggggggggtgcaaaaacccagggcgcaacacagcgatcaagtctgaacagtctactccaagaagggggggccatccgnaagaaaagccgccaccgcgtgggtcgaggccgacgagaaactaccacgtcgttcaggccactcagatgtgtggggcgactactcccccggcggtatgacaaaaggacgaggtagtgaggcagcagaaagaacggcaactgcaccggcggcagtcaagccaacattaccagcgacagcagaaaagagcaacacacacaatagcagagtatctcacgcgaacaggaggacgaccaccactatcaaatgatagcacgcgggcagctgatgaccgccgggaagaaaaaaacacggagagcgaggtagccacaacttgagacgcaaactgtgtggcgcccccacacacgtgggtgcccccatcacagcgagcgcgagggatgaaccagaccggagcagcaacccacgacagggcgcttcgcccgtgtggtgatacaacccacacgccggcggc

SEQ ID NO: 603650 - DNA, 260 bp, Homo sapiens
acgagccaccatgcatggttaattttagagccactgtgcctggccaaggttttgaatatactaaaaaccactgtacattttaaaagggtgaattttattatatgtgaattatatatcaataaaaagcatgaatttttttttttttttttttttttttgagatggagagaatatccaagaacgatggtacaattaaatcatctaacacatgtgtcattagaatcccagaaagagaaaatggggcagaagaaatatttgaag

SEQ ID NO: 603651 - DNA, 375 bp, Homo sapiens
accatgaatttgtacactgtgccccagagattgaaaagttatttcagtctgttgcacagtgctgcatgggacagaagcaggctcagcaagtgatggaggggaccggtgccagttagatgaactgtgtatatcccttgcagatgcatcagccttggtccgctgaaccaagttcataaactgaagattcctcctgactttcctagccctttggttctcaggggtctgccccaccaactgctggggttgatctcctgtctatgtgggcaagttccaaagtttaaatgcattttttttttgactcttggccaaaatttagaagatgctgtgaatatcattttgaacttgtgtaaatatatgaaagagaaaaaaaaaaaa

SEQ ID NO: 603652 - DNA, 166 bp, Homo sapiens
tgtggcgctctgacggtcccctgtgaggttgtggcggttgggacggctgtggagacgacacgtgacgcacggtgctcttgaaccctgtgctcattatgcaattttatccgtaatttgcacttagagtttttacgccacctcttttgttgtccctgccacaactcta

SEQ ID NO: 603653 - DNA, 726 bp, Homo sapiens
gccgagcgggtgccgggtgccgggcgcatggccatcaccgcgcggcgcgcagggacaccgtgcgtaccggcctgctggcgcccggcaccggtgagtccccggccgagcccaggagcgcctctgacccgctgcgccgcgcggcctgccgccccgccccgccccagctggatcttgcgctccgacgtggccgctcgggggcggaccgcggaacccgaggccatgtcccatgaacagagttactggtgtcctggggacgacgtagtcctcacaacaagagaacgtggatatcccggggggggccaccaagaacacagatgcacgcctctaatcgtaacgacatcaccataaacataggggcaggcgataacacgagaagggaccacggaataagcaaggagagacaaagaaaaagagcaaacagagcaaaacagaaagcagaagacttgacgcccagcgcgacactgcgcggggcgcaagcgtgggaacagatgaacccaccaatggcgaatacccatgagagccagtgcggagactcgagcagaacggaagagagacagaagacccagatacaggtcgatggaagcggctgtgaaagaagacgcacaacaaagcgacaccgcgcggagcccaggatggagcaaagaacgcaccgtcggactgacactcctaagatcacgcggatccgagtcgcttgctgcccgcgcgacgctgccccctcatacgccc

SEQ ID NO: 603654 - DNA, 295 bp, Homo sapiens
tggtcctgggcaatggagtgatatctgctattttgaacacctgatggacatgtgaagaaccgagctaagtggggccttcttaagaatatccagtttgccctcctgaagcacttctgagctccggcagttctggaaacaacctcagactcatcacaaagtagacatatacacacacatatatgtatgtatatttttctcaccatattcttcaaggaggttgttgacaaatgttgccatgacctcgcagttttccaacaggaatcttgtaatagctattataaggaaatacctgaat

SEQ ID NO: 603655 - DNA, 193 bp, Homo sapiens
ttactggtttgcagcggtactggtttgcgttacatggtttgcagcgagggaatgctggaacattgtaatgggtttggagacatgtcatataagttatgctaaggtgagtggtaagaagttttatcatagcgaagtgtatacacttggtcgtagcggaatcgggggtatgctgttcgaattcataataacaggt

SEQ ID NO: 603656 - DNA, 1132 bp, Homo sapiens
  misc_feature (7)..(7): n is a, c, g, or t
  misc_feature (17)..(17): n is a, c, g, or t
  misc_feature (19)..(20): n is a, c, g, or t
  misc_feature (27)..(27): n is a, c, g, or t
  misc_feature (55)..(55): n is a, c, g, or t
  misc_feature (57)..(57): n is a, c, g, or t
  misc_feature (59)..(59): n is a, c, g, or t
  misc_feature (94)..(94): n is a, c, g, or t
  misc_feature (111)..(111): n is a, c, g, or t
  misc_feature (136)..(136): n is a, c, g, or t
  misc_feature (206)..(206): n is a, c, g, or t
  misc_feature (234)..(234): n is a, c, g, or t
  misc_feature (240)..(240): n is a, c, g, or t
  misc_feature (316)..(316): n is a, c, g, or t
  misc_feature (318)..(318): n is a, c, g, or t
  misc_feature (351)..(351): n is a, c, g, or t
  misc_feature (367)..(367): n is a, c, g, or t
  misc_feature (377)..(377): n is a, c, g, or t
  misc_feature (382)..(382): n is a, c, g, or t
  misc_feature (426)..(426): n is a, c, g, or t
cagtggnagtcgtctananncgcgtantaactctcttcacttcgtacgatgtacntntntgatgattgtcatccacgataagacctcgtgcgtngccgtccgtagtcgctntcgacacagacgacacgtattattngtatgtcgacgtagctctagccgacgacacagtcgcatgaacgacacgacgtcgacgatgccgatgaggntgcgtggtcggtgtgcattcgacgacanctaaancacgagaatgtgacgcgcacgacgacgacgagaacacatcgacatgatctcgtgccgtgtacggtaagcatacgtnancgctgagacgtcacgacgtggtcgcgacgacgncatatcatcactaganatgacgattncgcgncacgatacgcgacattagcacgacacgacgagtcacgacatcgncgcgggacgtgttgtgtgtcgacgcgacatgacactgcctactctagacacatacgagagagagacgtgcgttcactagcgtgacctacagactgagagatgcgcgggcgcgtgtggtagatagctgacagagacactatactttctgaacaactccaacggagagggggcgcgtgcgtgacactattacttattgtcatacatactagaaagaggcagggactgcgcgccacgcttatacacgtatcgtgtgctaacacgggaggctggtgcagaaacagcggcgagaataaattcttgtcatacacaccagagggggtcaaacacacttgactttctgaagaaaacgactgattgtctccccgcgatcggtgcacagggtcaatttgaggaggcagtctcctccgggggcgagtacgctacggcgggataacatacattttattccacaaccaaagacgagaagatgtcggtgcgcccccccctcctggcgggagagagagaacacaaacgtgtttctccaacacactcgcgcgcgcggaggcgatatcgcgctcatagttagggactacgtcagacgaacaccgacgaggtgccctcatgtgtggggatgaataagagagagagactctactcgcggtgctactgtgggagagacgaagaaacgtgcgcttcttcgtgcatacgctacgaggaggcggggccg

SEQ ID NO: 603657 - DNA, 675 bp, Homo sapiens
  misc_feature (629)..(629): n is a, c, g, or t
gagccggtccaggcctctggcgaacatggcgcttgtcccctggcaggtgctgcggatggcaatccttgctgtcttacttgctctatcctgtgtaattacaaggccatcgaaatgccctcacagcagacctacggagggagctggaaattcctgactgtgcattgatctggttatccaggctgtcttttttggcatctgtgtgctggactgagtctttccagtgcttctgacgtcgaggaagtgggaaccaggagcaggagaggcaggtcaagaagctcatcgtctctccgggactggatgtaagctgtgttggtctttcctgtgggggttacgttgtgagcagtgttgctggatcatttatgcgctagtgagcagatgagatgatataggccgaggctggtggataattttatcccagggtggctgaatcacggaatgcacacgacggttcgtgccctgttatagtaaatcgagatgaggacatcggaccagcagtatcccagcaggagcagggacattaccgccatggtgtaccttctctgttgggtagtatacttatggggtgtgctggggtgcatccgtgtaaatgggctgtgggggtgtacccttttcctgggagcacatttggnccaggagtccggaatcagtcttctttgggtgtacaacatcttaatg

SEQ ID NO: 603658 - DNA, 95 bp, Homo sapiens
ccagctttggattatcccgcatgcaagattccggtgatcacataatcctcttcttcatcctcatatgaaatgaagagagagagcttcctcattca

SEQ ID NO: 603659 - DNA, 473 bp, Homo sapiens
agtcagttattctgaataattttatttttgggagacagagtcttgttctattacccaggctgatgtgtagtggcacactcttggctcactgcaacctttgcctcctgggttcaagtgattctcctgcctcggcctcccgagcagctggaaccacagttgcttaccaccacaactggccacttttggtactttaagtagagactgggtctcaccatgttggccaggctggtcttgaactcctgacctcaggcgatctgcccgcctcgccctcccaaattactgggattgcaggcatgagctaccgtacctggccaacaatcccaactcttaaaacgcacacacaaggaaattcgtgttataacactgtatagaacatatagggcacttatcgtattcatggcaaaataagtgttggcaccataatcttttatattacctttcttatggatgccatggggcccggggggggaaat

SEQ ID NO: 603660 - DNA, 201 bp, Homo sapiens
  misc_feature (36)..(36): n is a, c, g, or t
  misc_feature (130)..(130): n is a, c, g, or t
  misc_feature (159)..(159): n is a, c, g, or t
  misc_feature (191)..(191): n is a, c, g, or t
cttggatcaagcttagcacgtcaaggccatgtttgntaccccatggtcaatgacgtggactcctctcacctccagcttctcagtttctgcctgggcaatggctaagggccaggggtgagggtgggtggtngaggtgggtgagagctttctggagatggngcagggcaggcccaatccccagctgggttctnggtcatttgt

SEQ ID NO: 603661 - DNA, 145 bp, Homo sapiens
tacgggctttaaatccgcttccgtctcaggtcgcgctgcgaatggaccgcagccatgtctgcgcatctgcaattggatagtcgtgcggaactgctccagttccctgatcatgatgaataagcatacctacagcacatgagcccaa

SEQ ID NO: 603662 - DNA, 239 bp, Homo sapiens
ccgtgagtaatcttggcgatgagtaatctggggcagacaggagatgctgagcccaggagtttgagacctgtcttggcaacgatgataagaccgtttctatacaaaaataaaactaaaaaataaaattagctgggcgtggtgacgtgtgcatgtggtcccagttgctcgggaggctgaggttggaggatttctggagcccaggagtttgaggtggtagtaagctaagatatggccactgt

SEQ ID NO: 603663 - DNA, 849 bp, Homo sapiens
ttgatctcagagttcaaggaaccagttcttcccaacaataaatacatctacttttgataaaaatctatcccactggactcttcacaccagagcttgatcgtctcagactggggatatgtttctgtaagcagtcctgagggcaattttacacatatccacagttccacagaattagaagatctcttttggtgggcagctggaacaggcttcacaccatatggttaaaatactgaattatgcttgtgactgatatacccagtctcaggaaagtgaagcctgatgttcttcaataaaacagaagatgatataattggagaagccacttggagaaattagcatttacagataaaagactggcatgtgacattgtctctcagcacctatttctgaatggaatggcaaacagggacaatatttcaccagctcttctttctgaattttcgaccacagaaattggacaaatccaaagttctcgtcgtgcattgtggaccagtgccattacagaaccaggagtaggttgctgcttgatctcaacttttgccaaaaagtgagatccatagttttacagccatactgaccgcgctggtcatgtcctttattcaactagttaatctaacttgtgactgcttagggtttaagaagaactttttgtacctaacaaaggttacctaaattcagccttagtcctaaatgccttcactgtcctcagtacaggaactctggcttctttgacacactttttccactgctttgacctgacagtatctgcacacatcttcggtcttgcgtgacaacaatcgtcggcccaatattcggttcacaagcctgttgcaagtacacagactcccg

SEQ ID NO: 603664 - DNA, 285 bp, Homo sapiens
tatgttgtggtcgtcctgcaggatccccggactagcacgcgctacaatcacgatttatactttgccactcctttcagtgaagcctgggctcgtgcttactggagttgcctcagcgcatggataacccataatgttccttcaattctttgcctttagagttggaactaaaacgcgatcggatggtacattgatcattaaagtgttggccttaaaaccctagagtacctgatggaggatacttcatcatcgtctgatgtgtctttgctaaatccagatcctctctgt

SEQ ID NO: 603665 - DNA, 284 bp, Homo sapiens
atggtagacctgcaggaaatccatccaagtctggaatgacgtaataccattccacaggtatagccagtggataggatgatagaatcaagaatcaaaaaatgccgcttataaccagctcagaagcaggtgagcactaagaacaactcagccttcatggagaagtggctgtttccaggtctgaagcaaagaatgacatgatgtacccaaaaccctctgtcttgctggaaagggagggctggaactcacaggtggggagggtcttaagtaatcaccaaagctctgtg

SEQ ID NO: 603666 - DNA, 1740 bp, Homo sapiens
  misc_feature (63)..(63): n is a, c, g, or t
  misc_feature (472)..(472): n is a, c, g, or t
  misc_feature (675)..(675): n is a, c, g, or t
  misc_feature (1218)..(1218): n is a, c, g, or t
tcgtcccccacaggccaggagagtgacggacagagggcgagaggaggggaggcggcgagccanaaaggtgcgagatgagtgattgctgtctggctgatgtagtagtctggttgttgagttatcatctgctgtttgttcgtagtttacgcctgctggtgatcgctgtagtcactcgtcgtgtgtgttgcttttcaccccggagctggttgtgtgtcgtacgatcagtatgctttcttccctgcaagctaccttctgtttacacgagggggcccccctgctcccggttgaataacgtgttgccccccaacaagggctgtgtagggagacgcaacagacagccggtgggtgttgctccccccatataggatgggcgcccttgttcccaccccccctgagagggtgcgcacaccaaaaagaggccgcctcttcgaaggagcacctctcccgcgggctgcccccgccacagactgtncgccgccaccagtgtttgagaactcgctcgccctcccgggtgcttcttgggcggagacaccgccccccccccgcgggggaaggtgtggagcacacccgcccgctgtcgtcgcttccccaaagcgtgccccgctacaacaggcgatgccccaagagaaggttggtgggggtctgtcccacaagaggccaccaaccgaagtgggncctcctgaaaggggagggggtggaccccccccaccacgatgtttttgcccgtgcgttgggggacccccgtcagggcccctcctttttttttgaggtctggaagtgcaggccccgacagattgtggttgagagagcgtctttttatggttccccccccccgggaccacattttagggcccacgagtcttcctgtttagtgttggaggcgccccctccacacggcaaagacacgcgggtttggttttggcgctgggtgctcccctcggggccctttctggggagaaggacacatttgggggggaaatttttttgggagattatcttctggtgggtgaaaaagtgggcccccaccagagttagagagagttgtcttctgagagtgcgctttgtgcgcttgtcctttgtcgtggtggcagagacacgactttctagaagccctgcggcacattgtcccccctcttgagggcccaccttgcgagttgtggagttttatagagagagaggtctcccccccacaaaggagaaccaccaccctcggttttntggagacccccactcgagaggccactttattgagaactgccacatgtgtgtcacatttccggaggagcccccctcatgctgcacacacatatatgagcttatatgtgtagagaatgttaatacaagctataatgtgtacatgggaaaaattcacttgttctctcacaattgcacattagcccaccactctttgaggtaattcacatgtggctcgggctaagagtttctgtgaattatgcaccacacaagatatatggagaccactttgccactcacgccaccacgagaagtttctgcttggacacgcacctgcacttatgaataattttcactactgcttttcctcacaattaaatttttgttgttaacatgttgaatgtcttcacattggaatgggtcataaatgttccactgaaacctttcacagtaacaccattgtatgttctttgtatcccttacccccaatatctcgctctggtcattttttttgcagcttcctataaaggttgtcttcctcatcca

SEQ ID NO: 603667 - DNA, 1065 bp, Homo sapiens
  misc_feature (785)..(785): n is a, c, g, or t
  misc_feature (1065)..(1065): n is a, c, g, or t
ggaaaaattcgggctaggtcgaaggctgggtgttgacctgtcgtgactctgacggtttctgagcgttggtctttggtcaccgcgctacccccttttgctcttggttctgccatgccgatctaccaggtaagagccctatcacgggggcggcgcgcctctccgtgtgtatgcttcccaccctgcatgtacccggctccccaacgtgcacgcgcaggaactacgcgcccagacgccgggcgctggcctactgtgcaggaatgagtctaatcctgtctctgcaatgactcgttgaggtcccgcgcaactatggagtatttctaacaagcgtctgtatgacgttgaatagctgcagttgatggcctctctcaatggatgattcgagtaatcgaccctaggagtgcacgcaccttgggtactggttaaaccgaaccaataaagttccagagcgcgaatgtaaggccacacggaacttatagaccgaccaaactggcacatgggaacttgcagattccaagtgcattgagtgaaaggtgaattatcggggcgtcgggctcgtagaacgacaatcgatgtagtctaccgacaaaccccggcacttaccctcatcccgctcatccctgtcttatgcatgcaccaacgacatgctcctgtggaggcagcttcaagggtaccttgtccacgggtgcatcacagcaaatcctcggatcaagagcgtagccttgaaaaaccttctacaagttgcgtttaggggaggaaaccaggaattaaagaaaaacaaggccccntgaccaacgaatctgatacagtcgtgggggaattcagccttgaatgtttctgggaaacgaattggtggccataataaacgccagattggaaaccgttctggctatcccagcaacaatgtaggccccactatcgcatacgcgacaggggacgaattgggaccggtccgagggacccctggttggcgccaaaacatattagggggcaacatgacccctttttcatcataaggggcgtgaataatgccaacacagtcaacagagagaggagaaacaccccttn

SEQ ID NO: 603668 - DNA, 428 bp, Homo sapiens
  misc_feature (31)..(31): n is a, c, g, or t
  misc_feature (85)..(85): n is a, c, g, or t
  misc_feature (87)..(89): n is a, c, g, or t
  misc_feature (151)..(151): n is a, c, g, or t
  misc_feature (165)..(165): n is a, c, g, or t
  misc_feature (172)..(172): n is a, c, g, or t
  misc_feature (189)..(189): n is a, c, g, or t
  misc_feature (213)..(214): n is a, c, g, or t
  misc_feature (232)..(232): n is a, c, g, or t
  misc_feature (250)..(250): n is a, c, g, or t
  misc_feature (253)..(253): n is a, c, g, or t
  misc_feature (260)..(260): n is a, c, g, or t
  misc_feature (284)..(284): n is a, c, g, or t
  misc_feature (289)..(289): n is a, c, g, or t
  misc_feature (320)..(320): n is a, c, g, or t
  misc_feature (328)..(328): n is a, c, g, or t
  misc_feature (347)..(347): n is a, c, g, or t
  misc_feature (364)..(365): n is a, c, g, or t
  misc_feature (367)..(367): n is a, c, g, or t
  misc_feature (412)..(412): n is a, c, g, or t
tgcaatgcatcacctgacacacaaggcaganagcatcaagctctctgtttatcccaattcaatgacaaccagaacttattttttntnnnatggggtctcgttctgtcgcccaggctggtgtgcagtggggcattcatggctcatcgcagcntccaactctcagtntcaagcnaccctcctacgtaagtntcctgagtagctggaactacaggnntgctccaccacacttggntcatttttaaaaaatttnttnttgaganaggttcttgctacattgcccaggnttgantgccgtggtgcattcacagctcaccgcaggntcaaactnttggtctcaagcgatcctnctgcctcagctttctgnntngttgggactacaggcatacaccaccatgtctggttcatttcttanactttttgtagagaag

SEQ ID NO: 603669 - DNA, 312 bp, Homo sapiens
tctaaggatctcttagtgtcactgtcattcataatgtataatgtacgtcaagtattatgtctataatggagtgtagcagcatgaagatgaacaacatgtggtacttccctaaaggcatcacacagaattacatgtaataaagggggcgtagagagagattccttatggtgtggggagtagaaaggctcatcatggaagtgacattttgagcttactcttaaggaattaatgttttgtgaaacagagacaaagggggcattttagataggcaaggaagctcaaaggcatgtgcttggagcatagtacttgggt

SEQ ID NO: 603670 - DNA, 179 bp, Homo sapiens
aatgtgaatgagatctgatttacgcttttgatatttagccttttacatcctcatgatcatttcttagatagtgcattggagatattttttcctgatgaattatatagtttatcatctgcctccagagtttataaaaaggttctgatagcaagaaacagttgttgcaaccaaaaacaacc

SEQ ID NO: 603671 - DNA, 292 bp, Homo sapiens
cggacctaatataagtattatagtagagttgaggtaatcaccatgtaaggtacaggctggtctacaaacccctgacctcaagtgatccaccccgcccccccttcggcctacccaaagcactgggattacagggatgagccacctcgctgggaccagaccttactttactatgacttggacacaagtctgtcctgctacagagctgctgaaagtggctctcctgttgtatgggcttgggtgtggtagtggtggccctataccctgtcccagctgccttcttcctgggcactga

SEQ ID NO: 603672 - DNA, 434 bp, Homo sapiens
taacggacagcaatagatacagaaaagcggtcctgcagagaacatagtgaatatcagcaaaagcacagcaacgcagagaaggaaatagccttcacttttctttaatctcagtgctcaggcctctttccactttttacctgaagcagatccatctatgacccctgcagccgatgctccagatctgcagatgagctctctcagggactgggtctgctgcaccatctccagtttcagagttcgtaaggcttttcagaatgtcttcctcctccttctccaggttttgcagctcattgctctcctcccagtccaggatgtctctcagttgctcaaaatctgacaagacgttggtatagtcatacagtatttgagtcttccaggaagctttctcttctctgatgtcagcttccaactcttcagcttcctgctgcttctgc

SEQ ID NO: 603673 - DNA, 606 bp, Homo sapiens
aaatgaatgggactcggtcttaattagtattgtcaccaacttcgttgagcgcgagagcaattatggtagtttaggtattgagctaggtacagttctactgatgtgagaacaggctgtagcaagctaggacacagctttaagctggactgccatgatgggtgtattcctcgttgttgaggtgcccgcatacactattttgataaactgtaatgccaccatcttgtactagagtcggctgatccgtattgtagataaactgtcgagggttaggacatgggtctgtactgcatcattatactgtgcctttccgttatgcttcaagagaatttaccatctaatggacagagaacatttgcaagtatggcgtccagtgacctaagcttcctttccacgatacatcgtacgtccatctgaacgtttgaatgcagaatcttgaaagtgcaatgcccagatactaaggtcaagaaagaacttaatgggaattaatctccacgccattagctttaccctgacatcaggatgtgccaaatccaatggactcttgtctattcttacgtgacttctgctggaaaatgcgaatgttgaccatcctgccacttggactct

SEQ ID NO: 603674 - DNA, 1163 bp, Homo sapiens
  misc_feature (188)..(188): n is a, c, g, or t
tccccaaaaccccgggggttttttgggggggggggggaaaaaaaacttctggggggggggggtggcgcccacaacacatgtgcgggagcacgagagacatgtctctgtgggaccaaatccgccctcaggtgccctcgtgggagaagagtgtggagccacacacagagtgagcagccctccgccatgtntgtgtgtcccccgagagagactgttgtaacgaggcggaagggcgtcccagagagcaccgtggggggttttacccccattgtttctctcgcgcggccctcgcggaggagtgtgtccccagcgcccctcggtttcacggggggtccgtggggcgcggcatacttgtgggggagagggggggggggccccccaaagcgcgttttctctgcgggatcccccggtgtgtgataaccccttctcgccacagagagtttcttttgccagaggaatatatattcaagaagacgcggtgtgtaaaaacaccccgctaatgctcccgatgtatgcgcgcccagctcctcccactgagcacatatgcgccccatactatgtgtggacaacacaggagcgaggtgttgtttcgccccacgccactctttttgtgagaaggccgcctctgcgaggagagcaacccccctctccgggggagagaaatctgtgggtgggttctctctgcggcgcgggagcaccccgcggacatactcttttttgtcccacccagtgtgtgttctccgcgcgcaccccgcgcccccgtgtgtgctcccccccacgctctgtgtgtcgagatgcttcgaggctgaagaccactgtccaccctctcttttatgtcttgcaggagacgtttgttgttgctgcgagacccctctgttttgagtgcgctccccccgaggaaaattcttttgttggcgccctctgcgtggtgcatccgctggggtcccccctcgtgtgtgggttgtcccgtcactcctccgcgacacgccgcttcgttgatcatcctcctctctcctcgggagggtatcgcgaggctcctttgctgctgaggcaccacatgcttctctggtgggtggtaatacgttgcgccccccccgcgccgggtagacatctcgctccccttttctgtgtggacaccgtcgcgggctcattatgttacccccccg

SEQ ID NO: 603675 - DNA, 181 bp, Homo sapiens
cctatctaatagcatcctctatcaacaatatactaccccggacaatagaaccataaccaatactaccaatcaatagtcgctcattactaatcatagtggctatcgcaataaaactaggaatagccccctttcacttctgagtcccagaggttacccaaggccacccctctgacatccggcc

SEQ ID NO: 603676 - DNA, 261 bp, Homo sapiens
cacaggtataactagccgtcgtctttcactgcccatccagctataccggggcaccctttctcatagtcgaccatggaataacatccacatgactatcctggctagccaattcaaactaggaacgcactctactaatcgcataataatcctcactcaagcgacctccatacttctagtcccactaatagctctcagatgacttctaacaaaccacgataacctcgcctattctacaccaaccccgccgttcagccgcatcag

SEQ ID NO: 603677 - DNA, 198 bp, Homo sapiens
aatatcgtcgtcctctactccccttacattaccaataaaaagtttaaaataaagtgtcagattgatttttacaagaacagcatacatatatcaaaaacctctctctttttttttttttttttttttatattttttttttttttttttttttttttttttttttattttttttttttttctttaaaaaaaaaattttaa

SEQ ID NO: 603678 - DNA, 113 bp, Homo sapiens
ccggctacggtgtggccgacctgatggcgcactggaacttcgccccgggcgccaccttcaacgtcggcgtgttcaacctgggcgacaagcgctacatcgattggtccaacgtc

SEQ ID NO: 603679 - DNA, 1107 bp, Homo sapiens
ggagacttagtctcactgcaacctccgcctctcaggttcaagagaatctcttgaacctgagaggcggaggttgcagtgagccaagatcacgccattgcactccagcctgggggacaagagtgagacttagtctcaaaaaaaaaaaaaaggaaaaaaaaccgggatttattcatatcccattcttggtttacaccggatgtccctgattatcagcctggtagctaatggggactggggatttctgggtctaaggtggggcctcccgggggatgggggtgggtacactggagcttctggagcctcattggtagagtagaaagggtactgggggccgtgtgttggtaagcctggttgaaatggctctgggtattcagtatggccttaataaacttcacccacaactggcaaaaaaaaaaaaaaaaaaaaagaagaaaaccaacaaagagcgggggggggcgacgacgagaagaattcaccccgcgagggggggcccagacgtttacgcgagatgaccgcgcgagtgtggtgtgggcaacgaaggcggccccctgagagacgacgcgtaaataaaagacaagacacacgggcccaggtattaacaacagcattcggatggcggaaaaaacagtgtcgtcgtggaaatcatctgggggagaggaaccgcaaacgtgtggggggagcacattgtgtggcacaaaccaaccgacagacaatgaaagccccagaggggaaaaacatcaacgtggagggctatggcggggtcaccaccagaaggaaataggccagcgcgatcgaaaattagcggcccaggcttagcatggcacacaattctaccgacggctgtagtaaaagcgccaaagagaacaacgccacagcacagacaacagaaccgaaaggcagactgcacgatgatcacaacaagcaaaccaagaagacaccaaacgaacaacagacacaccatcatgaacaaaacccagcaaagacaacaacaccacacacatcacgaaagcacacagaacaaccagaacagcgcaaaacaagcaagaacgcgcccaacatgacacaaccgcaacaaaaacaatactgacgccaaaagaacaaccaaga

SEQ ID NO: 603680 - DNA, 871 bp, Homo sapiens
taaaaaaagtaacccttttttccttgttggtttgggacaaaaaaaaggggaagggggggggctttggggggattagccaaaaaaaccaatccccttttcccgcggcgcggtacctccccctccgaactctcgccggggctacaaaccttaaggcgggggccgtggaagaacaaccagcagaggaaaccagccgggtgggggcagccagccacaagggcggtggcagaaccgcacacaaaggggacagagaagtgggaactcagccacagaagagaggggcctggaaccttttaacagacccaaggtgggacagggggtgtataacctgcgcgatactcacagagagaaaaccaaggggcacagagagactccccgtgtagtggagcccccgggtagagaatgcagacaaacagaaaggggtgggagtaccctgagtgtgcgacaacaagaggtgtgggggtggtcagcgcccaaatcttgtggcgcgacaacccaaagacacatcgggtgggcacacaaccttgttggtgggagaaacccccactaacccagaggaaaaggcagaaaaaattggcacgggaaggaccacccctcggggggagataaatcaaagggccacctacacgaggtgattgtgtctacaaattagctgcgagacaccatgtgttggtcaaaaacacacgcgtgtgctgtgtatagtagaacacaagcccccaaaggggataaaaaggggggcaaacaagtttgaagagaccagtgttcacacaaacgcggaggcttctcaggggcccccacatgtggtccaccaggaggtgaacaacagggcactaaaccacagaataacaggggcccgtaaaatcagggggaaacc

SEQ ID NO: 603681 - DNA, 1121 bp, Homo sapiens
ctggccagcgctccgaaaccttgtcctcgctgcgcgccggcccctcggagcccacagcccgggaaggaggccgccgcgggccgtggcttgcccgctctgccaagcggacccagcaacccggaaaggcggcggcgggcggagcctggagccggatcctgctcagaccgggcccctggccggccagagcctgctgggctatgtcgagagtgctgcggacaggggcctggactgatggcgtgagggagagccacgtacgactcgtggcacttgagtctcttgcgctctctgcggctcccgtacccgagtccacctctggctccaagcctccgggtccctcgtgacggctagcccccagccctgacacccatcctccgggacccgtcaaggaaccacaggagaagtgaagacgcggatgggtgagcgggctgagttccacctatggctcctcctcgctcacctacagccctgtccttgcttgggtgggcccccgtagtgctgagtgaccctggactccaacagccgtgccaattccacccgacgtgggggcgcttgagcccttcagcgagctggaagcacgtcacttacatctcctgaggacggaggacacgctggtccaccttggcagtgaatccatgaggccccagcggtgctgcatctgttgccctggctttgcatgtcccaggagggtcctggagcgtttcacacataaacatttacacagatcagcactccaatcttggctgtaccatctggaccaaaccgggggcagcacagttcggcgcaactgggtgcatgacagggtggggcccaggccaagggcaactaccatggaaccggtcaaatgggtgaccacgaagcgcgccgttcaagttgtttgggctcctgtgtcaagtgggacccaagcccagccttgttgcactttggtggcccccggctggcacgctgcattggaacatgggcggtcgccataaatgccacagtgctagtacgtaacgactcgacaagctgtctcagctgtggaaccataccagtattggtccaaatcgtgggcaacgggttctaggggatgttactcaccacgtttggcaaacccctttaagcgcaaggaagcaatggcgtct

SEQ ID NO: 603682 - DNA, 1099 bp, Homo sapiens
tacaaattcactgggtttaatggaataattggcgaaaatctcaagtgaaattcttgggcgagggtaaaagaggccccaatttaagccattgtgataaatatatagcccaattaagcagtgtttcacagaacagggccgtgggcgtgacaagccaccgtagagttatccccaatcaccagcggaaataccaacagaacaccacataaagaccagagagaaaaccaaccataaagcgggcccagagcaacccccaaataagcgggcgggacaaaatcaaggcacaggtgggcaaccacaggaacaacagcgcgctccgagggagaaactcaacaatagaggcacaaatacataacgccgcggtacacttacgttcacagtgggtgagcaaaataataatccctccacaagagcacaacaccactcacacacacacaaaccaaccacctcccacttgcgagaagcgcggggaacaatagagccgcggttccaacaaaaagcgggcaccccctatacgaacagcgggcgcccaaaaaacatacaacacgagaagaaaaagcgcgcaaaactaatatcgcacaaatctaagtctccaccgggcaaacttgcgacacaaagacaaacacaaacaccaagcacacccaagaaccgcacaagagacaacaaagacagaccgaacacacacgcgacccaagaaacaccacacacaagacacaggacagcagagaaacagcacaaaaaaaaaaatagcaaaacacaaagagtgggaacgaagaagaaagagaagccaacccaccgccacacgaaacgtacccatcacgccggcgcccaaaagaagaccaagcgaaacaaaaaactacaaaccacacacgaaccagcgacgtagacacgacaatgaggacaccaagaaacccacagcggagagaagacgccagcgggagggaggcggggcacggcgcgcacagagggcagactgccagcgggcagtggctgatgagggggcggaaggtgtcggggggtaccgcaagcgggggagccgcggcggcggggggcgggcaggaagcgaggtgcggagagggcgaggggagtacgggagaggggc

SEQ ID NO: 603683 - DNA, 324 bp, Homo sapiens
  misc_feature (72)..(72): n is a, c, g, or t
  misc_feature (84)..(85): n is a, c, g, or t
  misc_feature (132)..(132): n is a, c, g, or t
  misc_feature (138)..(138): n is a, c, g, or t
  misc_feature (143)..(143): n is a, c, g, or t
  misc_feature (179)..(179): n is a, c, g, or t
  misc_feature (210)..(210): n is a, c, g, or t
  misc_feature (255)..(255): n is a, c, g, or t
  misc_feature (288)..(288): n is a, c, g, or t
gtccccggaaattcggccattatggccgggattcaggaaaaatttaggaagggattgctccatggggataangttcctttcttnngcaaaattagggaaaggaggggtagttttccagaggatgctaagggnttaganggccntatcgaagtccccaaaggcttaagggaccacagttntttggtttttgggaaaactgaggcatccgangtaaagccatgctaagggggttttaaaattccacataaaaggtancactggttcctggttaatccagggaccctaatngaaatttaaaattaaggctcctgaattaatggccgc

SEQ ID NO: 603684 - DNA, 104 bp, Homo sapiens
tcaagcttctaacgatgtacggggacatgatcttgccactgcactctagcttggtggacagagcaagaccttgaaaaaacaaaaaaaagggaaagagaggaaaa

SEQ ID NO: 603685 - DNA, 292 bp, Homo sapiens
tacacctgaggggaaatctatcccggcaagcacagagtatatatatacggcaacaatacatacatctgagttacacttgtacaaataactgtaataacccgtatgtgtttcatttaaacagcatcaggtttaggacatatgatttctttctaacaatcagtttaattgcaactgcacatctgtgggtagagcattcagtgacagagaaacctaggtatctatgccagagaaatgtgacattatgtattaagctttctctctgagaggaggacaagagaggtatagtctttgg

SEQ ID NO: 603686 - DNA, 1052 bp, Homo sapiens
gggcaacccagctccggtgtccattccatgctgtggaggctcatgttgtttcgctctttctactgcttacatcttcgggtccacactgctttatatgagctgtaacactcaccctgaaggtttgcaacttgactcctgaagccagcaagaccacgagccccagggaggaacgaacaactccagacgcgctgccttaagagctgtcaacatcaccgagaaaggtctgcagcttcactcctgcagcccagcgcaggccacgaacccaccagcacaggacagcacacactctggaacacatccgaacatcagcaaggaacaaactccaagacgtgccaccttcacgagctgtatcaacactcacaccgcgaggggtccgcggacttcaatttttgaagtccagtgagaccaagaaaccaaccaattcggggccacaaataccacctctttcatgccaggagaagcctccttaaaaacatacggtgcattcacccagcagcacattgggtcaacaatctccttgcaacagttgagccagggcgcagctgtaggaagatttcctcctatcctcgcaacatgcacatcttctgatatcagcaggtggttaccgggccacgcaaggacaaccagaaggagaaaccaagaacaacatcacggcactacaattccatcaccgacctcaacaacaagcactggtatccatacagttatgaccggcactcaggcggcctcagacgggagaaacgggatgccgagacaaggacgcccttgtgccccctccccctgggcacagcgcccctccacgctgacaccgtggccacacaaaggcacaccaaacatggaaaacgaccggtgccaactcacgaggagtgccaggacacacgaggctcgaacggcaccggggaacggcaagctcccaaccgacaggaccaaagagaaaaacacgtcgaggcgagaccagccgcacggagaaaccacgtgaaggagcgaacacgcgggcaccccatactgcggcgccgccggggcagcacaacagaacagtcgttacagccgag

SEQ ID NO: 603687 - DNA, 297 bp, Homo sapiens
  misc_feature (45)..(45): n is a, c, g, or t
  misc_feature (57)..(58): n is a, c, g, or t
  misc_feature (105)..(105): n is a, c, g, or t
  misc_feature (111)..(111): n is a, c, g, or t
  misc_feature (116)..(116): n is a, c, g, or t
  misc_feature (152)..(152): n is a, c, g, or t
  misc_feature (183)..(183): n is a, c, g, or t
  misc_feature (228)..(228): n is a, c, g, or t
  misc_feature (261)..(261): n is a, c, g, or t
gtccccggaaattcggccattatggccgggctccatggggataangttcctttcttnngcaaaattagggaaaggaggggtagttttccagaggatgctaagggnttaganggccntatcgaagtccccaaaggcttaagggaccacagttntttggtttttgggaaaactgaggcatccgangtaaagccatgctaagggggttttaaaattccacataaaaggtancactggttcctggttaatccagggaccctaatngaaatttaaaattaaggctcctgaattaatggccgc

SEQ ID NO: 603688 - DNA, 1099 bp, Homo sapiens
  misc_feature (78)..(78): n is a, c, g, or t
  misc_feature (80)..(80): n is a, c, g, or t
  misc_feature (898)..(899): n is a, c, g, or t
  misc_feature (902)..(902): n is a, c, g, or t
  misc_feature (905)..(905): n is a, c, g, or t
  misc_feature (908)..(908): n is a, c, g, or t
  misc_feature (912)..(912): n is a, c, g, or t
  misc_feature (954)..(954): n is a, c, g, or t
gggcgcgcggcggcggagggcgtgcgaggctgttgtgctcccggctctcgtgtttcccctcctgagcgggtggaggangnccaagcggtgctgggcgcgctcccccttcctttccctccggcgtcctctcccggccctctcgcgctgctctgtctctccgacgcaagattgtcccggcccggctttggagaccgagagtctcacgtgtcagcccaggctgcaagctgcagctggtgccgatcaacgcgtcacgtgcaaccatcgtgtctcccgagattcaacgcaattctccaacctcagccatccacaaggtagtctggaattacacgatcatggcatcgtggacatgccagaatacattgcagtctcgagctacgacatagaatgcccaaaacagcaagcttggacaagcagccagaggacacatggtacatgagccaaatagcgcgtagctgtctaatacgtctgcctgtacgttatataccctgcgaacatggtctggtatggacactagaatgcgcgagacctcataagatgctttcagaggcagcaacttatgagatgacaacgcatcgcgtaaggactccgacgttccgtaccatgaacttagctgattggttcacgtgcataagggttagtttgacagtgtcgaatgtgcatgacacacttgtgacctctgtcatactgtgcttcagacgcttacggtaagcatactcctgcagctgcgttcttctaacgaaagctgttagatcagcggtacaataacgggcgctacagaaagcgacgtcacttgaatagtgctgtgtcccctcttgggcttcatgcaaagacaattctgtgtaaatgtacagatgactctgatttggacatatgcacatcagtccatccttgttataannaanttntanaatngaattatattgatgtcacattgtgtaaataactcattaatancatcgaacttcgacttacgaccatcaccggacacaacaaaacaggggggccagccagccaaagacacaccacgagaccaccgcggaacgcacacgcccaacggccaccagcacgcggacggcagcacacgcacacaccaaaacgc

SEQ ID NO: 603689 - DNA, 883 bp, Homo sapiens
  misc_feature (78)..(78): n is a, c, g, or t
  misc_feature (80)..(80): n is a, c, g, or t
  misc_feature (682)..(683): n is a, c, g, or t
  misc_feature (686)..(686): n is a, c, g, or t
  misc_feature (689)..(689): n is a, c, g, or t
  misc_feature (692)..(692): n is a, c, g, or t
  misc_feature (696)..(696): n is a, c, g, or t
  misc_feature (738)..(738): n is a, c, g, or t
gggcgcgcggcggcggagggcgtgcgaggctgttgtgctcccggctctcgtgtttcccctcctgagcgggtggaggangnccaagcggtgctgggcgcgctcccccttcctttccctccggcgtcctctcccggccctctcgcgcatgcacagtgtcgtcgtcctgagcgaccacagcacttgtaccctggcccctggcatcatgtgctccgtgtgaccagccagaacaattccagtctccagccagaacaaatgcccacaaaagccacagctggcacagaaagcaagacaacaaggacatgaccaaaaggctgctgccaaagctgccttaatatatacctgcactgtctgtaggacacaaatgccagaccctaagaccttcaagcagcactttgagagcaagcatcctaagactccacttcctccagaattagctgatgttcaggcataaggttgtctacaggtgaattcatgacacctttgactcttctactgtctcagaccttaggtaacatacctgcagctgcttttctaacaaactgttgatcagcaacaataaaggggctacagaaacactcatttctatgctgtccctcttgggcttcatgcaaagacaattctgtgtaaatgtacagatgactctgatttggacatatgcacatcagtccatccttgttataannaanttntanaatngaattatattgatgtcacattgtgtaaataactcattaatancatcgaacttcgacttacgaccatcaccggacacaacaaaacaggggggccagccagccaaagacacaccacgagaccaccgcggaacgcacacgcccaacggccaccagcacgcggacggcagcacacgcacacaccaaaacgc

SEQ ID NO: 603690 - DNA, 142 bp, Homo sapiens
ctagaggatcacgagaggtgcgacactgggaaggtgaggaatgtcgcgttggtcaggtggaggagggaggcgcacgccaccgggctgggcaggtgcacgctagtgcccaggcctgggcccgtgagagcaggaacgattgcgg

SEQ ID NO: 603691 - DNA, 247 bp, Homo sapiens
cggcctgatgtagtctgtgggatccctgaactctcagacctggagaacctcaagtatgtatacgatgccctggaggcctcaggatacagcggccaatgccactacctacttcactaggttgattgagtccagcctgggcagtgtagcacaaagctcaattaattcatccataatctggctcagatgaagttcacgggctcaaatgcccggctgcccctctccttagcctcccgagcacacgcaactg

SEQ ID NO: 603692 - DNA, 411 bp, Homo sapiens
  misc_feature (131)..(131): n is a, c, g, or t
  misc_feature (142)..(142): n is a, c, g, or t
  misc_feature (178)..(178): n is a, c, g, or t
  misc_feature (203)..(203): n is a, c, g, or t
  misc_feature (207)..(207): n is a, c, g, or t
  misc_feature (216)..(216): n is a, c, g, or t
  misc_feature (231)..(231): n is a, c, g, or t
  misc_feature (235)..(235): n is a, c, g, or t
  misc_feature (289)..(289): n is a, c, g, or t
  misc_feature (344)..(344): n is a, c, g, or t
  misc_feature (404)..(404): n is a, c, g, or t
tccaagccttgtggtggaatatggagaggaaagaggccatttagagagattggcgctgggggtggagctctccagagctgagccctttgttcctctcaggccctctgagcagccttgacggggatattacnatattaggctnggtgcagtggctcatgcctgtgatcccagcactttnggaggccaagggtgtatcacttgangccnggagttcgngagcagcctgggcancatngcgtctgtctctacaaaaaaatcttaattacccaggtgttggcgctctcctgtngtcccagctactcaggaggctgaggcaggaggatcacttgagtccctgaggtcangggtacagtcagcagtgatcttgccactgcactccagcccgggtgacagagtgagatccngtataaa

SEQ ID NO: 603693 - DNA, 343 bp, Homo sapiens
  misc_feature (227)..(227): n is a, c, g, or t
acacgcactctgtggatacatgtgagggctagaacactgatgtgtaggcactattatgtatatgttatgaacacaggatgtagccaaactaatgcagttgtgctcagatgtcttcctatcagaacagagtcacatcagaatttgaatgcttaagtgtgacagcttattcagatatagaaaaacttttggtatgggccaaagaaaacatatccttaaggggatatggnccctaggtcctcatattccttttctgtctgagcagttaaaaaaagcattaagtgaattccacaaattctttggtatacctagagataaacagattatcatgttaactgtatgatga

SEQ ID NO: 603694 - DNA, 117 bp, Homo sapiens
tctttacgctgcgatggcgctaatcggcgcccttttcttttcatagaacaggtagaagtcagcgatcaaccggcggaaatcgtcggtgtagctgccgtcggcctgcttgatcgccag

SEQ ID NO: 603695 - DNA, 707 bp, Homo sapiens
gtgatgctgggaaatgacacatgtgagatgtctaacagccttgggctgagagaggaaacgtgcgcctcagtgtgatccccactccaatgctgcgacatccctcgtcagtattgacatgccccagtgcgttatgacggagtgactggatgggcgcacgtgtgtggtgtcagtgagtctagtaggccgtggtttgcatgtgtaggtgggctagcagtcatctcgtagtgggtgggcactcatattaccacagaaaggcggaggaatgaagaatggcccgtttgtgcacaagcatcgatgattgaagaccaagattgcacatcgcagaatataccttagtctatttggtcatcttccagggaacgttgcgctgacagggcaaggagggaggtagcgttagtctctcagaaatgttggagaagccaccgactcgagaattgtcatcagtcttcagggtgctggagatgatgtcattaccacaaacattggcagctcgtggggaccatgctcatatccgactaagtagctagtgcggctgcggtggaaggcttgacacagatcggttcctttctaggccggtcaggggggtccaacggggcccctagtgtgatctcgaacgggaaaagtgtgtaatgggcctcatgatccgttgttgaaacaatatcataccaggttagtgggtccgtgacccaggaactggttttagggga

SEQ ID NO: 603696 - DNA, 250 bp, Homo sapiens
aggggggggaaacccacttgaacccaggaggcagaggttgcagggagccaaaatcacgacagagcaagactgccctcaagcctgggagacagagcaaaactttatttaaaacaacaacaacagcaccatcaacaaaaacccccacagaattgaacaacacaaatgggggcccctaaggaaaactatggactttggttaataaaaatttatcaatatggattcatcattaataacaaatacagcacactga

SEQ ID NO: 603697 - DNA, 138 bp, Homo sapiens
cccctggatgccccgagctgctctctacagacattgaagaaaatattaaaatctttgataaaaggagaagttgaatttatcaggtgtgcctgtcccagtagttttgcagacttgtgattcctgtccaacatttgttca

SEQ ID NO: 603698 - DNA, 122 bp, Homo sapiens
  misc_feature (112)..(112): n is a, c, g, or t
tgatctagaggatccttaaaaatagcgagggttcgggtcgatgacggatgttacaccaactctcccgggcgactcgtgctctggtccacagggcccgcagttgtcgaccagncaatccttgg

SEQ ID NO: 603699 - DNA, 107 bp, Homo sapiens
acggccgtgtattactgtgcgagagtagtcggattacgatattttgactggtctataggaggtgcttttgatatctggggccaagggacaatggtcaccgtctcttc

SEQ ID NO: 603700 - DNA, 691 bp, Homo sapiens
  misc_feature (21)..(21): n is a, c, g, or t
  misc_feature (164)..(164): n is a, c, g, or t
  misc_feature (278)..(278): n is a, c, g, or t
  misc_feature (296)..(296): n is a, c, g, or t
  misc_feature (319)..(319): n is a, c, g, or t
  misc_feature (327)..(327): n is a, c, g, or t
  misc_feature (335)..(335): n is a, c, g, or t
  misc_feature (351)..(351): n is a, c, g, or t
  misc_feature (354)..(355): n is a, c, g, or t
  misc_feature (357)..(357): n is a, c, g, or t
  misc_feature (361)..(361): n is a, c, g, or t
  misc_feature (367)..(368): n is a, c, g, or t
  misc_feature (391)..(391): n is a, c, g, or t
  misc_feature (428)..(428): n is a, c, g, or t
  misc_feature (453)..(453): n is a, c, g, or t
  misc_feature (495)..(495): n is a, c, g, or t
  misc_feature (512)..(512): n is a, c, g, or t
  misc_feature (523)..(523): n is a, c, g, or t
  misc_feature (592)..(592): n is a, c, g, or t
  misc_feature (691)..(691): n is a, c, g, or t
atcaggacatcaacagtagcncaccatggtctagctctatactgaaagccatctagattctagcgcagctttgattctacacatgcacacaatatgctctctagcacaacaaatgaggttatttgcagctcgtcctcgtcagctacctcctggcgaaaggactntgcatctccctgacgttgaaatccttgtaaaactgtcacatttaatagtcggaacatgtcaagcccctcgcacaccagcagtggctctttccgagaataaggaaacaaagagcngcacccctgaacttgtanagacgcacataaaacgctgtgcngtcagccnagagttcncttactgatgtagtanganncnagtnggggannttcataagctacttaggatttcnagtgacatattttctattctcgcgtcatttcctgcgnagtttcttggagtttcacacacccnggcttcctggctacagacatctgagttcacaaagcatatttnacctttaacataatganaatgatgtatntggcatgaagagtttactcaattaagtcaagagttttaaagtcttctctgatcagaatttgctatctgntcagagcaggccacccaatcacagcaggtgcttggaggggagtggaatctcagtagagttgatgactcaccaagtgtaaatgggaaaaagcaacacagn

SEQ ID NO: 603701 - DNA, 350 bp, Homo sapiens
ttggggctcgattcacggtcggggcttctttctcccaaccagacagtctcctcctcagcggtggtgcctgtaaaggaggtgtgaattctgggggttctgcagcttagtcagccggtggtgtcgggagttcttccggtgggccagccagtgaggcctggggtcttgcaactcaaccagacggtgggcaccaacattcggcctgtgaatcagccagtgagaccgggtgcttcgcagaacaccaccttcctgacatcaggctctattctcagacagttcatccctacagggaaccaagtgactgggattccaacctacaggcgggcccccgtgtctgtcactctgccggttcc

SEQ ID NO: 603702 - DNA, 172 bp, Homo sapiens
agtcaaaggcaggagaaggataaagagacatctgcattttttcttctgtcatggggcagatagtaaatattttcagttttgtggcccacatagtctctgtcacatttacttgattcttcagttgtggcatttgcagcagctatggacaatacttaacttagtaggggtgcct

SEQ ID NO: 603703 - DNA, 622 bp, Homo sapiens
aacattgaaggattctctgtgttggctgtaacttttgcgcccctcttcctacctaaagatactctttctatcccactaatattttttgtgaatatagatatccattgtaatctgaagtatcaaaaattacctagaaaaaagctttgaggaactcagactctctctctcacacacacacagacaaaacaaaaggtgatagatgataggtgatctccgtccaaaggatctacaaacccatcaagcagataaatacttcaagagttaaaaaaaattactaaatggaaaagtcagctctcaaagggacagttccccgagcccaacccctttctagcttcacatccttccaggaagatttcatgggtggtttagctctagagatgcacggagaagcttctggagttgaagagaagtggttgtgcccctgagtaaattacaattccaggtgcctacatagtgttaaaaaaaaaaaaatctgaaaagagcttgcctggaccaaatttgaagccattcagagctgaattctaacctatgaccttgatcaaattacctcttttagccttagttttctcactgcaaaatgggacaaatgataccggctgtaataaactatgcaagaatgttc

SEQ ID NO: 603704 - DNA, 269 bp, Homo sapiens
gtgctgcgtcgctctagaggctcccggtgctacgcttggtgtcttgcacataggcacactcggtaacctggaccaggctggtggtgacttatcaccaattttccctggcaagggtaggtttaaatacctggccatccgggagagaaggaaccaggctcagaaaagggaagtcactggccagggtcatgtagctgataagtgcgggaatcaggatttccactcaggcctgcctaccgggggggctgacacccttcccagttggctcggag

SEQ ID NO: 603705 - DNA, 135 bp, Homo sapiens
gagaaaaatagaccaacctattccgagcagaattccgggtcttgctgggtgccaaccccagcctaagcggaatgagcagaggatcgagctcttccagatccttcggccagatgagcacatttgcaaactagcgct

SEQ ID NO: 603706 - DNA, 387 bp, Homo sapiens
tgaacctctgggcaggccgatgtaatcaacataaatataatgactcagggatagcttggagaattaccccttgtccaaagatcattctgggcccgaaattgtgtgctgtgctacttgctctgcagtgtaacctagcataaggaatatagattccttgggggtctaaagggtaaagtgtattcattttctccactaactgacccaatgtgagcactgcttccctgtgggccgaaggacagattgctagaaagggacagcattagaggtgcagagcatcatggtgcagctcacagcagtagctccaccacactctgcagcagagctaatggagggatgatggccggcgagatgcaaaagccggggttggaatcttacagggactccaca

SEQ ID NO: 603707 - DNA, 333 bp, Homo sapiens
ttttttgagatagggtctcgctctgtctcccaggctggagtgccgtggtgcaatcatggctcactgcagcctggatctcttgagctcaagtgatcctcccacctcagcctcccaagtagctgggactacaggtgtgtgtgtccacggctaactaatgtttttaaaatttttttgcagagacaggatctcactgtgttgtccaggctggtctcgaactcctgggctaagtgatcctctggccttggcttttcaaagtgctgggattacaggtgtgagcactgcacctggcccccttcctcccctcatccctaagctttgtacctctccagggac

SEQ ID NO: 603708 - DNA, 404 bp, Homo sapiens
  misc_feature (95)..(95): n is a, c, g, or t
  misc_feature (231)..(231): n is a, c, g, or t
  misc_feature (301)..(302): n is a, c, g, or t
  misc_feature (364)..(364): n is a, c, g, or t
  misc_feature (396)..(396): n is a, c, g, or t
tggatctatataggatgtgagcaggacttgacctatgtcttcttatgtctgcgcatgtaacactgtatctgtaagtgtgtaggttcatgtagttnggttcatatgtatgtatgtatgtaagtgcctatgtaaatggcgaacgcatttcgcctagacctgtattcctttttttttttcgagaagaaagactttaagaaggtttgagtaaaaataaacttaggcgagcgcggnggtgccctgaatccagactttggaggcaggcggcggacacaggcaggagacaagactctggtaacatggnnaacccgcttcttcaacttaccggcgtggtggaggccctgagcccagtctcgggaggtaggangagaatggcgtgcctgggaggcggagcttgangagctgag

SEQ ID NO: 603709 - DNA, 144 bp, Homo sapiens
ggaatcggcttcggtcgtgggacctgccctcagtgaggagacagggcagtgcctttcaagtgcatgcagctcactgatttcatcctcagtttccgctcggtgcccaccacaagtatgtccgacaagcctggcagaaggcagact

SEQ ID NO: 603710 - DNA, 1116 bp, Homo sapiens
  misc_feature (870)..(870): n is a, c, g, or t
acacgatcatgcgcaccgctgttactgttgtgtttgtgctcccgttgtggccctccacaggccctgtgtgtggccccctttgttgtgcaccggcaggggccgcgggggtcgtgtgtgaccccggtctagttgtgtccgcccccgctatgtgggttgtggggccgacaattccactgttgatttgggacaatattgggcccataaccatcctcgtggccgaggcgaaagtttccctaagctcgaggtgcccccctgcggataagatgtcctctgtgggggggtacaaacgaggtgtggatccatgcttgctataaatttcttatgcagcagctgaggttagcacacgaaagggtttttagagacctacccacacaaatccccctgtggtttcaatgggggtgggacactccccgtttgacccgcacgaaacacacgcgaggtcgcagaaatttctaacgccccgctagggcccgcggctcgaggaaacttccggcttcagcccattgtgtttcaaccccccaagggcttctctgggggaggtacatctctacttgcgcaacggacaaaaccgcgccaaagcgtcgtgtggcccgctggtggcgtcttccaagcccacactggcgcggcccaccaaagcacacaggtggagcaactgggagagaaataattccccaccccctgggagttgacagcaacatttctattctccgatttgcgtatgcgaccatccgagggagaccacgaggtggtccttgttgtgaggagagcctctatcttcatcgcggagatctcgccacagagttttgcctcgcctgagatgccacgtgtgagaagtcatggaagacggagatgcatgatcacgagaacganaatgtgttcaaactgaacgaggagaatggagaaagtacgcgcatgccctgaaggctggaactccacgagtctgcacaccgcccggccacgctgggaattctgagctgcaacgctggctttttagtgaattcttgcgttttgttacacaaattggaagcccgggacacgatcatagatttttgattttatgtaaaattttgcctaaaacattaaaccaagtcacttttcctgacaaaaaaaaacaaa

SEQ ID NO: 603711 - DNA, 142 bp, Homo sapiens
caactgtatgtgtagacggacttgaatgcccttttgaaattctcgactttctttgaactgtggtgatatcataagagaggaagagtgtgactctattcttatatgtatcagtgactatgccattacatgaacacaaggcact

SEQ ID NO: 603712 - DNA, 424 bp, Homo sapiens
  misc_feature (246)..(246): n is a, c, g, or t
  misc_feature (388)..(388): n is a, c, g, or t
  misc_feature (402)..(402): n is a, c, g, or t
gtaactgcctctaccagcaggtgatgagcactaatccccagagaagagctgccggccagggtgtgctgtgctgctgcgaaggagagaattgaggttgctgggacctggctggggagcaggaggggatgaggaaggaaagcaggagaagccagaaaggagggttcacaggagccagagctgaggcgggaggagtcgggtgctctgcccgagagctgtgtgtacgtccattttcaggttcttccaggnactcagtgacacctgggtttgtccagttccaaagcggaaagttcagattcaggggctgctaccctagcaaactgttttccccagcaggggaatgctcctggctccgcaacgttcagttgtactgagggcagaattgtggtancctggcgctcttcnccagctgaggaccatcgttgga

SEQ ID NO: 603713 - DNA, 217 bp, Homo sapiens
aaactaataggctggggtttttgttttgttttggggttttgttttgtttggttttcccttttagttactgaacccttccaaggttttgtaaagagatccctttttttgtcccaaaaatagccaaaagaatgctgtcaatattgggggcctgtaatgtgaatttatgttggggaaaacaattttttgttcccctttttaaaaccttagggtcctttta

SEQ ID NO: 603714 - DNA, 413 bp, Homo sapiens
ccttaagatactatacaattggaagtctctgtacgagctaagactcttgccgtaataagccatcattgcaatgtgcaagacagctgcttgccggccgcctcgaacattggcccacagcccaatgtatccatccaatacccgtgttccagagtcttaagcttgtgcctaaggtaatcccaaccttccttatgagcatttagaacattggtaagatatttcccccagtagcgctttttctggattagctacggtgtcattctaatgttctgtcaagttcttaaaatcttcacttggttgcaaccatagttcacttccctgttccatttatttaattccaaaggtgagagtggagtgaaagtcttccatatctataccttgtgcacagtgaatgggaactgtttggtttagggatc

SEQ ID NO: 603715 - DNA, 975 bp, Homo sapiens
  misc_feature (276)..(276): n is a, c, g, or t
  misc_feature (406)..(406): n is a, c, g, or t
ccacgcgtccgctccacacactttcctcttttcccgagtatggtgcgttggggtgtggaagtaccaagtaagctacaagcctcctagttctggatgagttgggaagggcatcatgacctcttgtgcctctcctgtgattctcaatgctacccgccatacagcactggtgttggtcgccagctcgccttcacctcgcttccaagacgtcccaatgatctaagtgctcaaggttctgcgacggacactgatcacacattccctcatggttactcgatngcttagctagcgattgtgatggagcagcggcattgttggcctaaccaaaggccgtcgttccctaatcgcgccgtgtgggacgcaagtgccttcgtagtatttagttgtatctgcgatgttcgttctgacngtgttcccacctagcgatggcgctatgtagcttgccgcaccatcctgccttcacctcgaaaacccatgcacgacctcccattcgtgccatcgattgccagatgactaccttagtgcgtgcgatgcgctacacggagtagatggacactggggacctgtgctgttgcgactcgctgcgatagcgatggcgcgcggcgattgtgatcaaaggcgttgtacaacaatccaagattatcaaaggtccctatggaacggatggctcctgatactggtctctcagaggtgaccttgacacagcagttgcatccagaacttcccagccccgatgataaccaaatgaagctaaccgcgtgagaccccttgcccgatttagcataactaaggcgcctcagagcccaaggcgagcccacgcttttgaggcttgagcctaacaaggaaccaagtgtgattcaacacttggcgattttcacgtccacaggaagctccgagagcacggttttgaggaaccaggtcccccttggagcaggtccagaacgggcgcctcatgttgcggttagctggagtacttcc

SEQ ID NO: 603716 - DNA, 935 bp, Homo sapiens
acgcgctgctttcaatgccctttcttgttctaccttcatcggtcgatctaaaagtgctgaaaccatgtgaataaaatacaggtggacacctgcgcaattgtgtgtgcccaccgtgcccctgaagcatggccatgcagctgtgcatggctgacagcgccaaccaacctgacattaactgaaatcgcgcagcatgcactcctggtcatgggaggcaagaacattacctgacgtcaattgagaggcaatgaagagaatggagctacaattaatgagagcagaccagaaacctcaactaaactggagatggaaacagcaaattgaaccagagagacacaaacagaagaaaagacaagagaccaccacaaaaaccaacaagaagcagaagaaaacagacaagagagacacaacaacacaaaagaagagatagcaagaaaacacaataaacaagacaacaagacagacaaacaaagacaaataagcgaaaacacacagagaaaaaagcaagagacaggagactttggacatacacagtagaatagaaaagagaaccagagcaaaaacatgaggacacacaagaggggaagaagccaattgcaacaacgaaaattgaggaccaacgaatcaaagagaaatacaggacaagagccccacgcaccaccaaatcaaaaaggacagcacctagtaagaagagacaagacagcacaggacaacccaggagaaaaggagcgaacaacagcaccccaacagaaggacacaagggcaagagacagctaccaagacaccgaaaaaccagtcagaggcactgcgcaacacacagcatcagtacaaaccgaagagcaccgcaagcacaaacgccaaggcccaggacgcccacagggtagacaacagaccagagggcgcaaccaacaacccgagccagccccacggacacagat

SEQ ID NO: 603717 - DNA, 103 bp, Homo sapiens
tcctgagctagtattgtgcctattgccatactagtctttgccgcctgcgaacagtggtgggcctagccctactagtctcaatctccaacacatattgcctagt

SEQ ID NO: 603718 - DNA, 357 bp, Homo sapiens
  misc_feature (153)..(154): n is a, c, g, or t
catgttcagtaggttgtctaaaaaataaaaatgcatttaaactccttttaagaatgccctttagttaatgcatatttaaactaaaattgatcctggaggttccggagaagctagagcctgattgtaggctactacttcatcaattaacttccnnacatggagactactttctgggactggaatataaaaaagaatccaaggttctgattttgagttgccataaaaggaaaggccctggttataacagtgcccaccttttaaatgtggaacctttacccttttctccccttccacggaaagtagttaactgggaaaagatttcccaaaggataaaaaaaggctccttccagtgaaaaa

SEQ ID NO: 603719 - DNA, 152 bp, Homo sapiens
  misc_feature (146)..(146): n is a, c, g, or t
acacgttatagaccaggatgaggaaggagaaggattacagccacagcagttacacccatggaccacaaagttgctgaagcagctgaggaaggcagagaaggcgagagggagttccggaagaagttcaaggtgaggcctctgagctnaagcag

SEQ ID NO: 603720 - DNA, 282 bp, Homo sapiens
aaaaagagcccctccaatgtggaacctcctacacagccccccttttgggtccctggatatgagcccccagcaggacccccactttagggggaagtttccctcccatccctcagatccccacattgttcctccctgtaggaaaaaagtcagccctgcccctggagcttttccaaaatggccctggactccccgttatttttaggaaccaggagctgaaatggctccggcttaacaacccagtatggccaaagtggaaaggttttttgtcctttgcagtcccca

SEQ ID NO: 603721 - DNA, 1010 bp, Homo sapiens
caaagagcaagtagcaggcccagtgtctttcctgctgatgttttcctgggatggtcccccatcacaacctactccctgggtgctctcaggtggattcgtggagaggcggcgcccagtgtgggccttcgtggaggaggtgccctgtggtccgcctgcccacgcgcctggttcctccctgaagattgtggctctgtgcgccgggcgcgctcaccagtgattgttgggcggcagcgcagtgtgccgtgtgtggcacgtgtgcctgtggcaggtgagcctgtggctgcgtgctgccgggaacaccgttgctggggccgtgctggtggctagagtaggtggctgctgtctgtgcgtgcgcactgcttcgactgtctacggggaccccatagtcagttgggcggccttcctaggcacgccgttcctgagcggcgcggaggggcacgctggagcgctgtggcgcgcatctacaagcgacccgttctacaatctctacacgctcgacttacgacttggcgctgctggagctggcggggcggtgcgtggcagtcgcctggtgcgtcccatctgcctgccctgagcccgtgtccgcgtacccccggtactggcacgcgctgcgtcatcaccggctggggctcggtgcgcgaagggaggctccagtggcgccgggagctgctgaatgcggccgtgcgcctcctaagtgaacgaaaccgtgccggcgcttctacccagtgcgagatcagcagccgaatgctgtgttgccggcttcccgcaggttggcgtgtacatgtgctcggtgttacgcttggggaccctgtgtcttgcggtgagccctctggacggatgagtgcaaaggggggtccataacgtgggctatgctttggccggccccacatcccaagagtataaacccgggtgcaactgtgacaagctgcataggaccagacatccagaagtaacacaagaaatggcaggcgagaatctacataagcacacgacagagaacacaaaccacc

SEQ ID NO: 603722 - DNA, 265 bp, Homo sapiens
ggtaagagtagcaaatgagacagggaacggtcgtgagtctgtcgagggctattgtatacagtagtaaagaatcatggcttgcttacttttacttgaaaccaagtctcactctgtcaccaggctgaagggcagtggcatgatctcagctcactgtaacctctgcctctcaggtcaagcaattctcctacctcagcctcctgagtagctgggcatataggcacacaccaccatgcccagctaattttatttttttatttatttaatt

SEQ ID NO: 603723 - DNA, 545 bp, Homo sapiens
ctgaaaggagaaggagcaggagagttgtgtgaatgagcataagtgatttcctcgggagatgccagatagagagcaatatgctcacgaaggtcgctcctcccatggctgattgccatgtgagtgatatggagcagcgcatcggatcccaagctgaaaatccctgggctgaactcgcccatccctgagagctgttcctttgggtaccatgctggtgggtggggcacatctccagtggatgagactgggaaaccgctctatggggacgtgttgggaaccaatgctgctgagtttcagaccaagactgaggaagaagagatggatcggagcccttggggggaactggtgtcatctgatgaagaatcctcaggagaagaggaagaggaggagggtgatgaagacaaaccagatgagagagggtttattagccctggagagaggggtcttatcactcctggaggcttttcatcagtgcctgctggaatggagacccctgaactcattgagctgaggaagaagaagattgaggaggcgatggacggaagtga

SEQ ID NO: 603724 - DNA, 149 bp, Homo sapiens
agccatagaggatataagcatgggcacagactatatgactaagacaccagaagcaatttgcaatcgaagagccaaacagtagacaaagtgggttctatattaggataaaggagcttactgctgaggcaaagagaacctgatcatactag

SEQ ID NO: 603725 - DNA, 153 bp, Homo sapiens
  misc_feature (83)..(83): n is a, c, g, or t
atctagaggatcctgctggaacgagacgacttgggcacagctggctggtgttagaatgatataatattacccctggacaaaanctactgggtggttattctgtaaatccagacattgtgtgagaaagcactgtaaaactttttgtactgttag

SEQ ID NO: 603726 - DNA, 433 bp, Homo sapiens
tacagcactgtgttggcgtacatgcctttgcggatgaccacgtcacactttatgatggagatgaaggtagggctttggatgccacaggactccttgcccacaatggatggctcgaacagtgcctcaaggcagcccaaccgctcattgtcaacggtgatgacctggccgtcaggcaactcgctgctcttctacagggaggagctggaatcagccggggccatctcttgctctaagtccaaatcgacgtatgacagcttctccttaatgtcacgcacgatttcccgctcggacgttgaggtgaaatgctcattgctctcatcataagacttcccgcatgtatacactctggtccctgcccgccaggttccaacgcatgatctcatggagcagggcatacccctcgttgatgggcccagtgtgggtgaccccttta

SEQ ID NO: 603727 - DNA, 558 bp, Homo sapiens
tctagaggatcccggactggagatgtctgagtgagactgagtagttctaatgcccgccaacacaatatccattctgcaaaccatggatcgaggagtaattttgactttgagcttttttggaaggaatatattgtgtaaagctgtagtcactatagatagtgattcctctgatggatctgggcaaagtcagttgaaaaccttctggaaaggattcaccattctagatgccattaagaacatttatgatttgtgggaggaggaggtcaagatatcaacatgaacaggaatttggaagatgttaattccaaccttcatgagtggctgagtggtttgaaacttccagtagattaaataactgcagatgtggtggaaatagcaaggcgaacgagaagtggagccttaagatgtgactgaattgctacagtgtcatgataaaactttaataaatgaggagttgcttcttatgggtgaataaagaaagtggtttcttgaaatgaagtctactgctgatgaaaatgctgtgaacctcattgagatgactacaaaggattcggaata

SEQ ID NO: 603728 - DNA, 194 bp, Homo sapiens
cctgaagagagctgatgatcagctcattagccacatcacaggtgccaattctctaaagggtagactctgtgcagttttgaagcctggaagacaatacctaccgacatgttaaagacacagatggagtatttctgctatgatgaagattaaatagaagaatgacagatggcaggataacatgtgatgttctgact

SEQ ID NO: 603729 - DNA, 119 bp, Homo sapiens
aagatcccgcatttctctgcgcttcacttgggtcacggctactcctgtcttctgctttgttgtgtgcctctagctgagttgagcctaaaaataagcacaaaccacaaaaaacaaaaaaa

SEQ ID NO: 603730 - DNA, 333 bp, Homo sapiens
ccaagagcttgaaagctttcaggatttcttcttatagtatctttctcagacattttctagggtcatcacagttaaaaagtcaacaaagttcattatttcctgtccctatacctatatcaatttcacttcatcatttacttaaattatcttctttctatgggttcaacagcccagaggccctacatttgccaccattcagttactttcaacatactcatggtagccagttaccatcacgcatacgaaaacgatcacacagcttacccggaatctacctgctttatagaactatcagatacagctccagagcttaagggctccatatacttttat

SEQ ID NO: 603731 - DNA, 668 bp, Homo sapiens
ttctgaactgttgggtatgtgcttgctcctctggacatgcagggtctggtgactggagcgaagcgcattcggaaggctgcggcagcagtgcacgactcgatgttcagaccgggtgtgctactctcatggcgtctggcacatggtatgcactacctctggggcctcgggggagaggagaccttctgggcactcgtgggacagcgtctgcgcgtgtgcactggactgcggacgccggacagggatgacaactgggaaggcgtggcagttggacgagcagggcgtgatgcgcgtggtcgactggagcctgggctagggcaatgcgtgcaagcgacctgcaggcacagccgggacgatctgaagaggggaagggagacagcccggatggagcagggagacaggcacgggacgaagggacggggggacgacagggacagagggtaggatgacgggtcagggcttgacggggaggagtacggggaagcctgaagacgatcagggtgggagagcggcgcgctggcgatccagggtgcacggcggcgtgggtcgtggtacggagaatggtgctagggggcacgagcgcagaggtctcggcatgagtgggcgcgagggacggaagtgcgagggaggaacagcagagcagatgggcggtgctgtctggatggggaggc

SEQ ID NO: 603732 - DNA, 154 bp, Homo sapiens
ccctcctcctttttaatagggtcaacactgttactacttccttttaaaaatgttttttttagttgtggtaaatacatgtacatacattttaccattttaataatgtttgaagtgtacagtgaagtggcattaagtacagtaaaaaaaaaacatt

SEQ ID NO: 603733 - DNA, 240 bp, Homo sapiens
ctaggttggacggcaggcagggccgtggggagctgtgtaggtgctgggagctggctgggggagccacaggggtagctgatgtcctgctgtactctgtgctggggggaggccgacttcctgtagcccagtgggccaggctggttttgatctggggcagatggctttccacatcaccagggagctgaagtgcaaacctgggcttgcagaggcaggaacaacccagaagtcagtgctgaggag

SEQ ID NO: 603734 - DNA, 91 bp, Homo sapiens
atcagctcgtaccatcgatgcagaagatcactcagattgggggttcagactagcctggcacatggcaaaatgctgtatctactaaaaatac

SEQ ID NO: 603735 - DNA, 761 bp, Homo sapiens
ggtggtgtcgatctacgtccaatgtgggccgtaccatggggagaagactcaaaagagtgtgaagattgctcctggagcagttgtatgtgtacgaaagtgaaatcagaggagatgtacactatcggacctcggaacagttgatccaccctaaagcaagaatcatggcggaagcggggccaattagtgatgggcgaagggaacctactagaagaaccaggcccttatcataaatgcttaccccagataatatcactcctgacactgaaagatccagagcgcaaaaactatgatcattgggcacccaattaactgtgttccgccagtggggctgtatattcccaatgcccatgacagactggcgcgctacctcactggtccctttgatctcaacacagctttattgtagggcagcaacgtgtaacttcttgggcacaagtggcgctgcactcaattggggcggcttgtgtttcacaacaccctaacataactattttggacgaggtcatccccctggacgaaattaccgcgagcgcaccttactgggtgcacggacgtcgccttgcgtcagcgctgcaagacctggaggtgcagcgtgcagcccccaagaccaacatacagcttgccatttcttggcaattgaacatctcttggcgcaatttacccatccactcttacaggacagactatgacaacggaagtctccactccagtaacagatattaggaccccgtgctttaccatgtgacgcaaacattctggga

SEQ ID NO: 603736 - DNA, 447 bp, Homo sapiens
atagatcgagccggtacccgtacttttaaacttcctctggtttcctcttttcatcgtttctcccttccccatacacgtaatgtgctagtcttagaataaaaacaagcttcccctatcccattctgaatttttcaatgtagctaataaagtccagccgcttgaccatcctagatgtcttttcaaaccaacgagttgaaaaagatcagattatctcagccattccctcagtctctttaacaaataatgataaagcagacaggatttaaatgagactgctgtaagagcacaaccccaatgcatgcaattgacccttgaacttccagaaatattgcaagaaaaatacacacttatttcatttctgttcccttgctctaatggctttgcaaatacatcctccttagagagcctacctctccacctcttcacttgaccagtttctactcatcc

SEQ ID NO: 603737 - DNA, 110 bp, Homo sapiens
aaggatctcaccaagcagcaccagtatgtgtacataactttaaggagcttacagtctggtaggacgcataggagactgttcacaatataggataataataagtgtgacgc

SEQ ID NO: 603738 - DNA, 132 bp, Homo sapiens
tggcttgctgccgtcggcgagggtcagctcgactcctgactgtcgccgtgctcggagatcagtgccgactttacgtgtgccgtagaagtcgccgctgtccatgtgcgccgacgtgcgaattggagtcacgcg

SEQ ID NO: 603739 - DNA, 283 bp, Homo sapiens
tcctgtgtgctgtcgtgcctgacctgatgcagctacgttgtttactgggtataggtatcatagagagtgctactgctgtacttatggaggctacagttaaatgagtgttacaaatctcttcccccagaatccgagcttctaaatggcatgttactgtgaaagcaaaactcacactgagttctgccacacacaaaaaaaatttactaggaagcaaggcacaaaaatactgttgcattaggtggataaaattcctactctctatgcttttagaacatctgacaag

SEQ ID NO: 603740 - DNA, 704 bp, Homo sapiens
ccagtctctagcagttatgttgttagaatggattcatctgtgcttatttcacaatacttcatttatagcaatgcttttccttaagctaatgtataaatatttctaaaggccattaatagtaacaaaataagtaggggaaaaaatggaccttctgtataaaaaccccttagcttttttttttcacaagttataagtggaataagttaataactgagctcgtaagtgtatctcataactataagagctacatgaagaaaataggaataacacacctggtatttaaacacaatcttcaaaattcttgcaacattaaacatagtaaaatgccagaatataaaatgaggtgtgctaatggtcacaggattgaggccagcattacagtttggggtgatttttcttttatttgctccctcactttgtttcctagatgctagtaggggtatctgggttgcttgagataccattttgcaattgccccttctctttctgcctaccatcttctcaggccctgatgagcttattggtaggcaactgggctgctttaatgttgaacttgtacttctttagaaactgaagtggaatcattgaaaactttcaataaagctttaaagttccatttacttttgaagcacagctaagctcctgctgaggcagctggtttgttgcaaacttaaaattgaactgatatgagccggtaccgagcc

SEQ ID NO: 603741 - DNA, 116 bp, Homo sapiens
gccgagaactaggctagcagttgggaccatagtgaggatgagactcgtgacagatcaggactttgaggcttttggggaagctcttcagagccagcatgccgttaggcagggtctcg

SEQ ID NO: 603742 - DNA, 133 bp, Homo sapiens
  misc_feature (3)..(3): n is a, c, g, or t
  misc_feature (124)..(124): n is a, c, g, or t
ctncctcaaatgttcagtcagatgctgtacctagcatagttccttgtactcagtgggcgactagtaaaatgttgtggattttgttaatactcagactcaggttatattaagagtccattttgtngaatagctt

SEQ ID NO: 603743 - DNA, 1148 bp, Homo sapiens
gttgacgctataactcgcctctgacgagaagcgagtcctgcgtagtcagcatcgccttagctatgcagcagtgtgcagtgacgcacgaatcgtcacggcgacctcgtagctaagatgcgtctagtacataacactatacatatgacatctgtgaacagcgtcacgtagtcccagatcatgcatttgtaggcccaacatgggttgccctgcgtcgtgcgttacacgtgatgcttctgtacccctggaagaggaagcgcgctagaaaacgtgcgcacatgtaggacataccccgccgatgcggatgcttccctgggagtaggtcgtcctggcgcggctgggccctcgactcggtaccaacctggatctccaccggcaccttctgcgtccgcggcaccgccaattgttgcctcccgggggcccctatttacttcgttgacatcagttgggcgcctggtgccttccggcctttttggttccccccgatatctcttcccaagctgtcccatatccctatagaaggcggctcggatcgggcacaggggatttaactgccaccacatttaaaaatagggcaacaaagaaaacacttgttattccccaccaccaagtgaagagacccctctctaaaccacccgtacacgttcatggttctacctcgtaatggcctccattatggaatgtaaacaagagactatacatacatctcccactgccacgtctgtcttctctccctttgggtggctgttctacgccctcgtctccatcctcttgggccccggtatttctcagtgagagcctcccgctgtaacttcggtcctattaatagccctatcttggccgctgacgcttccttcctgaggccttcttgcgccgctctccttacctcttgttagtgccaatctccgtccttactgcggtctgcctatggccggcccacaaaactgtgttcacggcacactgaaggttaaacgcagctctttccaatcacccagtttctctcagcctctttccccaatactcacagttggtctcatgaggctttgcgaccaccctagacattggcaatcgcccctaaatgagttcccaacagcttttcaatcactcttgttgtgccccgaccccaataaggtgcattagaccattcaagg

SEQ ID NO: 603744 - DNA, 86 bp, Homo sapiens
taggttttgtcccttttttacaggacaggtgactttctgtaacaatgcgatgtatattaaactttttataaaagttaaaaaaaaaa

SEQ ID NO: 603745 - DNA, 282 bp, Homo sapiens
gtgaccttggctcactgcaaccttcaggccagcctcagcctccctagtagctgggactacaggcacccactaccacgcctggctaattctttgtatttttagtaaagatggggtttgaccgtgttagccaggatggtctcgatctcctgacctcgtgatccacccacctcggcctcccaaagtgctgggattataggtgtgagcccccgcgccgggccggttgctggcatcttatgttctgtaggtggaatatttccaataaacccaaggtgccgtaattga

SEQ ID NO: 603746 - DNA, 431 bp, Homo sapiens
atgagagaattcattccgcagtgggtccgtatggagattccaacaaagctgggtttctgtcgtgggggagggaatcacccccaaggaaatgatatcacagactcactctccctttctaatgaactatcgatttcttcaattaactggatactgacaatgtaagtagcactagtagtagtagtactagtaattgtcttcctcaagacatcaaacacacaactgcaacttcagctcctaaagcagcttttttttttcttttttttgagacagagtctcatcctgtcgccaggctgaagcgcggtggcatgatctcggctcactgcaacctccacttcccgcattcaagcattcaagtgattctcctgtcttgccctcctgagtagctgggactacaggtgtgtgccaccacacccggctgattgttttaattt

SEQ ID NO: 603747 - DNA, 1197 bp, Homo sapiens
cggttattgttttcgtgtccacatgtcgcattggtctgttttcctcgcttctctcgtcttcttccgctcggcctctaccaagctgtgcgtcttgtcatcagcgtcgttctgctggtgtggcggtctcatctcatttttgtttttggctgctgcgtcgctgcagggcttccccatctcgctctgttggttattcgttcactcgctgcggtccgccgtgtgttggccgggttggcgtattttacctactctcgcctctctttttcttcttcctttcctcgtaggtgggatgggtcagctcctgcatcaacactactcctctcatttcctagccctgcgtcacactcctcttgtgctttctctatcttcgtgcttcctcctctctgtgcttcattgtgaatatcttactgtcttcgattgaacggctgcggccccttgttctatataatcaagagtctgtctccctccctcgcttgcttgctacttctctccctctcgttcccttcccgcatccaccgtgtttttgctgttcggtcttgccgtcccccctcatgcgcggttggtggctttctctctctctccctctctctccctccgtcgcggaggatacaaatagtatgtgtgttcccgccccccttctctcgcggtgggtggtggaccaaaattggtggagggttccccctctcgcactggctctctctctctctctttctgccagcctcctgtggcgcccctgccccgtgctccctcttctcttttatccgttctctggtgcatgcatgcgattcccccctcgcgttctctctctgcgagggagggcgcgccatcgctaccggtccccccctctctgctgctaccgacgctccacaccacactcgccacgcgctctctctgtcggatcctccgccaccgtgaggctcctctctctactacccaccctcatgtttgtgtcttcttgcttctgtttgttcctctccctcgctatctacccccggcgctcttcctctctcacccccaccctgcaggtctgcaggttggtgcctccactgcctctgtttcatgggacagccaccctcggcggatctgttttttttatagtagtgatatgttcatgcccccggcccccttttttttttttttttgcaccccggttttgggggacatttggggggggaggaaaaatttttttttttccccaca

SEQ ID NO: 603748 - DNA, 115 bp, Homo sapiens
ggaacttcctgagggcctgatatgctactgtaggcagttctgggttgagtgggtttctaggctgagcgggtttcttggagccagcttcagattctcatcttcagatcttggacct

SEQ ID NO: 603749 - DNA, 333 bp, Homo sapiens
ctagagatcccttcagccatttagtggaatcgggtcttaatggatacgggtttcttcaccggactatttctccctcaaactcttggcctcggctttttctcttgtagccgggttctcgggtgtgaacaggagcagatgaccaatagcacctagctgggtgacaacccataggaggtatgcctataaaatgccaggggccactgagtgttcacggtgaggatgacactatgggcaaggatggatgattggtatgtgaactactgatgagaaatgctccagagtaggtacggaccagccttctctagtgttccagacacctgtctgagtttcttg

SEQ ID NO: 603750 - DNA, 351 bp, Homo sapiens
  misc_feature (46)..(47): n is a, c, g, or t
ccccccccaccccccccgggggggggaaaggcggggggcttttttnngggggtcttttcctttcccgaaaggggggggggggggaaaccccccccccccggggccccccccaagggggtttcgggggtttccccccccccggggggccccccccttttttttaaaattggggggggggggggggggggaaaaggggaaaaaaaggggggggacctttccccccgggggggggggggggggttttccccccccccgaaaaaagggggcccttttttttttgggggggggggggtttccctgtcttttccccctttcccgggggaaaaaaaaattttttttttttttttttta

SEQ ID NO: 603751 - DNA, 177 bp, Homo sapiens
tagtaacacttaacacataatacgttagtttttctgacaaggattactttttgtgtgtgttaccattacacgagcgactatttatcatgcactgtacaatctatgtgactctgactactatttacactgttatctacaatctaacgatgcgagacgtagtcaattcaacgctggtat

SEQ ID NO: 603752 - DNA, 350 bp, Homo sapiens
gccgggcgcggtggcgcgtgcctgtagtcccgagtggctgggattgcaggcatgcaccaccatgcctggctaattttgtgcttttggtagggacggggtttctccatgttggtcaggctggtctcgggctcccggcactttggggggccggggcgggcggatcgcctgaggtcgggagtttgagaccggcctggccggcatggcgaaaccccgtctctactaaagagtgcaaaaaattggccggacatggtggcatgtgcctgtggtctcagcctcccgagtagctggcactacaggcacccgccaccacacccagctaattttgtatttttagtagagacaggtttcac

SEQ ID NO: 603753 - DNA, 944 bp, Homo sapiens
  misc_feature (13)..(13): n is a, c, g, or t
  misc_feature (121)..(121): n is a, c, g, or t
  misc_feature (132)..(132): n is a, c, g, or t
  misc_feature (168)..(168): n is a, c, g, or t
  misc_feature (191)..(191): n is a, c, g, or t
  misc_feature (205)..(206): n is a, c, g, or t
  misc_feature (234)..(234): n is a, c, g, or t
  misc_feature (236)..(236): n is a, c, g, or t
  misc_feature (241)..(241): n is a, c, g, or t
  misc_feature (246)..(246): n is a, c, g, or t
  misc_feature (255)..(255): n is a, c, g, or t
  misc_feature (291)..(291): n is a, c, g, or t
  misc_feature (300)..(300): n is a, c, g, or t
  misc_feature (335)..(335): n is a, c, g, or t
  misc_feature (393)..(393): n is a, c, g, or t
  misc_feature (418)..(418): n is a, c, g, or t
  misc_feature (427)..(427): n is a, c, g, or t
  misc_feature (638)..(638): n is a, c, g, or t
  misc_feature (640)..(640): n is a, c, g, or t
  misc_feature (738)..(738): n is a, c, g, or t
  misc_feature (781)..(781): n is a, c, g, or t
  misc_feature (785)..(785): n is a, c, g, or t
  misc_feature (863)..(863): n is a, c, g, or t
  misc_feature (937)..(937): n is a, c, g, or t
ggataggaggagntgaaggataagagatgaacatgaaggtgttttctcgtgtgaatgacggttttacgttgttaatgtggtgggtgagtttgccccattgtgttgtcgtagatatgtaganggtgtataggnctgtgactagtatgttgcctcctgtaagtcggagantcatatttgatcaggcgaccgtngttactagcacagnncgttctcccagtaggttaatagtggggngnaaggnggggntagcggggnttgctagaagtcatcaaaaagctattagtgggagtngagtttgangtccttgagagaggattatgatgcgactgtgagtncgttcgtagtttgagtttgctaggcagaatagtaatgaggatgtaagtccgtgggcgnttatgagaatgactgcgccggtgangcttcaggnggtttggatgagaatggctgttactacgagggctatgtggctgattgaagagtatgcaatgagcgattttaggtctgtttgtcgtaggcagatggagcttgttataattatgcctcatagggatagtacaaagaaggggtaggctatgtgttttgtaagggggttgagaatgagtgtaaggagtattataccatagccgcctagttttaanantactgcggcaagtactattgacccagcgaagggggcttcgacatgggctttagggagtcataagtggagtccgtaaagaggtatctttactataaaanctattgtgtaagcaagtcatattaagttgttggctcaggagtntganagttcttgggcagtgagagtaagtagtagaatgtttagtgagcctagggtgttgtgagtataaataagtgcgatgagnaaaaaaagggagcctactagggtgtagaataggaagtatgtacctgcattcaggcgttctggctggttgcctcntcgggtg

SEQ ID NO: 603754 - DNA, 204 bp, Homo sapiens
  misc_feature (62)..(62): n is a, c, g, or t
  misc_feature (64)..(64): n is a, c, g, or t
  misc_feature (124)..(124): n is a, c, g, or t
tacatgtaggcttgtgtataatcatgactaaaaacaataataattatttttgtttctgcatnantattcacttagcatttataggtttacatgacctagactgacgaattacatatttttatcncctgtaactggcatgtaattaacatagtacttcataactgcagatatgcataggtaatgatagtattcaagtaaaaatgc

SEQ ID NO: 603755 - DNA, 108 bp, Homo sapiens
gtgctgcttcttgaaacactgttatggaggaacatttctgctttgactgacagtctttaaactagtttcattatgtgcttggaagaaacacaagtaatctgttgacgc

SEQ ID NO: 603756 - DNA, 1215 bp, Homo sapiens
tccccattgtgaacaaagcatctgctataaggatttgggttgaaaaaaatctccaaaatgtttccccttagtggaaaaatttttccttggtagctgtaaccagttcaataaaggggagttcaaaagttaacattctcagacatttcgtgaatctccgtggtaattattaccttggggatagcctttcctttctcctccattttaattgtgggcgagaaagagagctgctgtgtaaacctttcccatagtgaattcgcgggtgattctccccgacttcactttaattctcatactttttagccagcacagagggcttataccagtgattgaagtgccctctcaaatgtggaggccacgaatgtggggaaagtgcgggggtgcacatgtgcaaaatctttttttccccatagagtgtgccccagttttaaacaaagagcccacgcgggtgtttttgcgcagaaaattcacccccccattgatacacatcacgaggtggtctcatatgtgggcaacatggtgatgctgtgcgcacacccccacaacagaacgcgggtgtgaggcgcgttggcaattatacttctccttataagagggggacaagagcgaaacacgccccatattggggtgccccatgtgaaaggtgactactttacgtctttatagaacaaaagagcgtccttagggaaataacaagtggttttaaaacagaagtctacaccggtgggtgggcgctttatctttccccccccaatgcggtgggacgaaggtttttggtgggcttcggaggtttataaaccatatcattctctcttatcacaccccacggtgtggggcccagacatgtgttgtggtgcggcaacaaagaggcgccccgacacagcggcaacaccaaccaaaagcacaaatgtggtggcccatctcattactaaaacaacatggtggtggggcgccattttaacaccaataatcttctcactccggtgaaagttcataacatctttctaagacgtctttactacccgaggggtggtattataattataagttgctcccccagaagaaggccccttccatatcatgtaggggcataatagtggccgtgggtgccgaggggaaagaaatttatcaccccgccataagaaaaggcgccctccaagcagatcttaaccgtggcaagcgcaagagatttttttacaccgacagaggataacgtaa

SEQ ID NO: 603757 - DNA, 114 bp, Homo sapiens
  misc_feature (42)..(42): n is a, c, g, or t
tcgtggggttactacggtcatgctctgaaatctgtggagcanacacagtttcatggccatcgtcctagaattaattcccctaaaaatctttgaaataggcgccgtcatttaccc

SEQ ID NO: 603758 - DNA, 123 bp, Homo sapiens
actctgaagccaatcagaacaaagtccttcgtccgggtgcagtggttcacacctgtaatcctagcactttgagaggccgaggcaggcggatcacgaggtgaagagagggtatcctctagaggc

SEQ ID NO: 603759 - DNA, 739 bp, Homo sapiens
  misc_feature (295)..(295): n is a, c, g, or t
ttcagaagtaggtttccatgggtgctgctcctgatatcagctgtgaaggggcctgcctttaatatggcatctcctgagctcacgatttgtggtcatcaaccttgacagggcccaataacatacaataggaggtgcggatgtttacaggggtgtcaagtgccccaagacaatcaagcacttggatgaagggcattatgagtgctaaaaggttccagggggtgcagtgcggaagggaccccaagtctcctctgctctcgaacttggcacacatctaagatttgctgggggcctctcnatttctcgaggacccaagatggtggcatatggacggtgtcgaacatggaggtcagatatggactccacggctcctgggctgatgtgtgtctagtggcctcaacggtacacttggaactgtggatctggaagacatgtaacattgccctaaaatgaagatccccaaatttaccttctctggccgtgacgctggtctggcagagaaatgggggtggcatgttcactatccctaaagcagaggccagcatccaagctggtgctggagacggcgagtgggaagagtctgacagtcgaactgcgcagagtccaagatcaaaatgcccaaggtgtatctgtcccaaggctaaaggggaagggggggcaccggcgccaccagaagcatcacttctggggcccaagggggccgtgaaagccccaaggcacccggggccccgggaggagaagc

SEQ ID NO: 603760 - DNA, 1611 bp, Homo sapiens
tacatttctttcggtccggctggctagaataatgtcaaacaaaaattacccaaaaacaaaaaatatgaaaaaaagtttaaaaaatattccgtgacagaggcccagaagaggctaaaagaatatcagacgtgccccagaggaggccagaagaggaaatatcacaaacacccatcgaaagatcaaaaaccggtgcggaacaagacgaagggtgctacacggaagaaagtctgtggggaagctagacaggggccaccgctgaaaggaagaagccccttacaggacaaagctccgagctcaaaacagtgtgaactcttcggcgcgcgagaaaaaatcagagaggagggccgtttggaagcgcaaagccaagcccaaagaagcggaccaaaagacagaagcgagcccgacaatgcgagataactcaccaaagaggaccgggggagaaaccaaaacccgtgggcccaagggaacacagcgcgaggagccccttatcaacgaaacacccactatctctccccacgaggggcgggtcgtgagaacgcaccccaggaagacaaagacagggggaaacatttgtggacacaacaacacggcagaccactgttgatgaaccaaaaccccgaggggcgcaccataacaccggagaaggggccccccaaggaaagaaactttctcggagaaaaagacaaccaccgggagacgactatcggagctggggaaacaaaatcaacacgtatccccacgagcggcaggaggaaatcaaagaggctgcagcttgcacgaacaccccaccaaaaagacctgagcggaaagagcacccacatagggagagacacatcacacaagaccctagacaccaaccaagaggcactccacacccgaacagcagagtggacaacaccccacagcagacatggacaaactagcgacgacaacatcacaacaaagcgtcgacacgcaacacaaccaagacgacctcgcagagaacgtacacacacaccagcgggaagaaacaacatccacggaaaaaagaagcacaacaacacaacagacaaccagataactgcaacgcagacaacaaaacacagcaaaaacaacaaccgcaagtataacaaacaccgagagaacaaaactacccacggagagacacccaccatgaaaagagcgacaaacacaaggatcacagacaacatacacaacggcacgaaaggcaggggagaccccacgaggacctcacaccaccaacacaagacaacagacacattatctacgaaagaagatgagacaacacacacggaagacaaaaacaccccgctcccgaggagaacgtaagacaaaccacggaaccgatcactagcgaccaaaagcgaacaacgcagtatcattctagaaaaagcacacagagaagagagaagacaaaggacaaccaaaaccgcccccacagatggacaacagaaaaaagaccacgaaagctaactggacgaacaagcgtagaacacaaatacccagaaaacacgatggaagaagaaatgacagagacaaaacataacaaacgagcgaagggaccaaccgaccaatacaacaaacgagccaagcgaccagaggaacccagaa

SEQ ID NO: 603761 - DNA, 186 bp, Homo sapiens
aaaaagttgagaagccagatactaaagagaagagacccgagccaagaaggttgatgctcgtcgcaaggtgaaaaggggtacctcaagctaaaagcccacgaggggagcccctttcagccgaaccctgtccttgtcagaggattggcaggtattccgatctgccatgtatccagaaggccatgtaca

SEQ ID NO: 603762 - DNA, 847 bp, Homo sapiens
gtggagctggaccagtgaggagctgcagctgggccggggctggagctgcctgctgtcgcgccagtggcctgcgaggaggggcgtgttgctgctggcccacctgctgagcctgcccccagccctgcgccgaggcgccttccctgccaggcctggctgccttcctgcctctttccatttccccggaatctcatgccggcgcgcctgtgaccctgaccctctcctgggtggagaagcgtcccggctgttcccggtttcactccttctcagcctgtggctcccagccccctctctccttttcctggactggctctcacccccttcgtgtccccttcctttagctcaggctccctagcccttcctttagcccacagtccagagtcccagctcctcagtcactttcctcagccaaaggtcccatgcttccttcttcctttccttttgcactatccctatccgtgccccttcctctatccctagtggctcagtttcccacatctgtcctcccccttcccaggcccggagttccagaccttttggtctcctttcgtggtcgttcctgggtccttgccccctttccccactttggagttccagatttgaaaccagctcccttccaccccagaaaaatttgttccatgggaaattgcctctctaaaacatgaactttttccttaggagactacggccaggtcttctcttccaattgcttgaccttttgtactatgtggccggtttactctcatttgtggtacggcgaggacggtcttggagcaggcaccatggtctgggggctgggatctgtggcctttttcacatcgatttccctctaccgggggggatggcggcg

SEQ ID NO: 603763 - DNA, 586 bp, Homo sapiens
  misc_feature (39)..(39): n is a, c, g, or t
cgacacatgatggagagatgtatgtatgtttagacatcntggtgatgtcttcagtctttgtccaccccattccccataagaaaactgttctggactctgggcggaatagaaaaggatggctggagggaagctaaaggactaagtggaaagttttggagtggtatcaacacaaataggaatagtagtattttgggggtgtgctcagctagttaagttcctgtactgcagacctttacagagtctttcatatgcccatgaatctccaagagggggattgaatattttaagatcatatacaaaacacaggatccttattttcatgggccatcttacggactagtttctgcaaattacactttgaaaatgatgaattagagaactgcagcaatgatcagttccagttaatttggaaggttcatgggttttggaagggggaagccatactggaaagggagaatgtccgggttaagatcttgaagcacagttccaggctgtggctttgttggtggagagctgggttactttccatatcccagttaaacttgtgttctaccattgagtccagtatcagttgagtcatcatatg

SEQ ID NO: 603764 - DNA, 1677 bp, Homo sapiens
  misc_feature (1597)..(1597): n is a, c, g, or t
tcccctttgtgggcccagtcgcccgtgtttctgggggtttttttttttatacttccaggggtccctcaatttatattgggggggagaaaataccttgtgagcaacaactacacaggggagaaaaagagtctcatacccctttttgtgtccagaatgtcattttatactcccttctccggtctggaacaaaaacgtgtgtgtgtggaacatctacaacaccacaccggagccttctgtggggggcaaaaacaaaaaaacagcttgctctcccttctggctctcgtgggtggaaaacctggggaggggtgctatagcgcccgcggtgtgttagtataggtgccattaaaaatcccatagcctttatttccctctctattctcctcgtgaatatatatgtggggccctcagaagaagttcccacgcggggtgtctctcatagtggtaaaaaatagtggaccggtgttacgacatttttcacacaaacatgtgtttctcgtgtttataacattctccttgtgtgtgtttaaaaacaaaaacatacacaagagagggggggggggggcgcgacctaataaagagaaataactcctcgcgagagagggggggcccccaagaagtatatataagcgcgcgttataccccgcgagggcttttctgcgtgccaccaccacagggggtgggcccacccacaataaaagaggggaagcggcgaaatataaataaaagccgcaaaggccaactggggcccgcgagctgactataccacacacagcgctcgcccacgcaccgggggagcacaacaacgctgtggtcaacacaccgcgggggacacaccccctcgtgggcggaaaagagggaacaacccacataaacatctccgagcggcggcggggggaggaacacaccaacatccatcgtcgggggaaccaccaaaacttccacagcaccccacacgaacgagaaagaaacttacaaaacaccagcgcactcaaacgagctgagcggacacacaatctaatcaacccacacctcactctcccacacggcggcgcatcacacacgggggcgcggttcacaacacaaccaacagagcgggcgaccatactatcgaccagcgcggcagcgaacatagcaacaacaacatattctgtggagccccaaccagcgaacgcaatctcactctctgtctacaaacaaattatcatcagggcgcgcggacactaatcaccatcaacacacaacacaccagagacgacaccccgcacagcacagatcacagcagagacagactacagcactaactgcactaaccgccctctcgatgaacagacaagcaagcaaatacacagagaccacacaggtagcgccaagccagtaagtaccagaagacgtactgcagtatcataaacacaacacgacgacgacgcaacgacaaaaagcaacaaccaagcaagaacaaaacagacaaagcggacagaaaaccagcacgaaaaaacggagcaacacaaaaacaaacatactcacaccatccaaagagcagcgagagagcgaagcgaaacaagccataatgcaacaaccaatcaaagacgatcaagtnaagtaaagcaacaccaagcacagagatgaacagataagaagagaagagaaaaagtagatatcaaattgatattacatata

SEQ ID NO: 603765 - DNA, 216 bp, Homo sapiens
tgtccactctaaaggatccccccaccgggataaccactttcgccgggacgagcttttctatcacctataacaatcattctttgtgagtcatgatcatatgtagcgcatgcctgctcaagtggtattgtgccaagtctcttggggtgctcacgatctgtggcgtcatatactgttgtttttccttgtgaaacatattgcagagatgacgagcctttt

SEQ ID NO: 603766 - DNA, 1417 bp, Homo sapiens
  misc_feature (598)..(598): n is a, c, g, or t
  misc_feature (605)..(605): n is a, c, g, or t
  misc_feature (631)..(631): n is a, c, g, or t
  misc_feature (653)..(653): n is a, c, g, or t
  misc_feature (671)..(671): n is a, c, g, or t
  misc_feature (804)..(804): n is a, c, g, or t
  misc_feature (905)..(905): n is a, c, g, or t
ccgctcttttgacttgtgggccactgcctctgtgtgtgctgccgcaggactgcccctgtcttgctgcgtactcggtcgtcttcttccggccgggcagcttggcgactggcccgccttgagagtggcacccgcgtcttcacgatggtcccagattatttgtacttgggtgtggcctgcccttcccgttctgacccccaggttcagccatccctctcacctgctttcgtcgaagtttcgtctcttttccccctctgcatgtttcccgcgtgtagattggtggggaagacccgttgcttgcttgtgctgtcaccttccgaggctttctgggccaaatcagcccgtgcaccctgggcagagccccttaaagctgctgtccaatagaatgccccatggtcccgggccttgtgggcttagaggataagtgccgggccagataactgggcaaccctgacttgtatatcaaccgggggagctccccagcttcccagcccctgcctccagccttcctgaggttctctctcctgaaccctactctctcctttttgcttcctcagtttttatcaggctttctctgggggacagcagtctctgagcaccngggagcngttgcctcaggcctgtgccccccctntttatacgaatgttttctaccngtgtgcttgggtttgccntgatgcgaggctgagttgctgtagcgtcttgattctctccctgggtctgcgttccctcccctgggcctgactgagcctgctcattgtttttccctttattacacaggacagccaggggaggaggggggcccanccctgggaggctggtgggaggcagggggcaggcctgcggatgcatgaaataatgttggcattattttttaattttttaaaaaataaatggtatcttatttnagtttgtcctgtttccttcccatatacccacggcctcctaggattgttatgcccaacgtctcagggtaatgcccagggggtctgggagacatgaagccagccaagtgggcgactggggaccaggttgcccttcaagcatgtcttctagagttccctactcgtcctcgcacatagctccattcttctacctccacagtacatgactgtccccaacttaaccagtgtttcactcgttataagccatgttgtcagctttacaatgtggtctgttggggtattaaatgaatttgtgacttaggatattttcatttatgatgggtttatcaggaagtaaccccatggtaagttgaggcatatctgtatatatttaaacctaattaattcttgagctgaaaataaataaaccaggatggcagggaccacaccctaatccctccccagcggaaagcccctcttttcagagtgggcagagggttgcctatggtgggcactaaggaatgaggtcccctgcc

SEQ ID NO: 603767 - DNA, 1448 bp, Homo sapiens
  misc_feature (598)..(598): n is a, c, g, or t
  misc_feature (605)..(605): n is a, c, g, or t
  misc_feature (662)..(662): n is a, c, g, or t
  misc_feature (684)..(684): n is a, c, g, or t
  misc_feature (702)..(702): n is a, c, g, or t
  misc_feature (835)..(835): n is a, c, g, or t
  misc_feature (936)..(936): n is a, c, g, or t
ccgctcttttgacttgtgggccactgcctctgtgtgtgctgccgcaggactgcccctgtcttgctgcgtactcggtcgtcttcttccggccgggcagcttggcgactggcccgccttgagagtggcacccgcgtcttcacgatggtcccagattatttgtacttgggtgtggcctgcccttcccgttctgacccccaggttcagccatccctctcacctgctttcgtcgaagtttcgtctcttttccccctctgcatgtttcccgcgtgtagattggtggggaagacccgttgcttgcttgtgctgtcaccttccgaggctttctgggccaaatcagcccgtgcaccctgggcagagccccttaaagctgctgtccaatagaatgccccatggtcccgggccttgtgggcttagaggataagtgccgggccagataactgggcaaccctgacttgtatatcaaccgggggagctccccagcttcccagcccctgcctccagccttcctgaggttctctctcctgaaccctactctctcctttttgcttcctcagtttttatcaggctttctctgggggacagcagtctctgagcaccngggagcngttgcctcaggcctgtgccagggggacccaaaattttgggggccccttccccccctntttatacgaatgttttctaccngtgtgcttgggtttgccntgatgcgaggctgagttgctgtagcgtcttgattctctccctgggtctgcgttccctcccctgggcctgactgagcctgctcattgtttttccctttattacacaggacagccaggggaggaggggggcccanccctgggaggctggtgggaggcagggggcaggcctgcggatgcatgaaataatgttggcattattttttaattttttaaaaaataaatggtatcttatttnagtttgtcctgtttccttcccatatacccacggcctcctaggattgttatgcccaacgtctcagggtaatgcccagggggtctgggagacatgaagccagccaagtgggcgactggggaccaggttgcccttcaagcatgtcttctagagttccctactcgtcctcgcacatagctccattcttctacctccacagtacatgactgtccccaacttaaccagtgtttcactcgttataagccatgttgtcagctttacaatgtggtctgttggggtattaaatgaatttgtgacttaggatattttcatttatgatgggtttatcaggaagtaaccccatggtaagttgaggcatatctgtatatatttaaacctaattaattcttgagctgaaaataaataaaccaggatggcagggaccacaccctaatccctccccagcggaaagcccctcttttcagagtgggcagagggttgcctatggtgggcactaaggaatgaggtcccctgcc

SEQ ID NO: 603768 - DNA, 454 bp, Homo sapiens
attggggtagcagggactgagtgtgagtccctgttgtaaactcggaccagtaattttgcatctataggcctccaccctcccatctatgaattgagactgataaacccacctcaccagggcccagtgggtccggggaccaacatgtgtgaagatgcttcactggaaagcattgtggtgacatgtgtgacgcacgtggggaagggtcagaaaatgggttgagtgaagcctcgtacagctaagtcgggtgggtgggctggaatttggagctggaatcttctggggtgatggtgcccagccaagcctcggtggccttgactggaaaagtctgcccattgtgaatgcgcctcctgctctgggcaaactgtgctcattacttgctcactcgtaggctctccagactctgccctgagtcactttccccatatgttagctgtctccaccctgtgttatcaaa

SEQ ID NO: 603769 - DNA, 254 bp, Homo sapiens
gacgccccacaccgcagggatgcggacagacagcacctctatgcctcgagtctagtgaggcgcgtcacacattcgcaggagccaaagccatctcatctgacatgttctttgggcggccagtggatgcggagtatgaggccaggtctcggctgcaacacctctcagagcacagcgccatcagctcttcagacctgtttggggacatggatagagctcacagagcacgaagtgtatctctggggaacgtgctgcct

SEQ ID NO: 603770 - DNA, 618 bp, Homo sapiens
ggaggaaccaggattatctatgacgggaaatttctgatggagtgtcggaactacctgtggccaaaccccccaaaaggacctgccagccattcctggggtcactagccctaccagcgatgagcctcccatgcaagccagccagagccaactgcccagcagcccggaagataagcgggcaggcggtgaagagtcacaatttgagatggacatttaagggaccagccgtaggacgcaatgatgcttctatgtcccccaaggcccttgggaggagagctgcacagcattcaggcctcataccaggcagacactgggtgtgggtcggccacccagtcctgctcctcactcagggtgccagctctgccttgaattttgtgaacaccagcacatacctccttgtgcctctgtctaaaccgagctgctactgcaggggaatgactctcactcacaccctccctgcatggagctccagcgagtggactcagaggagtctatcagaatgatctggcaatcctagccccagcctccggagcacacccatctttccttaggctgggttacctgggaaagccacacttttacttctttccctgacaggaaataaaagccacatttacccta

SEQ ID NO: 603771 - DNA, 142 bp, Homo sapiens
ggtggattagcagtaaactgagagtagagtgcttagtttgaacagtggtcctgaagcgcgtaacccgccgtcagcctcctcacgtatacttcaaaggacctataactaagaacccctacgcaataatatagaggagacaagt

SEQ ID NO: 603772 - DNA, 131 bp, Homo sapiens
tcacagctactcaccaaagccaagctgagagtggttacagacttacctaaggtcacacagctaagaagtcgtgaacctgggatcgaatcaatgtctgtgtttatggagtttaacatatcatgttgatggcc

SEQ ID NO: 603773 - DNA, 413 bp, Homo sapiens
  misc_feature (94)..(94): n is a, c, g, or t
  misc_feature (175)..(175): n is a, c, g, or t
ctctggcgtgttagcagattatgcaacgcttggtcaagctttaattgaagcaactgaacaagctattcaagtggatcaagtgacgcaagacgantatgttgccattctagaaaagaacgacttgccacatgatttggccgtgctctttgcttcattccaaagtcccattgccgangatcgcttgatgtggcttcagatgatttagtaactgttttgggtcgcgacttaacgccattgcccgctgctttgaaggaaattttgtcacggtcaagcttaacggattgccagtaaccaatcactgggaattcaaaggtcaagggaggcatacgctaatatgcgttttctttaaattaagcgatccatccattttagcttatattcaattaatcaaccaacggctttcaagtaaaggg

SEQ ID NO: 603774 - DNA, 374 bp, Homo sapiens
  misc_feature (114)..(114): n is a, c, g, or t
ttgcccagctgtctccctcccactcagaacgaaatgttctgtctttttgtggttgtaacctcttttcacttggaatgacttgctatgtctggacgttgatcagggctgctgctntaagacgctctcacgcaataataaattacccagtaagccttggtgtaagatctcctcccccgcccccgcccacttttttctcctccccgtcctcctcatcccactggaaaagtcgctgtggttggttcttaggcggcttccaagcccatgctgatcagcatcacttgcctctggccaccctcccctgtgaccggcagcacatgtcgccccacgcggccccggcttggggagcgtaaggcatgtgggcctccatgcggccg

SEQ ID NO: 603775 - DNA, 163 bp, Homo sapiens
  misc_feature (80)..(80): n is a, c, g, or t
tgaactaacccagtgaactgcccatattttgttgggttgtcccccttgaaaaggaatataagcactaaagtgttaatgtncacttggtgttacatttccctacagatttttgtatagtctaatttggttaatccttgtgacattaaaaacacatacacttttt

SEQ ID NO: 603776 - DNA, 398 bp, Homo sapiens
tactggtgcagctcagactcactagaatctctgcgctcccgaggtgattctcctcctcagcctcctgaggagcggggattacatgtgtgcctgccaccacgctcgtgtactttattgtattttttacgcagagacagggttttgccatgttagccaggctggtcttgaactactgacctcaggtgatctgcccgccttgacctcccaaatgctgagattacagatgtgagccacctgcgcccggccgctgggtgccctttctttccactttgcaacctcagttttctcatctgtaaaatggaaaagataatcctaccaactcatagggctgtggtgacgattaaatgacagcggtaacgcattcagccctgtgttccctcgtagtgagtgttccatcg

SEQ ID NO: 603777 - DNA, 110 bp, Homo sapiens
  misc_feature (30)..(30): n is a, c, g, or t
ccctcacaagacctgcaaacagtaccgctngcaaaccagtattcaccggcgcagtcattctcataatcgcccacggacttacatcctcattactattctgccgctgcaaa

SEQ ID NO: 603778 - DNA, 360 bp, Homo sapiens
accatgtcttactactgaactcatacactcactcactttaaaggtccctccatactcatctcaataaactacactcaccagtgagacaggtccctccataccgttatctcaattcactcactcaccagtgagacatgtccctccatacctcatctcaattcactcactcaccaggagccaatgtccctccatacctaatctcaattaactcactcactaggagccaggtccctccatacctgatctcaattcactcaatcagcaggagacagagtccctccatacctcatctcgaattaactcagtcacgcaagtgagcccggtcgctccaaagctcatctccgttcgctcagtcaagca

SEQ ID NO: 603779 - DNA, 153 bp, Homo sapiens
tgatggtgactctagaggtatccccaatgcagcagcctcctgagcaccatccatgccaccgcaccttaggcctctcgttcactcatcacactgccctcagtatacaccccgcgagaaaagaccaagttggccctagcatgtacctcaccgcgg

SEQ ID NO: 603780 - DNA, 138 bp, Homo sapiens
cggacagcatcccgggttttattttcaagtagggtgcgcagctccaaacaaagttacaagggtaagtgcaactccaagttcctgacacagctaatccctgctcggtcttcaaaaaatagaggtctgtaattccttttt

SEQ ID NO: 603781 - DNA, 208 bp, Homo sapiens
ctggagttcgtgtccagtcagctgagctccaccttgatgccagtgttgagtgtccatcgggcctgtaacggtaagtacctgtgtcccctcaccaggccatcttgtcaaccgagcccatttcctccaaggtggactctagccaagcattgagagagatctgtctatggaaccaggtgggtttgttttctggcacacccataattcgttg

SEQ ID NO: 603782 - DNA, 333 bp, Homo sapiens
ttagaggaaccccgctaagtgacgatcctcatgaatgactatcctaaatttaagtatgttgttctctttttgctgggtttattcgtgcgggttcatcgtgagtaagaagcctgcctcgctgttcctgggaagatgccatagttttcgttactggatgtttggagtagatactggtctgtgattggtggaatggagaacacacgtgttggtgcttctgggtagcactggtttgcattagtttatgtttccatgccagagtttgtgtgggcgggcgcatgtgcaccacagagtgcactcgaggggactttcagtcacaggatttcataattgtca

SEQ ID NO: 603783 - DNA, 1016 bp, Homo sapiens
  misc_feature (1016)..(1016): n is a, c, g, or t
ggtgatttgcatgtttgtgtgaggatcccggggtcgccgacgtcgctcgtggtccccggcatgggctgtcagcatcgatgctcaaatacagcgtgcatgcaggcaggaccttcatagcatcctgctagtggcagccgtgagctgagtaccggtgacaggtgctaaacaggacggaagatagtaagctgcagaagggtctgttgattgcgctttcctcgctgatggactagtgactgtagacaactcaatctagtgcctgtgctaaagaatctatggaagttgatcggatagtcccctaatcgaggggtaccttactcttgccattcggagtgaaggaacgagactttctcgtgcgtaccgtcaattgggtgacccaaggaccaaaatgcctgtggccagggttagccttcgagtcaacgcgccgcaagggaagggacccatcgaaccgcaaacgagcgatgggcacgccgcaaaggaagattcccgtccgtgagaagattcccgtaagacgcaccggcacaaggagaggcaccaggagaaaatctcgcgaggaggccacatgaggcacccggaggaaataccgaaccggctgaaggcaaacgccaacagagaaagctaagcggcagagcagagcggaagcgagcaccacctacaggacgccacagtcgcagacgttagcccagagcggcgaccaccacaaagagaagcggtaatcaccacggctccacggaaagggaaccattgggaagcacaacacgatcgcggaatactgcaaccagcaacattagagtgacgcaacggtaaccaaaccagagcaccccgagaggacaggtaggaaaaaccgagaccaccgaaccgacagacagcgggcccccaacgccgatggaagacacataacagagcaagtaggacaaggaggggagcaacaataggggaaaagagcacggaatgcagaccggacaagcacaaaaggacaggcagagagcgcagagagaaagcgagaccagacccaagan

SEQ ID NO: 603784 - DNA, 510 bp, Homo sapiens
tgaggcgtagaccactgggtgcccgtgcttgtgttttcaaacgtggctgtgaacgtgattgcgtcacttggggtgcattttaggatttggatgtgatccaaaatgtctacaccctgaagctcagtcttctgtcatttggcgtgttagctttctgtcaggaaaccttttgctgttctttttttaatgtgtccagggctctttgaagaaaactgcattttgtttgcacaaactgctgcattcttacagacttctggataacaaaataagaagcacgcttgagggtggggtctttcattatgatgacaaaaggggagagagcaggggtgtcagcggagcagctggaaagtattagcaaggacttaggggaattaatagggtcctcaatttggaatggtttgtttgctacagggctcaatatggtagtcaaatgtttttcttttcatcctttttcttggaaatcaattttttaaaatatagtttgcttcttggctccctgttctgcatctcgct

SEQ ID NO: 603785 - DNA, 328 bp, Homo sapiens
  misc_feature (160)..(160): n is a, c, g, or t
cttgtcgttgatgggtatgtgtttaaaaacatgcacggtgaggccgggcgcaagttgctcacgcctgtaatcccagcactttgggaggccgaggcgggtggatcatgaggtcaggagatcgagaccatcctggctaacacgtgaaaccccgtctctactnaaaatacaaaaaattagccgggcgcggtggcgggcacctgtagtcccagctactcgggaggctgaggcaggagaatggtgtgaacccgggaagcggagcttgcagtgagccgagatcgcgccactgcagtccgcagtctggcctgggcgacagagcgagctccgtctc

SEQ ID NO: 603786 - DNA, 392 bp, Homo sapiens
agcagacatcttaccattatcagatctgaaaaccccatgagtgttgtatagctacaaactttaggtcttctctggcttgtcgcacaatgtttttatagttaccagagtgtacagattttgcacatattttattaaattttcccctgattacaaattttgctatggtctgaatctctgtgtacaccccaaattcatatgttgaaatcctagcgcctaaagtgatggtatcaggaggtgaggccttagggaggtgcttagatcatgaaggcaggacactcatgaatgggactgctgtgcttataaaagaggcccctgagagcatgtttgctccttcctccatgtgaggacacagcaagaaggtggctgtctgcaacctggaagagagccctcac

SEQ ID NO: 603787 - DNA, 785 bp, Homo sapiens
ggcttcttcgcttctctcttggaagtccagtctctcctcggttgcaatggaccccaatgctcctgcgccgtggtgtctcctgcacctgcgctggttcctgcaattgcaaagagtgcaaatgcaccttcctgcaagaagagctgtgctcctgttgccccgtggttggtaacgcaagtgtgccccagggttgtgttttgcaaaagggggcgtcagcagaaagtgcagctgttggaattgatgcccaaggacaaaactttttctcccagattgtacaccagagagacctatgtacaaaaccctggattttttttatataccaaccttgtgaccccatttgtgctacatttccttttccctggtgaactactgtgacgtgacttaatttaacagcacttttagaaccttcaaaaaacaaacaacaagcatgaagctgacacaaaaaaacaatattgtgtgtcggcggtattcatcgggccctcttggagaacaagacgttttttcataacgcacccaactacttcgtgtttagtagccgccggcgcggcccccccgctagtaagggcatagctgtggccaaaacagttgggcgtccaatgacgcggttggtcccccaaaagaggaacgacctcgtgtggtcacggtaacacaacgggcggttggggattctctccaccaccaatagtgaaacaacagggccggcgggggaaacagccgaggggcgtttctaaaacacattccgacagagtgggacgcatcggggggcaccaccagggggcctcacacag

SEQ ID NO: 603788 - DNA, 200 bp, Homo sapiens
tcagcacactttagtaggtaataggacggctctctcctttaatccaatatagcagccgtgaagtcatttctgtatttcaggaggacgggcaggagatttatggaaaagactctgacaaggactccgtgaatacaagttcctgaataacttcaagaatcataccactgtggactaaattgtgcgtgagagggtaccggagc

SEQ ID NO: 603789 - DNA, 215 bp, Homo sapiens
tcagatacaggttctaatcacagagaaataacatatatataaagctaaaaaattgaatatcgatctcttgagtaaccagaaagaagcaaacacatatttgcttacctctctcggatacatcatgtgagcattatacatgcacttgtactactttacccttccctgctaagaaaattaaaatagtttgcataaatcatttaaggcaactcactacc

SEQ ID NO: 603790 - DNA, 257 bp, Homo sapiens
atcaaaacaatacgcataagttagacaagattaaatcttgtttgatatctgcccaaacagatatgccccatgttggaaacatgtgttttcctagtcccatccaggcttcccccaagaaagccatgatgtgggtttaaaccatatgttttgagtaaaggagaatagaaaaaggggagtgtccccaaaatggaaaaagatgaagatgttccaaggaaatatgctgaaacagaacagtgaccgttttgcccaaaactcca

SEQ ID NO: 603791 - DNA, 455 bp, Homo sapiens
  misc_feature (145)..(145): n is a, c, g, or t
  misc_feature (177)..(177): n is a, c, g, or t
  misc_feature (254)..(254): n is a, c, g, or t
  misc_feature (383)..(383): n is a, c, g, or t
  misc_feature (405)..(405): n is a, c, g, or t
ctcgactcgtatctattttaataccactcctctccccatcttcctgcgtataggagcttaccattttagtaaatcaggcaattttatcatttattattagatactaaaaatgaaaaagatgcaacatagaccaagttacatcaangctattagaaaataactgaggccagtagcagnggctcatgcctgtaatccagcacttggggaggctgaggtgggtggatcacccgaggtcaggagttcaagaccagctnggccaacatggtgaaaccccatctctacaaaaatacaaaaattagccaggcgtggtggtgcatgcctttaatcccagctactccagagactgcggcaggagaatcgcttgaacccaggaggcagacgtngcagtgagccaagatcgtgccnctgcactccagcctgggtgacagcaagactgtctcaaaaaaaaacaaaaa

SEQ ID NO: 603792 - DNA, 760 bp, Homo sapiens
gccaagtccctcatgttcgcagcccatcgcttcaagagcctgctttcttttcagcgtcaccaagcttatgcggtaaagaggctcttacgtacattctgggggaaaacaggatgatgatgagggaggaggtataggaggaggaggacttcatatccatcctcggcagtgtaaacgcaaatggagaccgagattctggactacgtgtgaccgggccccaaggctgggcctccctgacccggcccagactggtggtctggccttatgagggaaccggggctcccccattgccaccccaccagtgcccggaatggccctaggaggccctctgaggagagctagagtccccagccaagggtgcagctgacaccctagcactggctgtgacatagctgcttggtggctgcctctggtcctgaggggttagggacattcccccaagggtataaccctggctctgccaccccatgagacccagccccagcatcccagcccagtgagtgggcaccccatagcctctcaggatgagacccagtaaatagccggaggtggagctgggccagctgtggagcccccaggcccccaggccagtttcgcttggctttcatgactgtggtggtggagatagcgtggggaggcctcgcccatggtctcacgtggccagaagtgcccttagctttggatccccaccgtttggcacaggactttggccaccagcccggcccctttgggattgtcccttatttaacccagtttcccgaga

SEQ ID NO: 603793 - DNA, 246 bp, Homo sapiens
aggcacactgactcctttctacacttgcattcaacatagtactggaactgctagcacaggcaattaggcaagaacaagaaaaggcactcagattggcacagcagaagtgacaattatctttctttgcaggtgatatgctcttacatgtagaaaaccctaaagatttcacacaaaatactgtaagaacaactaaatgacttccagcaaagtcggaggccacaaagtcaacacaaacaactcaattac

SEQ ID NO: 603794 - DNA, 175 bp, Homo sapiens
gcaaagcgagccgtcagtcctagctatcagtcaaacacaggattccgggaatccagatctgctgcggtcttcctagattcactgaatccacttctgtgtagcacctgggtcagctgtcaattactgctagtcctcaggatttcaaaaataatcttaacgcacagtccaaggcaca

SEQ ID NO: 603795 - DNA, 993 bp, Homo sapiens
atagtggtctataatctgctctgagtatccgagtgtcaccgatatattttcactctatacttattcatacttcacaactgcgaaagttatctattcgaacgtatacgtagtacatatcgactggttgggcgtatagacgcacaagcgttacgatcgcggccactctcccgtagttaacgccgtggacgcgtgtcagcgaaacatctctctcttactcatccctgtttatcgtcctccatcttctctacatggtgcgcttgagtgatcgtcgtgtcctcccactcgcccccgtgtccggggccctcgcccacacgcctcgccgctcgggtggtcttggggtgggcttcctctcgcgtggtgtgtgtgtgccggcgccttcgtgccgtcgactgtatggcgatcttttgagtggtgggagacggccagccggcggtgcgagtcgagtcggctcctgctggtggctcaggtctctctcggttccccgtcagtcactctcgcccgtctctttgctcgctctcctcgccgtgtcagacgtctctcttctgtctgccttgtctgtcgtcggcgtcgtcttctcctggtgtcttgcgtctgttgtgtgttccgggtcccgccgtgagcgtggcgtgcgggcgcggtcttctgttcttctcgtctctggcttggcgtttgtgcggagggcgggtgcgcccgcgttgcgcgggcctgccgtcctcgtgtgggtcggggggcgctgtgtgggggtgggtgggtgcgttggctggggcggctctgccggggctgtggtcggcgcgggtgcgtttctgggcgtggtctgctcggctcgcgcgtgccgtgtgctcggtgtgcggtgtccccttgtggttgggtgcgctcgtcggtcgtcggtgggctcggcgcggggctctggttcgtgctgcttgctttcgcttcgaggtcggctggtgtggtcgtgtgtgctggtgcggcgcgcgcgcgtggtcggcgtcgccg

SEQ ID NO: 603796 - DNA, 846 bp, Homo sapiens
  misc_feature (1)..(1): n is a, c, g, or t
nggccccacatcgcgttcttccgctttctttggatgggatccggcccctccccgggcctgggttcccaaagcggcgtccctccctccctctcttgtccctcgcccgagtccttcttcgcgtccacgtccacagggtttcttccgacagtcctctccccctcgaggtgcctgccatcagcctctttagcgtgcggagatccagttagtattggccggccctcccccagcacctgttgggccctccccctctagggtggaactgaccccttccgtcgtgttcttgtctctccacacaatttcgtgccgccgcaccttagatgtggcgtgcgccccaaggcttgttttatagccagccccggtttctcgcgccccggtccgagtttcataagagatatagacaccccgcctggttctcctcgaagattggctccctcctctagcaagatagatagggtaagagataagggatgagagttcctttggctctgcaaaaacatgcaactatggagggggacagaaccattgttctctctcgctcacatagctcctcccgagcatagtcactcgctggtgaaaacggcacaaccattgtctacttctaagcgcccccacagcttcttatacagggggataagccttaacactcgtgttatttttacgaccttcacacccataaatggtaggaacgagcataataattcatcaccaccatacgatcaccccgaaacatactacctcctttgagcccacagaccccgccgtgataactaataacgagacgaacagacattcccctacccgaactgtcctaattaaaaaacggaatcccccccttctaacaaaaca

SEQ ID NO: 603797 - DNA, 1090 bp, Homo sapiens
  misc_feature (45)..(45): n is a, c, g, or t
  misc_feature (143)..(143): n is a, c, g, or t
  misc_feature (1048)..(1048): n is a, c, g, or t
  misc_feature (1080)..(1080): n is a, c, g, or t
  misc_feature (1083)..(1083): n is a, c, g, or t
  misc_feature (1086)..(1089): n is a, c, g, or t
aagcctctacaatgggctgttgcccgcctgcagcgccaaatgagnttgctctgtccgcatcgcctgtatgattctgtcaaacagtctacaccaagggctctgagcatgccagcattgggagccgcctcctagcaggccagacnacaggtgccctggctgtggctgtggcccagcccacggatgtggtaaaggtccgattccaagctcaggcccgggctggaggtggtcggagataccaaagcaccgtcaatgcctacaagaccattgcccgagaggaagggttccggggcctctggaaagggacctctcccaatgttgctcgtaatgccattgtcaactgtgctgagctggtgacctatgacctcatcaaggatgccctcctgaaagccaacctcatgacagatgacctcccttgccacttcacttctgcctttggggcaggcttctgcaccactgtcatcgcctcccctgtagacgtggtcaagacgagatacatgaactctgccctgggccagtacagtagcgctggccactgtgcccttaccatgctccagaaggaggggccccgagccttctacaaagggttcatgccctcctttctccgcttgggttcctggaacgtggtgatgttcgtcacctatgagcagctgaaacgagccctcatggctgcctgcacttcccgagaggctcccttctgagcctctcctgctgctgacctgatcacctctggctttgtctctagccgggccatgctttccttttcttccttctttctcttccctccttcccttctctccttccctctttccccacctcttccttccgctcctttacctaccaccttccctctttccccacctcttccttccgctcctttacctaccaccttccctctttctacattctcatctactcattgtctcagtgctggtggagttgacatttgacagtgtgggaggcctcgtaccagccaggatcccaagcgtcccgtcccttggaaagttcagccagaatcttcgtcctgcccccgacagcccagcctagcccncttgtcatccataaagcaagctcaaccttggngtntcnnnna

SEQ ID NO: 603798 - DNA, 1162 bp, Homo sapiens
  misc_feature (52)..(52): n is a, c, g, or t
  misc_feature (65)..(65): n is a, c, g, or t
  misc_feature (68)..(69): n is a, c, g, or t
  misc_feature (84)..(84): n is a, c, g, or t
  misc_feature (86)..(86): n is a, c, g, or t
  misc_feature (100)..(100): n is a, c, g, or t
  misc_feature (105)..(105): n is a, c, g, or t
  misc_feature (110)..(110): n is a, c, g, or t
  misc_feature (117)..(117): n is a, c, g, or t
  misc_feature (125)..(125): n is a, c, g, or t
  misc_feature (131)..(131): n is a, c, g, or t
  misc_feature (138)..(139): n is a, c, g, or t
  misc_feature (159)..(159): n is a, c, g, or t
  misc_feature (163)..(163): n is a, c, g, or t
  misc_feature (174)..(174): n is a, c, g, or t
  misc_feature (176)..(177): n is a, c, g, or t
  misc_feature (215)..(215): n is a, c, g, or t
  misc_feature (1120)..(1120): n is a, c, g, or t
  misc_feature (1152)..(1152): n is a, c, g, or t
  misc_feature (1155)..(1155): n is a, c, g, or t
  misc_feature (1158)..(1161): n is a, c, g, or t
tccttcttgaatgtaagccgtaaaacaagaaaatagggcaggggcaaatagnccatacgcgttanggnncatttacctggggantnggccccgagcttanatggntgttncggctgngcgcaatnagtttncttttcnnacggcttttgatctgtaaanagtnacacaaggctngnnatgccagcattgggagccgcctcctagcaggccagacnacaggtgccctggctgtggctgtggcccagcccacggatgtggtaaaggtccgattccaagctcaggcccgggctggaggtggtcggagataccaaagcaccgtcaatgcctacaagaccattgcccgagaggaagggttccggggcctctggaaagggacctctcccaatgttgctcgtaatgccattgtcaactgtgctgagctggtgacctatgacctcatcaaggatgccctcctgaaagccaacctcatgacagatgacctcccttgccacttcacttctgcctttggggcaggcttctgcaccactgtcatcgcctcccctgtagacgtggtcaagacgagatacatgaactctgccctgggccagtacagtagcgctggccactgtgcccttaccatgctccagaaggaggggccccgagccttctacaaagggttcatgccctcctttctccgcttgggttcctggaacgtggtgatgttcgtcacctatgagcagctgaaacgagccctcatggctgcctgcacttcccgagaggctcccttctgagcctctcctgctgctgacctgatcacctctggctttgtctctagccgggccatgctttccttttcttccttctttctcttccctccttcccttctctccttccctctttccccacctcttccttccgctcctttacctaccaccttccctctttccccacctcttccttccgctcctttacctaccaccttccctctttctacattctcatctactcattgtctcagtgctggtggagttgacatttgacagtgtgggaggcctcgtaccagccaggatcccaagcgtcccgtcccttggaaagttcagccagaatcttcgtcctgcccccgacagcccagcctagcccncttgtcatccataaagcaagctcaaccttggngtntcnnnna

SEQ ID NO: 603799 - DNA, 128 bp, Homo sapiens
  misc_feature (22)..(22): n is a, c, g, or t
  misc_feature (51)..(51): n is a, c, g, or t
tcgcctcccaggttccagcgantcttgtgcctcagcctcctgaattgctgngattacaggcatgagccaccacaccaagcccaggttgttgttcttaagcaagtaaacgagttattccagtgatggct

SEQ ID NO: 603800 - DNA, 1697 bp, Homo sapiens
cttcagcacgcttgcacaagggagctcacttacaaaggagaaattgtatacgttttaaaactatacttctctgtgcaaaatacctctcactcatgcctcataaaccaccatctaacaaaccacgtgtcatccgatatcggctacttcaacatattatcccgcgagctgaacaactctatcactcaaagctaaccatgcacctccaaacgaaccacctcatggctattcaatctcattaaacacgagatacctgctactcagactcctggcccccaaaggctcccacgataaacatctcacactaaacaagggctaattccaaacctatccccttctggagaaatcacaagccccctctcccggctgcaataccacagctcactacggcctggtctacattccggtcaatgagaccctcagcgcataacaatacgcttcacacaaccgtacgccccacaaagaaacatttcacacaaggaacccagctcccaccccccttggcaacgccaccccccacggacaacgaattggcccatccgcattaaaaccactcttcaaacaaactcaaaggacacaaacacgcacaccccccacccgccccttggaaatcatcccacaccccaactaccccatcctcctcacaaaccccccacgcttacgccaaaccacacaacttacttcatacgagcccccctaaacatccccctcctccaacgcacaccaagcatataggagcccccacgaccggcgctgagcatacaacacacaacacaccacgcacccctcgcgacaaacccccccgccgggacacacaacctctcaccaccccatcaaacaacacggggaccccaccctctccgaaacctaccacataatcctcacaacacgacgggaccaacacaaactcctcataagcaaacaacataataaaaataatcacacacaaaataaaaccaacatacacgaaaaccaacagtacacaacccaacttacataaactaccaacacacttcaaaacctataaaacactcaacaacaacacaaacaaaacaaccaacaaaaaacacatacatcaaaacccaaccctaaccacaacaactaccaccacacaccaaccatcgcccaagcaactacattcatcccaacaccactacaagcaacaaaacacataatatcaacacacaaccaacacacccactctataaaaaactcactacaccaccaatgacaccctattcaatcataacactacattacctccatttcaaaaactatattcacaccaacctaatcattaactaaaaccaacatataatcatatataaatctcaacacaaaatacaaataataacaatactataaaaactaccaacaaatcacacccaacccctcttaataataaatcacgtcaaacacttattaaccagcaaaatagcactcctcccacacaccaataacatcgactacaaaaacacacaaaacaacaaaaaaaaaataaccatatatacacctacacccgccccccacttcctcactaatgccgtaacacacagcactcactacctaccgaaaacaacccaataaatcatacaactacccaatactaacacacctcacacccaacaatcattaacatcccactgtaacacaaaaaatgtattgccaccccttttagcctacctctactcaagagataa

SEQ ID NO: 603801 - DNA, 1404 bp, Homo sapiens
gctggtgctgagtgccaacttatggcagagtgtgcgtgctgcctgggttccccagtgcacctgttggcacgtgacagtgttggcacctgtcctattcctgaaacagcctctctcaccaagttcccttgcctacagaagtgccactccctcccacacccactgaagtgtggggatagtcgtgtgtcctagcagtgcctcagtggcctctgtgtggctctggcccagacagatatctgcagtatcttgtgctatgggtgggagtcattcttcctcaagttatcggctagctgtgctgctgactggatgggctgatcctcccagggctcaagggctgatggtccgctcagcggtctcatttccccaaggccaagttcaaggccagcagaccttctgtgaggcgctcttggtcccctgggcctggagggagacactgcacgcttcacactcgatcaacagggcacgtgcgaatgggccctcgggtgcaggtgccacaccattcttgcataactcgagagctcatgacctgaatcacgtcctcgggtccatcagactgtcgtccaatgttgataccgagactgccaaggaccaggtccacttgtggaatcctgaccgccattggggtagtaagccgttgactcactacaacgcatataactgcagtgcctgagcaatgcgttcgcgtcaaaggcggacacactgttccagcttactgagagtagaccgacgttctatgcacctctagagtgagaccacgttgcgagccaaaccaagtgatggcatcaggccctcacgacaatacacagtgagtccttggaatcatgacatgaatttaacacattcggctagattctcccatgtgatttagcgcccagcgtgacgcaacatctcttgggaggctgcctcagtagaagtatatgagcgcctctagcggcacgttcagacaggtgagtggcaccacctcacatgcgcgccatagtaggagaaccagagcgaagcgaccgcgtacgcgctgtctctccactgcatcctataaccatcatctcgctgcggccccacgtccaactagaggggacacgaacagactgcaccgccatcactctaccgcacgtgtgctctggccgtcgcccacccgccagcacgactggagcacagcgccgaccagagtcgccgacactccgctctagctgccagatggcgccaacggccaagcgcgcggccatcgggacgcactcaccacgcgcgagctaacaacaccagcacgaccacgcaacggaacggcgctgcaagtgtagctcctgcggtctgcacaacgcacagctgacaacaggagcggcctagaccacgccccggaccagggagtcgctgagtgcacgtgcaagagcgagcgctcacgacccgctcttt

SEQ ID NO: 603802 - DNA, 222 bp, Homo sapiens
  misc_feature (180)..(180): n is a, c, g, or t
  misc_feature (212)..(212): n is a, c, g, or t
  misc_feature (215)..(215): n is a, c, g, or t
  misc_feature (218)..(221): n is a, c, g, or t
atgtggacgcacagtagttaggtggacgcacagatgaaggtggacgcacagagaggtggacagcacagagaaggtggacagcacagggaggcctcgtaccagccaggatcccaagcgtcccgtcccttggaaagttcagccagaatcttcgtcctgcccccgacagcccagcctagcccncttgtcatccataaagcaagctcaaccttggngtntcnnnna

SEQ ID NO: 603803 - DNA, 117 bp, Homo sapiens
gtattttccccttaatgcctaccttctttaaactagtccccatcccacttcccccagaaaggatattcagttttttatcttccttcatagccaggtaacgtttttgcagtacagccg

SEQ ID NO: 603804 - DNA, 787 bp, Homo sapiens
  misc_feature (745)..(745): n is a, c, g, or t
  misc_feature (777)..(777): n is a, c, g, or t
  misc_feature (780)..(780): n is a, c, g, or t
  misc_feature (783)..(786): n is a, c, g, or t
taacattgatgactcgctcattggtggaaatgcctcctctgtgccctcctctgtgctgtcccatcaaggatgccctcctgaaagccaacctcatgacagatgacctcccttgccacttcacttctgcctttggggcaggcttctgcaccactgtcatcgcctcccctgtagacgtggtcaagacgagatacatgaactctgccctgggccagtacagtagcgctggccactgtgcccttaccatgctccagaaggaggggccccgagccttctacaaagggttcatgccctcctttctccgcttgggttcctggaacgtggtgatgttcgtcacctatgagcagctgaaacgagccctcatggctgcctgcacttcccgagaggctcccttctgagcctctcctgctgctgacctgatcacctctggctttgtctctagccgggccatgctttccttttcttccttctttctcttccctccttcccttctctccttccctctttccccacctcttccttccgctcctttacctaccaccttccctctttccccacctcttccttccgctcctttacctaccaccttccctctttctacattctcatctactcattgtctcagtgctggtggagttgacatttgacagtgtgggaggcctcgtaccagccaggatcccaagcgtcccgtcccttggaaagttcagccagaatcttcgtcctgcccccgacagcccagcctagcccncttgtcatccataaagcaagctcaaccttggngtntcnnnna

SEQ ID NO: 603805 - DNA, 650 bp, Homo sapiens
cgcgagcatatgattctcatacccaggaactgtaaatttaaacctaaatatttggacgatcgaccacatcctggatgccccgtagcctctgcccgcatcctccagggggcccaaggagcctgcactttgctgtggtaggcctgatagttgaagaatgtaagttgctcatcgaggccagtgaaagcgtgcatctgttaaaggccttcaaggaagagaaaccaggccctgcgtcaggcagtgtgagtttgccgtttgtccttaactttcttttttttttttttttaaaaaaagaaaactttaaaaaaactcccattaaaaacaaaacatctttgtgtttttgtgaaaaaaagcaccaaaaatgccgtaacttgactttcaaatgggacggaggaagagctttttgaggcccaacccccataagagccgaaggatttctgcagggggggggaaaaaaaatagggtgtaaaaaaccgggggggaacccttttgggccccttgccccacattccttttttatcggatgggttttatagggggggcgctgggggttcttggtcccaacccttatgaggggtggataaaaaaacaagcccgggtgttaaaaacggggggggggaaaaccgggggaaacaaatataaaatccggaaaa

SEQ ID NO: 603806 - DNA, 1044 bp, Homo sapiens
  misc_feature (45)..(45): n is a, c, g, or t
  misc_feature (143)..(143): n is a, c, g, or t
  misc_feature (1002)..(1002): n is a, c, g, or t
  misc_feature (1034)..(1034): n is a, c, g, or t
  misc_feature (1037)..(1037): n is a, c, g, or t
  misc_feature (1040)..(1043): n is a, c, g, or t
aagcctctacaatgggctgttgcccgcctgcagcgccaaatgagnttgctctgtccgcatcgcctgtatgattctgtcaaacagtctacaccaagggctctgagcatgccagcattgggagccgcctcctagcaggccagacnacaggtgccctggctgtggctgtggcccagcccacggatgtggtaaaggtccgattccaagctcaggcccgggctggaggtggtcggagataccaaagcaccgtcaatgcctacaagaccattgcccgagaggaagggttccggggcctctggaaagggacctctcccaatgttgctcgtaatgccattgtcaactgtgctgagctggtgacctatgacctcatcaaggatgccctcctgaaagccaacctcatgacagatgacctcccttgccacttcacttctgcctttggggcaggcttctgcaccactgtcatcgcctcccctgtagacgtggtcaagacgagatacatgaactctgccctgggccagtacagtagcgctggccactgtgcccttaccatgctccagaaggaggggccccgagccttctacaaagggttcatgccctcctttctccgcttgggttcctggaacgtggtgatgttcgtcacctatgagcagctgaaacgagccctcatggctgcctgcacttcccgagaggctcccttctgagcctctcctgctgctgacctgatcacctctggctttgtctctagccgggccatgctttccttttcttccttctttctcttccctccttcccttctctccttccctctttccccacctcttccttccgtcctttacctaccaccttccctctttctacattctcatctactcattgtctcagtgctggtggagttgacatttgacagtgtgggaggcctcgtaccagccaggatcccaagcgtcccgtcccttggaaagttcagccagaatcttcgtcctgcccccgacagcccagcctagcccncttgtcatccataaagcaagctcaaccttggngtntcnnnna

SEQ ID NO: 603807 - DNA, 316 bp, Homo sapiens
ctccttttacggatgtacaactgccaccgaaacagggaaataaagaatgaaagacaggacttcccgctcgtggctcagtggtcaacgaatcctactgggtggcggcgtaagacataaccgcggccgcggttatatcttacgtactgcctttatttccagcggtttcatgtgtcgccatctcttgctaacgtgttgtcatttatcaatcgctttcgccgagcatcatcgtttataccacgttgctctctcgggggaattggcaccgatagacgcttgcaatccatataagccgaagccatgtacgatctaaccgcgt

SEQ ID NO: 603808 - DNA, 765 bp, Homo sapiens
cagaataagtacatggaaaccagaaatgcaacagttactaaaacaccatttaatagttataacgtcgttacttgtactatgaaggaaaatactcagtgtcagcttgagcctgcattccaagctttttttttaatttggtgttttctcccatcctttccctttaaccctcagtatcaagcacaaaaattgatggactgatacaagaactatcttagaactcagaagaagaaagaatcaaattcataggatcagtcaactaccttaatggtggtagagcctttacctgtagcttgaaaggggacagattggcaggataagagagaaaactgaaagaacacctctgggtccttctgtccagttttcagccactagctcttactcagctatccattatagctcttgcccttaagaagctcatgcattaactctcatgaacaacacatctatctgggggacacggaagtgctgataccttcctttggctatcctcctccgccagccctcaacatcctatcttcctgccccacaactgtgcgcagctacccctgagtactccctctttgctctacctgactttcaccctattccaactctgtttcaacctccttcatcgcgtgatacgtcgcatcatcttccctcgattcccgcgactgcccttcttgtctcctctcgtatccgcactgccccgtgtcatgccacggcctcccgccgcctctgcgctgggggtcacctccttgcccttccccctcgaccgcacggtcccct

SEQ ID NO: 603809 - DNA, 288 bp, Homo sapiens
  misc_feature (47)..(47): n is a, c, g, or t
gtacggagacgctgtcacgctcggtagtgttcttgagtgcacgtgtntgataaagaaataagacataaacccaccatcacaaataaaaaaaatttggcagcgaagagaaatgaagaaaaactgaagaaaaaaaaaaaaacgggaaaaaaggacccatccaaatttttccccccacccttacccgagggtggcattggcccggcctgggttttgtgcagccaattcaaaccaagaggcttaaaaacattacccgaggggtggcgggggcccctcaaaagttcgcccggc

SEQ ID NO: 603810 - DNA, 559 bp, Homo sapiens
caatgaatctagctctactagctcaggctgtatattcagtctctgaagcacttcttcagtgcatgctaaagacaggattaacaggtttaatctgttcttctcccaaaagtgactatccagcaattccaaataaggtatgatcaggatccaccatatctcctggcctgtctgcaaatccccccgtttcttcatcttgacatgctaaaatgaaattacgcagtttctctctatcaatccaatgaagtcttccaattatctttagggaagccaggacccaccatgagtagcatacatctggtaacttctccggccttccattgagcccgcctgagggtaattgtcgttcacaaagccaccagccaagtcaatcagaatttacttgatgcaactgacttgtaatagccagaaatcctgtgcaacagtagatctgcccagcatgggattcagaacctggtctgcaaccaaagtccacccgtcaaaaaggttcaataacagggataaaatacagaattccgattagccttttttccaacatttaatgggcatccagcttccccaa

SEQ ID NO: 603811 - DNA, 1077 bp, Homo sapiens
cgtgggcggacggcggctgcagcgcggagtgagctggggtcgctgtgaggtctgcgaagcagagcccgggacgtgcgcgcttggtgcactgatcctgaatggggatgctcctgaggtggccctggggtctccagtggctgctgcggccattccctgggagcccggcggctgggtgccctgcgatggatacttggtttacggcctgtcccatgtggctcctggtgcgccaccctgtgtggcccgctgcttgcagcgtgacgtggagctgctgtgcgagctgcgagcgggctccgtgagacaggcagttatctccccgtgcaatgtcttccctctgggtgcagcgaggttggcgaagttggtgaagcctgtgaggccgtgccaagcttggcatgcggttcctcatccggcagggggtctggcgaccacatgccggccccttgctcaggcccttgcaggccagtgggaggcgcccattgtctttgtgggcttagacacattctttgacccttaggcacgtttagccttttatggcacgcgttcgtgaggctcgcgactagcctggtggacctataatggctgaccctttgtcaggttagagacaaaacgccacgtgaacggttggtgacacaggaagagcgtaacatttaattggcggttccagagcaacttgtggccacctgaaaggaacccacgcgttaatgtgccggagagggaacaacacatttctcgacatatagaccggaacagcttggttacgggaaggaacccccctttccatggagtacattaagcggttggtggagccgagcgataccagactttgaggacagcctttatgtagggggtccgccctgcacgttcataggcatcgtgctttgaagaaccgccggacgttcgttctacgatttacggagcaatcgcggatatagaggcacacctttattcagaagaagctttctaatggaacacgcgagcaatggaacacttttcgacgagcgcggcacatttccctttatgtactggccgcccaggcaacatcgacgtttgtactgggagtggcacagattacacgttgtg

SEQ ID NO: 603812 - DNA, 233 bp, Homo sapiens
  misc_feature (129)..(129): n is a, c, g, or t
  misc_feature (153)..(153): n is a, c, g, or t
ccaggtagacctacgttggcttctgtgatggttatattgcctagcaagcacacccgtggttgtgaaaatagtatagcaaaaaagaaaaatccccgggttattgatgtgctagagtattgtgtatgtctntttaaacaagttctacgtttcacncttacacagtaataatcacggaaaagtgtaaaaattcaaagagtgaaataaaaattttatcatgttaggtctacctgggt

SEQ ID NO: 603813 - DNA, 188 bp, Homo sapiens
ggttgtttacttagaggccttatatttgtagctgtatataataccattatcacagcacaaaatcataccccatctggctctcttaaggtacatgatacatcagactactgctccttcatcaaagtgtcatcatctcaggatatgtcctgcgcacctatgatggctaccgatgcatcgtacttcgtcat

SEQ ID NO: 603814 - DNA, 139 bp, Homo sapiens
cacaccactgagtccaagaaccagcctggttatcaactatttgaagagcacttcctgtgtattcagatcccatgaaatgtgttttgtctatttttattactagtgtttaagtcattttttacttgactcaggtggtgtg

SEQ ID NO: 603815 - DNA, 218 bp, Homo sapiens
ccgcgcaggttgctccaccggcaggttgtactgtctttgtctggttttggtatcagcgtaatacctacaaaccagaaaattttccttttttttttctaaaggagattgtacagaatttgaagttcactctattttatttttttgagacggggtcttgctgtgtcacccaggttagagtgcagtggtgcaattgtggctcactgtaaccttgacctcca

SEQ ID NO: 603816 - DNA, 407 bp, Homo sapiens
  misc_feature (15)..(15): n is a, c, g, or t
  misc_feature (90)..(90): n is a, c, g, or t
  misc_feature (139)..(139): n is a, c, g, or t
  misc_feature (147)..(147): n is a, c, g, or t
  misc_feature (179)..(179): n is a, c, g, or t
  misc_feature (222)..(222): n is a, c, g, or t
  misc_feature (245)..(245): n is a, c, g, or t
  misc_feature (265)..(265): n is a, c, g, or t
cccacccttgccctnccccctcatgttgatgtccaaagagcgttccccctagcaaactccccccaaatgcccaatctcccagccttagantcctgcctttctggggaaactgaactgtgacagttacctaatacaaagnattaatanttttatgtcacattatacttagatagccttgnaatatatatgctcatccccacctcaatatttcagccttctggntctagttacttaatacattattnaaaaactttttactatatcnaaaattactttttaaacgttttagtaactgtatttcaagataattttctgtgttatcctatgccttttattttatgcatcttaaaacatcattctgagaaggacctataggctttatcactgccaaaggagtccatggcaat

SEQ ID NO: 603817 - DNA, 105 bp, Homo sapiens
catatagaagcaggtaaataaggaacttagtcccaggttcaaatgggggaaccgaggcccagtagagtgacactgggctgtggcgagtgggagactgctcttggc

SEQ ID NO: 603818 - DNA, 255 bp, Homo sapiens
  misc_feature (13)..(13): n is a, c, g, or t
  misc_feature (89)..(89): n is a, c, g, or t
  misc_feature (172)..(173): n is a, c, g, or t
  misc_feature (177)..(177): n is a, c, g, or t
tccccgacttctnccgccgcccccgaccagatcgaccgcttcgtgcagatcgtggacgagccaacgcacggggagaggctgtgggagtncactgtgctctggctttggcctcactggcaccatgctggcctgttacctggtgaaggagcggggcttggctgcaggacataannaaantgaaatccgacgactacgacccggctccatcgagacctatgagcaggagaaagcagtcttccagttctaccagcgaac

SEQ ID NO: 603819 - DNA, 392 bp, Homo sapiens
gcaatggcgcgatctcggctcaccacaacctccgcctcccgggttcaagtgattctcctgcctcagcctcctgagtagctgagattacaggcatgtgccaccatgcctggctaattttgtgtttttagtacagacggggtttctccctgttggtcaggctggtctcgaactcccgacctcaggtgatccgcccaccttggcctcccaaagtgctgggattccaggcatgagccactgtgcctgacctgattacttgttttaaatacaggcctgattaggcttgtgaccactctgtttggcttcactgaagggctgccaagagatggacttttgagagtgacactgcaagataattgagatcctaagtaaggccgtgagagagggaaggaggt

SEQ ID NO: 603820 - DNA, 280 bp, Homo sapiens
cccccccccgaaagggaatagggtttttttccggggcgggggccggctaaaaccgggggggttggtttttagggaaaaaaattggggcccggggtttgtaacccgccgggtttgcccctaggcgggttccggatttttttggggaatccgggggggttttttccggggccggcggggggggcatttggcttccgggggggcggggttcggggttttttcttttttgggggcccccgggcccttgggtttttgggatgggacccaatatccccctgggaga

SEQ ID NO: 603821 - DNA, 798 bp, Homo sapiens
  misc_feature (1)..(1): n is a, c, g, or t
ntcgtttgctagcgaagctctaggatgtgactttaagctggaaagactctcaggagctaggtttgatatggcacaatctcaaggcatcgctaagtctgaagttcttccagcaggtctgtaaaccacaaaggacaagcagctcagagattagcgaatgcgtctcagctgtcctagaaaagtgctgtcagcaagtctgaagagtttcccagaagccctgaaaggacgcaatagcatcatttagcagaaagaaacagccctggattaatgttcttttgggattcatcttctggctttgtgattttgggcaagttacttatcttcctccatttattcacatatataatgagaggagtagtacctaccttacaaacttttctgtgagaagcaaaaaaaataaaaataaaaaataaaaaataaaattgttaaatatttgctatgtgtaaaatgcttattcctttaaagttttcatgtcagttaaaacatgttattggcttgaatcctgactcaagaacggaaatagtaattgtgtctgccattcagggtgacacagttatttccactggttcaaggtggtggggtgggagcttctagatagaacaggtggggcaattcttgaacattttcgtgtttttggtactactaaccaccaacttttgttttactcaaagcacaataaatgacctatttttatagacggaaaatgataatgagataattttaaataaaaggaaagggaatattgctttaaaggatgattataggtctgatggtaatttatagcctgatggagctaaaaat

SEQ ID NO: 603822 - DNA, 487 bp, Homo sapiens
  misc_feature (406)..(406): n is a, c, g, or t
ggctcggtgcttgcgatcatggctcactgcagccttgacctcccaggctcaagcgatcctcctacctctgcctcccgagtagctgtgactgcaggcctggatcaccacgcccgattaatttctatattttttgtagaggcggagtttccctaagttgcccaggctaattttaaactgctgggttcaagtgatctgcctgcctcagtcttttgtttgtttttttttgtaatccaatgctcccaataaatatccttgaatacttgcacacatatgggagtatatttgtgagagaactttctagagctggaattactgggtcaaagagtatgtaaattttaatgattcgttgtagaagtattcgtactagtttacactatctttaataatgtacgagtgacacatgcanagctcagagtgtgatgggatctcgtttgcataaaaatgaaggatcggaataggctatatacttgtagatgcatgaacacac

SEQ ID NO: 603823 - DNA, 776 bp, Homo sapiens
  misc_feature (1)..(1): n is a, c, g, or t
ntcgtttgctagcgaagctctaggatgtgactttaagctggaaagactctcaggagctaggtttgatatggcacaatctcaaggcatcgctaagtctgaagttcttccaacaagcagctcagagattagcgaatgcgtctcagctgtcctagaaaagtgctgtcagcaagtctgaagagtttcccagaagccctgaaaggacgcaatagcatcatttagcagaaagaaacagccctggattaatgttcttttgggattcatcttctggctttgtgattttgggcaagttacttatcttcctccatttattcacatatataatgagaggagtagtacctaccttacaaacttttctgtgagaagcaaaaaaaataaaaataaaaaataaaaaataaaattgttaaatatttgctatgtgtaaaatgcttattcctttaaagttttcatgtcagttaaaacatgttattggcttgaatcctgactcaagaacggaaatagtaattgtgtctgccattcagggtgacacagttatttccactggttcaaggtggtggggtgggagcttctagatagaacaggtggggcaattcttgaacattttcgtgtttttggtactactaaccaccaacttttgttttactcaaagcacaataaatgacctatttttatagacggaaaatgataatgagataattttaaataaaaggaaagggaatattgctttaaaggatgattataggtctgatggtaatttatagcctgatggagctaaaaat

SEQ ID NO: 603824 - DNA, 99 bp, Homo sapiens
aggaggaggaggaatacgcccaggaggaggaggaatacgcccaggaggaggaggaatcgcccaggaggaggaggaatacgccaggacgaggggtaccga

SEQ ID NO: 603825 - DNA, 693 bp, Homo sapiens
gtctctgagacccatctcctgcctagacatccacctccagagcaacactggccccacagtaaaagaggaagtcttgtaccgtcaggcaggcccgagtctagagactatacgccgtccgttcccgaacagcaagagggtatcgtggatgacccttgagaatccattctctggtcttctgaaaataccaagggcagatgtcaccgtccttcctcaggcaggacgtgactctgggcatctacaaccagagtccttcacataaagggtttagagacgtccgccttggctcgccagtcaccatatccagtgtcgttgtacaagagactgggccaaacgaggaccaacgcaagtcgagccttgacctcatcgcgcagtacagagattgaccctcatgagcttttcgatttattcaaagctgctgtggtgacaggcctgttgttctaaaatgaaacttagatgctatgattggttgacaaaacagaagccgaccaaccagcgtgacgtgcgaaactggcatgatgcagtgtgggttcctccgtggtgatctgttgttagaagcacccttgcctgtttacattaatggcaaggtagcagtaacgtacaggctgtactgtacgatcctgggcatggactctgtgacattggctagcatatccaaagcaccaccagttgatttctcctgttactgggtggggg

SEQ ID NO: 603826 - DNA, 211 bp, Homo sapiens
gaaaaggagtccccctttattgcccagggtggagggcagtggggtgatcttccctccctgcaacccccccctcctggaaacttcctttggaggtcatgatcaaattccatttagtttttcaaagggtgttttttgaactccaggcatcaaaattacccaaaaaacttattaaaatgcaaatttttgggctttactcagccctataaaatca

SEQ ID NO: 603827 - DNA, 445 bp, Homo sapiens
tgtttgaaaagggaagatgaaacattttttcagccctttaacgggcctttttttcctttgtcctttggggggtttatttggcccgttcctcctgaaggtgcctttgagatggggggttatgaaaagattttcccagggggaaattaagccatatttttactttggtttttccggagaaagcttccagggtttcagggtgtgatttattttcaaaaagggggtggctttgaacccccctttgttcccccgccttgaggtttgtatttttagggggggccgtttttgccaagggagatatattcagagaaatttttaatccctttatgccagttaatattgctttggtgatgctatttggttttttgaggttaaaaaaagcttttgtaaaaaaaaaattttgggggttttgccccctttaataaattttaaagccctcggggtttta

SEQ ID NO: 603828 - DNA, 259 bp, Homo sapiens
tcgatcgagctcggtacctacttttccacagtgctgggtgcagtggctagcctggcgacagagcgagactccatctcaaaaaaaaaaaaaaaaaaaaaaaataaaggttcccttgggccaggagggaatttccctttttttccctcccccaaaataccccggtgtccaatttgggtcatttcttttttaaatttttaaccggggcggggattacgggggtgagccacctccgccggtggagaaccacactttcacaggt

SEQ ID NO: 603829 - DNA, 377 bp, Homo sapiens
gcctggttcctcccccttccctcaggggtaaacaagggacctttgattatttttagctttgtttttttataaccctttttgggggttaaaataaagtttcttacatttttgggacttttttaataggcatttccttttttatatgaaaaattcccatccattgggccccttttaaccccaaaatgtgacctcctcctccagttacccccagccctgcccttttcagggttgggggtggtcaacggtaccccggggttaggcatcctaaacaccacccttaggaaactgggaaatttgggccatgtaactccctttgttactctatttattttagtcccttgtataaaaccccaaataaaccaataaaggcaaactca

SEQ ID NO: 603830 - DNA, 197 bp, Homo sapiens
gggggggggggcccccccttccctttgggggccgggtttcccccccccccccttttaaccctcaaaatttgggtggggttttccgggggggggggtttttccccctttgccgccgggggaaacctggccccttttttttttttacccccccccccctttgccgcccccccccttccctaaaatttttttttttttta

SEQ ID NO: 603831 - DNA, 129 bp, Homo sapiens
gctcggtacctgatgtgtcttcggtgtgcctggcgggcggctggtggcgctggcgggcgcacaggcccatgttttccagcaccagcccggtccccatgctctgctgccaccgaaaagccggtattgatg

SEQ ID NO: 603832 - DNA, 690 bp, Homo sapiens
gagttgtttcataacatgggtcttgcctagaaaataggggcaatactacaatgcatctggccccactgagcaagtctgtcatgaaatggagcacacagcaaattgggtttaatgtaaaaggatcaatacctccacctctcttcacttgaacactaggtcccacagctagcggttgatagatgcatttcatcacctgatagatgcatttcaaggtttttctttgttttgtgtcttttaaaagtcacaggctaagatccctctcacatgtgagaaaaatgcaagctgctatggattgaattgtttctactcaagaattatatgttaatgaacctcagattgtgaccttgtttggaggcagggtcataacagaggtaatcaagttaaaatgaggtcatcagagcgggccctaatcaaatatgatagatgtccacatcagaaggggaaatttggacacagagacacacacacagggagtacaccacatgaagatgaaggcagagattgagtgatacatcgtcaagctaaggaacacgaaagactgctagcaaaccacaaggagcaaggggtgcggcgtggagcagattctctctcacaggcctcaggaggaaccgctctgctgatgccttgattttggacttctagcctccagatgaaatgtatgagacaatagatttctgttgtttaaaaaaa

SEQ ID NO: 603833 - DNA, 212 bp, Homo sapiens
tcacgcaaaggactcatcgtgtgcgttctcaattgctttattatcaacttgtaatttgttcataagcgaaaaaagtattagacatatcgagtccatactggctggtgcagttgctcgcgcctgttatccctgaactttggcaggccgagttgagtagatcacctgaggtcaagagttcgagaccaggctgttcaaggtggctgacatccctt

SEQ ID NO: 603834 - DNA, 355 bp, Homo sapiens
aagggatctgtgggctatgtggttcacacctgtggtcccactactgtgcagagtgagggggctgaggtagaaggatcgcttgagctcaggagttccaggctgcagtgagctatggtctcgtcactgcactccagcatgggcaacagaggaagactgtctcgaaaagaaaagaaaagaaaagaaaagaaaagaaaagaaaagaaaagaaactctataggatacgtttctttttcactctcttcaatgaagattgccatttcagtgaagcagctaaatgctcaattgaattaagtactctttagaactggacactttaaaaagaggagaatatcatttattaggatgcatggataca

SEQ ID NO: 603835 - DNA, 1507 bp, Homo sapiens
  misc_feature (1)..(1): n is a, c, g, or t
  misc_feature (646)..(647): n is a, c, g, or t
  misc_feature (651)..(652): n is a, c, g, or t
  misc_feature (689)..(689): n is a, c, g, or t
  misc_feature (701)..(701): n is a, c, g, or t
  misc_feature (827)..(827): n is a, c, g, or t
  misc_feature (858)..(858): n is a, c, g, or t
  misc_feature (1117)..(1117): n is a, c, g, or t
ncttgtcgtctcgtacttctcttttcatcttcttgtgctgtgtattgtttcgtctactgctgttattttttcctcttctctctttcttcttgttgttatgtttgttttacacggctcgtgtgttggtttcccactttggtgtctctttctgtttggtttgcccattattctatcacatggtggcgccctctttccggacaagtttcctctgggtttcaattttcccctcattttttccagggacatcttctattctaaacgacccgggtactttataatggattcccccgttctggacagttcacactcctgtggacggccaaattggtccacccagtgacaaaatttgctgataccgaaggcacacttggttttttgccccgccctttctcacgcatgggattaatctgtattccagacgggtcgtttctagatttccttcaccgttttgctcttaaaactgcttctctgctctgaggaagcacagctacctgccttcactgatatatacctcaggctgaaatttggggtgggatacccggtcacattgatcttctccccggaaggtgcacgcttttccatatcacgctctaaccaccgccgccacgtccacttcttaaggaaactgccgactaggactgatganngcanntttagctttgagcttttgggggttattctacccaccnaaccagtccatntggaaagaaaacagtccctggaaattaacagatcagaatgttcacacctggttgaatctttttttaaccatagagcatgaaggtagcagaagctggtgtgtttccagatggttcttctaacccaanctaatttttcactgttgaccaagcgaggcanagggttgcactggacccaaggctgaggcttggccatctagcattccatacaaaattgtttcctataagcattccttttattctctattctatcctgggtctgcctcaaccgtgagataggagagtctctggtactagctgctgtagcagtgcccttcatccagggcagttaatggagtcttggaccctttctttctctgggatccctgcccagcaccttcctatagagatgactttaaaaggaaaaaaaaaaaaaaaanaaacccacatgatttcaagggagtcgggcatccctgaatccttcttccctgccagggtgcctgtcacctggtcttcactggcctccttttccctggtcatggctcatcagctttatgggcttctggtctaagcacctgaacagaggactggaaacctccacttggcaggcgggtttaaggtctggaattatgtaagaaatcttggcacagcactggctaaggtaaatttcagtggtttttccctctaggacaaacactttaccaaaatatgcaactttttttggggggggaagagagattgtccggtgatttctacccatttcctgaggcctgtggaattaaccctttatgtacttaaagttatacgaaacttagattattgttattacc

SEQ ID NO: 603836 - DNA, 186 bp, Homo sapiens
aacagccgttcgacggcaaatctgtcaagatcagaaaaatagggccacgtgaagtttaagttcgatggcgcgataccttaaaccctggcatcactgcaaagagaggcagagaaactgagcagtccctgcccacggtttggcagtgaggaactgaaatgaacaatcagtgtgtctggttcgtcgacg

SEQ ID NO: 603837 - DNA, 113 bp, Homo sapiens
  misc_feature (24)..(24): n is a, c, g, or t
gagagagactgtggcgaagtctgnctatctcacagtgctaccatgcttagatgagagctgagagctaacaggagacatttgacccgagaggagacatcccgacattgacctaa

SEQ ID NO: 603838 - DNA, 117 bp, Homo sapiens
cacaacttgctcttctccagaccctgcccctctcaattaaaacaatgctctcttttttcttttctttttctctttgagacggagtcttgctctgtcacccggtgctggacgcggtgg

SEQ ID NO: 603839 - DNA, 372 bp, Homo sapiens
cctccgagtcaaacaagttctcctgcctcagcctcccgagtagcccggattacaggtgtgcaccaccacacccggctaatttttgtatttttagtagagatggggtttcaccatgttggccaggctggtctcgaattcctgactttaagttatctgcccaccttggcctcccacagtgctgggattacaggtgtgagccactgtgcccagcctacctggctaacttttacatgtttttgtagagatgggatttcactatgttgcccaggctctcaaactcctggcctcaagcagtcctcttgccttggtctcccaaagtgctgggattacagatttgagccacagtgctggctggtgctcagatcttgaaca

SEQ ID NO: 603840 - DNA, 394 bp, Homo sapiens
ggaaggccgaagtggagaagggttccagtgtgagtagctataatgaacagcgatagtatcgtcccgtctaggaatactagtatatctgtcaagtgatatactccctagtatgccctagaaggaataataggtatcggcgggtaacagtgtgatagactagggctcataaccctcgagggagtcgcactccctcgttagaccaagtgattgtgcctagtgccatgagccgtaggtgcgtttgggacggccggccgaagcgggcgggggggcctagtctcctacgtgagtctcaagtgcgccaagtcacatatggctctagagctacgtacatacacgtaaacgctactcgaacggctgaaaactagtgcgtcccacacaataatagttactacca

SEQ ID NO: 603841 - DNA, 113 bp, Homo sapiens
aatgatgagtaaaagattcaacaactcacagccctgggggcactcaggctactgctaaggcctgagagttttgcaaaaatgcgcagagaaacaccctttgaacgtggctttct

SEQ ID NO: 603842 - DNA, 354 bp, Homo sapiens
tagttgtccaagcatggctgagcgctgggaggagcatcagcactcagcctcaccagccaaggataatactattccagcaacttcccagccctcaatatggaagcagtggtagaagcgccccccagtgtcagaagatggtgaaccaatttctatccaaaggtggaacactgtgccatgtgcgcaattgtgctcatgcctgtaatcccaacactattggacggccgaggatgggacgatcaagcggtcaggagctgacgaccatcctgtgacaccattggataaacacccgactcatactcacatccaaccaattagtcccggttcagttgactcgtgcctatactccccgtgctc

SEQ ID NO: 603843 - DNA, 274 bp, Homo sapiens
  misc_feature (136)..(136): n is a, c, g, or t
gccgagatgtctcgctccgtggtcttagctgtgctcgcgctactctctctttctgccttgaggctatcagcgtactcccaaagattcaggtttactcacgtcatccagcagagaatgggaaagtcaaatttcctgnaattgcctatgtgtctgggtttcatccatccccacattgaggtgtgacttactgtagagtgggagagagaattgaaaaagtggagcagtcagacttgtctttcagcaaggactcgtctttctatctcttgtactacac

SEQ ID NO: 603844 - DNA, 326 bp, Homo sapiens
cagtcagacgggaagttcgggaagggatgcagagccagctcggttacacgtcaaacaaaataaagactgacaaaaactctgtcggatttagccagctagaatgtgaccagcaacagtgtcagccagcaccacaggtgacttgggcgagtgatgggcaaaaaaggcagatgagaccagggcaacaagcacagcgtcagcatgcaaacacaggcaggggcaactcctgcggtatggcaaggcaccactgtctcggcacagctttcagcacgcaaacgcacatcaacaccaggggcagcagcactgaaagcaccatagcaggcagagca

SEQ ID NO: 603845 - DNA, 849 bp, Homo sapiens
  misc_feature (123)..(123): n is a, c, g, or t
  misc_feature (127)..(127): n is a, c, g, or t
acgtatctttcgaggaataacagtttcctctggtacattgcaaatcgtaagagcactgtgaatgaaaataaggtagtctctcgtcgcaaccattctactttccatgcacccgtatctgcggcncgcnctttgcaccctagactcaggagtgctatccattagtaggtggaggacgtgagatgatggtatcgatttgtgaggatcgagacttggacacattagtaattcgtacgggctaaacactatccttatcgggctaggttgctgcatcttggccaagtctctcattcctgacactaaatgctcggattctatctttcataactagagattgaatcaaagaccttttgtatagttcaaaaaacaacaacatcacggcctccttggactacatggtggagctctgcctcctattctcttcacaggagtataatccatgatcctgggtctactgcctcccccattcggacccttccactttaccaactgcctcagattacttgaaaggggactaccgatctccccgcaattctcgtgaaccactaaaaacacttgttaaccagcaagtcactctcagtgccgctacccttcccacgccaaatcccccgctttatctcccaatggctagcccccctatcggcttcacacccccttgctctaaagtcataacttgcaaaatcccccactacgtccgctgcactccctgcggtatccacttgtagaccaactttacccccctctcaccaatactggcttccacccacacccccccgcccctctcgttctctcacctttgccctctctcccacccacccctccccgcacccacttccttatccattttatttc

SEQ ID NO: 603846 - DNA, 213 bp, Homo sapiens
ctgcgccactgtgagcctccattgaagctccccccagcctcgtgtcaatgggctgctcagggaggctgccccgtctcagtctggctggctcacgctcacccttcccattccccactgccctcctcgcccagctctgtcagcctcaagtcttgccaaactctcacacctggactgccgacctcccatggcctgacgtcctttccctgaccatct

SEQ ID NO: 603847 - DNA, 280 bp, Homo sapiens
  misc_feature (18)..(18): n is a, c, g, or t
  misc_feature (73)..(73): n is a, c, g, or t
  misc_feature (223)..(223): n is a, c, g, or t
tgtacagaccagagacanagcaagagaagaagcagagactggttgcccgcgccgagaagaaggctgctggcanagcggacgtcccaacgaagagaccacctgtccttcgagcaggagttaacaccgtcaccaccttggtggagagatggagctcagctggtggtgattgcacacgacgtggatcccatcgagctggtgtcttcttgcctgccctgtgtcgtanaatgggggtcccttactgcattatcaagggaaaggcaagactgggacgtctagtcca

SEQ ID NO: 603848 - DNA, 814 bp, Homo sapiens
ttaatctcaggaatcagcttgcaacagagcacaaaaaacaccaacacaaatttcaaacaagaaaaaagttttattttccctcctgccagcgcaattaattggcatcatcatcatccagctgacaactgcatagatcgcatatttcctgcatcgttcattatttgtggtaatcaagccatggcacacatgcacactttcataccaccaccccactggtgctctgtccagcagcatacaatcattcaggagggttgcttctttcaacagccaacacaagcacacacaaaacaccacaacacacccacaacgtcattcaacacatcgcgtccatcatcacacatcattcttattcttccgtctataccaagtgtttttcgacaacgccattgctaaaacaccagcttttcattggtcaccgtctacttggcaacacaatcattcaaccaatctcacattgctggcaatcaccatagcgtggtataacccagacgttcccgttcaattccgtcaaatcaccgtgtggaaaaaattattcttttttcccaacgggcattagcatttacggcatgctccaccaccagcacccgcaccatttattccaagggatatcatttacgttggaagggacattgggggctaactaatcaccaacattacattctccttcagggaacacaaacttttccaacgttctaactttcaaggttacttcctgggactcgcacctgaccccggttgccccccgttttatattcctgccacgctgggtcagaccttagggcctttactgttgttcgcaagactgctcccttgt

SEQ ID NO: 603849 - DNA, 213 bp, Homo sapiens
caggaataccttattgctatcaacggacactctttgtgaaaaatccaagtaatattatagttcaaacgtgagcggagccaaggcccactgccacctctgggatgggagtcggacctacataccaagtgacaagttcacctacaacatctagcttccatgaatggctttagattcagctcgtgccagtgcaacagcaacaggtgtcagactcct

SEQ ID NO: 603850 - DNA, 93 bp, Homo sapiens
gatttgctggtgcagtacaactaggcttaatagggactcgaattcgaggcgcgaattcgagaagcttctaacgttagaagcttgaattcgagc

SEQ ID NO: 603851 - DNA, 136 bp, Homo sapiens
gtgcggcctcagcctcccagtggggtagtattacaggtgtgacgcctcgtgcgccgggcctaccttttcttcgtatactcgacatgagtttcaggtaagttggcgtagacataaggtcgtcagtgtccatttggag

SEQ ID NO: 603852 - DNA, 150 bp, Homo sapiens
tgaccagtgtcggctgagtggaagcacgggctggatcatccatgaccagctacagacatggagtaccagattgtgttcgaggtgagtgatagggaaaggacgttccggagagattgccattgatgacatactgtgaaatgaaccaagcta

SEQ ID NO: 603853 - DNA, 1156 bp, Homo sapiens
ggagaaagcagcgacgtgagaggggaatggtggcgccaggcgagcacccgtggagccagcgtggacctgggcagtggggcgcccggagcaggcgctgcatgctgtggccccgcggcggtggatcctggctggaagagagctgtagcactgtgctcgcactgagtcctgtgtggcctgagtgtaccagtgtgatgctggccatgctgcaccctctggcttgcgacgcgcccgtatggtgatgcccctctagaagctatgcccctgtgtggcccatgtccagaccactattccgtccgtatcctggggctggacgcgtacgtaacatggatccacgtcaccctctttgcggggaagggcagggacaaccataggagggaggtggcttcccattgttacaatgtgcaggcggcaaagctccccattgtaccccaatggacaattgggcacctttggcaattacactccaagtggcaccttgagaacaggtgaactttggacacctccgagcgttcacgccgagaagaaacgcttgctcgacaattgccccagggccgttcacgaggggaactcccccgtttgggagccttggcaggccgccaacctttcctttgccacgcaagtgagctctttgtgccaatcccacttcgaaggaaggccttggaggcaggagcaactcccaatggaacaggggggaccatgtgtgtgcacaatttggggtttggcaccatttggttagcttgggcatcccccctagaaggaccacgcaacacgaggtgaaacggttcggccagagaactagcgagcgccgtcaatacagatcattccgcgcccagagccgcaatggcgtggccacgcgtatacagcacaggaacgtttacagcacgtctccgcgatgcgaggtgatttgccggcggtcaagcgctttcccccacggtaatttcgctgcgcgtatcacgagggggtgcaagcactcggggaacctgcaacgcttgggtttgcatgggtctagccaaccattgggatgattatcatatgtattgcctgtccgcccctggtcaacaccttggcagcgagtgttccgcagtgggaacgggcccttggtgtgaccgaactattggtatccgctgtgcgacagtgtgggccacaagccctttgt

SEQ ID NO: 603854 - DNA, 1380 bp, Homo sapiens
ggagagaactagtctcgagttttttatttattttttggaaatatggtctgggctctgttgcccaggctaaagtgcgggggcacaattatgggctcacgtggaacctcgcgcctccggggctacaagccatcctccaacctcagcctcctaagtagctgggaaccaaagggcacatgccatcatgtccagctaattttggcatttttggtacgacacaggggatttcaccatgttgccaggctgggtcttgaactcctgaactcaagcaatctggcccacctcggcctcccaaagaggtgcgtgggatcatagtgcattccatcacgtgcgaccgtggccaaccagtttttttatgttataaagcatattacatccataaagtttaaagtataggaataaaggatttataagtggcaacttataactcagaaagaagcactttcaagaaagtgggataaatcgagagagtggtgcggggggatcgcacatatagtgttcccccagcagaaaacattacacgtgcatgaaaaggccacaataacacacatttatcaccgtgataccgctttcatacaagtgtcgacgatcatcatagcgcacaccgcatagggaccctgaacacagagcgcatcacgtaggcggatacaaccacgtggcgcatgggatcaacagaaggtgcgcgcacaccaaagacaacacaacaccccggagaaagagggagcaaatccaagtattaatctaaaacagcccgcaacaacatataggaggacacaaaaaagaacaaccccaagaaaaacagaaggacgaaccaaccataaacaaaggggacaacacagaaacaacagaagacggcgccgcaccaaactcagagacagcagccaacaaccgacgacaacaaaagtggcccccccaagaaaaaagcatacttcaccaagagagcttcgtaagaaaacaaccacctctatcagcaccagaggacagacttatctacaacgacacctcaccccgacgcgaacataagtgcgtggagcagaacagaacacaacagaacgaagaacacacaaaatggagggaggatataaggcccacaacccaacagacaggacgggtgcgaaaccaccatagtcgaccgacagacgaggaaccacataccctataagggacgcaacaacacacattacaaaaacaggagggatagaacacacgccgcacggtagaatgatcgatgacagacaacacatcattctacgacgcgccaaatgagtgattgataacaacacatatcaagaacactattctcacagacagcgcccaacttagtatgtgcccgcggcaatataactaccaaagaaggacaagccaaacgacaaaaacagacgc

SEQ ID NO: 603855 - DNA, 81 bp, Homo sapiens
gttttactatgatgtaaaaattaggtcatgtacattttcatattagactttttgttaaataaacttttgtaatagtcaaaa

SEQ ID NO: 603856 - DNA, 328 bp, Homo sapiens
ccagtgcaagagggattgcagagaagaagaaaccccccaagcaaaaaaccagatgaggaaattaagctaaatattaactatctcaagaatattcccagaagtgactgctaaatttaaatccctgctcacaatgaaatactgtacagcaggggttctcaaactttttggtcttaggacccttacagccttaaaaattattgagaactccaaagaactttcaattatgtgggtcataactactgatacttactgtattataacttgaaactgaaaaaatttttaaatatttataaacatttaaaaataataaacccattgtaagctaaaa

SEQ ID NO: 603857 - DNA, 1064 bp, Homo sapiens
  misc_feature (1064)..(1064): n is a, c, g, or t
cggtgtgagagcggtaagatggctggcgtgcgtgtggtggtggagttccagagagcccagtctctactcaggcacctgacctgggaggcctccatcgacatcctccactccatctgtgaatgctgtgacattcatgtgaaaacgatgaagatggcatgtgcaatgtcaaatgatgcagatgcatcctggaacttgggatctctcctgtgcaaatgactggacaatgctgcagagcttggaggactcctgaagtatgtactgacccttcttgaattccatcagcaatggctaaagcagctcgcctggtccgatctcttcttgatctgtttcttgatatggaagcagctacatgtggcagtgagtgtcgagctgtgtttagatgtgcatctgaatgtggccaagtcagagaaaagaactttcttacgccaagctttggaggcaagactggtgtcttatgtacttttgataccaagaggtaccaggaagcatttgcatatgggttctcagctgctgcgggagttgaacaagatggacgacaaagctcttttggtggcagtacagctttgagaaagcaaaagataccatgccctgagcaagctgccgaaagcccgagctgcattacttctgctcgaaccacagcaaatgccatctactgaccccctaaattgcaggccaccttggaacatgcagtcgggtataatccatgcagcagaagagaaggactggaaaagcggcggtactcatacttcatatgaggccatttgacggttatgactccagcgagaagaccccaaggtgcctcacatcatctgcaggaccatgtggcagtgcaaaatcagtgccaagaccccagaaaggatgaccaaggctactggtgaactgtgacagcttcggcactacggtcaatgccgtgggagagaaaatagagcgcatatacaaccggcctggaccaagagataagagagcaagttcactggcgagttaagacaagggatagacaggacacgtagaaactcctcgtggtagcccactatactcaacaccattgcagatgtctagcaccn

SEQ ID NO: 603858 - DNA, 298 bp, Homo sapiens
cacgaggaatcccagcattttgggaggccaaggtgggcggatcacctgaggtcaggagttcgagaccagcctagccaacatggtgaaaccccgtctctactgaaattataaaaaattagccgggtgtagtggtacacgcctgtagtcccagttacttgggaggctgaggcatgagaattgcttgaacccaggaagtggaggtggaggtgagccgaaattgtgccactgtactccagcctgcaacagagtgagacactgtcacacaaaaaagaaagaaatatcacaatatgtcacaata

SEQ ID NO: 603859 - DNA, 156 bp, Homo sapiens
gacctaatcttagcatatttgtccttggcgccagtacttttgtgcacgcttttgtgatctgtgttaaaaacctgcattgccaacattgcagctcgaacttaaacttgttattcaaataaatatttaattttttaaattgctattgaaacttctaaa

SEQ ID NO: 603860 - DNA, 1062 bp, Homo sapiens
gaagtctcatttgagaagtcagtgacgtccaacaggcagacttgccaggtgttcttgtcgggtcaccctgcattcccgaggtttgcttccatgcctgcagtttcatatcagaaccaacccatcaataatggcgaatttgacattattgtccttaggtgagaatgagaagaatattgttgagacgaaatgtgtccaccgtcaggcagtgagcatttactttgaggcttacctttacaatgctaacaactgtaccagcacaccatggcatcttcctcccatgcacatgagctcttctcaacgccggccctccactgctattgaggaggacgatgaagactcaccctcagagtgtcacacccctgagaaggtgaagaaaccgaagaaggtgtactgctatgtgtcaccaaagcaattctctgtgaaggaattctacctgaaaatcatcccctggcgcctctacaccttccgagtgtgcccaggaacaaagttttcataccttggccctgaccctgttcacaagctcctcacgctggtggtggatgacggcattcagcctccagtggagctcagctgtaaagaaaggaatatcctagcagacactttcatccgttccttgcacaagaacattggaggctctgagacctttcaagacaaggtgaacttttttccagagagagcttcggcaggttactttcgagagaactccattccaaagtccactctgaaggtcgccagaccggcctgttcggagtcgcttggacaggcccctcgcacatttcccatttcggacgggcccagaactttgacgatgttcacggattaaggaacctgcgcatttcgacaagccactccacgggaaacagctggaccacactctgcaccgttgtgatgccatcccaacatatacatatcatctcgaattcaatggtcacacccacgacaaacttggttcaacacacaatagcccacaacacacgcagaagatagtacatcaaggacacgtccacctcgatgcatcattctcacgagacaccaacgaaacgcaccaacaactctagacaa

SEQ ID NO: 603861 - DNA, 706 bp, Homo sapiens
  misc_feature (310)..(310): n is a, c, g, or t
caacaataggggaggttggtgccaaaagaacggggtgctttgttgccccctctcttccaaaggtgtcgtttctaaagctacccagcgttgtagagagattaccccttcgcctcgatttaaactgccccgaatgttgctacccaactcacggagctgcgtgatttgcaccgagataacgccctagcattcgagagtcgtcttcggcccgcgcaacgcgaacgagttatgtatcgtcggcacacacatgttgttgtagtggcagaagggatctatcagcaggcttttcgtctcgctgatgaagtgtaagtgntaaagagtgaaaagatatatctgcttgaaatagaggtagcgaacgggtgttctcttggcactctctctcgcgtgacaagtggcccccccccagggtttagatctcacacgagtgatagagtgagggtccccccctctcttactatagagagaccaggcgtcttcgcgcggtcgagccacaaacattgtgtggtgtgaagttgtgtggcaccctagagccctccgtccgaacacggagtgtggtctggggagtttgcccacgtatgcaggtgaaagaagttggtactgcgggttgcgccgggcgtggaggtatactatatgtgagcagcatccatctaccaccaccacaagtgctgtttaaagagaagaaataacaaccgccccgccaatgatcaag

SEQ ID NO: 603862 - DNA, 196 bp, Homo sapiens
gctgtactgaggggatgacgaaagccccgtcttcaacgtcctctcacgtttttaaagcattgatattagtatcttctcagatacagaccgttcttatgattttgtaagaagtaaaagttctaacatgaagtcacacaggacaattattcttatgcctcagttaacagtggataaaagacttttctgtaaacaactc

SEQ ID NO: 603863 - DNA, 367 bp, Homo sapiens
cgtggagcaactgcgcagtgagcaactgcccaagaaggacattattcaagtttctgcaggaacacggttcagattcgttacttgcagaacataaattattaggaaacattacacatgtggccaacacagctaacaaggaccacttgggttacagcctataaccatctttttgaaactaagcgttttaagggtactgaaaagttattagtaaagtgtctgagcaagtaaaaaaatgtgaagcttaatgaggataaaacccaaagaaaccaaacctgaagagaccctggatgatggtccaccaaaatatagtaaatctagtctgaacaagggagataaaagcaactttcccaaaaagggagatgtcgtt

SEQ ID NO: 603864 - DNA, 419 bp, Homo sapiens
  misc_feature (287)..(287): n is a, c, g, or t
agaaaacgctatttttctccattgaatttttttgcacctctctcaaaaatcacttggacatatctgttcatctagtttttgcattttctactctatttcattgatctgtgtatgtcccccagctatataatatatatgtcttgattatctattagctatagtaatagagctttggaaatcacggtacgctgattgatatgcccctattatatttctattttcaacaattgtatctaggttatatctagttcctattgtcttttcaagataaattttaagcatacacnttttctagtatctagaacaaaaatcttgctgtgattttgcataggaattgcatcaaatctttggaagaattgacatctttactgtgttgagtcttccaatctatgaacatggtatgtctcaccatttgttta

SEQ ID NO: 603865 - DNA, 1125 bp, Homo sapiens
  misc_feature (500)..(500): n is a, c, g, or t
  misc_feature (503)..(503): n is a, c, g, or t
  misc_feature (508)..(508): n is a, c, g, or t
  misc_feature (514)..(514): n is a, c, g, or t
  misc_feature (516)..(516): n is a, c, g, or t
  misc_feature (612)..(612): n is a, c, g, or t
  misc_feature (719)..(719): n is a, c, g, or t
gcggaggcgtgcgggggcatgtcgggtctcggaggcagcggtagggctcgacgtgagaatcggtagctggggtctagtacagtgcattcgtgcgagttggaatcgatagcctctttaaatatgtgcaatgatgacttggacttcgagacaggagatgcaggggcgctcagctcagcctttcccaagtgcagatgctcaggattacgtaagaatggctttgtggtgctcaaatggcgcgtggcatgtaagatcgtcgagatgtctacttcgaagactggcaaggcacggccagcgccaagggtccaatctggataggtattgatcatcttctacctgggaaggaacatattgaatgattatcttgcctcgtcaacctcataatatggtatgtccccagatcgagtcaaaaggaagtgacttccagctgattggcatccaggatgggtacctatcactgctccaggacagtggggaggtacgagaggaccttcgtctccctnagngagancttggnanggagattgagcagaagtacgactgtggagaagagatcctgatcacggtgctgtctgccatgacagaggaggcagctgttgcaatcaaggccatggnaaaataatggtcccagggtgggcggtggtggcagcagggatcctctgaacctgtagaggcccctccccgagctggctggctctggaccggtcctaaagctggactcntcctacacaattgacttgacgtgcatttagggttttcgccaccccgtcaatctggacggggagacccttcccttaacctaagtacgtgtgcaagaaccgacgaagtgaggccttggagaagtgcatcatttgagccataaataagactgcgggggagaaaaacgggggggaactgcaaaggacaacaaggaaggcgcgtatataacacgcagaaacgaaagcgggaacaggacaagaccgtggccaccacaaaaaggaggagccgagaaagaacaagcagaaaaacccaatgggcgaccacggacggtgatccacaatcgagataacaaagaagcaccacagtagaggccacaacagcagcaaaagaaaaggaaaaggagacgtccatcaccgggcataggacgca

SEQ ID NO: 603866 - DNA, 1149 bp, Homo sapiens
  misc_feature (500)..(500): n is a, c, g, or t
  misc_feature (503)..(503): n is a, c, g, or t
  misc_feature (508)..(508): n is a, c, g, or t
  misc_feature (514)..(514): n is a, c, g, or t
  misc_feature (516)..(516): n is a, c, g, or t
  misc_feature (940)..(940): n is a, c, g, or t
  misc_feature (991)..(991): n is a, c, g, or t
gcggaggcgtgcgggggcatgtcgggtctcggaggcagcggtagggctcgacgtgagaatcggtagctggggtctagtacagtgcattcgtgcgagttggaatcgatagcctctttaaatatgtgcaatgatgacttggacttcgagacaggagatgcaggggcgctcagctcagcctttcccaagtgcagatgctcaggattacgtaagaatggctttgtggtgctcaaatggcgcgtggcatgtaagatcgtcgagatgtctacttcgaagactggcaaggcacggccagcgccaagggtccaatctggataggtattgatcatcttctacctgggaaggaacatattgaatgattatcttgcctcgtcaacctcataatatggtatgtccccagatcgagtcaaaaggaagtgacttccagctgattggcatccaggatgggtacctatcactgctccaggacagtggggaggtacgagaggaccttcgtctccctnagngagancttggnanggagattgagcagaagtacgactgtggagaagagatcctgatcacggtgctgtctgccatgacagaggaggcagctgttgcaatttatttgacgttttattttggttttccccaccccctcaatctgtcggggagcccctgcccttcacctagctcccttggccaggagcgagcgaagctgtggccttggtgaagctgccctcctcttctcccctcacactacagccctggtgggggagaagggggtgggtgctgcttgtggtttagtctttttttttttttttttttttaaatccaatcgggaatcaaaaagggggggattcgggcaaagggtccttgggcccttcccaacttcatcccgtggctcgggtccccgtgttggccttatatagccctttataccctggtggagcaccaccccaangagacgtggggaccagcccccttcgctgtgccgtggtgttctcttcccaanaaccccttttagaagtggggaggcgaacagacggcaggaacaggggagggggacctgccccctcctcaggcatcggggagggcccttgccccaatggggtttacccttcccgggggggctctctcccgcgaactttggttcaattcaaacctgaatta

SEQ ID NO: 603867 - DNA, 491 bp, Homo sapiens
tctaccaggctcgctcgcagttccaccgaacgagcccatgtcctatcccgcctcagtgccttgcagctgctggtgcacatctgcccggagcaatcttcctccagatgtctagctgctccttcaagcctcctccttgtccacatcaccttctccatgcggggacaccagctccgtaaggcttcctgtggctgtctgtacccagtgaatcccactgcaaacacttcctaagtctgtgctgaatgaacaaatgacagacagaaagacagacaggggtggaaggaaagtggggccaaggcacagggcagaaggggtccccagggcatagctgataggaaatgatcactcttcagacacagtgtcatgggaccctggattaccaatctgtctctgggagtccaggagagggtaaggcaggggcaagctgagctgagctccaggcggatcaatgtgtgtagtatagtgacagcatacctattaacaaaggtataaag

SEQ ID NO: 603868 - DNA, 209 bp, Homo sapiens
cccccccccggggggggggggggttttaggggggggcctagggggggggggcccaaacccccccgtccctgggggaagccgggaaaccggggggacttttttttccccccccccccgccccggggcccggccccccggggggccctggggttttccccggccccccccccggggggcagccccccccccttaggcctttttttagggga

SEQ ID NO: 603869 - DNA, 880 bp, Homo sapiens
  misc_feature (172)..(172): n is a, c, g, or t
  misc_feature (210)..(210): n is a, c, g, or t
  misc_feature (271)..(271): n is a, c, g, or t
  misc_feature (307)..(307): n is a, c, g, or t
  misc_feature (319)..(319): n is a, c, g, or t
  misc_feature (323)..(323): n is a, c, g, or t
  misc_feature (339)..(339): n is a, c, g, or t
  misc_feature (366)..(366): n is a, c, g, or t
  misc_feature (396)..(396): n is a, c, g, or t
  misc_feature (451)..(451): n is a, c, g, or t
  misc_feature (515)..(515): n is a, c, g, or t
  misc_feature (641)..(641): n is a, c, g, or t
  misc_feature (663)..(663): n is a, c, g, or t
  misc_feature (667)..(667): n is a, c, g, or t
  misc_feature (673)..(674): n is a, c, g, or t
  misc_feature (676)..(676): n is a, c, g, or t
  misc_feature (685)..(685): n is a, c, g, or t
gaagtggtagcagttcctcctaactcctgccagaaacagctctcctcaacatgagagctgcacccctcctcctggccaggcagcaagccttagccttggttctgtttctgctttttttctggctagaccgaagtgtactagccaaggagttgaagttgtgactttggtgtcncggcatggagaccgaagtcccattgacacctttcccantgaccccataaaggaatcctcatggccacaaggatttggccaactcacccagctgggcatngagcagcattatgaacttggcagagtatataagaanagagatcatagnaaantcttgaatgagtcctnataaacatgaaccaggtttatattcgnaagcacagacgttgaccggacttgtgatgnagtgctatgacaaacctggcagccctgtttcccccagaaggtgtcagcatctggnaatcctatcctactctggcagcccatcccggtgcacacagttcctctttctgaagatcagttgntatacctgcctttcaggaacatgcctcgtttcaagaacttgaaagtgagactttgaaatccagaggaattccagaagaggtgcacccttataaggatttatagctacctttggaaaactttcaggnacacatggcaggaccttttganttgngtaagnnangacctttanatgtggcgtgtcccaattccttactctggcatgggcacctggctagtgcgccatggcgattggccctgccttgggatcaacgaaagaaacacgccaggggctggccgaacccacataaagacgacacgaaatcttgtgggcaccgggccaggcaaaagaccctctcgcgagatagacggccacaacacccccctg

SEQ ID NO: 603870 - DNA, 306 bp, Homo sapiens
agcactggatggcagataccttcagctctgctctctctctctctctctctctctctctctctctgtcactgttgtgctctctctctcttactctcgctctctctctctctttcttttttggagacagggctcgccctgttgcccaggctggaatgtgtgcatgtggtgtgatcatagctcattgcagccttgaactgctggcctcaagatgatcctcctaccttggtctcccaaagcactgggattacaggcgtgtgccactgtgcttggcctcaatagttttgactttggattgtaatatatatt

SEQ ID NO: 603871 - DNA, 479 bp, Homo sapiens
aaccaatttccaccaatcacctctaccatcactaactgggcctcatgggatagcagtcaccgggagatgacgtccggggcgggctctgccccttctatccagcagcagcactaatggtcgggagacccaagctcacttttggatgactcggttcacaatggctggatttattacttggcaagaaagctaacaaagctagaagcacaaagctggttggcactggtaccgagaatatttgggcaaagctggtgattttatggctggatgcggccctctctcttcatggattggtgggcatatggcctagggacacggcgacccttcgggaaagcaaagtcccctatacaccatggtattctggagcatgggggagctctctcaggtatcgcaatggaggctggaagacatttggcaatgtcctctgggcttccggttggggggacaacaaagctaagcagtaattaatgctaaccggatag

SEQ ID NO: 603872 - DNA, 176 bp, Homo sapiens
caggcgccattttttactgcaaagtctactacttccaaatgttattccaaacattaccttttaacagtctatcaatcaataaatgttgaacattttttttctaaaaaaaaaaacacacacaccaacacaccaaacagaagacacataccatatacgggtgacacacaaaacaaaaa

SEQ ID NO: 603873 - DNA, 318 bp, Homo sapiens
agtaactcagaatggaaaaacggacatcgtatagttctcattcatatatgggagcaaagctatagcgatgcaaaggcgtaagaatgacacaatggacttcggggaatcaatgggaaagggtgggaagggggtgagggataaaagactagcaaattgggtgcagtgtatactactcaggtgatgggtgcaccaaaatctctctaatcaccactaaagaacttattcatataaccaaacaccaactgttcccccaataacctatggaaataaaaaaatttatatatctcagaactccaataatgtgtggcaagtttatag

SEQ ID NO: 603874 - DNA, 277 bp, Homo sapiens
ttcgcggctgcgtcgacgttgtggtggttcacgccttataatcccagcacttttgggtggtcaagggcagaggattgcttgagcccaggaattcaagaccagtctgggcaacatggtgaaaccctatctctataattgaaaactcagccgggagcagtggtgcacacctgtagtcccagctgctcgggaggccgaagcaggattgaggctccaatgaaccgtgatcgcgccactgcactccagcctaaggagcagacaagacgtcgacgcggccgcg

SEQ ID NO: 603875 - DNA, 384 bp, Homo sapiens
  misc_feature (232)..(232): n is a, c, g, or t
gcctggtgcagtggctcaggcctgtaatcccagcactctgggaggccgagtcaggtggatcatctgaggtcaggagttagagacaagcctggccaatatggtgaaaccctgtcgctactaagaatacaaaaattagccaggtctggtggtgggcacctgtaatcccagctacacaggaggctgaggcaggagaattgcttgaacctgggaggcgggggttgcagtgagccgngatttcgccactgcactccagcctgggccaacaagagtgaaactccgtctcacaaaaacaaaaatgtacacctcgtcagatgctatgacaccaatttttctctttttctcttcctcgccgttggcgtttatatctgggctgtttgcctcccg

SEQ ID NO: 603876 - DNA, 137 bp, Homo sapiens
ttttgcggtgcctttccttatgtattaatatttttcaagatatgcttcatagctattgtatatgccagatactagtataccataattatttatcccattggcctactactggggagttatttctaaatgcttcagta

SEQ ID NO: 603877 - DNA, 396 bp, Homo sapiens
atgagtttctccaagactaacacaagatgctacagaatttttcaaacagctaggtcattttctttatatgtacttacttagaacttttataaatgtagcctaaagctttgaaaaacttgagattaaaaaaagtcaacaaaatattttaaagagtaaatacaaaaggtttaaagaaagtttaaagaacaattactatttatctgaaagaagagaaaattcaggcatagctggaagactttgcaagcatagaaaggattatacaaaaaaggtgaccatatattctctctctagtgatgaattaaatgaaagacaatggctcaatggtagtggaagaggataattttaatagtaatggttattaattatagaaattatttattaaaattaaatagtaga

SEQ ID NO: 603878 - DNA, 1143 bp, Homo sapiens
  misc_feature (708)..(708): n is a, c, g, or t
ggggcgcgccccattccccaaagagtgaaatctccgggctcccaaaagagaaaaatggaggaagaagggggaagaagctgcccccccatgtgggacacccgagggatcccccggggtttttctccacaatagagagacaaccccctgtcgagcccaaagcgccacataggacttcacccaaggaccgtttggcataactggcgccacaggagaggagagacaagccccaagatggggggtgagagattgaaaaacactaatttgttgaacccggtgggggaagccctttttttcaaagaaattagggacttttaaacatcttttgcacacgaaaaaagatgggtccccgctgccagaggacattttgtgaaccctccccgagaggagaggtcttacacacgatgattctctcccctgtacgcgggacacactgcgcccacatcgcgcgcatacttgggcgcccacatgttgaccacattttgagaggtgcgcacaggcacagggattgcccttcaccccttctctaaaaaataatttgtggtggaagtatacctgaggccacccccacacggggagaagggttgagacatgagtctataaatcacggaaaactggggagtttctcttggtgataaactcgagagaactctttaatttgtgggaaaatgtagaaagacccctctttaaaaagaattctgtctttcactntcgcttgtagacactcggtgacactcttttccgctcgccactcttttgtttccccacaccacacaaatttttgtttgtgggggttatatgtttatactgagaagagatgtgaccacgagtgaggtataagctggagaggtgtttatatgtatataagggcactatattgtgacacttcgagaaattctgagagacacctcgcacgccacgagttttataaattaccacacacttcttgtgtattaacctctttttataaagagttgtgaaaatatccaaatataaatgagatcacagtgtttaatatacttgtatgatgggtggatgaggctgtcccttgtaccactttgtttgaattttcacaggcactggtttggcaagtgccagaaattttgtaaccctttaccaattccattaaaagttaataatatggga

SEQ ID NO: 603879 - DNA, 329 bp, Homo sapiens
gggcggggggcgggggggtttttttttggccccttggcccgccccgtaccaattttggggggttagggcggggggggcggttgggtcccctccccccttttttgggggtttgcccccgccccgggttgggggccggggtttttcccccccccggtttttaaaagggggtttgggggttcccccttgggggggggcccccccttttggaaaaaccgggggttttggggcccctcccccctgggggggtgggcctttggtcccttttttttttttgggggggccctggggcctttttttttttgggccccccggggccccccctttttcca

SEQ ID NO: 603880 - DNA, 393 bp, Homo sapiens
tgctacttgtagtgcagtagtgggaacacttcggccacctgactcttcttcatgagctacgaacaggggtgtttcatacattcctaaacctccttgacaagcaaactggccaagatcacagtgactagaacttgtttgtggcatatctacaagtggcccaaaccgcaatctagggaccacagaaacctgcggcgtatgtatagcttcaccaaatccatcagtacgatgtggcaccacaagagtcggactacttgcaactgttctgtctatcatcatcaaacaaatgctgttgcatgaccaccattcctggagtcaactgaaggccacgtccttcaaactgccttcgggtcatcctgaattctctgcgcgccacgataaagggaatacatctgc

SEQ ID NO: 603881 - DNA, 238 bp, Homo sapiens
cgggtggatcacttaggagtttgagaccagctgggcaacatggagaaacactgtctctactaaaaacagaaaaattagctaggcatggttgtgcgtgcctgtagtcccagctactcgggaggctgaggctggaggatcgcttgagtccaggagttctgggctgtagtgcgctatgccgatcgggtgtccgcactaagttcggcatcaatatggtgagctcccggtacatgcaagggta

SEQ ID NO: 603882 - DNA, 228 bp, Homo sapiens
  misc_feature (22)..(22): n is a, c, g, or t
caaaaaaaaaaaaggccccccntttttttttttgggggagggggccccctggcctttgaagggttttatcccccccttttggccgggggccaaagaaagggataaaagggttttccccaaaaaaaaagggccgggggggttctttttaaccccccccccgggggtttttttttgggtttttccattgggaaaggggggaaaaaaaagggggggggcccccccccccca

SEQ ID NO: 603883 - DNA, 336 bp, Homo sapiens
ctcaatggaattcaaccaatcaggaaccaaacattcaaatacgagcctgtgaggacctccttccttcaaaccaccataatgaatgaaaatgtatgcatgagtgaataaatgagccaatacattcatcaaaaatggcaaagattccatgctgatatgctatcaattgcaatcagagtgcatgcattggaaggcgcaatgcgtccaccaccacatttggggacctagatatttcctccagctctttgaagactgaaataccaacaagctaccaagtttacaggttatatatagccacatgcctagaagaaacagagcacatgaaaagcactaatggta

SEQ ID NO: 603884 - DNA, 219 bp, Homo sapiens
ttttttttgggggccttttttgggggggccctgttgtgggcttccccccgcgccgggggtcccccgggtttaaaacccggctttgggggcccgggcctggttccccccttgttttccgggggggaacccccttttggggcctgggctttgggttggaaagggttttaaaaaaagtgaagggcgggaaggggggggaaaataaaaagcttttttgcccca

SEQ ID NO: 603885 - DNA, 806 bp, Homo sapiens
  misc_feature (34)..(34): n is a, c, g, or t
  misc_feature (63)..(63): n is a, c, g, or t
ttggtgcaagtgccaaagttgtgcatttcctccnacaagtggaagggtggaattatacttatnatcccaaaacaaaaagtgtcaaaagtgaggcccatgatcccaacatgactcatccagagtttctcatcctgtggtggaacatctttaccaccaacgttttacctctgcttcaacaatttgttcttgtcaaagaggtgtgctcatatgtaaatgtgaaagataaataaggagccatatcacatctgtccctttggggagatcccagctatggcacagccgtttgtatcctcggaaaaacggaaggaacgactggaacaaggccctgctgattatttgggaacagattccttttaccaactgcaaaaggacacttgacactaacccttcaaaaaaaacactgcatttttctttggaacacatccactccacagacctttgtttctgataccttagtgtccaagagctggggtttaaaaaagtgttgtgtcagtgtgttagaaaattatccaaacccttccccagacgggaaggctttttttagaatcaaaaaggggaaacctgggcaataatttgcggacgcaacccctcctggtgatatgagaacggggtgccgctttttaagacctcctacgaacttggtcacaagattttgacgcttatggtggctgccagcattagcagtgctggtgaacttttacatattacgcagcggttcatatctcttgtaaactcgtcataaagcctggtaaaacatgcgccttcctttcagaacaccaagatcccgcgtcaggtaagatagataa

SEQ ID NO: 603886 - DNA, 108 bp, Homo sapiens
aatataaaactataagtattaaattgttattttctcacattgggaatctctaatgtgataatgttttctatgaaaataatttttttatattaattgttatatattaaa

SEQ ID NO: 603887 - DNA, 533 bp, Homo sapiens
  misc_feature (399)..(399): n is a, c, g, or t
agaggatcccctatgtctcgatgttaggtgttgtaggggagtgggcatagacagcacgtggctcaggtgtggaatgaagctagacaggtggaagccgaagggtcggctctccaggcaggagagaaggatgatctaagggcaggtgcaggccagaatgtctggaaagcatttctggtgcgggattgccagtttggtgacgtggactctgggaagcaaggggacaggggacagcagtcagagctgagctgctgcccacagagcaggctccactgcccagaggctaagcggtatcaccaagcggcggacaactggcaggtcaggaagaagtgccactccagcctggacaacagagtgagaccccatctcttaagaaaaaggaagaagcagcaccagaactgngccccctagtcttaactgtctgggaggctgaggcaggaggttgcttgaggtcaggaggtgaaggctgcagtgagctgtaatggcaccactgcactccagcctggacagcagcacgagaccttgtctgttttttc

SEQ ID NO: 603888 - DNA, 232 bp, Homo sapiens
gatccgcatgaagctgagcagtgtctcctcgtcctgaagcagtacctctgacagcagccctggagcaggtcctcgcgctgcccatagaacagtgaccactcgctcatgctcatatactctgctgtgatctgcaccgacttgtcacagccagctgtagaagaaggtgccatcgatttttgaatgaggatggacaggacctgcaagcaatgccccaggactgagtcaggccccg

SEQ ID NO: 603889 - DNA, 147 bp, Homo sapiens
ataagaaaagggaagagcaggagattatggttattcatacataaggtctcacgtgtctgtgatatgttaggatagtacaaataacacctagatgaagattggctagaaaaatataggaactgtttactattggttcccgaaagcata

SEQ ID NO: 603890 - DNA, 830 bp, Homo sapiens
atccgagacgggcgaggagtgccgatgtgtgcacctggacctcatcaaggagatgcggcagtttctgccagttccctgtttccccgttgtggcctatgccttacttgctatccatccccacctaccccagcggccagatcgggtcttcatgctgtgcagcaaagaacccgagcacgaacttccaggagccgggtgcagccgttgacacaagcagcaggtggcgcagatgcaggctgaagtactacaactccgacgtgcaaccggcggagttggtgctgcccgagttttgcccggcaaggctcttgaattgattgtagaaaggctgagccccatggtcgccatccaatgtgattgccagcccaggggacctcggacccttgtgaaagcctggcgggagtgcctcggaccccttccaggcgccccgggcgggacctcctggcttgagattcatcgccacacatcaagacaaggtgttacaaagccccaagaaatgctggccgggccttgcccaatgatgggggggggacgtgcctgagaagtcatagtacctcctcttgggaagttgccaaacggttcccagaggcctattacccaagatgtggtaacggggccatcctcttctggccatttcatggtgggcccctttcaatttcaaccgaaagcagcggttgtaattcaattagccaacaagaaagaaaagatatagcgtgggcgcgcacaacaccactttggggggagacaatcggcccctaaaaagaatattgggaagacgggtctatgagacacgcaagacccccaatgtggggggacgaagtgggcaaagatcgata

SEQ ID NO: 603891 - DNA, 718 bp, Homo sapiens
ctaggtagaggctgggtgttgaatcaggagaggagctggcgagggtctacagcctccggcacatctccacctctcttggtcagcgatgcgttgacgggccagtgtcaagctggagggctccgactggcgcggacggagcgaagctgccgagccatggtgcaccaaacgggcatccacgccactggaagagctgaatggaattctttgccaaggcacgggctggctctgtgcggctcatcaaggttgtgatttgaggactgagcagctcgtgctgtgtgtgcctcgcaggagccagtaggccgctgggatcaggactatgacagggccgtgctgccactgctgtgacgcccagcagcccatgctacctgctctacctgcctcgactcacagaatgctcagggcttcgaattggctcttcctcgcctgtgtctgcctgataagctcccccgtgactggctgaatgattgcttgtactgctggccacggctggggccacatgtgaaaacaggagttttggatggtggacaacatcaaggatgacgctcttctgggacttgtgaagtgatgacctctctttatgcttgggtaccatgaaacacctgtcgtcctgtgcggcaccttggccctgttgacctcgtgcttgagagagagctccagcagatccgcattaacgaggtgaagacatgagatcaggtgtggaaagcaagcaccagacctg

SEQ ID NO: 603892 - DNA, 169 bp, Homo sapiens
aggagatccaccctccttggctcctaaattgcttgggattacaggtgtgagctactgcgtccgacctaattatttttattttgatagagacgaggttcactatgttgcctaggctggtattgactcctgggctcaagcgatcctcctgccttagcttccaacgtgctgg

SEQ ID NO: 603893 - DNA, 821 bp, Homo sapiens
ggcctgttgagaaggaaaaggagaaggagaaggtgacacgcgagactagttctctctctctctctctctcgagagagagagaactagtctcggttttttttttcttctttctctttctattatctatatttcttttttatttcttgtgggctttaatattttctattctatttttcttgttgctttaaaaccccctctctcttctagaacctcttccactctctccgatatgtgctcctactcctacaaaggaatctgtgcgtcagaagaggcgcgtacgaaaatacaccgaccttcacaaaagaggcgctgctcgcccaagaagagagagaacagaacgcgccccacgtatctgcgtggtatctccacccacagagcgcgtatgataaatgacgcggcgcagtacacagcacagctctatcacacacacacccacagggagggcggaaacccccacacagagtgaattctacacgcccccccccgactaggccacgctgcgacaacacatcacgcgaggaaaacaacaccacacgacccaagaaaagagtgtatctctctatctctaccacaaacattttaacatctgatgagggagcgtgtattattccacacagtatatatagaagagaatttgttgagtagacggcatgcgaggagatattaactgctggttatatctctaatctcctctatagacgaccagtgagacgttcgcttccctgggtgtgctgattgatcaaccaaccgccgcgtgccgcgttgattaataaatgcggcgtgagggacaaataacgtcgaatattaaagatgtgcagccc

SEQ ID NO: 603894 - DNA, 101 bp, Homo sapiens
ggcatgacaactgaccttcagcgcctcatgtccagtgcaatggagtcctccaggatcgttcttcgtcgggggaagctggaaatgaacgggcggaacagagt

SEQ ID NO: 603895 - DNA, 188 bp, Homo sapiens
  misc_feature (32)..(32): n is a, c, g, or t
  misc_feature (36)..(36): n is a, c, g, or t
  misc_feature (86)..(86): n is a, c, g, or t
  misc_feature (97)..(97): n is a, c, g, or t
  misc_feature (188)..(188): n is a, c, g, or t
tttgcgagggaggcgctctggctgtcacgggnggcnatgcctgcgccgagcggatcgcgacgtatatcccaacccactacaattgntacgacatggncgtcaccactcaggattggcatattgatcccgataaccatttctccaacaaccccgactttgtggactcctggccgccacatggggttgan

SEQ ID NO: 603896 - DNA, 165 bp, Homo sapiens
aaccactcacctactacaacacctagcaacattaccaataagattagcgatagaattgaactgcgcatagatttgtacgcagaagagaaatatacaagcatatttgcaggactaccctgtactctgcatagaatactgaatacttgcagggacaagctagacccg

SEQ ID NO: 603897 - DNA, 603 bp, Homo sapiens
gggctggagtgcagtggcaagatctcagctcactgcaaattccatctcccagattcaagtgattctcctgcctcagcctcccatgaagctgggattacaggcagccaccaccatatccagctaattcttttatttttggtagagatgaggttttgccatgttggccaggctggtctcaaactcctgacctcaagtgatccacctgcttggcctcccaaagtgctgggattacaggtgtgagccactgctcccagccaagtattcaataattttcataagaaaagaaaccaacagtcagctgactctcatcctagaaattctaaactactattttttttccccctggataaagttgggtttttagaaactgatgattttttagtaaacttccctggagtaaccaactgagtcagtgcctttattagttacaaatacatgtgatccctaaattctcacctgtaggatctaatctcaaaggcttgggccctgagactatgcagctataaaaattggttaggtaccaagttgatcacaaaatgggattatctttctaagtaaatatttgccaaaaactagttaatcaaagatatcccccaccccttg

SEQ ID NO: 603898 - DNA, 944 bp, Homo sapiens
  misc_feature (30)..(30): n is a, c, g, or t
  misc_feature (112)..(112): n is a, c, g, or t
  misc_feature (230)..(232): n is a, c, g, or t
  misc_feature (259)..(259): n is a, c, g, or t
  misc_feature (267)..(267): n is a, c, g, or t
  misc_feature (274)..(274): n is a, c, g, or t
  misc_feature (278)..(278): n is a, c, g, or t
  misc_feature (283)..(283): n is a, c, g, or t
  misc_feature (285)..(285): n is a, c, g, or t
  misc_feature (288)..(288): n is a, c, g, or t
  misc_feature (292)..(292): n is a, c, g, or t
  misc_feature (309)..(309): n is a, c, g, or t
  misc_feature (323)..(323): n is a, c, g, or t
  misc_feature (336)..(336): n is a, c, g, or t
  misc_feature (347)..(348): n is a, c, g, or t
  misc_feature (354)..(354): n is a, c, g, or t
  misc_feature (357)..(358): n is a, c, g, or t
tgggcgtcagctgtggctcctttctggatnttttccctccccacccgtattttccgccatcctggcccctgtgtggcccacctggaccccctgcccgaggccggcgggcctncaggggtgggttggcggtttggggaagtgaatgcggttaaggcaacggagtttattctgaggtagatgtggcagggtgtggcacagccccgtgtggcccagccttggccgccgcgtgnnnccgggtgttccctcccccggccgcttngctgttgnctggctngctngccgncngcngccngccgcctctcttttgtngggagacgcaagangtgttgggctgtngggtggcccgnnggtctnganncaaaacagagaaactctcttggtggtccatgagatggcctgtctggattctcacaccagacacttgcgctgagatgcgcctgtgttgcgctgcgccatgtagagtgatcgcccctgttcagtggtgtttacatcagagcaaagaatgtccctggggcggagtctataccggagaggcggtctatggcgctgtgtagagatcacaagattggctacaattgggcacaacgttggggcgccccgcccttgtgggcaccaagagaaaagatctcagatgaagtggaaagttcgccaccggttctggccatttcaagcccaggatgtgacgtggcctccactgcagggccccaaccagagggggcccacaattctctcgtctcctcccggcagaacgggcctcaatggacagaacaacctcccgaggcttttccatcaccgacaaagtcgtgtttccccaaggggacacgcatggcacctgatgacagagacacaaacgattgctatatgggagcaagagccgtgcgtgaatctgacacaagagtctgcagttccctgtgggcgtgcacaccacaaagagggttgccccg

SEQ ID NO: 603899 - DNA, 441 bp, Homo sapiens
tcgtaatgcccggccgcatggcggccgcgggaattcgattaggtgaccgtccgctccaacaaccgtcctcgagccagcagactcacgccgctggtgcacgcggtaaaaaggaccgaattgtcgagccctactgacgtacacatgcacgaaggttctaccgtgcatgccacctgctgccaaaagtgcattatacactccataggcagccttttgacagcagaaattatctgcatcccccagcaaatgacggccgatgcagacccaaccaaagcgccgtccacaattgagtaggtgcacatagacgctgggcaaacggtcgtataagcaactgtttgatccacgccaacttatccaaatcagcatcctcgacttaaaggctaacaccgttagctcacgagctgtaccgcagcaaggttttgccaaacgtagctgagcacgcac

SEQ ID NO: 603900 - DNA, 205 bp, Homo sapiens
  misc_feature (190)..(190): n is a, c, g, or t
  misc_feature (204)..(204): n is a, c, g, or t
aaagtggaacaaaaggcacgttttggagtctcttgtcttaatgatatgtccatccgtctgtccgtccatttgtgttttctgcgtcgtgtcattggatataatcctcagaaataatgaaacttgcctctgtcaaccagaaggaaaaatccgttaaaatgtgggtcgaacttgtagactcggtcacggtatnaaaaaaaatctatna

SEQ ID NO: 603901 - DNA, 856 bp, Homo sapiens
ggccgcatcttcttttgcgtcgccagccgagccacatcgctcagacaccatggggaaggtgaaggtcggagtcaatggactttgagtcgtatcgggcgccatggatcaccaggtgctgcttttaactctggataaagatggcatatcgttgccatcaatgaccccattccttgaccgtcaactacactggttaacagtgttccacatatgattccagcccactggcaaattccatgtgcacgcgtcaaggcatgacgaacggagaacgctatgtcatcaactggcaaatcacaatccaccatacttcacaggagacgagaatccgctccaagaatcaaagctgggagcagatgcttggctgctgcagatagcgtcgctggcagtcccactggctgtacttcacacaccaatcggcagcacagcgctggggcatccatatcgccaggcgtgggcacgcccacaccaggtgtccatacatcatctgaccccacatcctgcatcgatgccccacaatgcttcagctcaatgcgagtagctgcaaccccagtgcagcacagctcatgcaccaaccagaacatcaaacgatccatccagaacacatgcaactccatagccaccaagacgacacatgccttagacaacacccatgagccacaaggctccagtacccactgaccaacaaaacgggccatacagccgccaaaccgaaccgtcacaatgaaacaccaaaaaggaatgcgcaaatgcccaaaatccacatggaccacgccccaaggaaacgacccatgaacagagcaaaaggacacacaccttacacagaagcgaacaacaatgaatgaagaagaatgcacatgaa

SEQ ID NO: 603902 - DNA, 107 bp, Homo sapiens
ttgggggcggggggccggaaagccctaatcgggaccctaatgggggccccgttttacgcttggacgggaagccgccaacgtgggaagaaagaaggggagaagccaag

SEQ ID NO: 603903 - DNA, 264 bp, Homo sapiens
atgttctcatttttagcccgactttgtggcatggtcggaacttatttccttctttaaaggcggaactatattccactgtgacatatagtacctcattttgtagatcctttcctcgttgataaacacttagcaccaacgacttgagtacgtgtaatattccacagttcatcatatacctataataatctagtacatgccgatcgtaattactccttcctggcatatacctgcccgtggcgacacgttgggtactacgctttggca

SEQ ID NO: 603904 - DNA, 846 bp, Homo sapiens
  misc_feature (81)..(81): n is a, c, g, or t
  misc_feature (86)..(86): n is a, c, g, or t
  misc_feature (99)..(99): n is a, c, g, or t
  misc_feature (166)..(166): n is a, c, g, or t
  misc_feature (190)..(190): n is a, c, g, or t
  misc_feature (200)..(200): n is a, c, g, or t
  misc_feature (204)..(204): n is a, c, g, or t
  misc_feature (206)..(206): n is a, c, g, or t
  misc_feature (215)..(215): n is a, c, g, or t
  misc_feature (221)..(221): n is a, c, g, or t
  misc_feature (227)..(227): n is a, c, g, or t
  misc_feature (236)..(236): n is a, c, g, or t
  misc_feature (239)..(239): n is a, c, g, or t
  misc_feature (243)..(244): n is a, c, g, or t
  misc_feature (251)..(251): n is a, c, g, or t
  misc_feature (263)..(263): n is a, c, g, or t
  misc_feature (267)..(267): n is a, c, g, or t
  misc_feature (279)..(280): n is a, c, g, or t
  misc_feature (282)..(282): n is a, c, g, or t
  misc_feature (288)..(288): n is a, c, g, or t
  misc_feature (293)..(293): n is a, c, g, or t
  misc_feature (299)..(299): n is a, c, g, or t
  misc_feature (312)..(312): n is a, c, g, or t
  misc_feature (334)..(334): n is a, c, g, or t
  misc_feature (336)..(337): n is a, c, g, or t
  misc_feature (339)..(339): n is a, c, g, or t
  misc_feature (354)..(354): n is a, c, g, or t
  misc_feature (357)..(357): n is a, c, g, or t
  misc_feature (359)..(360): n is a, c, g, or t
  misc_feature (372)..(372): n is a, c, g, or t
  misc_feature (378)..(378): n is a, c, g, or t
  misc_feature (384)..(384): n is a, c, g, or t
  misc_feature (406)..(406): n is a, c, g, or t
  misc_feature (435)..(435): n is a, c, g, or t
  misc_feature (437)..(437): n is a, c, g, or t
  misc_feature (447)..(447): n is a, c, g, or t
  misc_feature (469)..(469): n is a, c, g, or t
  misc_feature (498)..(498): n is a, c, g, or t
  misc_feature (615)..(615): n is a, c, g, or t
  misc_feature (639)..(639): n is a, c, g, or t
  misc_feature (645)..(645): n is a, c, g, or t
  misc_feature (714)..(714): n is a, c, g, or t
  misc_feature (720)..(720): n is a, c, g, or t
  misc_feature (723)..(723): n is a, c, g, or t
  misc_feature (763)..(764): n is a, c, g, or t
  misc_feature (794)..(794): n is a, c, g, or t
gcccgccgcgagcacctccagttctgccggcttctgcgcgccggggccgcctctccttccgccggtgccgcggcgcctcanggaanccccggaggcggncggaggggggcctgcagcgcggggcccggagggcagccggcgcccgaagccagggtgcacttccgantggcgaggttcatcatggaggcangtgtcaaacnaagnangcggtccantcccantgccantgcttgcancanttannaaaaatncttttgcgaaancaanctggacgcctannanccttanctgantgccangtcttcaatttanttggccggcaaaatggaaaaanannanctgcggactcgtganaanannaatgtgtccaanaagtantttaanccaagcggtgagcccctggaantggactcccgcttctgggaactccggganancatcgtgcantgtgagcttctcatgctgaaanttctgcgcttccaggtctccttccaacanccaaaaaaatacctgctccactacctggtttccctccaaaactggctgaaccgccacagctggcagcggacccctgttgccgtcaccgcctgggccctgctgcgggacagctaccanggggcgctgtgcctccgcttccangcccancacatcgccgtggcggtgctctacctggccctgcaggtctacggagttgaggtgcccgccgaggtcgangctganaancgtggtggcaggtgtttaatgacgaccttaccaagccaannattgataatattgtgtctgatctcattcanatttataccatggacacagagatcccctaaggtcctggccaggctgcccaaa

SEQ ID NO: 603905 - DNA, 1116 bp, Homo sapiens
  misc_feature (32)..(32): n is a, c, g, or t
  misc_feature (1055)..(1055): n is a, c, g, or t
  misc_feature (1063)..(1063): n is a, c, g, or t
aaaagaacagagttcgctggtgaaggaaaggngaaggggtttcggccgcatcacgttttaatacatgtttaggttaattcattattgaaaaataggagtcttcttttcattgcagcaaacaaaagtcctttcacaatattggtcatgggccgttcaaatccccaaatgctgaaactcctctgagggatgcgctggcgacaggatgccctgcgcggggcggcggagcgggtgcgtgcggcggcggttgcgagagagatgagccgcggcgatgagcccggaaaagcagcaccgggaagaggatgaagttgactccgttctcctttcagcgtccaagatcctaaattcttcggagggggtgaaggaaagtggctgcagtgacacagaatatggctgcatagcagaatcagaaaatcaaatccaaccacaatcagcattgaaagtccttcagcagcagttggaatcatttcaggctttgcgaatgcagactttgcagaatgtcagcatggtacagtcggaaatcagtgaaatattgaacaaaagtattattgaagtagaaaacccacaatttagctcagaaaaaaatctggtgtttggcacgcgcattgaaaaggatttgcctacagagaatcaagaagaaaacctttctatggagaaaagtcatcattttgaggattccaagacacttcattcagtggaagaaaaattaagtggtgatagtgtgaacagtctccctcaaagtgtaaatgttccatcccagatacattccgaggacacattaactctgagaacttcaacagacaatttatcttcaaacataattatacacccttcagaaaattctgacatcttgaagaattataataacttttatcgttttctacctactgcacctccaaatgtgatgtctcaagctgatacagtaattctggataaatccaaaattactgtgccttttctcaagcatggatttgtgaaaatctagatgacatttgccattctatcaaacaaatgaaagaagagcttcaaaagtcacatgatggggaagtgggccttcnaacttgancttcaccttgacactggccaaattgcccggcattgggccacacaccatggccc

SEQ ID NO: 603906 - DNA, 521 bp, Homo sapiens
  misc_feature (32)..(32): n is a, c, g, or t
aaaagaacagagttcgctggtgaaggaaaggngaaggggtttcggccgcatcacgttttaatacatgtttaggttaattcattattgaaaaataggagtcttcttttcattgcagcaaacaaaagtcctttcacaatattggtcatgggccgttcaaatccccaaatgctgaaactcctctgagggatgcgctggcgacaggatgccctgcgcggggcggcggagcgggtgcgtgcggcggcggttgcgagagagatgagccgcggcgatgagcccgggtaagagttggacggggcggggctcctaggggagccgcgggaacggagggcagcagaagggcattcagcaggcggctccccgctcgaaaacccgggacatcccgggtccgcccttctgcactcgccgcacatctcccgctcggccctagggctgagcacccgctgcggccccctgcgtccgctgtggcttacaggctggctacgtggtctgccgccgccgcccgcccagcgcgccctcgggtg

SEQ ID NO: 603907 - DNA, 1215 bp, Homo sapiens
  misc_feature (32)..(32): n is a, c, g, or t
aaaagaacagagttcgctggtgaaggaaaggngaaggggtttcggccgcatcacgttttaatacatgtttaggttaattcattattgaaaaataggagtcttcttttcattgcagcaaacaaaagtcctttcacaatattggtcatgggccgttcaaatccccaaatgctgaaactcctctgagggatgcgctggcgacaggatgccctgcgcggggcggcggagcgggtgcgtgcggcggcggttgcgagagagatgagccgcggcgatgagcccggaaaagcagcaccgggaagaggatgaagttgactccgttctcctttcagcgtccaagatcctaaattcttcggagggggtgaaggaaagtggctgcagtgacacagaatatggctgcatagcagaatcagaaaatcaaatccaaccacaatcagcattgaaagtccttcagcagcagttggaatcatttcaggctttgcgaatgcagactttgcagaatgtcagcatgcctacagagaatcaagaagaaaacctttctatggagaaaagtcatcattttgaggattccaagacacttcattcagtggaagaaaaattaagtggtgatagtgtgaacagtctccctcaaagtgtaaatgttccatcccagatacattccgaggacacattaactctgagaacttcaacagacaatttatcttcaaacataattatacacccttcagaaaattctgacatcttgaagaattataataacttttatcgttttctacctactgcacctccaaatgtgatgtctcaagctgatacagtaattctggataaatccaaaattactgtgccttttctcaagcatggatttgtgaaaatctagatgacatttgccattctatcaaacaaatgaaagaagagcttcaaaagtcacatgatggggaagtgggcacttacaaatgaacttcagactttacaaactgatccagatgttcacaggaatggtaaatatgacatgtcccctattcaccaggataaaatgaactttattaaggaagaaaacttggacggtaacttaaatgaagatataaaatcaaagagaatttcagaattagaggcattagtgaagaaattactccccttcagggaaactgtgtcaaaattccatgtgcatttttgtagaaaatgtaaaaagttatctaagagtgaaatgcacaggggaaagaa

SEQ ID NO: 603908 - DNA, 804 bp, Homo sapiens
atttgccactgttagtctctggtttcaggctccctccttttcagcctcccaggcttccttgggggcaccatcccgtggtgctctttgattaagaaagggggaggtgagtggaatagggggctgaggatataaatcagagcccgtggcctgcttggtcgttgatagaaatgggtaatggtccttgggctgagatcttgagattcctagatctatatccataggaaaaaagtaaattaatttaataacagtgtgatgagcttccattttatacttatttcatgccagaattaagattaatcttcacaacaatcgcaccttagagtagtaggtcctattatgatccccatttcagagatgactaccttaaggcattcaaacacctagtgagtgatggagctaagattcaaacccaggtagtatgctcccttttaatcacagctctgtaaagcctccatcaagcaacaagcaatttttgtactttctttctgagcagggaagcaaaatcttatttaaatcatactataactggatgatttatatgtgcagttaaaaaagcgggggactgcatgagcaggtcagcccagagaagagtggctacaatgctctccagaagagtggctacaaatgctctccagccctggttgaagaacttggcatctgtctgtgaccagcagcttctcattgcaatctctaaggttactcatcaaccttgaacaacaaacccagcagctggtttcccaaacaaatcgtattacttaaaagcaagaagaaagaatgtggttgtctgtgcatccattatatcga

SEQ ID NO: 603909 - DNA, 225 bp, Homo sapiens
cttagcttcagcttacagcttctgttgttgtgccagcaattccttgattggaaattgtcctttgtgttttgttgctctgttatcctgtaaatatactcggggatgcgtcctgtgtttgtccatctactgctttgattcctttgatcccacccattctttcacttttagaaagaacaaatcattgttgcagaggtctctgtattttgcagctgccctttctggtgg

SEQ ID NO: 603910 - DNA, 1326 bp, Homo sapiens
  misc_feature (32)..(32): n is a, c, g, or t
aaaagaacagagttcgctggtgaaggaaaggngaaggggtttcggccgcatcacgttttaatacatgtttaggttaattcattattgaaaaataggagtcttcttttcattgcagcaaacaaaagtcctttcacaatattggtcatgggccgttcaaatccccaaatgctgaaactcctctgagggatgcgctggcgacaggatgccctgcgcggggcggcggagcgggtgcgtgcggcggcggttgcgagagagatgagccgcggcgatgagcccggaaaagcagcaccgggaagaggatgaagttgactccgttctcctttcagcgtccaagatcctaaattcttcggagggggtgaaggaaagtggctgcagtgacacagaatatggctgcatagcagaatcagaaaatcaaatccaaccacaatcagcattgaaagtccttcagcagcagttggaatcatttcaggctttgcgaatgcagactttgcagaatgtcagcatggtacagtcggaaatcagtgaaatattgaacaaaagtattattgaagtagaaaacccacaatttagctcagaaaaaaatctggtgtttggcacgcgcattgaaaaggatttgcctacagagaatcaagaagaaaacctttctatggagaaaagtcatcattttgaggattccaagacacttcattcagtggaagaaaaattaagtggtgatagtgtgaacagtctccctcaaagtgtaaatgttccatcccagatacattccgaggacacattaactctgagaacttcaacagacaatttatcttcaaacataattatacacccttcagaaaattctgacatcttgaagaattataataacttttatcgttttctacctactgcacctccaaatgtgatgtctcaagctgatacagtaattctggataaatccaaaattactgtgccttttctcaagcatggatttgtgaaaatctagatgacatttgccattctatcaaacaaatgaaagaagagcttcaaaagtcacatgatggggaagtgggcacttacaaatgaacttcagactttacaaactgatccagatgttcacaggaatggtaaatatgacatgtcccctattcaccaggataaaatgaactttattaaggaagaaaacttggacggtaacttaaatgaagatataaaatcaaagagaatttcagaattagaggcattagtgaagaaattactccccttcagggaaactgtgtcaaaattccatgtgcatttttgtagaaaatgtaaaaagttatctaagagtgaaatgcacaggggaaagaa

SEQ ID NO: 603911 - DNA, 1107 bp, Homo sapiens
agcggagccccgccacgccacgacccgcgacagaacagccccggacggttctgttacagaaaagcagcaccgggaagaggatgaagttgactccgttctcctttcagcgtccaagatcctaaattcttcggagggggtgaaggaaagtggctgcagtgacacagaatatggctgcatagcagaatcagaaaatcaaatccaaccacaatcagcattgaaagtccttcagcagcagttggaatcatttcaggctttgcgaatgcagactttgcagaatgtcagcatggtacagtcggaaatcagtgaaatattgaacaaaagtattattgaagtagaaaacccacaatttagctcagaaaaaaatctggtgtttggcacgcgcattgaaaaggatttgcctacagagaatcaagaagaaaacctttctatggagaaaagtcatcattttgaggattccaagacacttcattcagtggaagaaaaattaagtggtgatagtgtgaacagtctccctcaaagtgtaaatgttccatcccagatacattccgaggacacattaactctgagaacttcaacagacaatttatcttcaaacataattatacacccttcagaaaattctgacatcttgaagaattataataacttttatcgttttctacctactgcacctccaaatgtgatgtctcaagctgatacagtaattctggataaatccaaaattactgtgccttttctcaagcatggatttgtgaaaatctagatgacatttgccattctatcaaacaaatgaaagaagagcttcaaaagtcacatgatggggaagtgggcacttacaaatgaacttcagactttacaaactgatccagatgttcacaggaatggtaaatatgacatgtcccctattcaccaggataaaatgaactttattaaggaagaaaacttggacggtaacttaaatgaagatataaaatcaaagagaatttcagaattagaggcattagtgaagaaattactccccttcagggaaactgtgtcaaaattccatgtgcatttttgtagaaaatgtaaaaagttatctaagagtgaaatgcacaggggaaagaa

SEQ ID NO: 603912 - DNA, 1268 bp, Homo sapiens
  misc_feature (32)..(32): n is a, c, g, or t
aaaagaacagagttcgctggtgaaggaaaggngaaggggtttcggccgcatcacgttttaatacatgtttaggttaattcattattgaaaaataggagtcttcttttcattgcagcaaacaaaagtcctttcacaatattggtcatgggccgttcaaatccccaaatgctgaaactcctctgagggatgcgctggcgacaggatgccctgcgcggggcggcggagcgggtgcgtgcggcggcggttgcgagagagatgagccgcggcgatgagcccggaaaagcagcaccgggaagaggatgaagttgactccgttctcctttcagcgtccaagatcctaaattcttcggagggggtgaaggaaagtggctgcagtgacacgtccttcagcagcagttggaatcatttcaggctttgcgaatgcagactttgcagaatgtcagcatggtacagtcggaaatcagtgaaatattgaacaaaagtattattgaagtagaaaacccacaatttagctcagaaaaaaatctggtgtttggcacgcgcattgaaaaggatttgcctacagagaatcaagaagaaaacctttctatggagaaaagtcatcattttgaggattccaagacacttcattcagtggaagaaaaattaagtggtgatagtgtgaacagtctccctcaaagtgtaaatgttccatcccagatacattccgaggacacattaactctgagaacttcaacagacaatttatcttcaaacataattatacacccttcagaaaattctgacatcttgaagaattataataacttttatcgttttctacctactgcacctccaaatgtgatgtctcaagctgatacagtaattctggataaatccaaaattactgtgccttttctcaagcatggatttgtgaaaatctagatgacatttgccattctatcaaacaaatgaaagaagagcttcaaaagtcacatgatggggaagtgggcacttacaaatgaacttcagactttacaaactgatccagatgttcacaggaatggtaaatatgacatgtcccctattcaccaggataaaatgaactttattaaggaagaaaacttggacggtaacttaaatgaagatataaaatcaaagagaatttcagaattagaggcattagtgaagaaattactccccttcagggaaactgtgtcaaaattccatgtgcatttttgtagaaaatgtaaaaagttatctaagagtgaaatgcacaggggaaagaa

SEQ ID NO: 603913 - DNA, 1691 bp, Homo sapiens
  misc_feature (326)..(326): n is a, c, g, or t
ggagggggaagcaagtctggtctctgtgcatggacgaagtcggctctgagctccattgggggattcacacagatagctcagaatgccggtgtctaagttgtggatggttatcagaacacgataattgtccctgagtgtggaagatgtactgatgggcgaatgtcgagatccattgctgaaatgggggcttatgtcagcatcgctggaatacaagaactgtgaaggcatgattcttcttagtgaattatccagaaggcgtatccgttctatcaacaaactcatccgaattggcaggaatgagtgtgtggttgtcattagggtggacnaaagaacaacaggcatcatcattgcatttagtccaacacacagcacagcagtttcgtcccagcaggcacagccaatcacaacatgtgcaagcacacaaattcaacaacacatcccaaacagctgtttcatcagccattcgttacgtccatgtatgctgcaggttgttcagcacataacaccacaggcatgcagcacgctgtgaacagcctattcccagcaggcactgtcctgggatctattgcatgcacaaagtaccacagaagcaccctggcacatgggtgccgcatgcatgcaatttcacgccattgcagatctccagcagcccatctcatctttgggccatcagtatatagcaatttagacatgcaagcatgcaaccgggcaagtcactccattcaatcacatcatctcacatcaggctgctgtgcaccccgacagggctggtccaaacattctgcagcccagactcactctgcaaggtcgggacttggtcgcctgcgctactggacaggccatctgacatggcttgtcacacacaagaacagccccttacagcaggccaggtctatggacattgtttctcacagaaacacattgccccatctacagctttccatctaacattacgcgtacatacactcggggtactgtacacatgaccgtcactgaacaaaccattggaagaagaaacacagacaggcacctatcctggtcccttccagtacaagacatattgagatcggatatcacaagacagaacacattggcggacacacgcagggatggatgtaccactggttcaacacgtgcgtcagcccaaaacaagttgttcacacagacattcacgaactgtaaacattgggacattaggcgaccgccacgcacatggatgaacgagcttgccaccacggaaaattggcgacaaagtgaagcgcgaacacgatacagtgcgacagaaaagtgttaaacagacaaagctttcaaactataaccgttcgtgagacaacacacagtccacaacctttaggagccgcacacgagcagcgcgtcacctgaggtcgcaaccaccacactggagaggagaaccacggacgggcacgacctacaccagcagacagctatagtagaacaaaacaagaggacaactacaacagaaacgatagtgaggcacatgaacgagaacgcgtctaacccgaaccgcacccactctcactactctaggcgaggcacgctacaacacagcacgaccaccactagacatcacgtgacgaccacgaaccccataaaccaacgcaactgacgctagatacacagaccaagataccgcatcaacgaagaccatcacgacacacgacgaatgacac

SEQ ID NO: 603914 - DNA, 175 bp, Homo sapiens
gtaaccacgcatgggaggagtgcttgtgattgatactcagatctgagacaggtgtgctcaagatggaagcaccaggactcagacccagatatctgaagcagggtcagagctccttgacgatatgcgactcctctggaggagactttacaacacccacccatgcgtgcattgccag

SEQ ID NO: 603915 - DNA, 933 bp, Homo sapiens
  misc_feature (326)..(326): n is a, c, g, or t
ggagggggaagcaagtctggtctctgtgcatggacgaagtcggctctgagctccattgggggattcacacagatagctcagaatgccggtgtctaagttgtggatggttatcagaacacgataattgtccctgagtgtggaagatgtactgatgggcgaatgtcgagatccattgctgaaatgggggcttatgtcagcatcgctggaatacaagaactgtgaaggcatgattcttcttagtgaattatccagaaggcgtatccgttctatcaacaaactcatccgaattggcaggaatgagtgtgtggttgtcattagggtggacnaaagaacaaacggatatattgattgtcaaaaacgaagagtttctccagaggaagcaactcaacatgtgaagacaaaattcacaaaatccaaaacctgtttatacgcattcttcgtcatgttgctgaggtgttagaataccccaaggatgacgcagctggaaagcctattccagaggactgcctgggtctttgatgacgagtaccagagacctggatttggtgcctatgatgcatttaagcatgcagtctcagacccatctatttggatagctcagattggatgaagaatgacgggtgagtactccttagtcagtttaataaggcgctgtaacccacggaactggcaaaacttcgagccgatattgaagagggtgtcaatgggtactgaaagcatgagggggaaagcaaacccagaaccggtggactggtctacgaaaacatgtgccataagacagcagagcttagtatgtatggacacccgtgacaacatggtgcatgtgatagtgtaacaacactgaacggactctccactccccagcatgcgctacacaaacagacaacaagcacgaacccactacaccagctagcccgaatacatgtctacacg

SEQ ID NO: 603916 - DNA, 703 bp, Homo sapiens
  misc_feature (1)..(1): n is a, c, g, or t
  misc_feature (15)..(15): n is a, c, g, or t
  misc_feature (25)..(25): n is a, c, g, or t
  misc_feature (27)..(27): n is a, c, g, or t
  misc_feature (32)..(32): n is a, c, g, or t
  misc_feature (34)..(34): n is a, c, g, or t
  misc_feature (47)..(47): n is a, c, g, or t
  misc_feature (50)..(50): n is a, c, g, or t
  misc_feature (76)..(76): n is a, c, g, or t
  misc_feature (95)..(95): n is a, c, g, or t
  misc_feature (131)..(131): n is a, c, g, or t
  misc_feature (142)..(142): n is a, c, g, or t
  misc_feature (150)..(150): n is a, c, g, or t
  misc_feature (158)..(158): n is a, c, g, or t
  misc_feature (168)..(169): n is a, c, g, or t
  misc_feature (205)..(205): n is a, c, g, or t
  misc_feature (208)..(208): n is a, c, g, or t
  misc_feature (254)..(254): n is a, c, g, or t
  misc_feature (261)..(261): n is a, c, g, or t
  misc_feature (268)..(268): n is a, c, g, or t
  misc_feature (286)..(286): n is a, c, g, or t
  misc_feature (309)..(309): n is a, c, g, or t
  misc_feature (334)..(334): n is a, c, g, or t
  misc_feature (371)..(371): n is a, c, g, or t
  misc_feature (373)..(373): n is a, c, g, or t
  misc_feature (386)..(386): n is a, c, g, or t
  misc_feature (395)..(395): n is a, c, g, or t
  misc_feature (401)..(401): n is a, c, g, or t
  misc_feature (428)..(428): n is a, c, g, or t
  misc_feature (472)..(472): n is a, c, g, or t
  misc_feature (474)..(474): n is a, c, g, or t
  misc_feature (519)..(519): n is a, c, g, or t
  misc_feature (543)..(544): n is a, c, g, or t
  misc_feature (617)..(617): n is a, c, g, or t
  misc_feature (700)..(700): n is a, c, g, or t
naactttaataaaanaaaataaaananaaaananaaaaaccaaaaanaanaaaaaaaacaggaaaaagggtcaacnaacaatttgtttgcaaggnggaggcaggaaaaggaacaagtaaacagaaaaaaantccaagaccancccaaagnagccaggntacaaaaacnnaagagtaaaaagccaaaaaaaagtataaaaccactnaanccacaaaagaacaaaaggggagtaaaaagtttaaccggtttagggnaaaaacnttaacancacaaaaagggattcacntccaaaaaggggcaccggcaacntttagaagaaagaagttcccaaaangggtggaccaaaaaaacccaaaaacaacaaagcagcnangccaaagcccagnaaggcccantaaacngtcccgggccagggtacatttcagggnaaaagagaaccacatttgggggttttagaaaggcagccaaaatnanatttgggcttttagtccagaagcctaacaaagtcaaggcgacagnccaagcaaaaaaagggaagggagnnaaaaattaagaatcaccacaaacccctgaaacccacatacactgtttaatgcttacatggaatgaaaccagtnttcttaattggcattttacacacacacacacagaatttaaaaaaaaaatcaaaggcaattattctaaatgtactatgatagcntgt

SEQ ID NO: 603917 - DNA, 473 bp, Homo sapiens
ttcccagtctgttggagatttaaagcgcctcaagggtccttctagaagcttccagagaaggtgtaaggaacttcacccaaaatgccaggaagtgaacaaggtcaggcccctcccgttccttccccctccccagcacaggcaatcagtgaacaggaagaaacagtggagtggagggaaagaaaacaagaaaattaagacggccaggccttgggccatgaggcttcctggaacccgggacctggggagcttctgagcaggcggagtgtctccatatctcacgcaggctttgggaggaaaatcgcccccaacacccacagggagccagcccttgggccctttaaggcttcaaagtcaagaacgcagctttttgtgttgtttttgtttctctttgcaagacagctccagcctggccacttgtgggccagcagagctcaaggtcatgtccaaacagggggagggagacgaggtaaatc

SEQ ID NO: 603918 - DNA, 309 bp, Homo sapiens
atgcaggggctgggagggttaggatgaaaaaactggggcccttggaggccccctgtaggtgggagggagcttattttggggtggggggtggggctagagggccatactgaaggggttaaacaggtttttgctcctcaagaatttgtttgcctgggcccaggattggaggggttcccccccataccctggggattcaagaatcagatttttaatacttccccttttttgttaggtatgacccctattaacccaatttttttgaaaactgggggctccccttgtccttagcaataaaatgtgttgggccga

SEQ ID NO: 603919 - DNA, 501 bp, Homo sapiens
agcggggggggagtttgcaaatggcgtctccctcgactaggagcggcagaaaaaggcgctggaaaaagtgaattgcgtaaccagaagccgaagccggagaaccaagatgaatcaggaactccttacggttcctaatggttggaaggtaacagcgggggggggcgaggacaatccctagaggactttgggagagaaagcagtttcgcaactatgtgcccaaaatacatgggaagcttacttgcacagagtgttggacatcggtgcagacagccttaatatgaacatcatgttaatgcaaccctgagagctgatcgaaggcagcatgactgtttgtactacaaatgaagacttgttgatccagtatatcatcattagggccagagatctcgataaaactgtgagcaaggagatgtttcatttgaacaggcagtacgaattcttcaggatgatgttgcactgtgacatcattaaaatacggttctttagtaaggaataaagaga

SEQ ID NO: 603920 - DNA, 455 bp, Homo sapiens
gtgaacgccaaaaatcctactttttaaatttaaaggagtaccttttccaaaagaattagtactgctaagtagattttatattaatctgcctaaaatttattcaaataatgaaaatgaatctgttttaagaaattcagtcttttagtttttaggacaactatgcaaaaatgtacgatggagaattctttttggataaactctaggttgaggaacttaatccaaccggagctattgtgaaggtcagaaaacaggagagggaatcttggcaaggaatggagacggagtttgcaaattgcagcttgagtaaatagttatgaatgggactgctattgtgtctcccaaggaaagttcctgtgatattatattccttttttaaggaaagagaaaacgcacagaaaacttttgctgtgcttcctttttctgtcctacctctgaaaataaactaagcaaaaaaa

SEQ ID NO: 603921 - DNA, 175 bp, Homo sapiens
cttacgaggatccccagtcaaccagctgcaggagagacaggcagctctgacgccactgtggttagtgtgtatgtgctgctatagaaatgtctgggggtctgcatggcgccccaattactctcagggactggttgcgtggcttctccaatgccggagcccgtcaggccatttttag

SEQ ID NO: 603922 - DNA, 619 bp, Homo sapiens
aaacagccgggaagaagcaccgtggctgctattatctgctctccgcgcctgacccctccctaggactcgtgatgccaaggccgctgcgagcggctacgtaggagtcggggttgagccccgagctgagccgcgggctgcgcactcttctggtctcccaggcccagacccaccttgaagaacatgagtggtggatttggctcctaagtaagagcacagtgtatgtatccaacttgcctttttcccgtgacaaacaagtgatcttgtacccggattatttttccaaggtatggcaaagcttgtacacacggttaccatcagtgacacgatacacggataccagggacagagtaaaggggttgcattgagtttaattctctcggactaaagacctctgcacaagaactgtaccagggcaataaacaacagaacagttattgggtaggagtgataagaagcaaggcattggctatttgccaactggacagagcacgctgagttcatccgaaggcgaaacttacttggtaaatctaagtgtcatgactgtggggaaagtggacacttaagttatgcctgttccgaaaaatatgctcggagaacgtgagcctccaagagaacgaca

SEQ ID NO: 603923 - DNA, 466 bp, Homo sapiens
  misc_feature (176)..(176): n is a, c, g, or t
  misc_feature (253)..(253): n is a, c, g, or t
  misc_feature (280)..(280): n is a, c, g, or t
  misc_feature (385)..(386): n is a, c, g, or t
aactgcgaagctgcccggagcaggattctgtctattcagaaagacctggccaacatagccgaggtagaggtctccatccctgccaagctgcacaactccctcattggcaccaagggccgtctgatccgctccatcatggaggagtgcggcggggtccacattcactttcccgtggnaggttcaggaagcgacaccgttgttatcaggggcccttcctcggatgtggagaaggccaagaagcagctcctgcatntggcggaggagaagcaaaccaagagtntcactgttgaatccgcgccaagccaggggggcaaaggttacccgaccaaccttttcctccagtgcggtgcaaggtgggggccggcgaacaatttctgggcaaggnntgcgctgacagcactggagcacgtgtcatcttccctgcggctgaggacaaggaccaggacctgatcaccatcatggaagg

SEQ ID NO: 603924 - DNA, 93 bp, Homo sapiens
  misc_feature (50)..(50): n is a, c, g, or t
actttttattttccctgttgcgttgctatagatgaagggtgaggacaatngtctatctgcactagctcttttctattaaagaaacttttccca

SEQ ID NO: 603925 - DNA, 961 bp, Homo sapiens
gtttgagaaggggtgcacaatcctggttaataagggtggttcttgcgccacatcttgatggtaaaagaaagttttggttcgaataaggcttgtaagaatgccgatgggtaatgccgtctgccaaggttaaagctgcatagaccttctcggggaatttctcagcacactgcagcttctttgcgccagcaaggcatccatgttacgcgcaaaatgcactggcagcagttcggagtgacagctcctcaggaccaggaatgatcctcaatgtgtatggaattatgtctcatcctgttctttacaagcatctattaccgtctcttgtggcgcatggctctatgcctcttaatcccagcattcttagggcggctgaagctgggctgtggtctacattgagcccaggagctttgagatccagcctggacaacatggctgataagccgtggtttcaaagaacatacattaaaattaggtgggcgtggatggtacgcacttatggttctagctacctcaggaggatgagatgggaggatcaattgagcgtgggtaaggatcgaggactgcagtgggacggagatgcactaccactgctaactgaagtgcaagcctgggcattcagagtaagatccctgctctcaaaaaacaatacataccaaatcaaaagcaatatatcactgtccattcatcactatgtttgtgctccgtagtagcaccacctacatgtgtctctcatactatcagatttcattgtaaaattttttgggttttctttttcctcttgatgcggggaaggatacataccaaactaaatagtggtgttctctgggtagtggggattgtgatggaaggcttcttgtttctactgtttattatttgaatgttttaactaatgagcatgtattattggattgcagtcaaaacaatttttaaagaaacatacaattgcccggtcatctcaattggg

SEQ ID NO: 603926 - DNA, 111 bp, Homo sapiens
acatatataccaagacagcacacattcttatctcatttgcgatctataaaaagtccataactgtaagcatggtgtcacttatcccgcatttgacacaacaaggtcatcagt

SEQ ID NO: 603927 - DNA, 1075 bp, Homo sapiens
cgtgacgcgtaggtcgagggacgcgtgggtcgatccacgtcggtccggtctcctaaagagacccgaacagctgaggaagctcttcattggagggttgagctttgacacaactgatgagagccgtgaggagccatatttgagcaatggggaacgctcacggactggtgtgggtacctgagagatccaaacaccaagcgctccatggggctttgggtttgtcacatatgccactgtgcgcaggaggtggatgcagctatgaatgcaaggccacacaaggtggactgcgaagagtctgtggaaccaaagagagctgatctccagagaagattctcaaagaccaggtgcccacttaactgtgacacacacagatattagtaggtggcattaaatggaagacactgaagaagcatcacctacgagattattcggaacagtatggaacaacacttgacagtgatctgacagtcatgactgaccgaggctagtggccaaggacacaagggcgcttgtgccttctgtaaccttaatgacgaccatgactccgtggctacgattgtcattcagcactattaccatactgtgaattggccacaaacttgttgacacgttcgaaaaggccctgtcatagccatgagatggctaagtgcttcatccagcaacagaggtcgaagtggcgttctggcaccctttggcgcggcgtccgcggacggtgggaacaggtgcgaattgcgcagctaggggacgtgagcggaaaccaccagaagcccgaggtggcatttggtgacacccgttctagctggatcgcataattgcaacatacatattgcataactgcactcgccaagtataggctccataagtatgccgtctgtgatacaacgcccggaagcagccgcccgtggacctgtggcacagtttaattaacaccaggacgcgcaatgtcgaatctgcgcactcgcaccccacccacagacagtagaacacactcatgctatctcaaccacagccatctaagcacccacacacatcgacacacccgctacaaatcatcacaaaagctaacattgtaacacaa

SEQ ID NO: 603928 - DNA, 469 bp, Homo sapiens
catatactatacactgacagcagcttcgaataggtttactatgtgtattacaagcatagtaaaaataaatgccctggtcctgaaagttcaattatttcaaaatgtatcaatacttactctctatgtatgtttaaagctggcctggtgtcactcccatatccctttgagtgtattaagccaaataagaatgtcaggcttccccaagcacactttggtctctaaccacaacccttaacagcatatccattatgtccttcaatatctttcagctctagtaaatccttgcctgctcaggtgaacattagtcttactttgaaagaatctgcagccctcataatgtggtcgttcctaaatgccatcacttcacaattaggattccctggttacaaaatgccaatcaaaacatcagtgggctttagtatctgatacaggctaggtttgtaataactccaggaggttttatatctac

SEQ ID NO: 603929 - DNA, 166 bp, Homo sapiens
catcatgttgaatgtgcgcgcgagcgactatcagagcatattgaatttgcgcagtgctaggaatagttctagaagtaccggttgtgaacgtaagccaggcatacgtatactccggaatataaatatgtgtaggatgcatttggcggccgtcggcagctggggccat

SEQ ID NO: 603930 - DNA, 1391 bp, Homo sapiens
tcctgggttgagcacagggtactttatggagggtccatgacaaggtggcggtccccctaggcccctccccttcttacaaggggttcctcacagtggaaacactgtggtgaaggaagggtgacaaatccaggtgtgtgggtgggggacagtggaggtggtggcagtggaatctcccccaagcaaggtgaagggttcctcttcttcttctccctcttgtggtgcctcatgggggggagcgtgggtgtgctcacaaggggggtctcttaatctctcctgtgtgtgaggagcacatgtgtgtgcgcgcacatgtgaggggctcaacacacaccctctgtgtgtgtgcggggtatacacacaaaatatctcgtgtgtgctcatataccccaggagacacatgtagagcgctttgtgacacacaaggtgttggtccctagtctgagagagttcgacacactgtgcgcaaggcccccacaggagtgtcaccaaaatagtggtgtgagaccgagactgttgtggtgtgtgtcaccgctagtgtgtagaagaaatgttccacagagagagagaagaccacacctctggggtgtggggctccacactgtgtgtgaacgcccccaatagaggtattttgcccgcctattgtgagaagaggggggcgcccccctcctccctgtagagaggcccctgtgagattctcaaacccacaacaccttcttgttgtgacagagtggctccaaactcaaactttattgtggggcgccaaagggagttttcatcccctaaaaacaggggggcagagggcttcatgagggtgtatcccaaaccccaaacgttgagaacaacgtggtttgttgcgccctactgtgcgggtgtgggcacccctcctgtagaaatgaggggcgctaatgagccgcaatgttgtagaaacgatcattcccccctggttgccacaagggctccctaggggagggtatatgcaacccttttgggccccacaaaataggccttttttggggggcatagacccgcccatgtaataacaaaggagcctacgggtgtaatcagtactacttcccttgctgggaaaaaacgacgccccccgcgatgagcaccaataacacaagaacgccgacaacaaaggtttattcccacgcgagagacgggagggcaccaccaacacacaacaagaactcgcacatcaggagggagcatgaggcacacagaatcaacagagagcagacagtagcgacaagcgtagtggtgggagtccaccacaatgaaatggctctccaccgtcaccgacagacgattcaaacacccgcccaagaagtgttgtgctaacgcatggagcactacaaacccgccgtgttgtgccgcaccggaggggcggaatt

SEQ ID NO: 603931 - DNA, 149 bp, Homo sapiens
atctggcgctcgataaaggcgtgggcgtgtggaaggaaggcagagcgtgcggtgggcgtcggccaaccgacgctgaaactggatacgctgaccgtcggcggcacggcgtaatctttcctcaaggagccacgcgctggctcctttatcca

SEQ ID NO: 603932 - DNA, 390 bp, Homo sapiens
tctgaaaatgtctacattagcttatgtctccagctactttgaatgtgcacattagtgtcccattcacatgtgcagcgcagctcaagactaagtgcaggtcatttgcccaaaggcatacaaaggtcggtagtagggctaaaatccagatctgcccagtatcaagaggtagtgcctctaaatgctgtgctagcctgccttcatcctccagctccatgcaggaaggagacaccccacggtcaccagtgggctcctccttacttcagatctggttagcaccaaggtcatgctctgtaagacgtgtatgttctgtgtaaaaaaccaacaactcacaatgttctcagcaaaaattcaggaatactggagtaaaatggactaagacagatactgtgt

SEQ ID NO: 603933 - DNA, 169 bp, Homo sapiens
tcgtccagcatcaagtatcagacttcttcaaatcagaatcttccaccactttctggacgggcttcatagtagaccggaacagatccaggttgagctcttcaaattgggcccgagtcagggtctcagaaaagtcttctcctccatagaaggactcaatttcaattcttcc

SEQ ID NO: 603934 - DNA, 483 bp, Homo sapiens
gtgttagaaataatatttttaattaactttttttaagcctctttgctttgtgttagtaactcttttttaaaccatatcttatgtagttgttagatataaggaaataagtaccttctgtgtccttgtacgttaaccaagatatttggtctcgacgtgctcaagcatgtcccagctcacagcttatgccctttccttatttggaaatgttattacttctccaagtcttttggcaagcaacttcctcttttcctttgttctccattgcctttacctatttaagaaagttttttaagttgttagccaattgggtttagcttagactgtgaggtccagctccaaccaatggagacaggacacagcagtaaggacccaatgcataagggataaatattcctgcctttctttgttcatggtgctctcctggcaggattgataatgggccgcaccctttccacagaaagtaaaataaccttgctgagaaaa

SEQ ID NO: 603935 - DNA, 545 bp, Homo sapiens
  misc_feature (58)..(59): n is a, c, g, or t
  misc_feature (117)..(117): n is a, c, g, or t
  misc_feature (151)..(152): n is a, c, g, or t
  misc_feature (264)..(264): n is a, c, g, or t
  misc_feature (281)..(281): n is a, c, g, or t
  misc_feature (359)..(359): n is a, c, g, or t
  misc_feature (395)..(395): n is a, c, g, or t
  misc_feature (426)..(427): n is a, c, g, or t
  misc_feature (486)..(486): n is a, c, g, or t
gagggcaaggtgtctggctgcgcgtttggctgcaatgagctcggcctcggggctccgnnggggcacccggcaggtggggaagaaaacatgacagaaacagatgccttctataaaagngaaatgtttgatccggcagaaaagtacaaaatgnnccacaggaggagaggaattgctttaatcttcaatcatgagaggttctttggcacttaacactgccagaaagcgggcacctgcgcagatagagacaatcttacccgcagtttncagatctaggatttgantgaatgcttaatgatctaaagcagaagaactactgctcaaaatcatgagtgtcactgttagccacgcagatgccgatngctttgtgtgtgtctcctgagccatggcgaagcaancacattatgctatgagcttcgaattcagacnnaactggctgttcaaggagacaagtgtcacagcctgttggcccagatattatcatcagcngtcggggaaccagcacgatgtgccatcatccttggatgtatagtatcgacgagttggac

SEQ ID NO: 603936 - DNA, 215 bp, Homo sapiens
  misc_feature (215)..(215): n is a, c, g, or t
gcctctctctctccttttttggaaacatggtctcactctgtcaccaaggctggagtacaatggttctatctcatctcactgcaacatctgaccttccgggagagttacgttaacccaggaggcaggacttgcggtgagcttagatcgccccacttcaacagatcgcgcttgggcaacagaaatgagagctcggtctcaaaaaatataaatataan

SEQ ID NO: 603937 - DNA, 214 bp, Homo sapiens
gacaagagcaccaggagccttgcactgacttactgtactgtaggtagagatgtgacatatgaataatacaaaatacccgtcatggttagacttgcagattaagtcactgctagactacagccttaatgccctctcttgcagaccctagccaacataaccagtcttccaggaacaataccatgttttaaattgcttgaggtttcactacctgctg

SEQ ID NO: 603938 - DNA, 1618 bp, Homo sapiens
  misc_feature (250)..(250): n is a, c, g, or t
  misc_feature (1171)..(1171): n is a, c, g, or t
  misc_feature (1556)..(1556): n is a, c, g, or t
  misc_feature (1616)..(1618): n is a, c, g, or t
taataaaaaaaatggtatttacttaaaagcattcaaaatggtcaacaaaacagctggcaacttttgtttttttttgggcgaattacaggagtgggttattcaggttaacaagaacaacaatttattccggtataacctggtatcaagagacaatctggaaagatggaaaaaattaccatctccccattattttaatctaaattgtggtgcgctgtgtggcaccacaaacaagagaaccctggtttataanattttccacttgcgcccaattttaaaaaccccccacattatgtggtgcccagggcaagggtaagagtggcgctatgtggaaatattccccaccaaggagacgagggggctatatctctataagagagcacacatttctcgggatagtgtggtgtgtgtcaccttattacccaaaaaagagagaccttgtggtgccccgtgttatacaaacaccaaattttttttacacgagcggcttataactttttcacaatttattttgttacgtatataacaaagggggatgcgagacgtttgggtgtggtccccacgggggcgggtgtaaaaacagtgggccgttatatttaagcgagccaccagagacatacacacaaaaacagacctgtgggcgcgtcgtaaagcacaccccaacatgttttattctcccctcacatctcattacaactcacttcactgctcctaacaaacttctcgacaactacttcatctttcaaaagctattatagtccctactagtcagatacactatgcagctaattaaaataccccctctgtgtacaaaattactgccacccaatacaaatatataggcaccgagccacatgattgagcaccgatactatatgtaaccgccagggcgcgacatattaataaccagcgctcttttgagaacaaaacgcccccccccttatattatggagggagcgaggaaaacaagagccggtattaccactttaaagagccgccgaaataatggtgcactgacgacaaaatacaccccctgttagtggaaaataatttgatcccctgtaaagaggaagtgattcgcacagcccctctaatttctcaccaaaaaggagggggacgaggatagaacaattcgagcagaaccagaggtgtattattccccccaacagcttcnctgcccccgagatgtttgtttctgcagacacatattcccacagaggtgacgaggcggcagaaaggtagtgctcgcccatgatgatatatggggaagcaaaacataccagaccaacacaaagaaaataagcgcgagaacaggagcccctttggtgggagaggaggcatgcatcacaactcttaagttcgcaggcactaagggaggagaaagcaaggtcagtacttcatcaaacaaggcagcgcggcgggcgcgacgagcaaaattcaatcattatcatatacagcatagaaggcttggttcacgcatcaaaacatcatgaaagcagggtgtgcaatatacgctgagcagaagaaaaataatgcatcgatcacgtgaattacatgcncgcgagacagaagtgagtctgatggtcactctatgtacgtcaagcattcattcgtgcggnnn

SEQ ID NO: 603939 - DNA, 181 bp, Homo sapiens
acggtgaattgaagcgtgtcccagaacgcaagtgtgagctcatctgcggcacttatggagtcagtactgctggtcctctatgacaaggaggcaagagactcctactactactgggggctgaaaaataccagagctggcgagtgtgcatcatatcaaatgaggcctgtacgggggtctcagc

SEQ ID NO: 603940 - DNA, 188 bp, Homo sapiens
accaacattcaacagcacacgcaacacagcacacacatataacacagcacacagcacacacagtcacacacagcacacacgcatgcacagaacacagtaacacagcacacacacaaacacacaacacaacaacccccagcaggcgtaaccgcatccgcttactgatgtccgcttactgatgctccgct

SEQ ID NO: 603941 - DNA, 387 bp, Homo sapiens
  misc_feature (37)..(37): n is a, c, g, or t
  misc_feature (45)..(45): n is a, c, g, or t
  misc_feature (47)..(47): n is a, c, g, or t
  misc_feature (49)..(50): n is a, c, g, or t
  misc_feature (52)..(53): n is a, c, g, or t
  misc_feature (55)..(56): n is a, c, g, or t
  misc_feature (115)..(116): n is a, c, g, or t
  misc_feature (119)..(119): n is a, c, g, or t
  misc_feature (127)..(127): n is a, c, g, or t
  misc_feature (133)..(133): n is a, c, g, or t
  misc_feature (136)..(136): n is a, c, g, or t
  misc_feature (216)..(216): n is a, c, g, or t
  misc_feature (270)..(270): n is a, c, g, or t
  misc_feature (295)..(295): n is a, c, g, or t
  misc_feature (324)..(324): n is a, c, g, or t
  misc_feature (326)..(326): n is a, c, g, or t
  misc_feature (338)..(339): n is a, c, g, or t
ccaacctcaatgccgtgccattaaatccgaaaacagncaagaaangncnnannanngacctcgagactagtggggtatgtgcagggaatcatctcacatgctgttttctcctatnnggnttgagaancagggntgncactattctctttgattagaaaataaactcataaaactcataatgttgatataatcaagatgtaaccactataaatatgnagaagaggaagttttaaaagaccttaagctggcattgtgaaggaacaccatggnagactcttttgtaaatgtatttgtntttaatgaatgcagtataagggtggggangngtaatataattnngtaacaaatcctgttaatagggagatgtacagaatcgttttgtacttt

SEQ ID NO: 603942 - DNA, 207 bp, Homo sapiens
aaggaatccactatgcggcgtgctagctggatgtcttttggcataattgttacacgtttggcaagtaaggcctatctggttggcctttttgaggacaccaacctgtgtgctatccatgcaaacgtgtaaattatccaaagcaatccagctagcacgccgaaacgtggagagcgtgcttaaggattccacttttgatgggaaacattt

SEQ ID NO: 603943 - DNA, 212 bp, Homo sapiens
cccccccccccttttttttccccccaaaaaaaacccggggggggttcccccccccggttttttttttgggccgggggggggaaaccatttttccccgggaaaaactttttccctttgggcctttttgggggcccctttaaaacaatttttttaaaaaaaaagggggggggcgggccgggatttcccgggattttttccccccccgggcccca

SEQ ID NO: 603944 - DNA, 217 bp, Homo sapiens
agatcccctttccactcgagacacacggcatgattcggggcatggcagatggcagcttctaggctcagtcacaggcttccgtttgccatcgaggcacagcagcgccaagtctggcagcttcaaatccttagcccatgcctcattgttatttccatcagtgttctgcaagacagtgacatctttcacaaaatgcaacggtctcccagcattcctcagc

SEQ ID NO: 603945 - DNA, 903 bp, Homo sapiens
  misc_feature (63)..(63): n is a, c, g, or t
tgaaatcatgtgatttgcctgggaaaacttgttagatatagagctacttagtgccttctgagnccttgatattaacttggtatgtaatagtgcattaaatatatatatagttcatcttaacatggggaaatgcccaacattgagctcatataagtccttgaaacgaagcgtacatattcatttctaaatctatacagtgaactggcacaagatattttaaagagggaactttagagtatcccattgtattgttttccataagcctggactgtataaagaagtgggttgttcgaagggttattattgagcatgtgggggaaaaaaaaagcttagtttgctaatgtatctaaacttcagcagagcttttggtgatctcctacctgcagcctcaatgttgacaaagaagcaagactatagattcatgtctgaaggggatcatgtatggaatttttggatgaagttttgacctttagctctctactcttgattactattatgaatactcttttaaaagagtgatttttaaggcttaatatatgtttttccaggctgatgttcacatctttttttgcatgaaactatcagaatatagtgaacacttttcaaatattaaaggacttaaatgtgtacaaaggcatagaatagagagtggtaatactacccaaataaattacttcaaaactgaaagctaagtaatcatagttatattaagagatgttcctgaggagaatgtgcttccagtgagaccaggtaaagttacataaatggtctttcccgtaatgaacacaacgtggcctgttttacatgtccaaaacaggggcctcttacacacagtcgtactgcacggtcggtaagtcaccgagatcccccaacgttacacccacttccgttcacgccactgtg

SEQ ID NO: 603946 - DNA, 380 bp, Homo sapiens
tcgcaccaggtggagactgtctcaaaacaaaaacaaaagacaaaacaaaacaaacgatactaaatactcattgttttctcacttcccacgtgcgatgaagatattcgcattgttgctaggtgtggaaattgaggcttgactgatgttgtaagtgatctaagatgcacgagaacgacaagcagtacagctaggattcaaagcctcggtgggtttcattgcagtgcctgtgttatttctattacaccattgctgcctttgtccaccatgcctcacagccagagtaagaaagtttgaacacacaccagtgttaggtgctaaaagaaaatgagtttgttgattaagatgctgatttagagtaggtagtggaggagactggagag

SEQ ID NO: 603947 - DNA, 457 bp, Homo sapiens
aaaacctcccaatattttgtcatcaaaaggtggttaagcaggcgtcggagggcccctcaagggcatcttgggtacactgagcacaaggtggtttcctttgatttcaaagcgacacccacttctccccctttgacgctggggctggcattgccctcaacgaccactttgtcaagctcattttctggtatgacaacgaatttggctacagcaacagggtggtggacctcatggcccacatggcctccaaggagtaaaacccctggacccccagccccagcaagagcccaaaaggaaaaaaaagaccctccctgctggggagtccctgccccactcagtccccccccccactgaatttcccctcctcccagtttccatgtaaacccctttaaaaggggaggggcctagggaaccgcccccttttccatgtaccatccaataaaagtacccctgtgttcca

SEQ ID NO: 603948 - DNA, 1021 bp, Homo sapiens
ggcatcacggctgttgccatggctcagcgcggtgaggagggagccgtgtgacgtcggcatcacagctgactcagagtgctagcacgcgggcgccacagggccaaggagtactggcgtccatggactccgtggggacccctgtcaggagctggtgacatctcgttccccgttccacgcctgctccctgcgtcgtacatccgccagtcgaggcagtgtccgtcgtcgccttcttccattgtgacttccacagagagggatgcctgcccttcctttgcctagaagaagcggctcaagtcgcttcaaaatgccgcaggaaaggcgcgtcatcgctggagcgctcttgaggctcgtgagcaacgtggtggtagcgattgagagcctcgcgaggtctaccgagcctcgggcgaactagagacgtggttgtcaattgccctacgaaaagagcacagggagctagtgtccatccatgagcgtctccacagaaagcaccgcgaaccgatagaggcacgttcgtagaacagggtgccgtaggtcacctacagggaaacaagtaaccgtcatggtaggcttctagaacggaaccagggcgacatcgctcgtcagactcattcgtcaacagaagcctctgcgggaaaggagaatttgagacgcgaacacgcgttaggcaaaatgccatcactcatatagcgtttttcgcatatgcgcgaaatagttcccgagccggaattggtaaccggagctcccagttggttccccaaatccgaaaggcgtatacaatagtgggccctctaagcttgggcaatccgtaatccagtatggaagctagctttggccatggaacaacatggcactccttaagcacctagttcgtacgaaatggagttcgaaaaggcgtacccgcccaagggagaacgcgtaacacttttcggcaaacaaaaatgcgcgtggagacgctcggcgccatcctaaggactgtggcagggattggatccccaaacccgtacacattaaaggcccacaa

SEQ ID NO: 603949 - DNA, 773 bp, Homo sapiens
  misc_feature (429)..(429): n is a, c, g, or t
  misc_feature (538)..(538): n is a, c, g, or t
  misc_feature (600)..(600): n is a, c, g, or t
  misc_feature (610)..(610): n is a, c, g, or t
  misc_feature (618)..(618): n is a, c, g, or t
  misc_feature (623)..(623): n is a, c, g, or t
  misc_feature (702)..(702): n is a, c, g, or t
gagggaaagcgagagggagacggacgttgagagaacgaggaggaaggagagaaaatggcgtccacggattacagtacctatagccaagctgcagcgcagcagggctacagtgcttacaccgcccagcccactcaaggatatgcacagaccacccaggcatatgggcaacaaagctatggaacctatggacagcccactgatgtcagctatacccaggctcagaccactgcaacctatgggcagaccgcctatgcaacttcttatggacaagcctcccactggttatactactccaacgtgccccccaggcatacagccagcctgttccaggggtatggcacttggtgcttatgataccaccactgctacagtcaccaccacccaggcctcctatgcagctcagtctgcatatggcactcagacctgctnatcacagcctatgggcagcagccagcaggcactgacacctacaagaccgcaggatggaaacaagcccactgagactagtcaacctcaatctagcacagggggtgtacanaccagcccagcctaggatatggacagagtaactacagttatccccaggtacctgggagctancccatgcagncagatcanctganctccatcctaacctcctaccagctattcctctacacagccgactagttatgatcagagcagttactctcagcagaacanctatggccagcgaacagctatggcagcagagtagctatggtgaaaggcagtatggcagagctcccgtagta

SEQ ID NO: 603950 - DNA, 752 bp, Homo sapiens
  misc_feature (579)..(579): n is a, c, g, or t
gagggaaagcgagagggagacggacgttgagagaacgaggaggaaggagagaaaatggcgtccacggattacagtacctatagccaagctgcagcgcagcagggctacagtgcttacaccgcccagcccactcaaggatatgcacagaccacccaggcatatgggcaacaaagctatggaacctatggacagcccactgatgtcagctatacccaggctcagaccactgcaacctatgggcagaccgcctatgcaacttcttatggacaagcctcccactggttatactactccaacgtgccccccaggcatacagccagcctgttccaggggtatggcacttggtgcttatgataccaccacatgcgtacgatgtcagcacagctcacgcctaggtcgctcactagtgcgagcctcacgtcttgcgattagtggcgacttcaagccctgtcgttaatcctagcactaatggcgcaagtccagaccgaggacagctcacctggcaaccctaacaaggacccgcagggagtggacatagcaagcccgacgtgatgacctagctcaaaccttctaatcgtnaggacagggtgggtttacaaaccaagcccaagcctagggactagtggacacgacgtaatctatccagttagtcgcccaaggtagcctgtggaagcatacccccagtgcaagccagatcgagctgctaccttccagtcgctaacccatctcgtagccaggctattccctcttac

SEQ ID NO: 603951 - DNA, 825 bp, Homo sapiens
gtcaacaagctctctcgcccgccgcgcttttggtttttttttttgggtgtgtctctagagaggctgggcgacacaattttgttcgtctgttgtgttgtttctcctcacagctgatgagatagttttggttggtggacgactcttttctcttctgtggaggcgcccccacagatagttttttgtgtgtgagattcgtctctccgcgcggagtctcgcttattcttttggtcctcatgaagacccgcgcgcacatatattttttttgtagagagaagtaaatatatagaagagaactgtgtggccccaaaaccgttttttttataataaatcgcctctctctccctctcctcccctcccacacaaacacaccccgcacagcggtgatgtatgtgttacacaactcagagtagtctctctctcttttctctcatcacacaacacacgctgctgctgtggtgtgagaagttataattctctctgtggtgttttctctctctttttgttttggagaaagaaaatatgtagggagatgtgttttgtgggggtgtatttatgaggagaggtgtttaacaaaagctcgaacaacgacgcaatttgggggggtggcgcacctgtaggatgatttttaagaagagtttatgggcgcacgagaatatggtttggatataatatttagtaaagtggttcttctcccccctcttctcacccacggagcgaggaaaaaactatagaggggggttcccacgaggtttttccgggtttttccccccccctttttttggaaaaaactgtgtttagggggaaggtaaacatttttttttgtta

SEQ ID NO: 603952 - DNA, 119 bp, Homo sapiens
tacctcggaccgttgacgtggctggcacatgtgtgtatatggattgtggaagtgagtgcatatgtacctgtgtatgtacatgtatgtgcggagtgcgcacgttgatgcggtgtggtaga

SEQ ID NO: 603953 - DNA, 219 bp, Homo sapiens
tcatatcttattctccgagctcaagaaatcactgcttgcttctttagcatggtcaggtaccatcttgatcttgtcctctaaatccccaggagaagagttgtttagcgactcctggatgcccatgagggagcggctccagagcttgccttccctcctctgttttcacaatggtccagcgataggcacggttctctgacaatccttcttggcactgtatat

SEQ ID NO: 603954 - DNA, 713 bp, Homo sapiens
  misc_feature (659)..(659): n is a, c, g, or t
gccccactgacagcaagggcagaccacagcaagccccaaccctgagaagcagagagggaccgcacgcgcagcgggagccagcgagggacagacaagaacagcgaatacctataacggtggggggacagcgccccgccgagcgcgtcagcgacagaaccccccccgggaggagacaggcgccaacgcccagacgggacagcagggagaagaaagggaaccacagcccgaagcccagccggagcagggacgcacgcagggccgggaaggagggcggcggggggcccctgaaaccacggaggagccgcccgggccgcggaggaagggcgggcgacggaaggagcgcgggggggacccacaagccggacggcgaggcggccggcccggccaaggagccccgaaccacgcaacccacggaggaaccgagcgcagggggagccccacgagggaccgggcacgggaggcacgcccgccggccgctcaacggcggaagccgcgccgaggcgcccgcggggggagcaggggcggaggacgccgcgaaggaccacagagaaggacgggagggggaccacgggaccacccgataccgcccgcccccccccgcaaagcaggggagagcggcaggagacagcggcgagcccacctcgcaggggcggcgaganggaaagggggcacgccagccacacccccccaccacccccccctcccacccaccc

SEQ ID NO: 603955 - DNA, 159 bp, Homo sapiens
ttgctccgcccttttttgctgtacgcccgtctttgtctcccaaagtgctgtgcttaacgtcatgagcgagtgcgcctaggctgccagggttacttcaagaggagatattgcctcttgacagtcgcgccctttctggtgcagccagagacacatgcagaa

SEQ ID NO: 603956 - DNA, 244 bp, Homo sapiens
aacgggtgatgcggttgctactcgtgagcgagctgcgcgaagtgtagtaatcgccgacagggctcgtgtacacgtcctcctccatcgagcccgatttgtgccgcttgctcccactgaaggaggtgctgggcagcgttcttctgaggccagcgctcgctgagttcaggtcgcatgccacgtgcccctgcagctcccccagggagaagctgagtcctgttccagccaccacggatgcacgtaacac

SEQ ID NO: 603957 - DNA, 416 bp, Homo sapiens
tgatagaactcgagcgtcggtacccctcgtataaggcctaagagtaccgctaagattcatccaagtgttttcactgggtcgtgagccgccgctccatgttcccatctctcagctgctccctcggccctgtgtgagatctgttctccctaagagggggctcagatggtgcggcctgagtgtgcggccggcggcatatgggatacacccgtagggtgggcggggtgtgtcccaggcctaattccatctttccaccatgacagagatgcccttgtgaggctggcctccttggcgcctgtccccacggcccccgcagcgtgagccacgatgctccccataccccacccattcccgatacaccttactctcgataagggccaaaaatcaagtggggcgatgctggcgctgagtacgtcgtg

SEQ ID NO: 603958 - DNA, 231 bp, Homo sapiens
tgtatagtaccgcttactacttcctacagctaagttctatctattcctgctgtaattgtaatgtgtttgaaatttaaatcatgtaggtatttattttaccttgagattagatgacatcatagtaggctgagtataggttgactctgtacaattcaaaagagtgaacgcatggttaatatccttttctcacactaatggtgggacttggcgttggtcccgggtaacaccaca

SEQ ID NO: 603959 - DNA, 258 bp, Homo sapiens
ctcctacttatttctgggttaattttggtggctagaaaaaatttcgtgggaaagactaatgcacaacatatttttaccacatcaactaccggtcccatcatgatgcaggatgttgcaggaatcactgatgtgcaccttgtacaggttgatgtaatgcttacttcttggtttgcaggtcaaaaacaagctagaagtgaggagtggtatcaatatacattttaaggccgagtgcaatgactcacgcctgtaatctcaaca

SEQ ID NO: 603960 - DNA, 420 bp, Homo sapiens
agagtcatcaaagggccaacgaaaaggtaaaaaagaaaccaaaacaaaccaaaacaaaaaaagaaaataagaaaacaaaatagataacatagttcatagtctgaagaagatcaaatctgatcatccttaatttagtgtaagaggtgtttgaaattgttgggtaatttaattacagcacgccagaaacgtagggcactccagtgggcttgatccacctgtcgccaccgatgaatgttccggcagtgaacttctgggcgtgatccatagtgatctgcttgatgccgcgccatttcactctctgggcctggtcggcgccgacacccttgttggcaatctcggcgtagaagcaagtgttgagagcgaagtcacccatccacggcatccacccctcggcctggatgaagtcgccgatgtcgacgc

SEQ ID NO: 603961 - DNA, 277 bp, Homo sapiens
ctatacgacggtgtgcttatctcttcataattttgggtcttctttctggagaggagtctccctctgtagcccaggctggagtgcagtggcatgatctcggttcaccgcaacctccgcttctctggttcaagtgattctcctgcctcagcctcctaagtggctgggactacaggcacgcgccaccacccctggatagtttttgtatttttagtagagacggggtttcactgtgatggctaggatggtctcaatctcctgacatcgtcatccgtccact

SEQ ID NO: 603962 - DNA, 1986 bp, Homo sapiens
gggtgacaagctgctgcggcatttgtccccgcgacagcaccgctgccgccgtctctaagtgtctgccctgggtcccacctgcctgccaccatgcctcggggaatgcctgcatgctgctggcctccctggccatgccatgcctgcccatgcctgctgcccatctgcccacacctgaacctaagcaccacatctgacctacagtgaagaatgaacaagaacaacagatcaccagatacagagagagaaagacctgacagagcatcacttgggactcaagaattgtgcagacaacaacacgtacactagccatagaggagtaccacccagttagtcaccctcagacgatgaagccaggaccacccgaacaactaggagcaagactgacgacatgacaccagtcaagaccaaatacaagccaagggaggagagacgacaccaggagacgccccgacacacacaggcaccatcgcctaggaccccagcgaaagaggaaacagcagaaagagaagaacccgcagacgaacacgcgcgaagcacacacagcagaagaaacaaagaggaagcaaagacagcagagagacagaagaagacagagaaaaacgacaggagaagaaaccaccagagaagcagcagtgagaaacgagaagcacgacgacgacagaagacgacaacagaagacgcgacgcaggacagcagggcaggcaccacgcagagcacgagacacacaagccagccgaacgacgaagagcagacacgacaacaagcagccaaagaacgagagacagcgccaagcagcgcccgagaagccaagacagaaagagcagagagaaacagaagaggacaccgaacatagcaacgaccagaaccgacaggaccaagcagaacagacgagacacgacaagcagaggagagacgcacagcccggacggagcaaaggcgacaagaacacaagcgacgcaggagagagccgggcacgagaagacaggaagcaacaaagcgaggaagcagcagagagaggcgacacgcaggaggcaggagaaagagcaagaggagagagacgaggaagcacgcaggagaagaagagcgacagaagtagagaagagagagaaagcgaacaagaagacgaacgaacacgcaagacgagaaggagccgcgaggagggcaagcaaggagacgacaggaacgaagggagaggcagagcagagcacaaccagaagagacaacgaagaaggagaacaagcgcagcaaccggcagccagaagagcaggagcaaagaaacgaccgcagaacgacagcagagcacagcgcgcagagacagcgacgagcacagatagagacgcgagcgagagcacgacagcagcgagcacggcacagcagagcgacagggcgcgagcgagctggtagtaggacgcacagacgagacagacgcaacagcaacagacacagagaacacagaggcagcaggagcagcacaagaacgaccacgagcaagaagaacacaggacgagagagagacagagggagtagcacaaccaggacaccagcaacagagaccacacatcagcaacacacctcagcaccgagaagagcagacaagcgcagaaacgcagaagcaaagagacagaaaggcaagagcagtcacgaaagtagagagagaacagatacacagagagacggagcagcagagaacagaacaagagagacagaaaagtaagagaaagatagctagatgaagaagagcgagagcagagccagaacccagctagtaaggcacgtatcaaagctaagacatcgggcagcgcgcgtaagagtagtgcgagagcagcagagagccagaacagacggtagcagcacagccgagagactacaggacaggagcagcgaccgttagtacaccagaccacgacgagagctagcatcagtgctaggagcctgcgtgtagctagaaagaaagcgagagagaaagtacagaacagagacgagtag

SEQ ID NO: 603963 - DNA, 626 bp, Homo sapiens
gcttttaagccacgtaggaacttctggggggggataggtggaccctgacatcctgtggccttgcccaagggctctgctggtctttctgagtcacagctgcgaggtgatgggggctggggcccccaggccgtcagccctcccacgagggacagcttgagcccccttgccttggctgggagggttcggtagaagcagccgaagggctcctgacagtggccatgggacccctgggtcccccaggcctgcagatgtttctatgaggggcaagagctcctggtacatccatgttgtgggctctgctcccaaacccccttggtggccacgcccccaagaagccccctgtggggggggtggtcatcctattgccctgcgcaacccccttgggcattctgggcctttccttgttgcgcgccctcccagcacaaaattcacgccccaggaaagggccccccgtgggccccttgggcttactcgttttctttattaaagagcaaccttcaaggccaggcaactttgcaaggttcttccccaattcttcccttgcgttagggggcttaaaggcaatacaaccccggctgtttccccaccggttggttggtctcggatcgaataggggtttggggcaa

SEQ ID NO: 603964 - DNA, 988 bp, Homo sapiens
  misc_feature (15)..(15): n is a, c, g, or t
  misc_feature (76)..(76): n is a, c, g, or t
  misc_feature (128)..(128): n is a, c, g, or t
  misc_feature (143)..(143): n is a, c, g, or t
  misc_feature (145)..(146): n is a, c, g, or t
  misc_feature (148)..(148): n is a, c, g, or t
  misc_feature (150)..(151): n is a, c, g, or t
  misc_feature (252)..(252): n is a, c, g, or t
  misc_feature (327)..(327): n is a, c, g, or t
  misc_feature (380)..(380): n is a, c, g, or t
  misc_feature (388)..(388): n is a, c, g, or t
  misc_feature (392)..(392): n is a, c, g, or t
  misc_feature (397)..(397): n is a, c, g, or t
  misc_feature (409)..(409): n is a, c, g, or t
  misc_feature (412)..(412): n is a, c, g, or t
  misc_feature (417)..(417): n is a, c, g, or t
  misc_feature (495)..(495): n is a, c, g, or t
  misc_feature (512)..(512): n is a, c, g, or t
  misc_feature (531)..(531): n is a, c, g, or t
  misc_feature (559)..(559): n is a, c, g, or t
  misc_feature (570)..(570): n is a, c, g, or t
  misc_feature (602)..(602): n is a, c, g, or t
  misc_feature (625)..(625): n is a, c, g, or t
  misc_feature (651)..(651): n is a, c, g, or t
  misc_feature (670)..(670): n is a, c, g, or t
  misc_feature (674)..(674): n is a, c, g, or t
  misc_feature (781)..(781): n is a, c, g, or t
  misc_feature (822)..(822): n is a, c, g, or t
  misc_feature (825)..(825): n is a, c, g, or t
  misc_feature (827)..(827): n is a, c, g, or t
  misc_feature (860)..(860): n is a, c, g, or t
  misc_feature (863)..(863): n is a, c, g, or t
  misc_feature (880)..(880): n is a, c, g, or t
  misc_feature (951)..(951): n is a, c, g, or t
tggggagcagagcgnggatcggggtttgctccgggggccggcgggcgattggggccaggcggggaaaaggggggangggggccgccctccgggggggtcggggccgccgccgccgtcgtcgcggcggngactgaggccgagangnngngnngggggcgggggagctgccgccgccgccccccagaggcgccggagcccggaatcccgctcggagccagccagccgtcccgagctaccagcaggttttcattngataacagatcctgcaaaagttccaggtgcccacactggaaacttggagatcctgcttcccagaccacagctgtngcggaactctggggtggagcagagaagttttcttgtatttcatgctggcccanggcacganggangaatnggggttctccancangcctngaaagaattgaacgacactgacatgaataaaaagactcagattgtcatattgatggagttggactggaaagaaaaganggccccttggggccccnggggaagaacttgaagatncgagaggggccggggccttccccttggnagggggttcangcacgttccaagcagttgataggcaaaagctngaagaagttccaaggcatgacangccaatgaatggcccgatttagaggnaagccttccacccccaaanggtncaacaaagcaggggtcgggagttgaggagatactcacgagagttgaaagttgaggagaccaattgcaccaaaaaaagaccgaaaacttgagcaggaactccctcggnccacagtctccctccagatctggatagcttggacgggcggnctntnaatgatgatggcagcagcgaccctagggatatngancaggacaaccgaagcangtcccccagtatctacagccctggaagtgtggagaatgactctgactcatcttctgggcctgtcccagggnccagcccgcccctaccacccacctccactcttttctc

SEQ ID NO: 603965 - DNA, 400 bp, Homo sapiens
  misc_feature (294)..(294): n is a, c, g, or t
  misc_feature (311)..(311): n is a, c, g, or t
  misc_feature (317)..(317): n is a, c, g, or t
accttgagctcctggtctcaagtgatcctctagagtagccagaaccacaggcgtgagccacagcgcctggccaggaagcttacagattattaatgaaactttgttaagaaccctttaccttactgacaaccagaaaagtaatttcactggtttgggaataaatggacacttaagaaatgaagcaacctcttcaagtaattttttttcaaagaccaaactattgaattagtgctttttgaagagcataaaagagcagtcatcaagtgtgacattaaaaactttcagctgggtgcngttgcacatgcctgtantcccancactgggaggttgagacgggaggattgcttgagcccaggagtttgagaccagcctgggagacatagtgagaacctgtctctac

SEQ ID NO: 603966 - DNA, 343 bp, Homo sapiens
gggattccgtcccaaaaaaaaccccccctcggccgtgtgcaggaagccccatgttgttttgccgagatcagccctgggaggatccccttttccagctcagatcatcccgtgtggccaaaaggctgcggaccccactgacctgcttctcgaggtggttgatgttttaaacaggaagctccccggagttcagccctgggggcatttcctcatgtatgtaaacccccagactgaatgtgaaaggtgttggccccgggccttaagtttgagcagatccctttggaatgttcggggtgtcctgtttggatttggtgccctaaaaacccggaataaaggtccgtgccca

SEQ ID NO: 603967 - DNA, 233 bp, Homo sapiens
aaggaagacactatttctcaaacgtgtttcaaaaatgatggctgggctgggcacggtggctcacacctgtaatcccagcacttggggaggctgaggtgggcggatcacctgaggtcaggagttcaagaccaacctgaccaacatggtgaaactccgtctctactgaaaatgcaaaaattagcagggatggtggcatgtgcctgtaatcccagctactcgggaggctgaggcag

SEQ ID NO: 603968 - DNA, 122 bp, Homo sapiens
tggagggtgtgagatctaaaacaagagggattcctttataggaacgaggtctagaaccagaggaagttagtgacttctagaaccaaaagaatctggtagtcttatgcacttatagagccagc

SEQ ID NO: 603969 - DNA, 124 bp, Homo sapiens
gccggtccgacagcatgaatgagataagaaacaccatctatggtttaaaagataacagaatgaaaataagaaaccacccatctataggtttaaaagataacagaatgaaaataaagaaaccacc

SEQ ID NO: 603970 - DNA, 209 bp, Homo sapiens
tccatccatacaacgttatcttacttattgcattttgcacattcatggcaaatgaatcgatgagctgaaaaaatggaagaagggaactcgagatgttggtatgcagaccttgattatcagactacagcatctgaattatcatgctagatctttaaatatgctaatcagtcctgattactttgtactactaacacatcaatccagaccag

SEQ ID NO: 603971 - DNA, 354 bp, Homo sapiens
  misc_feature (95)..(95): n is a, c, g, or t
  misc_feature (97)..(97): n is a, c, g, or t
  misc_feature (127)..(127): n is a, c, g, or t
tgaaaaaaaaagcccccccccttggtggtttttttttgaaaacactttcccctggagtggggggtgaaccccttaaaaaattggggggcccccangntcccaaattggggaaaaatggagggccccnaatttggttggggggaaaatttttttaacaagccccccttgggagacagtaaaaaaaaaaggtaacccggggggtattttccccaaacccgggggggaattccctgggtccccaaaccagggaaagaatgtgggggttcccttcccctttttaaaaaggggtcccaaaaaaccccttaaagttttttgattggaccctttccttcaaaaaaaaaaattggggcccca

SEQ ID NO: 603972 - DNA, 538 bp, Homo sapiens
tgtcacaaaggagacgcgatcacgcatgattgcaaacatgcgtcgatatgcatgaatgttgagtatgcgcccaagtccggtattcactctagtgcattacaagtgtgcggtaaaaggggcgtagagggcttctgtcatgagtggcacacataggacaactcacatttctcttcatgcagaataaacatcaagagatttaggaagcgtaatatagggtagttggacagctggtgatcactggtgccagaacccttactccttgtctaaatcagaggttgcagctctggtcatgttatattagatgattccgcactctaaacctccgtagtagatcctgccccacctcagggctatgtggtaggatatatgctgtttccacattatgcgactgcttgctatcttactggtttaaatggttgtaggtgaccataacacaatggcaagcatcctgtgtatacaagtacagaaaagatacagtaaaaatcactataacagaccaaaagtggggcgaggtgcacgggatcacacctgttattcc

SEQ ID NO: 603973 - DNA, 339 bp, Homo sapiens
ctgccaatgatatatatttaggctttattcaagagttactgacaggcctgactttaaaattaggctttttaaattaaaggccaaaactaaaaaagtttgcaaatatgacattactaaaagaatgattgccttaataatttaaactctaaaatgtccgccctgtggagttaaggtttttatacacagaatgtgtatgatccatgtcttttaaactaaacatctgaaaaacctcggatggtgggtaaatctgccaatgaaaatgaacatcagtttcagccttctaaagtatgaaaaccggccattaattaatcctgagacagaatataatctgcccttgag

SEQ ID NO: 603974 - DNA, 162 bp, Homo sapiens
tggaaagggagttccactctggtaccccagcctggagggcaagggcgcaatctgggttaaccacaaccttggcctgcggggttaaggcgattctccggcctaagcctccaaggaagctggcgcaccaccaccccaagctaattttggaccattttaagaaaa

SEQ ID NO: 603975 - DNA, 168 bp, Homo sapiens
  misc_feature (46)..(46): n is a, c, g, or t
  misc_feature (73)..(73): n is a, c, g, or t
cccgcagctgaagcacatcccgcagcccggcgcgatctccgatcgncgcagttgccctctggcgccatgtcgnagaacggagcgcccgggatgcaggaggagagcctgcagggtcctgggtagaactgcacttcagcaataatgggaacgggggcagcgtttccagcc

SEQ ID NO: 603976 - DNA, 321 bp, Homo sapiens
aaaacactctatctatccattcaagatgtgaaagtactatcaaatgataacagcagagactatttcaggcagttgccaattctgagacagaaaggggactgtgaggcaagaaaataaagcacaaattctttttttattctgttgcccaggctggagtgcagtggcatgatctcgcaatctctgcctcccgggttcaagcgattctcccacctcagcctcttgagtagctggggctacaggaatgttccaccacgcttggctaattttggtattttgggtagagacaaggtttcaccatgttggccagtttggtctcgtacg

SEQ ID NO: 603977 - DNA, 426 bp, Homo sapiens
tactcaaactatagctctgtgatactatttgggctaggcaattgtcatgacgaaagtactatcacgattatacattggctagggtagaagcatatcacttgtcttaatgatgctatatgttttaatctagttgattcataacttcttcttgtctgtgtagactctgacagttacagtggagatacattatatcatagttgcttgtaaggtcattaggatctcttcagacctggggtacacatattagaaatacacagaggagctttttaaaaagtaccagtgcttagtccccaatctggattgtttgggctatacctccttcagtatttttgtggttcgataattatcttttaagttgagaataaacaggtaaatttagaggggggatagctttttcattgttctagtttccaaatatttactttt

SEQ ID NO: 603978 - DNA, 261 bp, Homo sapiens
ttgcctcccaggtttgtcacctgtcttgtccctgcgaacttgccgaatggtgctatgactacggtggccttctcacaagacgtcccggtcctcggacgctcgtgtagaccagctccccgcccttggcatccttatccgtgagtggcagaaggcacaggcccgtatcggggtcctccacgcagcgctccagtagctgcaggtacgcttaggttcccgtgcgtgttggggtcaaagaatcccttggtgtcgtcgctcggcggt

SEQ ID NO: 603979 - DNA, 246 bp, Homo sapiens
tatgaacgatctatatactctaaaaataagactagctaaaacttcttaagtgtagacagccttcaccaatggaggctgcaaatgcttggtcagacgaagtaactctagagccagacaccacagagctaaggctgctagattaaaccactaccacatagctgctaactactctctatattcacacagcgttaatcaaaacaagttcaataccatcttttcacatgtgcctcggtgcaataggaataa

SEQ ID NO: 603980 - DNA, 150 bp, Homo sapiens
  misc_feature (108)..(109): n is a, c, g, or t
atcaataacctacctagtaccagcacgccatgggtcatttacacagaggaaggcacaaggctactatcacaagcctagtgggaccaaggtgaatgtaggcaagctagnnggcaggagaaaccctggggaaggctacctaggttgtctcac

SEQ ID NO: 603981 - DNA, 1116 bp, Homo sapiens
ggcttcttcccaactgtccgtcctccggccccaggtcaccgacagcacgcgcgctgcttcaccgtcgtgcgcgagtcccacgtcaggtcgtccctcaggcgccttcagccagcaacaggcagcacgcaggacagtgcgacagcgaaagcgtgagaagacatccagcgaggtgcagccagtccacggtgcagggccagggcctcattcttccgagcaggccctgctccgggccatggggcctaggctcgacattatcttcttgtaccttgtcgtgcatgcgatgcgtaattcggctttcttccttcacgtaggaacctgcgagctagaaacctgcggtaacagcactgcgacagggcatggaccccacgggctgtgcttacccgggtgacctggtggggccactctgtgaccggtagctacaaagcgtctcatggagtcgcgctaagcttcctcacacaggtacaaggctacagcaagtgcctctccgttgcccgcccctacgtatcgagcgaaacgcagttgggcccgccagttgagccatgactatcccgataggtcggtcgccttgatagtgtaggtgcggtcgccccttttcggcgaatggcttggcgtgcctccccgcccgtgggtgtgggtagaaatcccatgttgccccaatacatgcttggaacgggtggggccatttggtacccttccccctttgtccaccgttttacccttcggagcctgggtccccccctttgggtcctaccgcccaaggccttccccccgggagagacgttaactgaatggccctagggatgggggtccccccccccaatttccttgtagcaagcttggaaccatacaaacagtcccaaaattgtgcctattggtcccaacagcgttaattttgtccccaaagactggtttgagaacaaggaaacccttccctaaggtacgttcctttgaccttcctggtccacctatttggggaagcgaaccccaggtggaagcgccacctgaaatggggggcaatcccacgtgaacccccgagggtccttttggggaaaggccaaacgccctttggacactacggcccagtgccattggccgtccgcgaaaaaccccgaatgc

SEQ ID NO: 603982 - DNA, 584 bp, Homo sapiens
  misc_feature (79)..(79): n is a, c, g, or t
  misc_feature (90)..(90): n is a, c, g, or t
  misc_feature (92)..(92): n is a, c, g, or t
  misc_feature (98)..(98): n is a, c, g, or t
  misc_feature (105)..(105): n is a, c, g, or t
  misc_feature (112)..(112): n is a, c, g, or t
  misc_feature (119)..(119): n is a, c, g, or t
  misc_feature (132)..(132): n is a, c, g, or t
  misc_feature (137)..(137): n is a, c, g, or t
  misc_feature (147)..(148): n is a, c, g, or t
  misc_feature (158)..(158): n is a, c, g, or t
  misc_feature (161)..(161): n is a, c, g, or t
  misc_feature (223)..(223): n is a, c, g, or t
  misc_feature (270)..(270): n is a, c, g, or t
  misc_feature (298)..(298): n is a, c, g, or t
  misc_feature (308)..(308): n is a, c, g, or t
  misc_feature (331)..(331): n is a, c, g, or t
  misc_feature (501)..(501): n is a, c, g, or t
  misc_feature (577)..(577): n is a, c, g, or t
  misc_feature (579)..(579): n is a, c, g, or t
  misc_feature (581)..(581): n is a, c, g, or t
atggccaaccttaggtgcaggaagataatgagtgacccacccatgggctttatcctggaacaaatgcaaaaggaccccngggcactcagngnacattnaagaatnctgtaanagcacanaagatccagaagntgagnatgtgggttnnattgcaattnggnaatgatttgttcatccccccttcccttcgccctcatgtggaaaaagagctgggaccccggcnaacagcacggagcggaagggaaagcaggggaaaaaaggcctcatctntttatatttatacataaccccggggaanacacaaaaanttgtacctgcgctgtttgtgccnccgctgcctttgggccctcccagcacaggaatggttttttcaccgctgcccccgagttccatgtttttttcccctgccccaagttgctgtttcggctgctttcccaaagttggttttttttttatttggggcagtgggcatgttatggggaggggagggggtttttccancctcaggtcccagctgtttcacgttgtttattttgggtccccttttccaataaaacaagccagttgggggtggttntntntta

SEQ ID NO: 603983 - DNA, 380 bp, Homo sapiens
  misc_feature (58)..(58): n is a, c, g, or t
  misc_feature (61)..(61): n is a, c, g, or t
  misc_feature (183)..(183): n is a, c, g, or t
  misc_feature (222)..(222): n is a, c, g, or t
  misc_feature (316)..(316): n is a, c, g, or t
taaagtcaccccgagaaatggtgactgccagtggccgtattgggtcctgggggacaanggngagcggagtggctgcctccaccctactccagacatcacagtccctgacctaggggtcgccaatgccgactcagctctgtctggccacacgatagccctggggtgacatccacaaccaccctncaccaagggtcagtgggttttaacctgtcatattgagtnggcttctaaaagatgcagatttcctgggtattcccttaaaaggtttaattttttaggtctggagagatcgcagaaattctgatgcaggggtctnagaaacatacttagggagataatccaagagaattggacctgctttttcagttttgctgacaagt

SEQ ID NO: 603984 - DNA, 124 bp, Homo sapiens
caatcgagctcggtcccgaagctcgctgtcgctgggattacaggcatgagccaccacgcccggcttatttttttattttttgaaacagagtctccatcactcaggctggagtgcacacgatccc

SEQ ID NO: 603985 - DNA, 225 bp, Homo sapiens
  misc_feature (11)..(11): n is a, c, g, or t
gatgatgcttncctgcacggctgacagataggaaatgcggggtagagagatgttgagcggtgtcctccgttgcggctggtcgttgctgattcttgcaaaggaggtgggggcggatggcggtgatggcctcctggttttggtggtctctgctgaggaccatcatcttggttaccactatcacccgggggtctcgttaggcgtccttcacgaggagctctctggggt

SEQ ID NO: 603986 - DNA, 213 bp, Homo sapiens
gggatcaaaaaaaaagggctggaaaagggggaatggcccccctctccaaaaaccaaatattgtttgtggtggttgggggtggggggggggtttttccttttccttccttttattttttttgaatgggggaggctatttattggactgagagtggggtctggatatattccctttgttttcctccccttttgaaaataaacctaaaactgttta

SEQ ID NO: 603987 - DNA, 106 bp, Homo sapiens
cgtcacgcttcttcacgatcggctttcgattcagcgtgtttgttgcctttcttagccggacgcgccgctttcgcattacgtccacggccgtgaccgccattcaact

SEQ ID NO: 603988 - DNA, 695 bp, Homo sapiens
ctgctgatgaacagagcagaaacagcactaactcagtcctaacagatggcaatatgtgagcatgtctgataaaaatagaaaatagcagttctaaagaaacttagtgatttccgagataagactgaaaagcaattcagaaatgtatcaaagaaatttaacaaagaaattgaaaaaaataaaaaaacggaaatcaaatcttgcaactaaaaaatgaaatttctaaacagaattcattataggctctcaatggcagaatgggtccaatagaagaaagaatccatgagctccaaaataagttatttgaaaacacaaagtcagaggggaaaaatgagaacacagaatgaaaaggagcaaagatcatctacaagatgtagaacattacctcaatagaccaaatttaagaatcattgatgttgaggaaagagttgaataaagagacaggcgtacacagattatttttaaaaatattaataactttccagttcttctttggaaagaaaactttccaaaacttgagaaagatatacatttccaggtacaggaaggtcagagaacaacaaacagagttgacccaaatatgattaccccaagtcatataataaactctcaaaggtcacggaaaaagagaggatcctgaaagcagtaagagaaaataaaccaatggcatttacaggagctctaattcatctggcaac

SEQ ID NO: 603989 - DNA, 419 bp, Homo sapiens
ggcacagtgactcattcctgtaatcccagcacgaggctgaggcaggcaaatcacgaggtcaggagatcgagaccatcctggctaacatggtgaaaccccatctctactaaaaatataaacaattagccaggcatggtggcaggtgcctgtagtcccagttacttcggaggctgagcttgaatggtgtgactccgttaggcgactctgctagtggccaggaccaccgccattgcattccagcctgggccccagagcgagactatgtcttatatctctcatcctcccctcacaccacatgtcggccgcctcgccccagacgcctcttagctctggcatgtttacgctgctccaccatatcccggccatcttgctctatatccctctaagcgcgggcttcaccttttggcgcgctctttccg

SEQ ID NO: 603990 - DNA, 1361 bp, Homo sapiens
agcatagctgttccacttaaggcccctcccgcgcccagcgcaggtgctgcagccgctgccgccgattccggatctcattgccacgcgcccccgacgaccgcccgacgtgcattcccgattccttttggttccaagtccaatatggcaactctaaaggatcagctgatttataatcttctaaaggaagaacagaccccccagaataagattacagttgttggggttggtgctgttggcatggcctgtgccatcagtatcttaatgaaggacttggcagatgaacttgctcttgttgatgtcatcgaagacaaattgaagggagagatgatggatctccaacatggcagccttttccttagaacaccaaagattgtctctggcaaagactataatgtaactgcaaactccaagctggtcattatcacggctggggcacgtcagcaagagggagaaagccgtcttaatttggtccagcgtaacgtgaacatctttaaattcatcattcctaatgttgtaaaatacagcccgaactgcaagttgcttattgtttcaaatccagtggatatcttgacctacgtggcttggaagataagtggttttcccaaaaaccgtgttattggaagcggttgcaatctggattcagcccgattccgttacctaatgggggaaaggctgggagttcacccattaagctgtcatgggtgggtccttggggaacatggagattccagtgtgcctgtatggagtggaatgaatgttgctggtgtctctctgaagactctgcacccagatttagggactgataaagataaggacagtggaaagaggttcacaagcaggtggttgagagtgcttatgaggtgatcaactcaaggctacacatcctgggctattggactctctgtagcagatttggcagagagtataatgaagaatcttaggcgggtgcacccagtttccaccatgattaagggtctttacggaataaaggatgatgtcttccttagtgttccttgcattttgggacagaatggaatctcagaccttgtgaaggtgactctgacttctgaggaagaggcccgtttgaagaagagtgcagatacactttgggggatccaaaaggagctgcaattttaaagtctctgatgtcatatcatttcactgtctaggctacaacaggattctaggtgcgggttgtgcctgttgtccttttatctgatctgtgattaaggagtaatattttaggtggctgggaaaacatcaactcctgagttaggataagatggttgtaaatcccagcttttccgtgctggtgggttaaccttgtgtggctcactggtgggttgaatgtcctgccccct

SEQ ID NO: 603991 - DNA, 1675 bp, Homo sapiens
agcatagctgttccacttaaggcccctcccgcgcccagcgcaggtgctgcagccgctgccgccgattccggatctcattgccacgcgcccccgacgaccgcccgacgtgcattcccgattccttttggttccaagtccaatatggcaactctaaaggatcagctgatttataatcttctaaaggaagaacagaccccccagaataagattacagttgttggggttggtgctgttggcatggcctgtgccatcagtatcttaatgaaggacttggcagatgaacttgctcttgttgatgtcatcgaagacaaattgaagggagagatgatggatctccaacatggcagccttttccttagaacaccaaagattgtctctggcaaagactataatgtaactgcaaactccaagctggtcattatcacggctggggcacgtcagcaagagggagaaagccgtcttaatttggtccagcgtaacgtgaacatctttaaattcatcattcctaatgttgtaaaatacagcccgaactgcaagttgcttattgtttcaaatccagtggatatcttgacctacgtggcttggaagataagtggttttcccaaaaaccgtgttattggaagcggttgcaatctggattcagcccgattccgttacctaatgggggaaaggctgggagttcacccattaagctgtcatgggtgggtccttggggaacatggagattccagtgtgcctgtatggagtggaatgaatgttgctggtgtctctctgaagactctgcacccagatttagggactgataaagataaggacagtggaaagaggttcacaagcaggtggttgagagtgcttatgaggtgatcaactcaaggctacacatcctgggctattggactctctgtagcagatttggcagagagtataatgaagaatcttaggcgggtgcacccagtttccaccatgattaagggtctttacggaataaaggatgatgtcttccttagtgttccttgcattttgggacagaatggaatctcagaccttgtgaaggtgactctgacttctgaggaagaggcccgtttgaagaagagtgcagatacactttgggggatccaaaaggtagctgcaaggttttaagagtcttcgtgatgtcatatacatttcacgtgtctaggcgtacaacaggtattctagcgtggcaggtagatgcatgcttgtcctgtatttgagtctgagtctgtgattaaagcaagtcagagtatttctacacgatggacctggggaatataacagtcaactcgctgaagttacgaacagtacatgaactggttggtagaaatccacagctatatcctgatgctggactggtattaagtcttgtgtagtcttcaactggttagctgtgaaatagtgctggcacctctgacgcatccacggccaatgtctgtagcgtactgcatttcgccccttgtaggccaggtggatgtgtaccgtgtgttatatgacttcctggctccttgagtgaagatgccgtagtccagcatgtttcccggtgagtcagatcctgggatccagcgtatagtccaaatctgtcttgtgcatagtcttccaaggagctatttgggaacaatcagggggcctcctttttgtgaggtctcttcaaagtgccatt

SEQ ID NO: 603992 - DNA, 191 bp, Homo sapiens
gggcagcggtggcggagcaccctgaagcctggtgacgccccacggttcaagaagctaaagagccgacgaaggctcgaagcgacccagtggcatgccccacgctgagcagcacaggctgccccaccgtgggctccccgatctctctctggatcaccgagacctcgcaggaaggtcatcaggggcgccagcca

SEQ ID NO: 603993 - DNA, 129 bp, Homo sapiens
tgctagctcattcaggaagtcattgtcactcaggactttgtgagtcaccccagtaagccacggcctcatagaattaaagtggccgaggaaatgtgtcttagccaagatcatccagtgaatggggcagaa

SEQ ID NO: 603994 - DNA, 1230 bp, Homo sapiens
agcatagctgttccacttaaggcccctcccgcgcccagcgcaggtgctgcagccgctgccgccgattccggatctcattgccacgcgcccccgacgaccgcccgacgtgcattcccgattccttttggttccaagtccaatatggcaactctaaaggatcagctgatttataatcttctaaaggaagaacagaccccccagaataagattacagttgttggggttggtgctgttggcatggcctgtgccatcagtatcttaatgaaggacttggcagatgaacttgctcttgttgatgtcatcgaagacaaattgaagggagagatgatggatctccaacatggcagccttttccttagaacaccaaagattgtctctggcaaagactataatgtaactgcaaactccaagctggtcattatcacggctggggcacgtcagcaagagggagaaagccgtcttaatttggtccagcgtaacgtgaacatctttaaattcatcattcctaatgttgtaaaatacagcccgaactgcaagttgcttattgtttcaaatccagtggatatcttgacctacgtggcttggaagataagtggttttcccaaaaaccgtgttattggaagcggttgcaatctggattcagcccgattccgttacctaatgggggaaaggctgggagttcacccattaagctgtcatgggtgggtccttggggaacatggagattccagtgtgcctgtatggagtggaatgaatgttgctggtgtctctctgaagactctgcacccagatttagggactgataaagataaggacagtggaaagaggttcacaagcaggtggttgagagtgcttatgaggtgatcaactcaaggctacacatcctgggctattggactctctgtagcagatttggcagagagtataatgaagaatcttaggcgggtgcacccagtttccaccatgattaagggtctttacggaataaaggaagctgcaattttaaagtctctgatgtcatatcatttcactgtctaggctacaacaggattctaggtgcgggttgtgcctgttgtccttttatctgatctgtgattaaggagtaatattttaggtggctgggaaaacatcaactcctgagttaggataagatggttgtaaatcccagcttttccgtgctggtgggttaaccttgtgtggctcactggtgggttgaatgtcctgccccct

SEQ ID NO: 603995 - DNA, 787 bp, Homo sapiens
  misc_feature (346)..(346): n is a, c, g, or t
acgaagaaaaattgtatcagcatacacatacgatgtgttgtccgtcgtggtgtattcagcatgcttagttacagagctttatctgctcgtacaatttctggggaaaatttgatcctctgtatccgtggcaatccactattcgacgggtgatgtcctctacaccactggctgccccccgcctcccgcgcgcgtttacgttcccccacctgtgtgcagcgttgtaatcatctcgggcacagggttatcagcctctcgggcacaatcgtgttaaggctctcgtctgccccggctcttttggagaatagtctgggtggaggctcaattttaagcgtccaatgctcgcagnttgttgccgacccaggcgggggctcaaaagggggtcgcccggcggatcatctcataacataggcgggccaattgatgtagtaaaaatcgccctcgaagttaggtgtttaccccccccttccgtcaacacacacattctactagaccccctctctcttttagcagaactcacctattggctgacgacacacaatttatcaacagtccgcaacatctgcgcttcgaacctaactatgcccctttagtctacgcactatctcggattatattatcgggacacctctgctctcctctgaccccctcctgtggagtacgcccccatattgtacacccaatcacccacctattcacttctccggcgacgactaatagtctgtatatttgctccccgaaccattttttcccaacctattaacatcaatggaaaaaaaaccaacataaa

SEQ ID NO: 603996 - DNA, 1315 bp, Homo sapiens
cgtgacgcgtgggtcgccacgcgtctaggccaggcgcacccggatgaccggctcactgacgtgcattcccgattccttttggttccaagtccaatatggcaactctaaaggatcagctgatttataatcttctaaaggaagaacagaccccccagaataagattacagttgttggggttggtgctgttggcatggcctgtgccatcagtatcttaatgaaggacttggcagatgaacttgctcttgttgatgtcatcgaagacaaattgaagggagagatgatggatctccaacatggcagccttttccttagaacaccaaagattgtctctggcaaagactataatgtaactgcaaactccaagctggtcattatcacggctggggcacgtcagcaagagggagaaagccgtcttaatttggtccagcgtaacgtgaacatctttaaattcatcattcctaatgttgtaaaatacagcccgaactgcaagttgcttattgtttcaaatccagtggatatcttgacctacgtggcttggaagataagtggttttcccaaaaaccgtgttattggaagcggttgcaatctggattcagcccgattccgttacctaatgggggaaaggctgggagttcacccattaagctgtcatgggtgggtccttggggaacatggagattccagtgtgcctgtatggagtggaatgaatgttgctggtgtctctctgaagactctgcacccagatttagggactgataaagataaggacagtggaaagaggttcacaagcaggtggttgagagtgcttatgaggtgatcaactcaaggctacacatcctgggctattggactctctgtagcagatttggcagagagtataatgaagaatcttaggcgggtgcacccagtttccaccatgattaagggtctttacggaataaaggatgatgtcttccttagtgttccttgcattttgggacagaatggaatctcagaccttgtgaaggtgactctgacttctgaggaagaggcccgtttgaagaagagtgcagatacactttgggggatccaaaaggagctgcaattttaaagtctctgatgtcatatcatttcactgtctaggctacaacaggattctaggtgcgggttgtgcctgttgtccttttatctgatctgtgattaaggagtaatattttaggtggctgggaaaacatcaactcctgagttaggataagatggttgtaaatcccagcttttccgtgctggtgggttaaccttgtgtggctcactggtgggttgaatgtcctgccccct

SEQ ID NO: 603997 - DNA, 405 bp, Homo sapiens
ctttataagtagagataattcactcgcagcgtctctgtacactctaacttattagacagcaagcaatatataatactgaaaaagtattcagaaatggaaaattacatcatataggtaatcgaacttgtgtacagcctagaatgtaactgttttgaaagtgcagaacaattctttggattattaaataaggtatacagtatgcatggtatctcaaaatttagctttaaaatctaaaagtctataaagaatcagatgcataaggcatatgttaagttcacttgggaggctaaaaattttccagtgaaaacaaaatgaaaacctttaagagaatgtagagtttatataaacacaaagtatgcgcttgaagatctgtgactaccaatcaacataggtggggtaccgagc

SEQ ID NO: 603998 - DNA, 1532 bp, Homo sapiens
agcatagctgttccacttaaggcccctcccgcgcccagcgcaggtgctgcagccgctgccgccgattccggatctcattgccacgcgcccccgacgaccgcccgacgtgcattcccgattccttttggttccaagtccaatatggcaactctaaaggatcagctgatttataatcttctaaaggaagaacagaccccccagaataagattacagttgttggggttggtgctgttggcatggcctgtgccatcagtatcttaatgaaggacttggcagatgaacttgctcttgttgatgtcatcgaagacaaattgaagggagagatgatggatctccaacatggcagccttttccttagaacaccaaagattgtctctggcaaagactataatgtaactgcaaactccaagctggtcattatcacggctggggcacgtcagcaagagggagaaagccgtcttaatttggtccagcgtaacgtgaacatctttaaattcatcattcctaatgttgtaaaatacagcccgaactgcaagttgcttattgtttcaaatccagtggatatcttgacctacgtggcttggaagataagtggttttcccaaaaaccgtgttattggaagcggttgcaatctggattcagcccgattccgttacctaatggggaacatggagattccagttggctggtatggagtggttgagagtgcttatgaggtgatcaactcaaggctacacatcctgggctattggactctctgtagcagatttggcagagagtataatgaagaatcttaggcgggtgcacccagtttccaccatgattaagggtctttacggaataaaggatgatgtcttccttagtgttccttgcattttgggacagaatggaatctcagaccttgtgaaggtgactctgacttctgaggaagaggcccgtttgaagaagagtgcagatacactttgggggatccaaaaggtagctgcaaggttttaagagtcttcgtgatgtcatatacatttcacgtgtctaggcgtacaacaggtattctagcgtggcaggtagatgcatgcttgtcctgtatttgagtctgagtctgtgattaaagcaagtcagagtatttctacacgatggacctggggaatataacagtcaactcgctgaagttacgaacagtacatgaactggttggtagaaatccacagctatatcctgatgctggactggtattaagtcttgtgtagtcttcaactggttagctgtgaaatagtgctggcacctctgacgcatccacggccaatgtctgtagcgtactgcatttcgccccttgtaggccaggtggatgtgtaccgtgtgttatatgacttcctggctccttgagtgaagatgccgtagtccagcatgtttcccggtgagtcagatcctgggatccagcgtatagtccaaatctgtcttgtgcatagtcttccaaggagctatttgggaacaatcagggggcctcctttttgtgaggtctcttcaaagtgccatt

SEQ ID NO: 603999 - DNA, 1556 bp, Homo sapiens
agcatagctgttccacttaaggcccctcccgcgcccagcgcaggtgctgcagccgctgccgccgattccggatctcattgccacgcgcccccgacgaccgcccgacgtgcattcccgattccttttggttccaagtccaatatggcaactctaaaggatcagctgatttataatcttctaaaggaagaacagaccccccagaataagattacagttgttggggttggtgctgttggcatggcctgtgccatcagtatcttaatgaaggacttggcagatgaacttgctcttgttgatgtcatcgaagacaaattgaagggagagatgatggatctccaacatggcagccttttccttagaacaccaaagattgtctctggcaaagactataatgtaactgcaaactccaagctggtcattatcacggctggggcacgtcagcaagagggagaaagccgtcttaatttggtccagcgtaacgtgaacatctttaaattcatcattcctaatgttgtaaaattcagcccgattccgttacctaatgggggaaaggctgggagttcacccattaagctgtcatgggtgggtccttggggaacatggagattccagtgtgcctgtatggagtggaatgaatgttgctggtgtctctctgaagactctgcacccagatttagggactgataaagataaggacagtggaaagaggttcacaagcaggtggttgagagtgcttatgaggtgatcaactcaaggctacacatcctgggctattggactctctgtagcagatttggcagagagtataatgaagaatcttaggcgggtgcacccagtttccaccatgattaagggtctttacggaataaaggatgatgtcttccttagtgttccttgcattttgggacagaatggaatctcagaccttgtgaaggtgactctgacttctgaggaagaggcccgtttgaagaagagtgcagatacactttgggggatccaaaaggtagctgcaaggttttaagagtcttcgtgatgtcatatacatttcacgtgtctaggcgtacaacaggtattctagcgtggcaggtagatgcatgcttgtcctgtatttgagtctgagtctgtgattaaagcaagtcagagtatttctacacgatggacctggggaatataacagtcaactcgctgaagttacgaacagtacatgaactggttggtagaaatccacagctatatcctgatgctggactggtattaagtcttgtgtagtcttcaactggttagctgtgaaatagtgctggcacctctgacgcatccacggccaatgtctgtagcgtactgcatttcgccccttgtaggccaggtggatgtgtaccgtgtgttatatgacttcctggctccttgagtgaagatgccgtagtccagcatgtttcccggtgagtcagatcctgggatccagcgtatagtccaaatctgtcttgtgcatagtcttccaaggagctatttgggaacaatcagggggcctcctttttgtgaggtctcttcaaagtgccatt

SEQ ID NO: 604000 - DNA, 117 bp, Homo sapiens
gcagctgatgctgtgggtgatgctagaggatcccggggtcattttggctgtcaccagcgacgttgccgcgacgaacatctgtacagacacattcttgacattgaagcccacattgtc

SEQ ID NO: 604001 - DNA, 326 bp, Homo sapiens
gcactctgcctggttcagctgatttgtgttcaaaggaggcaggactgggtgcggtggctcaggcctgtaatccgagcactttgggaggctgaggagggcaaatcatgaggtcaggagatcgagaccatcctggctaacgtggtgaaaccccgtctctactaaaaataaaaaaaattagccaggtgtggtggcgggtgcctgtggtcccagctactcgggagactgaggcaggagaatcgcttaaacccaggaggcagaggttgcagtgagccgagattgtgccactgcactccagcctgggggacagagcaagactgtctcaatta

SEQ ID NO: 604002 - DNA, 165 bp, Homo sapiens
  misc_feature (58)..(58): n is a, c, g, or t
gagagggagcctcgttttttcgcccaggctggagggcagggggggggtttggggtcantgcaacccccgtttccgggggtggggggatttttttgccccggccccccgggggggtgggattacaggggggggcccctaagcccaggtcatttttgtttttttaga

SEQ ID NO: 604003 - DNA, 347 bp, Homo sapiens
cgacaaaacttcatcagcatcttttcgcgtttcacttaagcttctgaaaagcccttcttggtcagaatgactgaaacaaagtgatggccttttcaaagttacataatatattttcagcacatcccctgactaacactatgaaaagtgcatccattctagagtcagacaggcctaagttacaattctggatttactcatcactttctgtatgtttttaaatgagctatgcaacttctcttcagtaaaccaagaataaatatacttatgatatgaagttaagattatccgaaaagggaaaactcagccctcatttgaactaaaatcagcttaaaaggcaaattgtaagt

SEQ ID NO: 604004 - DNA, 137 bp, Homo sapiens
atccccggcctccttggttgccacactccatccttctacagataaacaactggagaaaaggagtacttatagcacaggaagacatgtgagcctggtaaaaacagactctacacagaatcagcaatccaagtgtgacg

SEQ ID NO: 604005 - DNA, 1838 bp, Homo sapiens
  misc_feature (70)..(70): n is a, c, g, or t
agcttggattggtcgtagtagcgtgctgcagtatgcatggcgcgttggttgatcagaacagcacgcccgntgtggagtgacctcgcttatatgactgtgcagcgtgagcccccaccatgtgcgtgtaccacgaaatatgcccgtgcgtttgttgtattcgctgcggccctccgtatatcttatgtaccgggttctctctatatgagtattcagagagctccgtgggtgggccagcaatgtatcgtgccatccaggggtgtttgatccccagcgacgcaccactggcgccgggggtggggccaacgatgagatctactagcgccccgctctgtttgctgaagattggtcggcgccccatcataaactaggggggggtcgtctctctaatgatgaagtaaataatgtgtgggttgtagagcgcagacggtgttgtttggtaaagagaacaagatagttgggttgtaagagtataatggtggaaaaaaaccacccgcgcgtgctgaatggtgtgccgcaaaatgattgtgacgagggaaatgttggtgtgggcaaataaggaacggccttgtgtggtgtccaatcccccgggggggctcgcactacaaggggggtacaccccccaggaaaaggttgggtcgactatcgttcgggataggggtgtcttaccacaagaggggtgttcagctggtgttggttttgttgaagacagatgggtgagagggtggccgctgttgccttcggaaaagttgttggcgccgccggcaaaaagttggtatttgggagaagattggtggcccaccagtgtgctatggagacagaaagattggtgtccaacagagccgttgtagatttgttttccttgggagaaagagaaaattgtgttgtctccacagcgcgggtataatataaatacctgggtcgccgcccgggagggctgtataaaacgtcgttgtcagcaacatgcgtgggaccacattggggagattgtcttgtgtgaaaacaccccccggggtgcgacccagcagaatgaagggtggtggtcccccaataggggttccccacaaaaatataatagggcgcacgacacaccacattggtgagtttgggatgagacttctctacacggtggtgagagtgtgcccagagagacattacaccccatagggtgttgactactatggcggtgtctcggtctgtggttttgttgtgtgttttgggtggtttttagctgtagataatgagacgcgcccacgcctatatcacgagatatatcgcggatagagacccctctcttttatagagctgctcgagagcgcgcccctaccacgagtgttcccgcccgcgacatatcccgcgcgatgagagaagatataggtagtaggggaatatatcactagggagacccgcgtgagagagagggccacgagacacacaatagtgacacttgtaaatagaaagatgggtctcacatataaagtgtggaatatctcccgaaccagccacttgtggaaaagaacacatatagagaaaagagcggttgtcccacatatgttatattgatctcctctgtctccatagagatagttcttgtgctttagaaaaagattaaaatagctgaagaaagaccccagatttggaaatggggaagagcttcactggagactttcatggtggaagagccacgttagatttctgggaaagacccatcggggaacgcagaacacgggtggctcaaagattgtgacggaactgtatgggatatggaccccccgtcccagaaatctgttttaaggtcagacgtccaatagtggccaaattaaaagggctaatttgttgat

SEQ ID NO: 604006 - DNA, 115 bp, Homo sapiens
cgcaatgaaaaacactaagagaaaagaagggaacaaagaatatataagagaatgagaaaacttttaacaactgacaggaacaaagcctatcatattaattataactctgaactta

SEQ ID NO: 604007 - DNA, 971 bp, Homo sapiens
  misc_feature (754)..(754): n is a, c, g, or t
gtcttttgttcctctcgcgtgtcgttgctgcttgtggtctctgttcacttagtgttttgtatgacttctggtcccttgggtggcgctagttgcccttgctccgaacacgggggtttctctgttcgaaacccaagccttgtttggaggggccttccttctggtaaccaccgccggatttgccttcgggtccacactgtgttgtgaggacacgggaagcccacacaccccgttttctgggcgggttgcccactgtcactggctgcccagtgttgaggcgcacctgccccacccctggggtgggaccccggccccgcctcccttcctttgggggccgcgtgtgttcccgccgtcacacgttcgaacacccgggtggggggtcccacggtgaccgcacatataggcgggcccccgcctgtgccccctaaagcgacggccgtgtcaacccacggattgttgccgaccccaggtggtaataacaacgtaggggcgtccttcttataagagaagcccaaacatgagggtgcaacacgggcggctacgcggaccacccccgcgccgagagacccctgccagagggcgtcctctttggcggcacccacaacccccgagagggcgagttctccggcctcccccacgcgaaaccacccgctttcggccgtgtcacgccaagcccctcctctgcgccgttctcaagtaattccctaagcgcaccccttaatggcttttcacgaatgttatcaccacccgaaggggntggcttccatatcattccacgagaggccgcccttttactaatgctcttgtagcagataaatgcgtggcacagagcactactggggggctccctagaatgactgtcaaaccccccaaagctttggcccccacagggacagttctaatgccaagctggtatgaacgcggtacggcaaataacaggtttaaaaaaaaagtccccctcttccaaaaaaaca

SEQ ID NO: 604008 - DNA, 210 bp, Homo sapiens
  misc_feature (26)..(27): n is a, c, g, or t
  misc_feature (118)..(118): n is a, c, g, or t
ttaccgcagtattccaaccacatccnntaccagctgtgtttacctctgtgattagacagcataataaatgcacctgtgatatgccgagttgatttgattaaatgcctgattatatatncatgttaaaagttattttgtcaaacaatgaaaagtgtcctatgtcccatgaaactgcaaatgcctttactggcgtggcctaataagcggtaa

SEQ ID NO: 604009 - DNA, 535 bp, Homo sapiens
ggaaggtcctggactggatttcttcaagccaatctcacacccctatgggaggaggtcatcgatagcaggaagaaggatggctagggactccagtcatagtataacgcttcaggctactgcaaatccaaacacaggtttggtggaagatttggacaggacaggacgtctttcactgacaacgcagcagagtaattctcagcagcttctctacatcacatgcaaggcttggcagaagctagagcacatccagacgaagttctcatcggacatcacgcacataggaatgatgtcacaggtggaagaaaagacccaaatcatactgaaggcctcaagtcatttactggcaaggtatagctctcattacccacacacgaaggaaagcaggatcttcatcccagtgacctcagctaagagtgggtcctttggagttactgcagtttacggtgggagattccaaatcttaatgtcagtcgtaccttatcaggagaccaagacaaagttccatcccagtggggggtcccataccactcatgga

SEQ ID NO: 604010 - DNA, 134 bp, Homo sapiens
tgtgtgctgggtgactctacaggatctttgtcatcccccttcgtgtgccatccctcttcgtgtgtcatcccccttcgttgcaggtaccctcagcggccactgagtcctgttgcctccatcttctctctgacaca

SEQ ID NO: 604011 - DNA, 696 bp, Homo sapiens
agcggaggtctcacggccgcgagctaggtggtctgggaacccacgtgggcgtgggatttccggacttgctcgtgctggtccggcacgcctggacgcgcccacccgtggcctaggtcgccactggggaacgctgctgccgcgcgcgtacaaacatcaacggaggcagccagacacggcgaggcaccactggacccttcgaaacgggccaccacacgcagaagcacgtccacccgcgatgacaagaccctgggagacatgggagcgcaccaaggagcacaaccgctttgcacacgggcagactggcaatgcaaaaggcaatcgggcgtcctccgcgtgtcataaggcagagtggcacacgcacacgcacacaacacgaaaacgaacaccgacgggaccgccgaagacacaccaatggctaccgcaaaggcaaaacgcggcacgaacagggcaacagccacctacctggcaacccgagacgcaccagggcacggagagcgcacaccaggcttggcccctcgggccatggaaaacacacaacacccggccaacagacacacccacggcaccacgcggcacgccacaccgcagccacacgcatgggccccaaacgccgggcaagccccgagcgcaacgcgaactaacccttaaccaaaggggacagagggcccacgagcaagccattgccccccaccgcct

SEQ ID NO: 604012 - DNA, 230 bp, Homo sapiens
tgttgggattacaggtgtgagccatagcacctggccaatttttgtattttttaatagagacggggtttcaccatgttagccaggatggtctcgatcttctgacctcgagatccacccgacttggcctctcaaagtgctgggattacaggcataagccaccgagcccggcctgtaaatcttttaaaaacaccgttgatagacagaacaccgtcgaaggggtaccgagctcg

SEQ ID NO: 604013 - DNA, 270 bp, Homo sapiens
agtctcctccagcgtcccacggggtccactggtccgaggaatcatgacgccggtgctcagtctggagagcccctaccctctgtccccttaccggtgtctggtggccctgggaggtggctgtgatgtgcctctctgggcagctttctctgctcagtaaattcaagatgatctcagagttgtcatgtggcttgaaggacaggcatggcagtacaggggcctgatgatgtcgcctccccccacagagagagcgtccgtcccgaaactgagaca

SEQ ID NO: 604014 - DNA, 391 bp, Homo sapiens
gtctcctccctcctgcttgcgccttccctttgcaccagcccgagtctaggtctgggccaagcacattacaagtgggaccggtggagcacccctgggctcccgggcaggggagttctgaggctcctgctctcccatccacatgtctgtactggcctaatgccaggctctgagttctgtgaccaaagccaggtgggttccctttccttccctcccctgtggccacagctctggagtgggatggttggttgcccctcacctcagagctcccccaaaggccagtaatagatccccggcatcagtaaataatctgctttggactagtaagagatacattttgtacacgtaaaatacaaccagttacaaacaaaataaaatctgtagagtggaaaaa

SEQ ID NO: 604015 - DNA, 223 bp, Homo sapiens
taatcgagccgcccgcttcgtgaactcctgctgattccttctcaggcgcgacactgagttgggtctaccccgatgctacgattgctaccgggctttaccctggcggcagtaccctcgttgccaactaccggtctttgccggagcgagaggtgcccatactgctgtcgccgacgcaaaaggccgtttaccaaagcatgatgcccactgaggtactggctcatct

SEQ ID NO: 604016 - DNA, 699 bp, Homo sapiens
  misc_feature (1)..(1): n is a, c, g, or t
  misc_feature (139)..(139): n is a, c, g, or t
naaggtactaaatggtgaagtccttggagttgcagtcagctctacaatacttgatccagtggcatgaaagatcgggcaggaaacgcgcagccatgtcttgtgccgttaacatgttcaaggctgatcgaacgaaagatgnctgtcctatgtacgcaatatggtaaagtgctaattcttggtgcagccagctatataatggtggccttcaagccatctaatgtttgcagcgccttcaagaagagcatagtgtaggatcctgtcatgtcagtcacgagccctcagaatgggcacatttctaatgcattcagcgagccctccagaacacgtcgaaagtgtatcgtccttgctttcagtcatagctgagaagagtgttaaccacccgggtaaagtttttatcatgggcttggcatggattgtagtaggagttcttgatgcttatggctattacagggaatttcccatcaagtgtagtccagcagcttaggggtccatagccattctgggcttggtgggcacacctgtgtgtacagctttcgagcatctgggtagagttaacagtggcttgggcagtgcacccaaatgatgcccttaaaaaattataggggttaagtcactctcattcaatttaaatggcttacaggcatgtacagttgcattctttcataaatataacataatctttcctggcagaagcctcat

SEQ ID NO: 604017 - DNA, 113 bp, Homo sapiens
ggaatccggctggtgcagcctatcctctgcagctgacctctgttgtcctccccttgtgctggctgagagccccagctgacattgaaatacagttgttggctccggctcccctc

SEQ ID NO: 604018 - DNA, 158 bp, Homo sapiens
  misc_feature (25)..(25): n is a, c, g, or t
ccctggtttcagggctttcccattngaactttttcccattttagggatttactttaaagttttttcccatgtcccaaaggctagggggttggaggtgggggctttggaaaaacagcccccctttcctcgggggcccataaataaaacatgccgggtta

SEQ ID NO: 604019 - DNA, 393 bp, Homo sapiens
tgaaatccctttttattttttaaagatttttttttttaattttggagggtggggggcaatttttaaaatatgccttaaaaggccgggggcggtggctcccgcctgtaatcccagccctttggggggccaaggtggggggtttgccttaggtcaggggttcaagacccccctggctaacatggtgaaacccccttttttcttaaaatacaaaattagcccgggatgttgggccatgcctgttatccccaattcttgggaggcttaggcaggaaaattgctttaaccccgggggtgggggtttcagtgagctgagtttgggccctttttttttgaatatgccttttttgttgttttgaatttgcctttaaataaagtgttccccccccctgccca

SEQ ID NO: 604020 - DNA, 387 bp, Homo sapiens
  misc_feature (41)..(41): n is a, c, g, or t
  misc_feature (330)..(330): n is a, c, g, or t
  misc_feature (349)..(349): n is a, c, g, or t
ctcgcgtgcgtccgtatccgggagcagccactaggtaactntagaggccactgcaattaatcggcttgaacagccaggagcggaaacccgagagtcagttcaaccacagccacccgcgtgtgcccgcggaaagccgatggcctactctcgtccggcagcgcactggtttcctgggttaccggcctcagcgctcctcccgctttcttttccgggaggcgacaatctgacgctctcagcgcgtgacgcagcacgcttttgatataaaatgcagaccgcgcggccgtagcttcctcttctgcttttcggggccgacttcgcaaagattggcgncgcagaaagacaaggaagncccaaggaggtcaaaccttggaggttttaattttggac

SEQ ID NO: 604021 - DNA, 213 bp, Homo sapiens
ctaaatcattttactttcctggaaaattgcaaggttaacgactaaactgggcccatttgggccaggggcttacaggtggtaacagtgattataaatgtgtaaatttagccaaagggctccctattttgacggtcattgttggctctttgccccgtcaggattgaaagcagattgtattttgctaggaataaattgccctgttgtgtggtttta

SEQ ID NO: 604022 - DNA, 224 bp, Homo sapiens
aatttccgcctgggtacgtgccacgcactgcaccgggtggcccacgagatggaacaggtgcgtgaacaggccgcgctgatcatctctcttgagagctgggaaaccgctggcgcagtgccagtcgcgcagtggacgctcggccagttgaccatgttcacctgtgtacgccgagtgaagctgcgccgcatttacgagccggattgtgtgaaagcctgcgtacctgg

SEQ ID NO: 604023 - DNA, 104 bp, Homo sapiens
agccagttctcatcatgtatgtggctggctttttggagggttacctcactgccccacacatcaattaccactacacaaacctctacccacagctgatcatgaaa

SEQ ID NO: 604024 - DNA, 940 bp, Homo sapiens
cccacgcgtccgcttaggtataggagaagaggaagaagtttaaaaagtgtaagtgggccgggcgtggtggctcatgcctgtaatcccagcactttgggaggccgaggggggcggatcacgaggtcaggagatccagactatcctggctaacaaggtgaaaccccgtctctactaaaaatacaaaaaaaaaacattagtcaggcgtggtggcgggcgcttgtagtcccagctactcgggaggctgaggtaggagaatggcttgaacccaggaggcggagcttgcagtgagccgagattgcaccactgcactccagcctgggcgacagagcaagactccgtctcaaaaaaaaaaaaaaggtgtaggtggtttaaaagagaaacacttggtctagtccataatattttaatagggcttccctggctgcggggaaaacttaggccagtaagcattctcttggtttaaagccctacaagacatttggaaatatttcatggttcatgccaaaattctaagtactgttttcttagcaagtgtaacataatcgggaccatgggtacagtaaaacattcttgggatgatatcaaagccttattagcactgccctgaataataggtcatttggcctcactcattgccaaagtagccattttctaagtgagggagttttagactgggctcatggcctggtttcgttagattgtaggccaggacggatactaattggcacctagggttcatattgcaccccacagtaatctggggctatacggttattggtacataaagcaaaaaaaaaaagaaagagaaaaaaaaaaaagaagaagaagaaaaaacaaggagacaaaaggacaaaatgacagagcaaaataaagccgggggataagaaggcgaaacgaacacacagcaatagtgacgccaacaaagactatacctggtcac

SEQ ID NO: 604025 - DNA, 372 bp, Homo sapiens
tcccagccccccctgccaaagtcccaggttttcaagccccgcttacttggtgggttgggggggaattctttcctctgtcccccccagtttccccattggggggacctgaaggggtggcttccccccctttttttcagaattactttgccttagttttcccccaaagggaaggctgggactttttactctggcccccctgatagttatttaattctgtttctcccaggggttccccatttaactgaatttagatgggggcgggggggtaaggaaaccccccccctctccttcccccttgggccccctttatcaattgcctgttttgttttgtttgtttttttcctttccctaataaaatggggtttttttcca

SEQ ID NO: 604026 - DNA, 287 bp, Homo sapiens
  misc_feature (189)..(189): n is a, c, g, or t
cttttttttaaaaccggggggggggggaaattcccccgggggggtcccccaagggccccgggcccccctttttgggtttttttgtcccaaacccggccccccccctgggggggggggggttccccgggcatgggcccccccctttttaaaacgggggggcaccccaggggcccccccttcctttttttnaacccaaaagggtttttgggcggggggggggggggccccctttttggggtttttggttggggttcaaaaggccgaaaaaacccccgaaaaattgttta

SEQ ID NO: 604027 - DNA, 146 bp, Homo sapiens
  misc_feature (139)..(139): n is a, c, g, or t
gtgtcaagataacctcttatgttaacacaaatattcaataaggctgggtgcggcagacaattcttcataacaaaaacagtcactttaggaggccgaggtgggagtctgagaccagcctgggcaacatagcgaaaccccntctctac

SEQ ID NO: 604028 - DNA, 731 bp, Homo sapiens
cactgaatgcatctaagcaagatggacctatgccaaaaccacacagtgtttcacttaatgataccgaaacaaggaaactaatggaagagtgtggaagacttcagggagaaatgatgaagctatcagaggaaaatcggcacctgagagatgaaggtttaaggctcagaaaggtagcacattcggatgaacctggatcaacctcaactgcatccttcggggataatgtcgccagtcctcttccttcacttctggtgtagttgcagccattttcattggattctttctagggaaattcatcttgtggagtgaagcatgcagagtgctgttctttttttttttttctctctgtgaccagaaaaagattggttggcctacaatttcatggggggtgtggcccgcggtgaccattttttggggtgtacagcgtatataggcttggccttggatgatctctggcggttgggaaaaccaatagagacaactcggttccggtgctgaccgggttggtgttatggccagatcatcatctagcagatgtccgtcgcactctcgcgtccttgtgaaattcataactaagactgtcttttctgggggggtcacttacgagttcagaatggttccagagtttggcactgtatttaataatccttcacttattctgtgcgttaccttttgcatatgatctattacatgctacccatatcaggaaggcaaagtatcctgggaaaggg

SEQ ID NO: 604029 - DNA, 461 bp, Homo sapiens
ccggggggggggaggagaggggggaccgcccctttttgtttgttttttgggtggtgcccccccccgcccccccccccggggggggggtttttttgggggggggttttttttgttgtgttcccccccccccccccggagaggtgggggcgattgtgttttttccccctccccccccgggggggggggggtggggggaggtaccccccccctccccggaaagaattttgtggggcgaaggtggtggggaggggcccccccaccccccttttttttggggggccccaggggagggcccccctttcccttccaaaataggggggtggggggggccccctttttttttttccccccttttcaagggggggggttttttgtggcccccctttttaaaaaaccccttttttttttttatttgggccgttttttcccccaaaaaagggtggggccttttttggggggga

SEQ ID NO: 604030 - DNA, 162 bp, Homo sapiens
ggggggggggtctggtgcaaccaattaccttcagaagtcacataatcagttaaataaagttctcctgtgtgcaatctaagtttcacatgatttatcacatgatctcagtatataaaacacctgttctgaaaggccccagagtgtacaacaccaggtcgacgc

SEQ ID NO: 604031 - DNA, 135 bp, Homo sapiens
cctcacgaccacaccatgatgaagtggatgtgtactgtttcttcttcagcatcaccaaggtgatcacgatcacgtgtcgcgtattacaacaccgcccaccacatgcctcgtgcaccaccactgcctcgatgcagt

SEQ ID NO: 604032 - DNA, 244 bp, Homo sapiens
gaccactacgcatgctcagctattgagacactgtcaagattacgttattccatccatagtgcattattgtcactttttttctgtcatgtatgtagatacttctatatcatattcgtcctttttttctaaatagaatttctataaagatggatttgacacactcaccatttaaatcatttccagtatagatatagtgtttgggctgacaattatgtcacaatgggactgtctttatacggtttgt

SEQ ID NO: 604033 - DNA, 304 bp, Homo sapiens
aggcccaaggtgggggcggtggccaggacaacgggctggagggtttgggcaaccacacccaaaacatgtacatggagtttaagggcggcgacggctacctggctccggaaaaagggtattttattgaaggttgccccggagtaaaaaggttgtcctttccatttgttgggtttggaggggttcctgcccagccccttggtgtaatcccctcccccaaccttggccacttgagtttgtcctccaagggtaggtgtttcatttgttttggccccttggatttaaaaaaaaaattaatttcctgtta

SEQ ID NO: 604034 - DNA, 1021 bp, Homo sapiens
tggaaataacggcaatttatccatggcacataccactgtatttatgcaaatcaacgtttgggaaaatttagacacagaagggaactagaacagttttcccccgtgcagagaatgaaaagcttttgggcctcttaagtcttgtgataaaaggcgtacataattctgggtgtctacgtgtacagaatacgtgccgcttagcgtggatttcccaatttcgtgagttaacacttcgtgcaattccaaacggggtttcaacccttccacctttacgaggccgtgctttacgggcacttaaacacattaatccaagaaatttcttacacttaattttattacattttaaattgtgggtggcattatttttaaccgatgtgttactattaagaattcttttctaagaaagcatttacattaattaaagtggattacgtggtaaaaagaatcgtgatatagtttaaagagttaacagagcctttaacgagatagaatacttaccaaaaacttcgagccgtggatcagaactgtgggtgtgttgaagccgtgttaagtggggctagtggggccaccgaggcctttcccagaggggtttagcctttcagagggagggcaggggaaagagggggggtcttaaaagagaaccacaagaaccaattaacaaaaaattcagaataatttagaacagcgagattacgcggtaaacaggttctactctctctccgaggtgaacaagaagagaataaggcttccaatggccaattccatattcagaagtgatttccaccggtggcttgtcctggtgccaatactcggggggccccatggtggggtgggggcaggggaaagaccccccaaggggagccaaatcaggggccaaggggcgtggaagattgagaatatacggtctcaaaattggaggtgattctgattgtttttgcgatttagatattgtatttttaaacacaatattgggggttaaaagtgtagagagggggatatttggggacggtggtttgatagaaaa

SEQ ID NO: 604035 - DNA, 341 bp, Homo sapiens
agagctggggctgtctgtggggtgagtaggggccagaaagcatagccagcgggacaggagtcctttgaagagacaccattgttgccaaggccacagcggtgcaggtcacaccagccagttacagggatcagagacccaaccccagaatcacattcctcatgacccatgcgttcagaagagcctctgaactccaaggggcaaagcggacagctggcagccctttccctggccagcagaggtggcagttctggtaaaactaagagtggggaggaacatgaacttgctttactgattcccttccattaataaaacagaggaccctacacggggcgcttcataaa

SEQ ID NO: 604036 - DNA, 629 bp, Homo sapiens
  misc_feature (153)..(154): n is a, c, g, or t
  misc_feature (201)..(202): n is a, c, g, or t
  misc_feature (238)..(238): n is a, c, g, or t
  misc_feature (253)..(253): n is a, c, g, or t
  misc_feature (291)..(291): n is a, c, g, or t
  misc_feature (326)..(326): n is a, c, g, or t
agcggcagaaattctagagctgaaaaatgcaactggcatactattgaagaatgcatcagaactttttatggcataactttttatggcagaaatgatctagcagaagaaagaattagtgagcttgaagacaggctatttgaaaatatacgtcanngagaatgacaaaacgcaaaaaaggataagaaaaggcatttccctacnnaggatatagaaaacctcagtctcaaaaagggcaacnatctaagagttatcntggccttaacacgaagaggtagcacgcaagagacaggngttagacaacgtttattcaacaggaagaataacanaagagcttccaacacctagagatagatatcaatatccaagtacaagaaggttatagagcagcaaagcagattgaacccaaacaaaagtacctcaaagcatttaataaacttccaaaggtcaaggataaaaacatggtctgtaataacagaaaggatcctaaaagcagcaagagaaaagaaacaacacacaattaagctccaatatgtctgggagaagacttttcagtgaaaaccttacaggccaggagagaatggtacgacatactgcaagtgctgagggaaaaatcctttcatgctagaata

SEQ ID NO: 604037 - DNA, 156 bp, Homo sapiens
aatagcgaacggtgcaggcggggtcgggtgctgcggtgtcctcgcgcagccctccggctgagcacccccaccttgtgccagggggaccctgggccatgaggcgtggggtgcgcgcccgccaccaccatccgtgtctctgctgggaatggctccctg

SEQ ID NO: 604038 - DNA, 423 bp, Homo sapiens
  misc_feature (1)..(1): n is a, c, g, or t
  misc_feature (3)..(3): n is a, c, g, or t
  misc_feature (48)..(48): n is a, c, g, or t
  misc_feature (177)..(177): n is a, c, g, or t
  misc_feature (181)..(181): n is a, c, g, or t
  misc_feature (185)..(186): n is a, c, g, or t
  misc_feature (209)..(211): n is a, c, g, or t
  misc_feature (353)..(354): n is a, c, g, or t
ntngcccggaaggggggggggaaggggggggggttggggcaattcatnaaaaaggcttcgggggggcgggtgggcagatatagggagggttggggggggtggggcaccgccggggggcatggggatagaggtatgttactgggtggccaggggggttagggggggagggcctggggntccngggnncgttattggtcgtggggcgtttnnnaggccctgcacatgggggtttggctccttccaggactcctcccggggtcagggaggccaggtgggggtcagaccccaccggggcaaccttgcaggggacgacccgggggactgccttgggagtatcaagtcgggaggtaaannggatctcccctttcacccctcccacccattaatttcctcccaaaaaacaagtaaggttattttcaatcc

SEQ ID NO: 604039 - DNA, 199 bp, Homo sapiens
aaaaaaatttggagccccccaaatttgtttttgtttctcagggggggggttttccccaaaaaacatcagggggctctggggtcccaaatggggttttttttttaacagggggggggggggcccccttttcgggggggggggggggccccctcattttgggttgttgggggttttgaacctttaaattgggttttcccca

SEQ ID NO: 604040 - DNA, 536 bp, Homo sapiens
tagggaatgcgaccaggccgcggacacttacgagtactggctccaagacttccgcggcaaacccccagcagactatcatggcccatcagatctcatgtcatcccacaagtgcaagaacagtaaccttcttaatgattggtaatggaggttatattgtctgcctaatgcatatctctttttttttgttttattggagacagagtctgtgtcctgttgccaggctggcagtgcggtggtgcaatctcagctcactgcagtctccacctcctgggttcaagaggttcatcctgcctcagcctcctgagtagccggggagctacaagctaatgcgccaccaaaactccagtataatttttttttatttttttggagaaagagagtcttggcattgtgtccgccccaggcttagatgtgcaaggggcccaaatcttcgggcctcacggcgaacctctggtccccggggctcatgccaatccccgggttaaaccttccgagtagccccaggagtacggggactagggtgcccacaacaacca

SEQ ID NO: 604041 - DNA, 462 bp, Homo sapiens
  misc_feature (454)..(454): n is a, c, g, or t
aaaatttgcaaccttttactatttgatctcaaatttttaaaacttccaagggggctaccaccaccgtttacctaaatttgggacacttcccgagcattacctcctgacttaattttaaaccttcccccacccccacaccgaaaaataggcccaggaccctcaagctttgaggaaactgttaaaaaaattgatttgctcaggggaatccaactgagctttttactactataaaatctgtttcctcaaactgttttgaaaattaagtaacataaggggggtccggtacttagcacactgactgacttacagcaggttttcccagtaaagattacccattatgatggttatgaggcaaacaaagcctgcaattaaccagtacttttccaaggaaacttgtaaggtagcagggggttatactccctttgcaaaaaatggaggctgaaggcttaattgncttttcta

SEQ ID NO: 604042 - DNA, 299 bp, Homo sapiens
cggcacgaggtgtcctcactggaatagacacttactcctgatatgggtctgcctatcctgtatgcaatgcttctgccaagattaccatgcatgggctctccaaaggccttacccaccatcatggtattccacacagcattgcctctgaccaaggcactcactctacagctaaagaagtgtgccagtgggctcatgctcatggaattcactggactccagcctgggtgacagcgaaactccatctcaaaaaaaaaaaaggcattcagtattgcaacgggacagtccttggaggtggacca

SEQ ID NO: 604043 - DNA, 380 bp, Homo sapiens
cagcctggcaacacaatgaaaccgtgtatctaatataaatacaaaaattaatcaggcatgatggtgtgcacctagtagtcccagctagtcgggacgctgaggtgggaggatcgtttgagcccagtgagttcttgggctagtcagtgcgctatgccgatcgggtgtacgcactaagttcggccatcaatatggtgagctcccgggatgcgggtgtaccaccagtgttgcctaacggatggtgtgaaaacggaccaggtcggaaacggagcaggtctacaaactcccgttgctgatcagtaatgtgatcgtgcctgtaaatacgcgcactgcactccagcctgagcaaccatatgtgatgaccagactcgtgtctgcctcca

SEQ ID NO: 604044 - DNA, 207 bp, Homo sapiens
cagcattgggccgagaatcttgctcgctgccattgcgtctcttgcgcgtcgtttttctgtgggcttgagggtttcagcgaacctcaaagaattttgggtttcttacgggttaatcaggcagagaagtgaaaggtaaatttcctaaattcatattgttctgtgggtttctaactcgacaattaagggtccttctgttgggagggggcg

SEQ ID NO: 604045 - DNA, 393 bp, Homo sapiens
  misc_feature (4)..(4): n is a, c, g, or t
  misc_feature (259)..(259): n is a, c, g, or t
  misc_feature (296)..(296): n is a, c, g, or t
  misc_feature (357)..(357): n is a, c, g, or t
ccgncatcaaaaaaaaaaaaaaaaataaataaataaatacatagccaggcgtggtggcaggtacctgtaatcccagctactcgggaggtgaggcacgatcttggctcactgcaacctcgtctcccaggttcaagcaattctcctgcctcaggctcctaagtagctgggattacaggcgtgcaccaccacgcctggctgattcttgtatttttagtagagacggtctcaccatgttggccaggctgctctcgaacccctnacctcaaatgatctgtccaccttggcctcccaaagtnctgggattacaggcatgagccactgcgcctggccaaaaataaatttttttaaccgaagganggctggggtgcagtgggccaagccttgtagtcccag

SEQ ID NO: 604046 - DNA, 261 bp, Homo sapiens
tgagacggagtctcgctctgtcacccagactggagtgcagtggtgtgattttggctcactgcaacctctagctcccacgttcaagcgattctcctgcctcagcctctcaagtagctgggattacaggcatgcaccacgacgccctgacctggcagttgctaaaagtgtacagtcacatgcattcacaaagagagggttggaaattggaacttatgttcaaaaggaaagaagacattaaaaggttggaaaattagggactcg

SEQ ID NO: 604047 - DNA, 466 bp, Homo sapiens
  misc_feature (4)..(4): n is a, c, g, or t
  misc_feature (13)..(13): n is a, c, g, or t
  misc_feature (27)..(27): n is a, c, g, or t
  misc_feature (30)..(30): n is a, c, g, or t
  misc_feature (41)..(41): n is a, c, g, or t
  misc_feature (46)..(46): n is a, c, g, or t
  misc_feature (83)..(83): n is a, c, g, or t
  misc_feature (309)..(309): n is a, c, g, or t
  misc_feature (387)..(387): n is a, c, g, or t
  misc_feature (402)..(402): n is a, c, g, or t
aatnccgggtcgnctactactactaanttngcggccggtcngaccnttaaaagaaaaaattagtagggtatagtggcgcatcntgttagttctaactacttgggaggctgaagcaggaggatcacttgagcttgggaggttgaggttgcagtgagccgtgatcatgccactgcactcctagcctgggcgaccagagtgagaccctgtctcaaaagaataaaaagtaggtcgggcacggtggctcacgcctgtaatccaagcactttggcaggccgaggtgggcggatcacctgaggtcaggaattcaangaccaagcctggccaacaatggtgaaaccccgtctcttgcttgaaaaataccaaaaatttggctgggatgccgttggngaagtgcctggtagntcccaggctacttcaggaagggggttaaggcttggaaaagtcgctttggacctgggaaggttgg

SEQ ID NO: 604048 - DNA, 243 bp, Homo sapiens
gcatatttagtgttgtctctcttaaggaaaagcgtatttttaatctaatcattttataatgcacactgaatgactaggaaacctaaacaaattagatgatgtaattctatattaagggaccggaaaaaaaaaaaaggtaggtttcgggatttataacattttggaaaggaattagaaaccggggtcctcttagagatgaggttggatctaaacccatctcttttccttagtataagaaaccag

SEQ ID NO: 604049 - DNA, 964 bp, Homo sapiens
gctcgccttcccggcgagcggtttggcagggcggggcgcctcgcggaagatggtggcgcgctgcggcgtgtggctcccgtcgtcgggccaagtctcagcgctgctggaccggcccggcgtctcgttgtggctggaggcccactaaccacacggggtccctgagcaccgggcccgcaccgagtccggttcccggtatgcctcgacgcccgtaatgggcaacattgctccgcgaagggtggtcagtgccgtaggaggaggtgcccaggagaccagtgcccaagttgactcgggttccaggtgacgagtgaggagcagaccaggtgcaggccctgcaggcaacacgacacatgtgaagtgcacccatgccttcgtcagcacgcacgtgcaacgagggatcaagactatgaggtgcgggaatggtcagtggaggaatgaggacaacgtgggactaagcaagggaaaggacccgtgtgtgatgggaccgacgtgcgtgaaaggagaccatctgctggcagatctggagtcgtaccactattaaacagaatacgcctgaccaagtggaagagcccgcggcagggggttgcagtccttgcaaggaagccactggacggtccatggaggacgttaactgcattgtacccactgggccttttaaattccgcatgaatagatgtcaccgacgcgggagggcacgggggacaccgagctttaaagagggcggtacagacgacagaagattggcaacggagagggacagcagaaggggtggacccgtgacaaggggcaataccggggtggagacacggggccgcacggtggaaacccaaagtgccccccgtggagcactggggccatggccgtaggggagacaaaacagcggctccaagggcgaccttgggtctagttggcgcaaatgagctttagggggaaccccattggggaaacacccatcaaaagtgaggga

SEQ ID NO: 604050 - DNA, 211 bp, Homo sapiens
aagaagacaggataagaggagatacatcccagatttcagaggtgcagtaaaaatatccttctcaggtaaaaacagcccagtaagcggtcttcaaaaaggccacggtgtaaaacatgcaaatttccactataaaaggacaatgcagccaaggttacccaattactcacctaaaacaatagaatacttattatggggttttggtttttttttt

SEQ ID NO: 604051 - DNA, 403 bp, Homo sapiens
ctttatatttaccaacagatgaattttacatcatcagattaagataatagctctatactttaccctttaatgacttaagcaagattgagggtcaaaggaacttttttttttttttttttttttcaggcagcgctaacggcaggcaaaggggggaaatggtatgatggcctcaggatttggaagatacgccacgaaagcgacgtagggagggacaaggaggccaaggggatgaaggggaggagaagggtaaaggagaggcgggagagcagtggagaggggtgaaagtaaagatacgagagtatattaagagctccagagtcttgggttcagctctgtagtttctgtggctactgaagaggtggtcaggaacataggaaccccctgctgggctcctggtcacttc

SEQ ID NO: 604052 - DNA, 481 bp, Homo sapiens
atcagagttcccgacggcagtatagtcgagtctggaagttagaactcttagaattagaacacacaaacatcaagctgtcatacctacttatcctgaaccattactaccaaagggatgtagtttttaaatcaagcagatctgtggcaatgcaaaataaaatacaaatttgttagaacagtaaagtttgctttaatggctacagaaagaaggcggtaatattttcttttttaaacacatctagttctggcagcaagttatattatgcatttagagcaataggtgccctgaaagttattgttgctttttttgtttagttatattaacagtttgtgcgtatacattgattccaaaaccaaacacttttgacaaatatcatcctcaatgacccccattaattctctctccagaaggtgacaattttagtgaactcaagactctcactgataatggtatttaacaatgaaaccacatggaaaaccct

SEQ ID NO: 604053 - DNA, 1085 bp, Homo sapiens
  misc_feature (789)..(789): n is a, c, g, or t
agcgggcctgccaggcactcaggaggcgggggcgcagtggaggaggcggcgccatcgcgaagcggagcgcctcgtcccgcacgtacagccgttgctcagcccggcccgcagtctcaggctggacttgggcggcgatttgcgcagaggctccttcggccaggccccctgtccggaccggagccgtgcttgagaccccgggcagcggccagcgttgggaacgaggaggtggcaagcgggtccgggggaaggcctggaaggccaaggcgaggagaacccaaccgatggagacccgttacaacccttgaaagacgtccggctggtttaccagcgtttaagtcgacaacgacagcggctagactttgaccaggattccaaccaggaagtcatttacccagtgccgcagcccgttttagaagggaattaaccccttatttgttggcacatggtgcaacatttgcaccgtgcatatagcaacaggggccccccgaggaaatcttcccgaattcattacggatgcgccagcgaggttataatccaaaggggcgccggcgaattaggtcactcatggcccactccaagaagttattgcgccgatggaaaaagccatccaataagccagttcacaatttcctccccataatacgcgggcgtacaaatgggggtacaggaaattgtgtgagaacggtgtgaggcccaacggacaccaaattctgggatttgggcaggcccaattcatacaaagcgggccaaattcgaattcccccttggaaagacacgtgtgggggcganccacatgggccagttttcgcagggtggcgcaacgtttaactttcacacccggcggaacgcacgcgccaatttcacatttataagggccccagaattcccaattagtgacgggttttgataattttgccccagaaccgaagacaatacggggaacggcaacggggacgacaggccaagtcaacgagggtatatcccattcagtaagcgaatttttacacagcagttccccatttggaaggcgcaaccaacgggaagatgaaaggacgaccttatggctcaccaaagacacaaaacat

SEQ ID NO: 604054 - DNA, 813 bp, Homo sapiens
actggcctgggcaacacggggccacttcttgggagcttgggccacaatgggcttgaccggggagcgaaaggttccgtggaaccagattcgcccgcacgttatgtcccagccctggggccaacagtagccaagccaggagctccgtttcgaattaattaatagaaggctttccaggaccttttgatgcccccttgggaataatgggaactctctcccattggggaggagaggcgtcttttaagaaggaatagccctatttgagatccccgccgtagaccctttaggagttgaccctcgagcctgagaaggtaaggagagggtgtaggagaccccctgactctgagccttccaaccctgctcattcctctccacgggcagtcccgccccctctgatggccacatctggtgcccggtagtttctcgtaaagatctacactcacccttaccaccttgacatccccctagtaggtatttaccccagacacctggaagcatgtgtgtgaccccaagactcgttaatgagatgccactctatatgttatagcccaaatttagcgcaccatcccaatgttcatcagccggtgagtggtaaaaccagttgtgatatgttcattaccatagttgctactccagtaataacaaaggaatgagctcaccagataccagataaggaaacttggaggtgatatgttcataattttgtttgggtccaaggtttcagggatgtatacatgtgtccaaacatatccaaccgtattatttaaatacctgctgcttattgtatgtccattatatttccattaagctgttata

SEQ ID NO: 604055 - DNA, 365 bp, Homo sapiens
cctctatcatcactccccggagtccgcctcctgggttcaagtgattctcatgcctcggcctcctgaatagctgggactacagctgtgtgccaccatgcctggctaatttttgtacttttagtagagacagggtttctccatgttgcccaggctggtctcgaacgcctagactcaagcgatctgcccgcctcggcctgccaaggtgctggggttacaggcatgagccactgtgcctggccagcttttttacttcaggtgattttttacttcaggtaatatgtttttcacttctaccatttccacctgctgagaacgtctgtcttttcactcattcttggggtgtccactcttgccgcggggagtga

SEQ ID NO: 604056 - DNA, 884 bp, Homo sapiens
tctcgggctccatccaggacaagagggatccattcagaagttcgtgccctgacctcatagcaggcatccaacacggctgccaggatatcggggcccgcagcctgtctgtccttcggtccatgatgtgctcaggagagctcaagttggagaagcggaccatgtcggcccagattgtagggtggtgtccatggccgtgctagctcttacagtaaaagcggctgtacgtgaggacagctggtggaggccgaggtggtggaggggatgcaaccccgagtgtccgacttgtgggcacagcgcatccctccataactgagtggtccactagatttgcactacgggttctccagctccttgtccaggcagagaggaggggaggtcctgaggggactgatgcccctcactctggttatgcccatgctagagtcaggagctgctcccgggggcaggcgtgccctgggagcctcccctccgagcggcagacagcaggctctcaggccctgcgcttgctcaggtctttcttgctgcagctgtccagcctggccccacccagggcaggcggcctcctggttctcctgtagggcacctccctgccctagcctcccaggaaatggtgctctcctggcctgctctggccttcccgggcgtgcccctcagcatgtgggacttctgagttcctgacctaggccaaggggggggtctctgccccttcccggcctggctaccttgggtctgtctcaggcgtcccgtcctggcatggtagaaatgcctgtatggcgcgctgcatctgaatacacgtcctaggacatctcctctctagtgagaagtacttgacctggcagggtcggtaatcggaatccaaaaaacggttggggaaaaagcgactc

SEQ ID NO: 604057 - DNA, 476 bp, Homo sapiens
  misc_feature (395)..(395): n is a, c, g, or t
cccctggggcgggccccaggagactgaaagtgtgggggtggctgctgctgccgccgccgccgcggcgccgccgctgcgccgctgtaagctggcaggcctgggccgggcctgggcttgagcccgagcttgagcctgggctggagcttgagcctgggccagggcccactgctgccgcagccgcagcagcctgcacctgtcgctgaagatcaggcgggttgcgttcgcgcacatgtttcataaggtatgttcctgaagagcacgcccgactgcagatagcgcaggtgtacaccttggcatgcttcactgtgtgcgtagacaggtgcacctctagtgaggctgcatccgtgtacgcccgatgacagttgtggcacttgaagggtttatctttgttgtgntgccgtctgtgggactgcagattggagagttgtgtgaaggctttctcacagcctgggtgtgcacatttgtatggtctatca

SEQ ID NO: 604058 - DNA, 774 bp, Homo sapiens
  misc_feature (176)..(176): n is a, c, g, or t
  misc_feature (178)..(178): n is a, c, g, or t
  misc_feature (230)..(230): n is a, c, g, or t
caggccgtgggtgcggagggcggcgccgcgggccgggggccgatgggtcctggcggacgcgaggcgccggcgcggggctcgcctggactcgggtgtgcggggctgtgagggggcgaggcgggcgctgcggcccgcccgggatgggccagccctggcctggcggggctgagccgaangnagggcggcgcgcgggccaggcctgccgggcgggcggccgggggttgaggtanaagtgggcgcggaggaaggggccgagccaaggcggaaggggagcggcgaggggggcggaggctgggccgcgtggggcgaacggagcggcgcgcctgtccggagctcggcggtggcgccggagaaaggctgcagcggtggagagcgggcgggcccggacaagcgtcggagggtggggacagaggcgccggggggccccccaatggaaccgggtgtgtgggcgcccaagaaagatcctcgggcagcctccaacggagaaactcggaggggcaacgggagttgctcctaggtcgaaaccaagctgtgaaaaaaggagaaaccaaaaatggaaaaagcgattatccttatgaccagaatggacaatctaccggcagcaacggagggatgcaatttggggcgataccagcaaccaggcttttggaaggccggaaagaacgattcgcggatgcccttgaaagggcttgttgcacattgccttctgagagcaatgatccatgaactggacaccaagacatcatggatgcgtgcaaacataacataccacct

SEQ ID NO: 604059 - DNA, 349 bp, Homo sapiens
ggcctcaaaaggacagtatccgtaatggactggagtggcccagatctttttacagaagaaagaatacggtaatttggccacgcgcagtggctcatacctgtaatctcagcactttgggaggccgaggtgggcggctcatgaggtcaagggatcaagaccatcctggccaacatggtgaaaccccatctcgactaaaaaatatacaaaaattagctgggcatggtggcacacgcctgtagtcccagctattcaggaggctgaggcaggagaattgcttgaacttgggaggcagaggttgcagtgagtggagatgatgctgttgttgcactccatcctgggcaacaagagg

SEQ ID NO: 604060 - DNA, 378 bp, Homo sapiens
gcctactttgctcttccaggacttacccaagaaggtctttttagggtgaatggtaacgtgaaggtggtggaacaacttcgactgaagttcgagagtggagtgcccgtggagctcgggaaggacggtgatgtctctcagcagccagtctgttgaagctgtttctgagggagctgcctgacagtctgatcacctcagcgttgcagcctcgattcattcaactctttcagggttagtacaataaatccttttaggagttaaaacaactttactaggctgcacgtggcccacacctatacccaacactttgggagctgggtagaaagattcttaaccggagttgaaaccccgtgggcaaccaagcaagacccccatctctac

SEQ ID NO: 604061 - DNA, 276 bp, Homo sapiens
caggctgctcgtggaggctgaggggggagaatcgcttgaacccgggaggcggaggttgcagtgagctgagatcgtgccaccgcactcccccagcctgggcaacagtgtgaaactctgtctcaaaaaaaaaaaaaaaaaattccagtatttggttaaagtttccatagggcttccgggaattctagttctcctttaggagggatgcctttggatctcatatttttggtttaaagaattgattgtgtggcaagagttctggttggacaaggggaaaca

SEQ ID NO: 604062 - DNA, 476 bp, Homo sapiens
agcggctttagtgatgtaagcccggatggttacttgcgcatatgatttgatagaatggttacgctcaaatacgcgccgcctacatacactagcatctggttgtgcttggacagtagatcctgatagctcgcactcggcaagagttgacagcatggcgagtgggcatatgaagagagatctgccaagagatcaacagataactcatcttttgtgaacagtgtatacacgtacgatcagctaatgcccacaaaggatacgtcttgtcagatatccaccgttggacaaaactgtcgtcaaataatgtgaatgtcttcatgagatcctgctcttaaaccgcaaggcccgacgggaggccaatgtcaagtttgaagagagatacaatgacaggcaacgaacaagtggttctatccagaaactgcggttttagcatgctttgtctgtgactcattaacaacattataacggaacacaacaca

SEQ ID NO: 604063 - DNA, 326 bp, Homo sapiens
tctcccctgttggttctttcctatgtgaacccaaaagtatctaagacagagctcaatcaacttagaaagtttattttgccaaagttaaggatacagcgttaacatacagcctcaggcggtcctgaggacatgcacccaaggtggtcggggtacaggtttttattatttttgtttgtttgtttgttttttgagacagggtctcactctgtcacccaggctggagtgcagtggtgcgatctcgactcactgcagcctctgcctcccgggttcaagcagttctcctgcctcagcctcccaagtagctggaattacgggtgtgctttcac

SEQ ID NO: 604064 - DNA, 179 bp, Homo sapiens
tagcgccacaatgtcatagtgccacaaggcatagcgcacacaaggacatagcgccaccaaggccatagcgcgcacaaggcaggtggcgccaccaaggccatagcgccagcaaggccatatctgcccacaagagacatatcgcacacaaaagacatagagcccaccaaggccatagacga

SEQ ID NO: 604065 - DNA, 581 bp, Homo sapiens
cgatcatggccatcattgatctctgtggcttacaaatcattgtataatggaagtagtgggtgttatacacaaagtcttgctctgtcacacaggctagagcgcagtcgtgtgatcgctactcattgcaacctccacctagcaggttctaccaattccactgcctcagcttctcgagtagctgggattacaggcacgcgccgccacacacagttaattgttgtagttttagtatagagtaggtttcaccattttggtcagactggtctgcaactcctgacctcgagtgatctgtccacatcggtctcccaaattgctgggattacaggcgtgagccaccggacccagctcagactgttaacagagttttaatagcctcaaacatggttctataggatcccagacaatacatatcagattttaaccattatgttatctacatgttctctgtgactcaagtttgacattagcatttgcaccccaaatgagttcccctacatatataatttgttcatgttgacacaaagaacacaaagcgagtatagatcccgcagtaagttgtcacaactcttaataagattaac

SEQ ID NO: 604066 - DNA, 313 bp, Homo sapiens
ggttttttcccagcagatcgggggaccggatgttggcattttgggattcaggtccacaaaggttcaggcctggccccagctggccctttaggttgtttggtgttttgggcccgggggtgcccgtgtttttgccggcactcagggagttgttttcccttgggactccatgcaactttccgtttcggattccagggcagggcaaggcgggttgtttccgtccaaccaattttctcacttgttttgtgttctgtcatccttgttttttttttaaaaatacactcccctccccccccgccacacccctttcagttca

SEQ ID NO: 604067 - DNA, 629 bp, Homo sapiens
tcatgtccatgcctacagataagtgtattgttctccaacgggacttctctgaagtcatgggcgcccgtgactgggaggaagctgtgaagatgcctgtgggcatgcatccccgtgcgcgctctgggcaacgtcgctggcctgtgatgcatgtgaacacagctatctgggggatttgagccagccctgtggcctcgacctgttgctcaacttgctcactgttgctgtgccggggatggtggccacctcactggacctgctctccgtgacgctggcctctggtgctcccgctgtttctccttcctgtctgtggcctggtggcttcgtgtcagatgtggatatccagagcgagcgcttcagggccttgggcagtgcccgcattcacacttgggacacggttgctgggcctcgccacactgcaacacctaccgcggacgggccctctcccttaccatccccacgcaacatgtgtgaaacctgtgcccattctgtcccaagcacatggccacatgagcgcaggcccttcgttgccaaagtacccggcagctggccccataaaccccaaagacaccacgccacaccgaccacacgggaccacacgtccacaccacctatgcaatcgcaacaagtag

SEQ ID NO: 604068 - DNA, 794 bp, Homo sapiens
gctaaacctagccccaaacccactccgacttactaccagacaaccttagccaaaccatttacccgaaatcaagtataggcgatagaacattgaaacctggcgcaatagatcatagtaccgcaagggaaagcatgcaaaaattatagccaagcataatatagcaaggcactaacccctataccttctgcatcaatgacattaactagaaatcaactttgcaaggagagccaaagctaagaccccctgaaagccagacagagctcacctcaagaacagctaaccagagcacaccctgtctatgtagcaaaatagtgcggaagatttataggtagaggctgacaacactaccgagcctggtgatagctggtttgtccacagatcagcaatcttcagttcaactttcaaatttgcccacagaaccctctaaatccccttgtcaatttaactgttagtccaaagaggaacagctcttctggacactaggaaaaaagcttgtcgagagagtaaaacattaacacccatagtaggcctaaaagcagccaccaattacgaaagcgttcaagcttcaacaaccactacctacaaaatcccaaacatatactgaactcctcacaccaatttggaccaatctatcacctatagaatgaactaactgttagtcttaagttacattggaacacattctcctccgcataaagcttggtacaattcaaacactgacatgggcaatacacagccaatatctacaatcaacaacaagtcattattacctcactggcaaccaaaacaggctg

SEQ ID NO: 604069 - DNA, 628 bp, Homo sapiens
ttatggccgggtgggtggagaaattaatttagacgttggtttgcaataaaaagaattcattttaaaaaaaaaaaaaaaaaaaaaaaaaaaaaaaaaaaaaaaaaaaaaaaaaaaaaaaaaaaccataaaaaccacctagccccaaccaactttaaactcaaccaacctaatccatcgcgcccgcatttcaaccaaattggcccaattcccccaaaagggacccgattaccaatcaacggcccgccgtttaacaacgccggcactggaaaaccccgggcgtacccaacttaaaccgcttggaagcaaatccccttttccccagctgccgcaaaaccaaaaagccccgacccaaccgcctttcccaaaattggcccaccctaaaggccaaaggaaaatggaaaccgcaaatatttggtaaaaatccgcgtcaaattttggaaaacacacccaatttttaaccccaaagccccaaatgggaaaaaccccttaaaatccaagaaatcccccgaaataggcttgaccgtcgccccactccgccccagcgccccccttctcaaacccgcgccctcaaccgtcaaacgggtaaacaaccgcttaaacaggcgccctacagccaccctaatccacc

SEQ ID NO: 604070 - DNA, 491 bp, Homo sapiens
gtatgttttaacaacaagaagagagttagacccacagagacaaccctcactcgcgcgggggtttgtttttattcttgttgttttttttttcacaacagaaccactcgtaccgcagcacagagtgaatcacaaactgcgagagacggagtggtagcaccccccaccgtcgaggagcagaccccccctccgatctagctcactcctcccgcacgctgtcactactcactctacactcgctcagctgtccacactctcttgctgtgctgcccccgcgcgtgacggggagagcgcgtgtctatgagtgtgtctctctctcctcccaactgctcccggttttttctcgtgatattgttggctacccttcttcttccctccccctttttctttgtttctccttggcggtgttattttttttcccccccccgggtggggttttttttcccccccccccttgcctgttttttttttaaaaaaaattttttgggggggga

SEQ ID NO: 604071 - DNA, 414 bp, Homo sapiens
ccgaggcccagaggtcgcgcgacacaggcagctatgacctagctgctagcctctaccgctggcagcgcagggagtaggctgtgctgcagcggcggacacactaccactatggcggaggagcaacatcccggcgacatgcctacactgagcactaacctagggcggtataccgctcggagtccgagcctcatggagccatggtggggccgacacagggggcagcgcctgcagctggaagcggagcccataccgactgcggaaccgaccttgcaggcaccgaaaggcgcagagcccagtcggcaggggcaaatagtgacgccagtatgaacgatgcggatgaaagccattcatcggcccaggacactctgcatcagctacggcacacagggatgtgcagacagtttataggcgccc

SEQ ID NO: 604072 - DNA, 452 bp, Homo sapiens
tatctgaacttagggtcgccacatcataggatcctgcttactcacgcttgtcatacgggtctctctggcagtaatgaactttaacactctcatgggcatctcccacccacctgagcacaggctagcgtgcttacattttttacttattgagacagggtctctctagtcgcccaggtctggcaatgcagtaggtgcaggtcatggactcagctgctagcctcaagcctcccagtgctcaaagtgattcctcccacactcagtcctcccgtagcagctggagactataggcacacagcaccatgcctgactaatttctgtatatttagtgaacatgggttttaccatgttggccaggctggtctcaatttcctgagctcagatgatccgcctgcttcggtctcccaaagtgctgggattacaggcgtgagccaccgcgcctggtgagccctctt

SEQ ID NO: 604073 - DNA, 563 bp, Homo sapiens
  misc_feature (38)..(38): n is a, c, g, or t
  misc_feature (56)..(56): n is a, c, g, or t
acccggcctgtccgctgctactgggtaagggccccagncctggagactggagaagnagaaaatcagttcgtggttgcattgtggatgcaaatctgagcgttctcaacttggttattgtaaaaaaaggagagaaggatattcctggactgactgatactacagtgcctcgccgcctgggccccaaaagagctagcagaatccgcaaacttttcaatctctctaaagaagatgatgtccgccagtatgttgtaagaaagcccttaaattaaagaaggtaagaaacctaggaccaaagcacccaagattcagcgtcttgttactccacgtgtcctgcagcacaaacggcggggtattgctctgaagaagcagcgtaccaagaaaaataaagaagaggctgcagaatatgctaaacttttggccaagagaatgaaggaggctaaggagaagcgccaggaacaaattgcgaagagacgcagactttcctctctgcgagcttctacttctaagtctgaatccagtcagaaataagattttttgagtaacaaataaataagatcagactc

SEQ ID NO: 604074 - DNA, 407 bp, Homo sapiens
agaattgctggcgttttttgctgcacactggatggcttctgccacaagtgtctcagcagatcatatcttgctgtccagacctgcctgcttggcgtcgtggagtgagatccggtcaccggtgaggaccatctccatcgccagagtcttctcacaagcacgggtgagtctgtgggtgccgccagcacctggtatggttcctattaagatctgcggctgtgcgaactgggcgttctcatcggcatagatgatatcacacgtcatggctagctcagagccaccgccaaaggcatagccattgacagcagcgatgagtggcttcttgacctgggtgaggtggtcccagtgcttcaagaccgtgctggagtatcagtcctgcaaactcaggttctgcatttcgttgacatcag

SEQ ID NO: 604075 - DNA, 866 bp, Homo sapiens
ggggctatgtgacctgcgctaagcggaagctggcgctcttttccgtggcgcctcggaggcgttcagctgcttcaagatgaagctgaacatctccttcccagccactggctgccagaaactcattgaagtggacgatgaacgcaaacttcgtactttctatgagaagcgtatggccacagaagttgctgctgacgctctgggtgaagaatggaagggttatgtggtccgaatcagtggtgggaacgacaaacaaggtttccccatgaagcagggtgtcttgacccatggccgtgtccgcctgctactgagtaaggggcattcctgttacagaccaaggagaactggagaaagaaagagaaaatcagttcgtggttgcattgtggatgcaaatctgagcgttctcaacttggttattgtaaaaaaaggagagaaggatattcctggactgactgatactacagtgcctcgccgcctgggccccaaaagagctagcagaatccgcaaacttttcaatctctctaaagaagatgatgtccgccagtatgttgtaagaaagcccttaaattaaagaaggtaagaaacctaggaccaaagcacccaagattcagcgtcttgttactccacgtgtcctgcagcacaaacggcggggtattgctctgaagaagcagcgtaccaagaaaaataaagaagaggctgcagaatatgcttaacttttggcccagagaatgaaggagggtaaggagaagcgcccggaaccaattgcgaagagacgcagactttcctctttgcgaggttttacttttaagtttggatcccggcagaaataagattttttggggaaccaataaataaggtccggctttgga

SEQ ID NO: 604076 - DNA, 923 bp, Homo sapiens
tatgaggccaccatcattctgacaccaaaatctggcagaaatacaacaacaaaaaagaacagttcaggccaatatccctgaagaacactgatgcaaaaatcctcattaaaacactggcaaacagaatctagcacccatcaaaaagcttatccaacaacatcaaattggattcatcccaagggattcaaagttggttcaacatatgcaaatcagtatatgtaattcaacacattaattgaatgtaagacaaaaaccacattattatctcaatagatgcagaaaagacttttgatacaattcaatatcccttcatgctaaaaattctcaataaactagatatcgaaggaatgtacctcaaaataagattcatatatgataaacccatagctagtatcacactgaatgggcaaaagctggaaatattccctttgaaaaccagcacaagacaaggatgccctctgtcacccctcttttttaacataatatgggaggttctggccaggacaatcactcaagagaaagaaataaagggtattccaataggaagagcaggaaatcatttccctggcggttgcatttcgccggtggcaaatcctatatctagaaaaaccccaaggtttctcatgctcaaaggttcttaaggcgataagcaacttcacaaaaatcttcaggctccaaaactacatgtgcccaaatgctcgcctttcttatatacccacattaaggcaagcagttaagccccatattgattgaggccccttccaattcctaagagaataatactttcggagaaacctacacggagaaaggagaactccagggaaaaaaagcctcgtcggaggctaaggcgccaccgggagaaaacggcccatgaggagagacacgaaaggatctccacaaaaaataacaggttggttgcaaca

SEQ ID NO: 604077 - DNA, 898 bp, Homo sapiens
ggggctatgtgacctgcgctaagcggaagctggcgctcttttccgtggcgcctcggaggcgttcagctgcttcaagatgaagctgaacatctccttcccagccactggctgccagaaactcattgaagtggacgatgaacgcaaacttcgtactttctatgagaagcgtatggccacagaagttgctgctgacgctctgggtgaagaatggaagggttatgtggtccgaatcagtggtgggaacgacaaacaaggtttccccatgaagcagggtgtcttgacccatggccgtgtccgcctgctactgagtaaggggcattcctgttacagaccaaggagaactggagaaagaaagagaaaatcagttcgtggttgcattgtggatgcaaatctgagcgttctcaacttggttattgtaaaaaaaggagagaaggatattcctggactgactgatactacagtgcctcgccgcctgggccccaaaagagctagcagaatccgcaaacttttcaatctctctaaagaagatgatgtccgccagtatgttgtaagaaagcccttaaattaaagaaggtaagaaacctaggaccaaagcacccaagattcagcgtcttgttactccacgtgtcctgcagcacaaacggcggggtattgctctgaagaagcagcgtaccaagaaaaataaagaagaggctgcagaatatgcttaacttttggcccagagaatgaaggagggtaaggagaagcgcccggaaccaattgcgaagagacgcagactttcctctttgcgaggttttacttttaagtttggatcccggcagaaataagattttttggggaaccaataaataaggtccggctttggataaaagtcttatcctggcgggctgctgggccc

SEQ ID NO: 604078 - DNA, 388 bp, Homo sapiens
  misc_feature (210)..(210): n is a, c, g, or t
  misc_feature (299)..(299): n is a, c, g, or t
gaaaccaatgattgtgaaatacagttctatcaaaatttttaaaaacaacgtttgtaatttggcaacacacatgcttctttattaaggcattaattagggagttctcgcagtgggtctaagcactatcataatgttgaagcagtggtgagcataaattatgctattttgagagatctgcaacagtggtaatgtgataggaggaaagtatcntgtgattaaattggtgacagtcacaggttttgctaatactaatgtggtcttgttgacaacatgcataactggaaggaaaatgtcaaacngtcagcttgagaacaagaaaagctgtcgtttttttcttgggctatctcagttctttgggctccttgcagggtcttccactgacctcagg

SEQ ID NO: 604079 - DNA, 862 bp, Homo sapiens
ggggctatgtgacctgcgctaagcggaagctggcgctcttttccgtggcgcctcggaggcgttcagctgcttcaagatgaagctgaacatctccttcccagccactggctgccagaaactcattgaagtggacgatgaacgcaaacttcgtactttctatgagaagcgtatggccacagaagttgctgctgacgctctgggtgaagaatggaagggttatgtggtccgaatcagtggtgggaacgacaaacaaggtttccccatgaagcagggtgtcttgacccatggccgtgtccgcctgctactgagtaaggggcattcctgttacagaccaaggagaactggagaaagaaagagaaaatcagttcgtggttgcattgtggatgcaaatctgagcgttctcaacttggttattgtaaaaaaaggagagaaggatattcctggactgactgatactacagtgcctcgccgcctgggccccaaaagagctagcagaatccgcaaacttttcaatctctctaaagaagatgatgtccgccagtatgttgtaagaaagcccttaaattaaagaaggtaagaaacctaggaccaaagcacccaagattcagcgtcttgttactccacgtgtcctgcagcacaaacggcggggtattgctctgaagaagcagcgtaccaagaaaaataaagaagaggctgcagaatatgctaaacttttggccaagagaatgaaggaggctaaggagaagcgccaggaacaaattgcgaagagacgcagactttcctctctgcgagcttctacttctaagtctgaatccagtcagaaataagattttttgagtaacaaataaataagatcagactc

SEQ ID NO: 604080 - DNA, 219 bp, Homo sapiens
  misc_feature (16)..(16): n is a, c, g, or t
  misc_feature (24)..(24): n is a, c, g, or t
  misc_feature (26)..(26): n is a, c, g, or t
  misc_feature (67)..(67): n is a, c, g, or t
  misc_feature (181)..(181): n is a, c, g, or t
  misc_feature (184)..(184): n is a, c, g, or t
  misc_feature (195)..(195): n is a, c, g, or t
aaggtaagtcagaagnggaggagnangcgcgaaggcggttgggtcatccgagatcattaaaaagggntgaccgtaacaataggtacgagaatagtaaaatgtgaataagaagatacaaacaaatttccttttgaaggtacttttaagaaaaaaagcaggggcttggaagtttgggttcttnttncctcccctgtngcaaattctcatggtttgggttgg

SEQ ID NO: 604081 - DNA, 1067 bp, Homo sapiens
ggggctatgtgacctgcgctaagcggaagctggcgctcttttccgtggcgcctcggaggcgttcagctgcttcaagatgaagctgaacatctccttcccagccactggctgccagaaactcattgaagtggacgatgaacgcaaacttcgtactttctatgagaagcgtatggccacagaagttgctgctgacgctctgggtgaagaatggaagggttatgtggtccgaatcagtggtgggaacgacaaacaaggtttccccatgaagcagggtgtcttgacccatggccgtgtccgcctgctactgagtaaggggcattcctgttacagaccaaggagaactggagaaagaaagagaaaatcagttcgtggttgcattgtggatgcaaatctgagcgttctcaacttggttattgtaaaaaaaggagagaaggatattcctggactgactgatactacagtgcctcgccgcctgggccccaaaagagctagcagaatccgcaaacttttcaatctctctaaagaagatgatgtccgccagtatgttgtaagaaagcccttaaattaaagaaggtaagaaacctaggaccaaagcacccaagattcagcgtcttgttactccacgtgtcctgcagcacaaacggcggggtattgctctgaagaagcagcgtaccaagaaaaataaagaagaggctgcagaatatgctaaacttttggccaagagaatgaaggaggctaaggagaagcgccaggaacaaattgcgaagagacgcagactttcctctctgcgagcttctacttctaagtctgaatccagtcagaaataagattttttgagtaacaaataaataagatcagactctggaagcaaaacgaagacccgcaaccaaagagaaaacccgccgggggcacattgcggggcggggacacaacaggcctcaagcggcccggtccagcgtccggccccctttcttgcacaggggaacgcgggccccagggcgtaaccgacccggcacgagcgccaacgcgccacccccaacgcggggactgcacccgcgcgccacccc

SEQ ID NO: 604082 - DNA, 113 bp, Homo sapiens
ttgcagctctctctactgttggcagtactcatgctgcacttgcagacagccatgttcaggctgatattccatagccactgtctggtgccctgcgctttcgatcactcagaatt

SEQ ID NO: 604083 - DNA, 985 bp, Homo sapiens
  misc_feature (802)..(802): n is a, c, g, or t
gcagcccagtggctatggattctattttctatgggactgtctacgccaggcttaattttctctttgctcagataacttctgactaagagtcgacgggtaggcattatacaatgggtttaaaataacgtattctcaagaccttcatttttcagccatataaatttgtaaggaatcaggtgtttaacaggtacgtgaaaccatttggctagatattgggtccttagtttttttatttattaagtttaacaaatcttaaagtttttagatagaggataaggctaaaggattgtcacagagagtataaaatattggcgagacaagctattttgaacaaacaatgtgggaatagcaattgtttaacttggaatgtgtaaaatacacaaattggatggtcttgggtgtaaactctttggggaaaggcatattagacaaagacgtctaagcagcattcttaaaagtgttgtgtggtggacaaatttgttataatattgtcgagagacgagctttgggtgtggggagagaggttaaaaacatgtgggttgcgtgacactttgtgaccatatacgggggctcaaaaatgagggtgtagacaaactacggttaacagacgaagaaaacggctcccaaagggcagagacggcgcacaaagcactgggaggtccgtacaacagaggtgtgggccaagccgtcccccgaggacacaataacggggcggggaacataagagaggggaaccccagcagattcttgggggacgacataacgttcatgacccaagcctgttctctaaccccgcctaatnagaaactttccatatgatgagtgccccgcgtgagacgatacgcctttttaaagaggctcaccttttaaagactccccctgttgtgggggtcgtttgacacacgcacagtgtgtatatcaccaacttcttgtggcaacggcgggacaaggtgattagaaatagttggaggtggtaatagttcta

SEQ ID NO: 604084 - DNA, 1022 bp, Homo sapiens
ggggctatgtgacctgcgctaagcggaagctggcgctcttttccgtggcgcctcggaggcgttcagctgcttcaagatgaagctgaacatctccttcccagccactggctgccagaaactcattgaagtggacgatgaacgcaaacttcgtactttctatgagaagcgtatggccacagaagttgctgctgacgctctgggtgaagaatggaagggttatgtggtccgaatcagtggtgggaacgacaaacaaggtttccccatgaagcagggtgtcttgacccatggccgtgtccgcctgctactgagtaaggggcattcctgttacagaccaaggagaactggagaaagaaagagaaaatcagttcgtggttgcattgtggatgcaaatctgagcgttctcaacttggttattgtaaaaaaaggagagaaggatattcctggactgactgatactacagtgcctcgccgcctgggccccaaaagagctagcagaactggagaaagaaagagaaaatcagttcgtggttgcattgtggatgcaaatctgagcgttctcaacttggttattgtaaaaaaaggagagaaggatattcctggactgactgatactacagtgcctcgccgcctgggccccaaaagagctagcagaatccgcaaacttttcaatctctctaaagaagatgatgtccgccagtatgttgtaagaaagcccttaaattaaagaaggtaagaaacctaggaccaaagcacccaagattcagcgtcttgttactccacgtgtcctgcagcacaaacggcggggtattgctctgaagaagcagcgtaccaagaaaaataaagaagaggctgcagaatatgcttaacttttggcccagagaatgaaggagggtaaggagaagcgcccggaaccaattgcgaagagacgcagactttcctctttgcgaggttttacttttaagtttggatcccggcagaaataagattttttggggaaccaataaataaggtccggctttgga

SEQ ID NO: 604085 - DNA, 863 bp, Homo sapiens
ggggctatgtgacctgcgctaagcggaagctggcgctcttttccgtggcgcctcggaggcgttcagctgcttcaagatgaagctgaacatctccttcccagccactggctgccagaaactcattgaagtggacgatgaacgcaaacttcgtactttctatgagaagcgtatggccacagaagttgctgctgacgctctgggtgaagaatggaagggttatgtggtccgaatcagtggtgggaacgacaaacaaggtttccccatgaagcagggtgtcttgacccatggccgtgtccgcctgctactgagtaaggggcattcctgttacagaccaaggagaactggagaaagaaagagaaaaatcagttcgtggttgcattgtggatgcaaatctgagcgttctcaacttggttattgtaaaaaaaggagagaaggatattcctggactgactgatactacagtgcctcgccgcctgggccccaaaagagctagcagaatccgcaaacttttcaatctctctaaagaagatgatgtccgccagtatgttgtaagaaagcccttaaattaaagaaggtaagaaacctaggaccaaagcacccaagattcagcgtcttgttactccacgtgtcctgcagcacaaacggcggggtattgctctgaagaagcagcgtaccaagaaaaataaagaagaggctgcagaatatgctaaacttttggccaagagaatgaaggaggctaaggagaagcgccaggaacaaattgcgaagagacgcagactttcctctctgcgagcttctacttctaagtctgaatccagtcagaaataagattttttgagtaacaaataaataagatcagactc

SEQ ID NO: 604086 - DNA, 1022 bp, Homo sapiens
  misc_feature (762)..(762): n is a, c, g, or t
  misc_feature (768)..(768): n is a, c, g, or t
  misc_feature (772)..(772): n is a, c, g, or t
  misc_feature (823)..(823): n is a, c, g, or t
  misc_feature (828)..(828): n is a, c, g, or t
ggggctatgtgacctgcgctaagcggaagctggcgctcttttccgtggcgcctcggaggcgttcagctgcttcaagatgaagctgaacatctccttcccagccactggctgccagaaactcattgaagtggacgatgaacgcaaacttcgtactttctatgagaagcgtatggccacagaagttgctgctgacgctctgggtgaagaatggaagggttatgtggtccgaatcagtggtgggaacgacaaacaaggtttccccatgaagcagggtgtcttgacccatggccgtgtccgcctgctactgagtaaggggcattcctgttacagaccaaggagaactggagaaagaaagagaaaatcagttcgtggttgcattgtggatgcaaatctgagcgttctcaacttggttattgtaaaaaaaggagagaaggatattcctggactgactgatactacagtgcctcgccgcctgggccccaaaagagctagcagaactggagaaagaaagagaaaatcagttcgtggttgcattgtggatgcaaatctgagcgttctcaacttggttattgtaaaaaaaggagagaaggatattcctggactgactgatactacagtgcctcgccgcctgggccccaaaagagctagcagaatccgcaaacttttcaatctctctaaagaagatgatgtccgccagtatgttgtaagaaagcccttaaattaaagaaggtaagaaacctagggcccaagccccccaaattnagggtnttgnttctccccgggtcctgcagccccaacggggggggtttgcttttaaaaaacnggggncccagaaaaataaagaagaggctgcagaatatgcttaacttttggcccagagaatgaaggagggtaaggagaagcgcccggaaccaattgcgaagagacgcagactttcctctttgcgaggttttacttttaagtttggatcccggcagaaataagattttttggggaaccaataaataaggtccggctttgga

SEQ ID NO: 604087 - DNA, 912 bp, Homo sapiens
  misc_feature (336)..(336): n is a, c, g, or t
ggggctatgtgacctgcgctaagcggaagctggcgctcttttccgtggcgcctcggaggcgttcagctgcttcaagatgaagctgaacatctccttcccagccactggctgccagaaactcattgaagtggacgatgaacgcaaacttcgtactttctatgagaagcgtatggccacagaagttgctgctgacgctctgggtgaagaatggaagggttatgtggtccgaatcagtggtgggaacgacaaacaaggtttccccatgaagcagggtgtcttgacccatggccgtgtcccttactcagtagcaggcggacacgccatggtcaagacacnttaactgcctgctactgagtaaggggcattcctgttacagaccaaggagaactggagaaagaaagagaaaatcagttcgtggttgcattgtggatgcaaatctgagcgttctcaacttggttattgtaaaaaaaggagagaaggatattcctggactgactgatactacagtgcctcgccgcctgggccccaaaagagctagcagaatccgcaaacttttcaatctctctaaagaagatgatgtccgccagtatgttgtaagaaagcccttaaattaaagaaggtaagaaacctaggaccaaagcacccaagattcagcgtcttgttactccacgtgtcctgcagcacaaacggcggggtattgctctgaagaagcagcgtaccaagaaaaataaagaagaggctgcagaatatgcttaacttttggcccagagaatgaaggagggtaaggagaagcgcccggaaccaattgcgaagagacgcagactttcctctttgcgaggttttacttttaagtttggatcccggcagaaataagattttttggggaaccaataaataaggtccggctttgga

SEQ ID NO: 604088 - DNA, 143 bp, Homo sapiens
atggtggtgcacacctgcagttctagcaattcaataggctgaggtgggaggatcacctgagtctatgaggttcaggctgtagtgaactatgagcatgccactgcacttcatggtgggcatacagagccagaccttttctcata

SEQ ID NO: 604089 - DNA, 867 bp, Homo sapiens
  misc_feature (607)..(607): n is a, c, g, or t
  misc_feature (613)..(613): n is a, c, g, or t
  misc_feature (617)..(617): n is a, c, g, or t
  misc_feature (668)..(668): n is a, c, g, or t
  misc_feature (673)..(673): n is a, c, g, or t
ggggctatgtgacctgcgctaagcggaagctggcgctcttttccgtggcgcctcggaggcgttcagctgcttcaagatgaagctgaacatctccttcccagccactggctgccagaaactcattgaagtggacgatgaacgcaaacttcgtactttctatgagaagcgtatggccacagaagttgctgctgacgctctgggtgaagaatggaagggttatgtggtccgaatcagtggtgggaacgacaaacaaggtttccccatgaagcagggtgtcttgacccatggccgtgtccgcctgctactgagtaaggggcattcctgttacagaccaaggagaactggagaaagaaagagaaaaatcagttcgtggttgcattgtggatgcaaatctgagcgttctcaacttggttattgtaaaaaaaggagagaaggatattcctggactgactgatactacagtgcctcgccgcctgggccccaaaagagctagcagaatccgcaaacttttcaatctctctaaagaagatgatgtccgccagtatgttgtaagaaagcccttaaattaaagaaggtaagaaacctagggcccaagccccccaaattnagggtnttgnttctccccgggtcctgcagccccaacggggggggtttgcttttaaaaaacnggggncccagaaaaataaagaagaggctgcagaatatgcttaacttttggcccagagaatgaaggagggtaaggagaagcgcccggaaccaattgcgaagagacgcagactttcctctttgcgaggttttacttttaagtttggatcccggcagaaataagattttttggggaaccaataaataaggtccggctttgga

SEQ ID NO: 604090 - DNA, 804 bp, Homo sapiens
cagatcacagccccttggcccgaaacagtgaggaacgtctccagcaaggcctgcaggccccacggaggagtcaccccccagtagcgcctctagcgtacccccagaaccacctagctgggcacgagagcacagacaaacgcaccgacgccagaaccagaaaaaacagacaagacgagaagaaaagagagaaagcacactacacaccacatcgacaagcgaaacacaagaaagcaaacaagaggacagcgcacccacaccccagaccgcacgagaggaacacacggagggaagacagcgcaagcgacccaccagcacagaggagagacgagagagaagaccgcgcagggcaggggacaacacaccgacgccagaacggagggacgagaagagcgcagcgacaaaaagcagaagcagctagcacgacgaaccgcgcgagagcactacccacccacgaacgcgaccgagaggagaccgccccgccagcaacacggagggagagaccagcaacagacccgcccccacgccccccgggaggagaaacagcacaaagcgacaacaagagagcacgcacaggacgcgacgcgacgaccgaaacacaacacaccaccacacaacaggagcagacaagaagagaggaggaagacggacaccacccacggagagaaagcgcagacacaagaggcgggacggaacacccccgcccaaccacgcagacacaaaacgagaaagcgaacgcacgagaagcagaacaaacacggaacatgagaaccacccccccacggagcgacgagcaaaaggacacac

SEQ ID NO: 604091 - DNA, 195 bp, Homo sapiens
  misc_feature (44)..(44): n is a, c, g, or t
  misc_feature (47)..(47): n is a, c, g, or t
  misc_feature (66)..(66): n is a, c, g, or t
  misc_feature (71)..(71): n is a, c, g, or t
ccagccttgggaactttaaattccttttgcgagaggcggagaantcnttccccaaatcttttgggnacttntctctctttacccacctccgcccctgcgaggagttgagggccagttcggccccgcgcgcgtcttcccgttcggcgtgtgcttggccggggaaacgggagggcccggcgatcgcgcggcggtcgc

SEQ ID NO: 604092 - DNA, 765 bp, Homo sapiens
  misc_feature (416)..(416): n is a, c, g, or t
  misc_feature (423)..(423): n is a, c, g, or t
  misc_feature (434)..(434): n is a, c, g, or t
  misc_feature (445)..(445): n is a, c, g, or t
  misc_feature (448)..(448): n is a, c, g, or t
  misc_feature (457)..(457): n is a, c, g, or t
  misc_feature (459)..(459): n is a, c, g, or t
  misc_feature (464)..(464): n is a, c, g, or t
  misc_feature (470)..(470): n is a, c, g, or t
  misc_feature (472)..(472): n is a, c, g, or t
  misc_feature (476)..(477): n is a, c, g, or t
  misc_feature (487)..(488): n is a, c, g, or t
  misc_feature (491)..(492): n is a, c, g, or t
  misc_feature (498)..(498): n is a, c, g, or t
  misc_feature (512)..(512): n is a, c, g, or t
  misc_feature (519)..(519): n is a, c, g, or t
  misc_feature (521)..(521): n is a, c, g, or t
  misc_feature (527)..(527): n is a, c, g, or t
  misc_feature (531)..(532): n is a, c, g, or t
  misc_feature (535)..(535): n is a, c, g, or t
  misc_feature (564)..(564): n is a, c, g, or t
ccacgccctgcccccccccgccacgccttagccccccgacaccagcccggcatacggcagcgcccaggagcggtggcccggcgccctcacatcgcggcgcctcccggcggggacaaagacaggtcatcgccacgaaggttttgggaaccagtaaaatggttcacatgtaaggaacggatatggtttcatccaccggagatgacaccccaggagagatgtatttgtacacccagactgcccataaagaagattacccccggaagtacccttcgccagtgtaggagatggagagactgtggagtttgatgttgttgaaggagaaaagggtgcggaggccagccaaatgttaccaggtcctggtggtgttcccagttcaaggccagtaaatatgccagccagacccgttacccttatanacgctanccacgtcgtangggtcctccangcnattaccagnanattanccagantngtgnnagtggggaannganngagggntcggagagtgctcncgaaggncnggcccnacanngcnggccctaccgcaggcgagggttcccaccnttactacatgcggagaccctatgggcgtcgaccacagtattccaaccctcctgtgcagggagaagtgatggagggtgctgacaaccagggtgcaggagaacaaggtagaccagtgaggcagaatatgtatcggggatatagaccacgattccgcaggggccctcctcgccaaagacagcctagagaggacggcaatgaaga

SEQ ID NO: 604093 - DNA, 541 bp, Homo sapiens
  misc_feature (192)..(192): n is a, c, g, or t
  misc_feature (199)..(199): n is a, c, g, or t
  misc_feature (210)..(210): n is a, c, g, or t
  misc_feature (221)..(221): n is a, c, g, or t
  misc_feature (224)..(224): n is a, c, g, or t
  misc_feature (233)..(233): n is a, c, g, or t
  misc_feature (235)..(235): n is a, c, g, or t
  misc_feature (240)..(240): n is a, c, g, or t
  misc_feature (246)..(246): n is a, c, g, or t
  misc_feature (248)..(248): n is a, c, g, or t
  misc_feature (252)..(253): n is a, c, g, or t
  misc_feature (263)..(264): n is a, c, g, or t
  misc_feature (267)..(268): n is a, c, g, or t
  misc_feature (274)..(274): n is a, c, g, or t
  misc_feature (288)..(288): n is a, c, g, or t
  misc_feature (295)..(295): n is a, c, g, or t
  misc_feature (297)..(297): n is a, c, g, or t
  misc_feature (303)..(303): n is a, c, g, or t
  misc_feature (307)..(308): n is a, c, g, or t
  misc_feature (311)..(311): n is a, c, g, or t
  misc_feature (340)..(340): n is a, c, g, or t
cgattatgctgcagagggcatatcaagaatcgtcgcagtgctgtagctccgccgtgtctgaaatctggagacatggtgacgtgcgtggttgcttaacgggaagctgggcggagcggtatatcttgtaccaggtccagtgtggtgtctgtatctcaggaccgcaatgatgcacttgtaccgtaaacttaatanacgctanccacgtcgtangggtcctccangcnattaccagnanattanccagantngtgnnagtggggaannganngagggntcggagagtgctcncgaaggncnggcccnacanngcnggccctaccgcaggcgagggttcccaccnttactacatgcggagaccctatgggcgtcgaccacagtattccaaccctcctgtgcagggagaagtgatggagggtgctgacaaccagggtgcaggagaacaaggtagaccagtgaggcagaatatgtatcggggatatagaccacgattccgcaggggccctcctcgccaaagacagcctagagaggacggcaatgaaga

SEQ ID NO: 604094 - DNA, 287 bp, Homo sapiens
cttgttatggtgatctccaggtatttgcctggattttgaaatcatgtaaacattatccacgtgtctgtggctgtggctgtggttgggccctggcaggtggaagaccatctcccagaaatctgaattcacctgccattgacgcagattaccctggccctacagcctgcttgctccgcctataccacagagcacagcctggacattatggtgggtgtgtgcggtacggtccacatctgggtcctccatcgggaactttccatgcttctttctccatctgatgtctatgg

SEQ ID NO: 604095 - DNA, 436 bp, Homo sapiens
  misc_feature (235)..(235): n is a, c, g, or t
atgtaacgggtcctggtgagtgctccagtccaacgcacgtgaatatgcagcggaccggtaccatgtatagaggcgatccacgttgtacgggtgctcacatacaattaaccagcataatgatacagaaatatatgagtagctggggaatccgtactagaagtcgtacgcgtgagtgcttgcgagagtgcaggccgaacgacgccggaccaagcggaggacgtaggggttcccaccnttactacatgcggagaccctatgggcgtcgaccacagtattccaaccctcctgtgcagggagaagtgatggagggtgctgacaaccagggtgcaggagaacaaggtagaccagtgaggcagaatatgtatcggggatatagaccacgattccgcaggggccctcctcgccaaagacagcctagagaggacggcaatgaaga

SEQ ID NO: 604096 - DNA, 335 bp, Homo sapiens
tctctttttgccctcgggaaaaagcaaaaaatcaatgtttgggggcctgggtaaagctcagggggtaagaacatctttttgtttaggttttctttcggctctttattgaagccaacccctccccaaaaagaaaaataaaagttttcagagaaactaattttttttggcaagagtattacttaaaatttgggcctcctaaagtttccctagttagaactgggacccctgggctaattgtcagcttacaaatcattgtaaagagactgtttattttgtcccaaactgatttcaaaagtactccattgaaaataacccggggacggttttttttcata

SEQ ID NO: 604097 - DNA, 350 bp, Homo sapiens
cgcagttcagaaaaaagagtctggagaatcgtccacggtgcgggaagcatctcggtttcttctgctttagtctctcaggaaggctgtcgccgtgcgtgcattaaatagttatgtacatcgcagagagtcccaggcatggtcaggtgcgggaggggctgtcatttcaccatgggccgagtaccatcatcgtcaccgcacttgtttagctttgtactttatcacttcctgccatgtactttggccacgcgtaacctttacttgtaaataacctcatcctctgtcttctgcttcattggataactattcccggcttgagggctagtatgtacccgcctactgcgtagggccac

SEQ ID NO: 604098 - DNA, 387 bp, Homo sapiens
agatgattccccaaagtacaattaccatttggactccagtggtagctatgtatttgagaacacagtggctacggctgatggctctgcgcagggagaagtatgttcgtgtacgaggtgtccatcaggccacgagtgtggatctggtgctggacatcgaacctgtatctatgctgaacgcaaggcaggccatatctattacgaaggctacctggtgaaggtgtgatgacagcagtgatgattaaacagagtttactgtgaagaatgctcaggtccgaggagggtatgtgctacacattggaaccatctacggtgacctgaaatgtgggggatcaggtctggctgtatattgataagccccgacgaagacccatcatgagcaaccacaca

SEQ ID NO: 604099 - DNA, 314 bp, Homo sapiens
ccccaaaaccccaacaaaaggggcctttcccccaggggttttttttgggaggtgggccccccgcggggggggccaacttgggttttggggggggcaagcccccccgaaaccccggggggggtcccttcccccccccccccccccttttttaagggggggggggggcccctgggggccccctttttcccccccccaggggggggggggggccccttggggggggggggcccccccccccccccccccccccaaaagttttttttttttttttttttgggggttttttttttttttttaccttaacccctttccca

SEQ ID NO: 604100 - DNA, 219 bp, Homo sapiens
ccttgtgatccacccgcctcggcctcccaaagtgctaggattacaggcgtaagccactgcgcccggccacgtcttcctttttttagctttgctttgagaaatcggttcttatcttggattccattacaatgggcctcctgccctttgggtttttcaagtgggtcccttaattttccctttcccattcccaattataaagattccctaagaaacttggcc

SEQ ID NO: 604101 - DNA, 118 bp, Homo sapiens
gttagttgcacggtcctattcctgacatgctagagtgattgttgtttcgagtgctagggcattttaccgtggaaaatgtagaggctcaggttaatggctggtagtattttttattctg

SEQ ID NO: 604102 - DNA, 1053 bp, Homo sapiens
cagcactttgggaagctgaggcaggaggatggatcacttgagcccaggagttcgagacgagcctgggcaacatgatgagaccctcatctctacaaggcataaaaacattggctgggcatggtggtgcactcctgtggtcctagctactcaggaggctgaggtgggaggatttattgaggccaagagtttgagaccagcttgggtaatattatgggactcctctctatagaaaataaaattaaaggctgggtgtggtggctcacacctgtaattccagcactttgggaggccaaggcgggtggatcacctgaggtcaggagctggagaccagcctgaccaacatggtgaaaccctgtctctactaaaatacaaaattaaccaggcgtggtggcgggtgcctgtagtcccagctactcgggaggctgaggcaggagaatcgcttgaacccgggaggcagaggttgcagtgagctgagaccgcgccattgcactccagcctgggcgacaagagtgaaacttcgtctcaaaaaaaaaaaagggaacactttaaaaacttagctgcttgtgcttgcgtgtgcacctgtagtacgagctactacagaggctgaggctgaggtgagagaatcacttgagcccaggattccagaccagcctgggcaagatagcagattccatccctattttcccacttaagtcaaaaggccacgtgtggtggcccatgcctgttatcccagccttggggaggcccagtgggcggacctggacctggggcgctcgagacctccgggctaccggtgaactccggctttaaggggggttatcacaaattttccgggggattggttgaacgcacatggggccagcgcctgtatggtactgccaaaaatgtttgataccttgtgagcagggttgcgaaaccgcaatattttgtagtcacccagggggaggaagaactgtctgttaggaaaacaaaacagagggcgcgcaaaatgtgagcgagacgtgctatcgctcgttagtcgactgcaacaatagtaacggagctagcagcgga

SEQ ID NO: 604103 - DNA, 249 bp, Homo sapiens
gacgcttcaacggaactttgagcagatcgaccacgttggggcaagcatacaaagatagcctacgagcgggacctggagactagagcatacatcggcgacacctactgccacttccagaagatgcttgtggtcctgctccaggggaaccagggcaggaggaataacgtaatggggcgtggaccttggtacaacgaggacggtccaggacctaatacgaaggcaggggcaagggtaccgaagctacgaatt

SEQ ID NO: 604104 - DNA, 110 bp, Homo sapiens
  misc_feature (100)..(100): n is a, c, g, or t
  misc_feature (107)..(107): n is a, c, g, or t
ccagaagatacatacaaagtaattctcaatgtaaagctattcagctcttccaggttgaatgccctgtaacccctattttttgtcttccagtgtgcttcantgttggntat

SEQ ID NO: 604105 - DNA, 386 bp, Homo sapiens
  misc_feature (293)..(293): n is a, c, g, or t
  misc_feature (329)..(329): n is a, c, g, or t
  misc_feature (345)..(345): n is a, c, g, or t
  misc_feature (374)..(374): n is a, c, g, or t
gaaaaatgcaagttagctccctgctaccttggcgttgtcagtcctccacatagcactcttcagctcaaattgcattttataaaatccccagcaagcctttgtctcctggcagtcaactcgtctcttactgacctgcccattgctcccttgcaatgtattttcctactttctctaataaatctgcctttcttgacctaaactgtcatgggtaaattcttcttactcctatggtcaccagccacaggacagtcggccacaaggccatggacaagtcttgcggatttcatgggtcnttttttttatttttggaaggatattttccccagtgntttggggggggacagnagggatggccccacaatttttagggggcntaggtcacaagg

SEQ ID NO: 604106 - DNA, 258 bp, Homo sapiens
ctggaggacactatgcttggcggacatctagtgcttggcagcatcagttacacaggcaggaagaacaaaaaacaaaagctggccctctgactctatgcagatccaagttctttgcaggtactctacatgtccagaagtgagacacagtattggcagcattatcttagagaataccggtaacattcttaactgattaatgtaaccatgccatggaatattatatgtctgtcaaaatgtaggtagactgggcactagtgt

SEQ ID NO: 604107 - DNA, 211 bp, Homo sapiens
cccactcaaagctcactccccgcaaatccctaagccccgctacgttggtgatagcataacaaaatatatgtacattctcatcattagattgattgttgctgtccttgcacaactggtttaggaaaaatgaattattctgtcatttctgaagaatccacatcctgtctcttataaagtcagaacagaagggggcaaaaggttgtggtgagca

SEQ ID NO: 604108 - DNA, 1247 bp, Homo sapiens
  misc_feature (580)..(580): n is a, c, g, or t
  misc_feature (701)..(701): n is a, c, g, or t
  misc_feature (711)..(711): n is a, c, g, or t
taaaagtagttagcattttaatggaaactccctccagtgtgggcttcaaggccaccagggacacagggcccccccaaaactcttaatcttctcctcagtctcttctgggtggaaagaattgtgggctcttcacgagatgagacagggctggtcttggggcgacgctttcacctttctcccaaacacatctttggtgatgtacacgccacggtatcggcaccacccacatatcacatatggatatggggagcaaagccccccagagttctggtgtttaaacgcacagcatattacacaccccctgtgtgttctggtgtccctctgtggcaccaaatgtcgccaacaatatgtgtggtcgcaggtgtgtggcacaaagtgtgagggacagaaaggctcctggggtgtcactctctctataagaggtggggtacaaatgggctctcacaataacgacgagatctgtttccgcaaagagtaagcgcacctgcgggggtgagggactatatgtgggtgcgagaaaagggtgcgaggaacaccccgggcggagcggagatgagactgccgccaagcatcaactaancaccaaaggagtattcaacaacacgtggcggggcacgaggccagaggagagatgagataatacacgagggatgagctatggggcgcataaatagcgaccgaagaggcaccgtgattgagangccacagatnagggggggagatactcccaaccagtggtgggggggccgcccccattaaatgtaggtatcaccagcgagggaggagtgagcattacacacccataccaagaggtacatgaggaggaatgcggcggcacatgtgatggagagggacaaacaaagaaagtggcacaagagcacaaaatatccactcttcagacaaacaaaaatttgcaggagagaccccacccaacaatatttcgttggaaggaaggtagtataaccccaacagcagaagggaagaataccccgactccgaaagaacagcgcaacaaagtaagcacagaataagcgagtccccctctgttggtggggatccgcgggtcagacaaagaagcgacggacaaacataaaagagaccgcccgtgaggtagaccgaagggggctacactgggtgaacaagagcgagacacacaaaaacggagtgggaccacaggtgaacggagaaaatatcgccagggagctaattgaaaaagcgcccaggaggatgagccacacgggtgacag

SEQ ID NO: 604109 - DNA, 759 bp, Homo sapiens
gaggcatgaggcgtccggggcaggggcttctgctgagggggcacgcggagcttgaggaaagcgcatataagttggtctctctttgaaagatagagatgaatacaagtagttaagagaaatatagtcaataggttactacagatatcgcttagccgttaagttctgtaggcgtagtgttccaatgagcttgagatgtgaacgagaaaatatgaagacttagaagagtattcatgaggaaggaaaagatacaagaggttactgaaagcgatgacggaggttgagatgaagcttctggcatggagtaggaagatgtttgtaatcagagaatcgagagaaaggagttaacagagcctcgcgaattagctatcaatagaggggcaagcggttatacgacttaaataatgaaggtgatcttaaatagcttgaaaagtttagttttagaacgtttgtaagtggtgattagattaatttgaaggcgatgtgttacaaaatgagattatatcggagaggtgattaataggaccttgactatccatgaccgcagggagaaatgcggtcatttgaaaagcctagttaacgctatattactagaggcagatcgaagatggtgagataaagtgggtgagttgggaggatcgatgacacttttggagaaaggatcaggaaagttggaagtgggaaacagcgggcaatgacggaagtgcgggaaaggcgagacccgagaattggaggaaggatagggaaatttcgagggataaa

SEQ ID NO: 604110 - DNA, 368 bp, Homo sapiens
  misc_feature (23)..(23): n is a, c, g, or t
  misc_feature (104)..(104): n is a, c, g, or t
  misc_feature (106)..(106): n is a, c, g, or t
  misc_feature (114)..(114): n is a, c, g, or t
  misc_feature (127)..(127): n is a, c, g, or t
  misc_feature (130)..(131): n is a, c, g, or t
  misc_feature (155)..(155): n is a, c, g, or t
  misc_feature (161)..(161): n is a, c, g, or t
  misc_feature (167)..(167): n is a, c, g, or t
  misc_feature (189)..(189): n is a, c, g, or t
  misc_feature (195)..(195): n is a, c, g, or t
  misc_feature (198)..(199): n is a, c, g, or t
  misc_feature (203)..(203): n is a, c, g, or t
  misc_feature (213)..(213): n is a, c, g, or t
  misc_feature (217)..(218): n is a, c, g, or t
  misc_feature (221)..(221): n is a, c, g, or t
  misc_feature (236)..(237): n is a, c, g, or t
  misc_feature (258)..(258): n is a, c, g, or t
  misc_feature (261)..(261): n is a, c, g, or t
  misc_feature (297)..(297): n is a, c, g, or t
  misc_feature (359)..(359): n is a, c, g, or t
cgaggggggcgtaccccgttggngtgggggagtggggggggggggggggggcctcggggggggggggggggggggggtgtcgttggggcggcggggttttctcngngggggggngggggggggcccnccnnggcctcgggggtgggggcgggggntgcccnctcggngtccggggggggggtggcggcntttctnccnnccgnggcggccgcnccgnngcncgctccgggttgccnncgtccttttgtgggtgggggngcngcggggctcggggggcgggggttcgcttgtgtgggntggtggtctgcttttccggcggcggctgtgctcccggctcctccgtctcgggttccgccggntgcgctggg

SEQ ID NO: 604111 - DNA, 163 bp, Homo sapiens
atgcataccagctcaatgggtcacttggaacaaactttgctttgactattacgagcagaaacaaaacggaagcacaaacaccttctttttttgacatgtatctggagataggtagggaagacactacttggttttaaaactgactcctagctgtcatgaggac

SEQ ID NO: 604112 - DNA, 128 bp, Homo sapiens
gtatttttttttccacctggaatcctttggccagtgggtgcagccataagtttgtccagccaggggcatacgccaggtgcctgccgagctgtccatctggcccaggcaagaggcaaaggataacttcc

SEQ ID NO: 604113 - DNA, 446 bp, Homo sapiens
cgctttatcataggaggtggaagaattgcttgagctcaggaaggctgcagtgagctgtgactgtgccacatgctctccagcctgggaccctgtctgaaaaaataaaatataaaaaataaaagaaaacatgaaatacctgaaaaataattcaaactactgatattaaagaagctcagtgagatccaagagaacacagacaaacacaaggacataagaaaaacaattcatgatctgaatgagaaatttagcaaagagatatcattttaaaaaatcaaacagaaatcctgcatctgaagagttctatgaatgaaataaaaaatacaattgagagcttcagaaacagactagatcggggtgtccaatcttttggcttccctaagccacactggaagaattgtcttgggccacacataaaatacagtaacactaatgacagctgatgagct

SEQ ID NO: 604114 - DNA, 245 bp, Homo sapiens
cgaggaccccaataaattgttggtcattgataaattcacgaaacataaaacaggccaactcgaatatgcgccatctaaaggatctcctcttaagcgtggattttatgctataggaacatcaatgtataagtaagtcgattacaggtgtattagaaaaaatgaatttcataaatagtaattttttaattaatttttttaattttagagcactcatcaatgaccaacattattggggatcctcggaa

SEQ ID NO: 604115 - DNA, 519 bp, Homo sapiens
  misc_feature (212)..(212): n is a, c, g, or t
  misc_feature (323)..(323): n is a, c, g, or t
  misc_feature (352)..(352): n is a, c, g, or t
  misc_feature (371)..(371): n is a, c, g, or t
  misc_feature (387)..(387): n is a, c, g, or t
  misc_feature (399)..(399): n is a, c, g, or t
  misc_feature (416)..(416): n is a, c, g, or t
  misc_feature (418)..(418): n is a, c, g, or t
  misc_feature (420)..(420): n is a, c, g, or t
  misc_feature (457)..(457): n is a, c, g, or t
  misc_feature (475)..(475): n is a, c, g, or t
accagaaaaaattaccaaactcagtaaatattatttggcattaatacaaaattccaaaggtgaggggaaggtgcattttttttttaatgcaccaggtttaaagttcaaaggataaaaggcaaatagttgttttcatcaagagcagctgtacatttcacataattttttcaaaaggaaaggctattaacaacagtgattatttaatgctgcangtttacagcaaagacaaaactaaatagcaaattcacaaggcaatacttccacagaactatcatcccatgtctcatgcaatgcctaaaaagtgctcttaattggatatacangtataattaacgttaaaaaagaagaaatntaaatttgacacgcagatncattaaaggctgagtngtaatgagtggntttaatatttgccttgncnanaggagaatatgttggcatcaagcactttgaatccttncccaggtcacttccaggngatatcttcattgtgcaacaggcccacttgagaggcccacaccc

SEQ ID NO: 604116 - DNA, 161 bp, Homo sapiens
tagtgctgctcagggattgtctcaagtttacaatagagctgggatggatactgcagacctagagcaagcatgtggaggtcatgtgctttgtgcccaagcgctgcaacgagtatgatgacgctggggagattgcggggatttgaggggaaaagaccctgtgt

SEQ ID NO: 604117 - DNA, 605 bp, Homo sapiens
  misc_feature (60)..(60): n is a, c, g, or t
  misc_feature (311)..(311): n is a, c, g, or t
  misc_feature (546)..(546): n is a, c, g, or t
  misc_feature (562)..(562): n is a, c, g, or t
  misc_feature (578)..(578): n is a, c, g, or t
aagtaggctaggtacgagctggggtgaatcggccgaggcaaggctccagacccgcacgcngcgcgcacagagctctcagcgccgtcccagccacagcctcccgcgcctcgttcaagctccaacatggcaaaaatctccagccctacagagactgagcggtgcatcgagtccctgattgctgtcttccagaagtatgctggaaaggatggttataactacactctctccaagacagagttcctaagcttcatgaatacagaactagctgccttcacaaagaaccagaaggaccctggtgtcctttgaccgcntgatgacagaaactggacaccaacagtgatggtcagctagatttctcagaatttcttaatctgattggtggcctagctatggcttgccatgactccttcctcaaggctgtccctttcccagaagcggacctgaggacccctgtggccctggccttcaaacccacccccgtttccttccagcctttctgtcatcatctccacagcccacccattcccctgagcacactaaaccaanctcatgcaggccccanctgccaatagtaatanagcaatgtgcacttttttaaaactgtg

SEQ ID NO: 604118 - DNA, 182 bp, Homo sapiens
ccgtcagggcgaccgctggagcttcgactttgaccgtctggatcgttggagtcgcatcgctcgacgtcacggtatcacccacctcgagttctcccatctgttctgccagggggaagtcgaccgtccggctgacgtctacgatgccgacggcaaccacctcttcggttcccatctgcctactg

SEQ ID NO: 604119 - DNA, 259 bp, Homo sapiens
tcagcccccgcaagacgacgttgtgtcatgccctacgttggtattatcacatctacgtcttacgaaacggaataggcctagcctgccaggcagtgaagaaagctttgggcaaatattgtcctgccgatttgtaagacactacaggaattggagctaccggttgtacagatgattatcacatttacctctttggatctcattatcaggaggaaagtgaagaatgctgataggctcagggaagaacgtcttgcgggtgctg

SEQ ID NO: 604120 - DNA, 204 bp, Homo sapiens
gttgtatctgttctcacgccaagtaattggttgggcaatgaagtcaaggatgtgcagcgacctggctatcgacgcgatgttgatggctgtttggcgacgcaagcctcagcagcaagttatgattcactcagatcaaggcagtcagttcagtagctcggattggcaaagctttttgaaggccaacaatgtaatcggcagcatgag

SEQ ID NO: 604121 - DNA, 1161 bp, Homo sapiens
cgcagaggtgagagtcgcgcccgggagtccggcgcctgcgccaggatggagttacgtagaaatgccttgggcacctccgaagagttctacaaccatggtgcgcttccggatcgggggcaagcggaaggtgatgcgccgaagaatggaccaggacgtcgcttcagcagcagtctgaaaacttgctatcgaagtatctcaatcagagcagtcgcagtgtatcgcagctgttatccaggcgctggatggggaaatgcgcaacgcaggtgtgcatattttatctggttctccgagctctggacacactggaaggatgacagtgaccagtcagtgtggaaggagaaggtcccgcgtgtatacagcaactttgcactctgttcctttaccaagccagactggcggttcatggagagcaaggagaaggatcgccaggtgctggaggacttcccaacgagtctccctgtgagtttagaaatctggctgagaaataccaaagagtgattgccgacatttgccggagaatgggcatagggatggcagagtttgcggataagcatgtgagctctgaacaggagtgggacaagtactggcactatgtcgctgggctggtcggaactcggcctttccggtctgttctcagactcagagtcgaagacccttagtgggcgacgatacagagcgtgcaactctatggggctgttgctgcagaaaacaaagatgatcgtgactatgtggaagagcatgagggggcagagagttctggactgcagaggttggaccaagtatgttaagaagtaggggaataggtaaggcccgcagaatatggacatgggccgtgcacgtgccgcaaggaacgagagccaaggccctgaacgcaatccaagaggtactaacgagacacttcgcgaacgtggagcccgcccgggtacactgcgtcgatatcacagcgcgaagtccaggtgaactggagcgcctggtgcacaacccgcaggagtaaaagggcgataacaaactatgaagcgaaaacaccgatcgagagacgtcagaccgaggcaagaactattacactaggaggataaacaccaagccgaaaacagagagtacgacgacgactgttagataccacatgactcgggcccgccagcctactaacactatcgtgcg

SEQ ID NO: 604122 - DNA, 149 bp, Homo sapiens
cgtcagccgcacggtgcggcggccgcccgggtagacgtagaagtacgcgcgggcggggaagcgggcgccgcgcggggcgcggaagccgtaagtcgcgcggaacgagcggccgaggtcccgggagcggatctggtgccaggagatcagcg

SEQ ID NO: 604123 - DNA, 250 bp, Homo sapiens
tagatatgagcatggttttgttgatattttaagtaagccttgagtgaaggatttgggtagagttgtgttgtgattggatctgagtttgttactaatttgagtaatccttaagtgaaggctttgggaaaagttgtgttgtgattcgagctaagttgtgttgctgatctagttaagccttgagtgaaggattttgggtagagtagtgttgtgatatgagctgaatttgttgttgatttgagtaagccttaaa

SEQ ID NO: 604124 - DNA, 311 bp, Homo sapiens
agttgatcctcaactcaatttcaagtggagcttgatgctgataagacagggcccttttgtcctattctacctcgcgccggagttgctgcacagctctattgcttttcctgacatcttggcgcgtcttctatcatgacagttggatgaagtgttccatgacacgctgatcaaagacatgctgcagccagatgagaatctccattagtctccacaacttagaagacaccattgtcaatggcagagaagagacacatcgaagtgtccgccacccagaacacacaccaggacgttatgctacccctacctctcga

SEQ ID NO: 604125 - DNA, 655 bp, Homo sapiens
aggctatttagctagggagtgatggagcccagatgcgaatccagactgtaagctccttcagtgctggagcagtgtcattcatccatttgttcatttacggatcaaatatttaatgcataactaccacatgcatgatgctttgctaagcccttggggaggcaaagatgaagacatattccttgctttcaagcaggtgctgacagctgagccattccacgcaccttcggagcaaagaactgccggaaaccagggccaagttcagagcctgaaatttttttcaaaggctacaaggagaaacctggggggcctgatcacacattacataagccgtatgtgagcagaggatgccactgatgctaggaacccagtgcctgtcggaattgcgcaaggtttacgcagaagcacttaagtgttgcaacatgaccccacatctttaccaaaaatgtgaaacattcacgcagcacacactttaaaaacactaaagcttgtctccgccaggtggctaaggctgcttgatggggctgacaggagaggagctttgcaggggggcctgacttactgtagctcttggcccagggagctgaacacgcagtactttgtaccccaatagccctgggcagcccaagcctctgataaaatgtacttttctgtgtga

SEQ ID NO: 604126 - DNA, 721 bp, Homo sapiens
gttcccttatcctcggccgtttgttttggattgtaaccggaaccttttctcccggatccactatgccatgttccccaagctagatttacctccattaagggaccaaactggagctccccccgttgcggccgctctaaactagtgattccccgggctgcaggatttcggcacaagccttgtggaccaagaggcccgttacgcaggatatgtcgtagcacctctgaatgatgggtttgaaactgcgcccctctctccaggcacaagcactcaactatctgaactgatagctcttacaagagccctcaactttagcaagggaaaagtaactaacattggcactgactccaagtatgctttcttagtccttcatgctcatgctgccatctggaaggaaaggcacttctttacagctaatgggctctctataaaataccatcaggggccgggctcggtggctcacgcctgtaatcctagccctttgggaggccgaggcgggcggatcacgaggtcaggggatcgagaccccggttaaaccccgtcttttctaaaaattcaaaaaattagccgggcgcagtggcgggcgcctgtagtcccagctacttgggaggctgaggcaggagaatggcgtgaacccggaaggcggagcttgcagtgagtggagatcgcgccccagcacttccgcctgggcgacaaaacgagactccgtctcaaataaaaaaaa

SEQ ID NO: 604127 - DNA, 210 bp, Homo sapiens
tgctgggattatggttgtgggccaccatgtccagttggaaaatgcttcctaattgtcatacaactggacacttcagtggacatcaccatgccatgcctcctcttatgggtcggaattatgtctctcacaaaagacgtctgagtcctaactacccagcccctgtgactgtgaccttatttggagagagggtctttgcaggcgaggctagga

SEQ ID NO: 604128 - DNA, 465 bp, Homo sapiens
  misc_feature (20)..(20): n is a, c, g, or t
  misc_feature (133)..(133): n is a, c, g, or t
  misc_feature (168)..(169): n is a, c, g, or t
  misc_feature (194)..(194): n is a, c, g, or t
  misc_feature (201)..(201): n is a, c, g, or t
  misc_feature (362)..(362): n is a, c, g, or t
  misc_feature (376)..(376): n is a, c, g, or t
  misc_feature (454)..(454): n is a, c, g, or t
  misc_feature (456)..(456): n is a, c, g, or t
gtgggggggggtggccaccngtcacagggggtcacttcagggtcttcacgaaatcttccccctttttgatggaggcattcagctcggggatggcatccgagatcatcttctcatcaaaagaggagactttgcngatgcccaggttattcatggatgcactttttcccnngcagcagcggtgtggagaagtaggnacattangtttactgtgacttaacgaaggaacattccacaacaccttcctttccattcattgcatccacaagggggaagacaaagggggggcggggatacgcgatggagagggtgggagagcctgctccggctttagcttgaccacctccgtgccggcctcctggatnggcccagtgagtgntgtaagctggtcctggggaaagtccaccttgggggtggactgagagatcagggggatgatggtcttcccaggatgggnancaatgagag

SEQ ID NO: 604129 - DNA, 272 bp, Homo sapiens
cacgaggcttcaggacacatttcattgctaaccacgatggcagagcatcatcacgcatttcattcaggtggaaggtgtctgctgctgtacaaggctggaagagccattgctttcccaacgttacctgtttggcaatatttccctcaggggaagagccagaagcattgtcagggtcttcagatccaggcttctttgagaccccagcaatgagctttagtattcagcttgtccacgtcatgcacacgttagctcttgcagtcaaggaaactcta

SEQ ID NO: 604130 - DNA, 228 bp, Homo sapiens
tgcatgttcatatcctgaattacaaatcaaaatgagcaaacacgtgcataagcaaatgagaaaaaagaaggcacacatcaaatgatgagatgtgcagccagtgcaggtaccccgggagtgttgcaagttaaactgatgaaaagacgtttagtatttaattgctcctcatgtaacataactctgcaacagaaccgttttgtattttgatatcactaaactatagctaaa

SEQ ID NO: 604131 - DNA, 231 bp, Homo sapiens
caggccctggaaataaaatccccttttttccctttaaaaaaggggacgattaaaaggcatccaattaaaggtgtttcctaggcaacaggaaataacttgggggtcagacccctccaaaaagggaaaaagagatccccctgataagggcttttaaacagtgaggactttttttgggggcaaaataacagcctccccccaggaagtgggcccccgccccagtcccccccccca

SEQ ID NO: 604132 - DNA, 124 bp, Homo sapiens
acctccaacgagatgtccttccactagtggactggtggaaacagagctccaattaaccttctcccaggtggcgtacaggttcatctgcaccggggcgggggtgcggcctggccccgggccaccg

SEQ ID NO: 604133 - DNA, 174 bp, Homo sapiens
aaaccccccttttttttttccggggggggggggggtttaaggttttttgggggtttttttttcaaacccccccggggcccccccccccccccttttgtttttttaaaaccccccccctttttttggggtatttttggggccccggccccccaaggtttttttttttttttccca

SEQ ID NO: 604134 - DNA, 333 bp, Homo sapiens
ggcaaagagccatccttgtatttaagaagtaactttggccaggtgtgatggctcacgccgtaaccccagcactttgggagaccaaggagggtggatcacgaggtcaggagatcaagaccatcctggctaactctgtgcaatgctgtctctactaaaaatacaaaaaattagccaggcgtggtggtgggcacctgtagtcccagctactcgggaggctgaggcaggagaatggcatgaacctgggaggtggagcttgcagtgagccgagattgtgccactgcgctcgagcatgggcaacagagcgagactccatctcaaaaaacaacagtcgac

SEQ ID NO: 604135 - DNA, 372 bp, Homo sapiens
  misc_feature (181)..(181): n is a, c, g, or t
cctaggtgcctgtcatctatatgatctcagtattttaaaaatcagcttccagcccatatggtggctcatgcttgtaataccagcagttgaagaggctgaaatgagaggattctttgcacccaggagttcaagagcaacctgggcaacgcagcaagacccagtctctatcaaaagttaaaanaaaaaggtcggcatggtgatgtgcacctgttgtcctagctatttgggaggccaaggtggaaggattgcttgagcttgggaggttgaggctgcagtgagcagtgattgcaccactgcactccagcctgggcaacaaagcaagaccctatctcaaaaaatatatataataaaaataaaaatcagctctcattg

SEQ ID NO: 604136 - DNA, 486 bp, Homo sapiens
gagcccgccgagtcttaaatgacattaggatcaatacgtgcggcactagaagattcatccaaacccgacactacgctgaacgcacacggccgaggatactgatagcaactaggcacaagcttatcgggtagtggctcaacattggaatacgtgagcaatgcttttaggatcgccaccggaaataaccaacgtataaggagctcggaaccaacctccgcattgtcgaaaccaagcagatctttttcaacctgacgccgcatcatgaagtccaacggcgccacgtgttttattacttccatagcttgatccggcatgaccaggtgaatcaatagcacacccaacccctgcattagcccggtcgtaaatgcctcatcacgatcatgattggtttgcgcggcaaggtgagaagccatgaatgcggtatgcagtcccattttccagtaggccggcatatcgatacccagcgttgctggaatcgctttcaca

SEQ ID NO: 604137 - DNA, 137 bp, Homo sapiens
ctgtggcgtttttcccctccatttttacatgttctcatggtgtcacatatccagcataaagaggttgtgcagctattccacattcgaccatcctgcagcggtgcctgatcagtctgtcataggcgtcatccatatct

SEQ ID NO: 604138 - DNA, 102 bp, Homo sapiens
  misc_feature (2)..(2): n is a, c, g, or t
antcagtgacatgacctacccagggtagggactctgacacactcatcttcatgctgcctggggtacttttgggtgggtgctattgaaacttctaaaactagg

SEQ ID NO: 604139 - DNA, 513 bp, Homo sapiens
gattatcttgtgatcatagcacctgctgtcggcacactcccgtgagtcctgtggtcagggtttcaggataggaggtggaggtttgggttaacgtgggaaaatgttcttgctttgacacaaggaagtactgagtggctgcaccgagaaaggacttggctagtaaggtttaggatgtcattcgcgcatagccgagcagcctgctagcaggtgacacactccgtgggggaggctcttctccccttctttctctagtctgggtggtgaacgggctgacactgctgtcactggttcttaggacctaaggtggtcctcataaactcctgggggaagctgggagcaacttcctgggaagctaatttatttgtctaaagggtggtgtgggcatcaccacccttgtttgatctgccttggatttcctcttggagcttatgtgcagatagaggttgtacttggtaagatttctaatgtgttctatgggtttcaattctgaaaaaaaaataaaagattttaata

SEQ ID NO: 604140 - DNA, 418 bp, Homo sapiens
gatggttggaggtcctatagaacaaaggagacctaaaccctactgaggccaaattcaccaggcatctgttcaagtggcaagattgaaactggggcatgcctatggtggggacttccaggagggggaaagtgagagactgaagctggataaggaggtcggggtggacctggaggagtggggctggagggagctggcttctctgctggcggtgcctctgggatttatttcttttcttttttttttttttttttttggaaaaagattcccagggtgccgccaaggcggaagtgcaggggcacaaggtgggcccagggcacccccggtctcgggggatcaaagaagatctcgggcctctatgtcaggttcggaaacgggcattagaggcaggaaagggacacaaaaaaggtaccagtcaaaa

SEQ ID NO: 604141 - DNA, 170 bp, Homo sapiens
gggaggcttccggaaccctacgcccacccgacgcgttcgcccgtccgttttcatttttatttttattttggtttttttgttgttgttctcttcttttgtcttttttttttctttagagacggggtctagctatgttggccaggctggtctcgagtccccgggctcaagcg

SEQ ID NO: 604142 - DNA, 985 bp, Homo sapiens
ctcgtgtttacgcgtgtatcccgtccaagattatcggccctggaacggaactgtccaatcccaaaccgcctcttttcttggaaccccttcccaatatgctaataacacacccgcgtgatacccggatttcctcatgcgccttctcctggtacctttcttatacaccgtaatggtcccctccggggaacctgcgatttaatcaacacttctcgaacgccacacatggtaaaagcctacgtctaatggagccccagttaagggtcctaagtttaacgtcaacaatcctacttagcactcaacgtcttcgtacatcactcaggcatgtgcttgcttaacccgtgttccccgggaattttgccccgatgaatgcttacccaacgggtccttcgtgcttccctctggatgaactactcgtaatccccttgctgccaattcacccctcttaaatcccttctcgggtgacccctatactcttacagatggtcaggctttcaagtgccctttttgtctgcgcaacccaagtgcccacgtcagcgcgctagttgacgtgctgcggccttgttctgggcgcgaagtttctgtggagtgtgttcttgtggggcctccccggacaatacctctcctgcctgcgtggtcagatgcaggttgtaaggggccttgctgagtggcgcaaggccgagcgttcacagcagggggagaaacccttcacatccccaggcccttcaggaactggggctttgcactgcagccacatggccccatcccagttggggaagcacaggtgagctctgacaccattgggcctgggcctctgcccctcccaacccagccgtcgtctccctcgacagcgctcctgctgtcttccccactgcagtcaccaccacccgaaatgccacgtggtcactgtgcactgccactgttagtgtgccttctgcggggcaggccttcctggttttgtaaactgcctgtaggccagatgcctaca

SEQ ID NO: 604143 - DNA, 692 bp, Homo sapiens
  misc_feature (692)..(692): n is a, c, g, or t
gcacgaggagagagagagagagagagagagagagagagagagagagagagagagagagagagagagagagagagagagagatcgagtgaaccgtttcggtatctgaagttgctgattaagcctgatctagatgacatcctctcatacgcaccgttacttcgttgctgatcccatgggggataagccagtggggagcctggctggtattggtgaagtcctgtgcaatatgctggttgggtgttttgacaatgcctatgttgtccttggcctttttctggtgctcattatcgatgaagacctctttcggtagtggctgactgacacttttggcgccaatgcctttctttctctggactgcttcttatgccttcgatagtggtgcgacgccttcttgtgatgctctctgtgatgctttcattccctaccccttattcatactttgcagccgagtagggactcctcctctgtcctctactatttaactgattgctcttgtcttactctcctcctacgttctcccgtgtctattgggttttttgccttgtccctttcgatctttttttggattctcgttcttccttgcctccccgttcttttttcctttgctcgttcctttgttctttttcctgtttccttttggttcctcgtcccttttctttctccctctctgctttccttccctttggttcccn

SEQ ID NO: 604144 - DNA, 446 bp, Homo sapiens
tggggtgattcagatgttaagacaagagatgtccagccatacagaatgcgatggttctgcctgccagagaacaggggatgcaggcatggctcggcaggtggatgtcagattctgtctccctcccaactacttatatcctccagagagacacatagctgaggcgtacctgttacgactctggtcatatcttgcgtggggctgcaaaggaaaggggtaccctcaggttaattgctgcagtcctgtgtatgctgaattctgctgtgaagaaggagagacgcttccatcttggatattgcctaaatactttgtctttccttcggtaacaacagtgcacagattgtacggcaggaatgtgtttgtattcactcctgctgtaatcctgtatactaaagtggtccttagggaatgtgctgatgtgcgcgataaacgtatgaagagttgttggt

SEQ ID NO: 604145 - DNA, 407 bp, Homo sapiens
taaggcagagccagcagatccgtgtcacccatgtgccattaagacaaggggcaacgctacaactggcaagagaagaaatgggactattattgcgtgtggaacaggccttaattagttacgttacagctaagaatgtcatgtcttgggtctcgagttgtcatttttagcaccgttaatgtattcacttaaatctatgttagcaccttgtctccaggcagaacaacaaaccatccaaacattttaaacattgggggaaacacgaaggggagggttaaagacagaatccggtactgtggaaggagtggatttagatcacaagatccttgtcgatatccttctgcttgatgccgaagcagccggcccactcatccagggcgatgtactcgtcattgcaacacggtctctca

SEQ ID NO: 604146 - DNA, 186 bp, Homo sapiens
atctcactgcaacgctctagcttagccaatatgaccagccgagaaagaatgctgcgcgtgggccaagataggcaccggcaaaatcagcgaaggttttgaagctccaagtatggaacagtcaacatattcggccccatggtcacggcattgaaccgaaagttaggaacgaaaacaaggaaccggatt

SEQ ID NO: 604147 - DNA, 229 bp, Homo sapiens
cagaatctatggagcttggattcattaatgcaaacagtacctaataagacccacaggtcctaaactaccacacctgcattacaaattccggtatgggtgctgacctcgttgccagaacccaacctccgagcagtacatgctaagacttcaccagtcaaagcgaactactatactcaattgatccaataacttgaccaacggaacaagttaccctggggataaaccgcga

SEQ ID NO: 604148 - DNA, 587 bp, Homo sapiens
tagtgattttaactcttagcgtccacacgcgctcatcccaacttccccgacgtgccccactcccggggggaaataaccctgccttgaagagtaaatagcaaccaagtgctcagttctatggaaagtatgaatatttatttcaggctttcgatcccaatcgatttcaaaaaacaaagtctgatttctctcctcagagcagctgaggcctccatgttacgatggtttcatggagatggaaggagcacatttcatcaggcttagcacaaagtccctgatgcccaccatgtcccagccttaggaaaggaaagaaacagaattcaccaccatggggctgaacgaatgcacacacactaatgtaaatgagcagctaaaccttggcaaattggtttttttgtaaagttagtaacgtgggtttttttccattttctttagctacccagtatatgcagcacttgtgaactcccaacaggttcccagctttaaacacattaaacatcttgaaagactattgaattcttcaagaatctaaaaacagaccaaaggtgttttgctgtgaacattctgtagagacgaagtgaggcgggagt

SEQ ID NO: 604149 - DNA, 1649 bp, Homo sapiens
cgaggcgctcgtcgatggcattctctgagcatacacgaggatagcgtcgatgtggctcgtcgttccgattcgtgggcaggagagggctcatgtggggctctgtgctagtgtccgtgggctctccgcgcagcgtatgtgcatgataaagagaaggttcgtgctcgacgtagagactgcacgtacccgtgcactctctcgccagttaacaggggattcgtcgaatgaaatggactcagggcagacacacagatgaagagttctcttcactcaattctccaccctaacctgtactcaatagggttcctagggttgcgatctgcgtgtagttgacagaataggcaagcacacgtaatcaaaactacaatctcctcctgataatatggcagcttcagaggtgtgtagggatccctgtgtccaagtgccgtggaatgggcatcttgtgaaagggaattgagaggagcagtgtcgattttgctccagcacgccatggaggtggagaccatgtgcacgtgttaggggacggccacgtagcgcgcacactgtaatgcgctcccctggggacacctcacgacggcgtggccgctctttcctcctcttaacctcgtgcaccggtgaattccacacgcgaaatgtgaatccacacacgttgtgagggggcaccctttgaacgggagcaaaacacgttctacaagggtggcagaagggaatttatacgcaggtgggagatggccttgtgcgaaacagggccgccttattgttggcgccacagaaatttcttctgtggcaatttttcttacatcccaaacgaggtaataaccttgagttgggggcggcccaattccttacggcaaagaaacattagtggacctcctggattatagacccttcccagttgagggggtatagagaaggagagagcacctggtctctgtggcatctagacataagagtaaactagatcaatagacagaggaggcggggacatagctatacgaggaatggccatattccccattgagaagtggccccatctaggggagcccgcgcgccaaaaaggggaccaccagagcaattacatatgggagcaaagcccccccagacaggggaaggggtaccccagagagggacaggccacaccgggcagaaggcacacgaaccgatatgcgcataggtcgtccataggacccacaagggggaggtggtaaccaatatgcaattggacggcgaggaaagcacgagagaaagaggaggaggccaccaagagaagccagttggcactatccgtatggacggatgagaaaagggggacaacgtccacaagggagggcaccaagtggaggcaagaaaagcccctgggggaggccccccgtttttgggaacatgcaccagaggacgagacctatagaggccccgggaccacggaccaaacggtgatagggggcccacaaactcagtaggtacccccgcactggttatagtagcacggaacgagaggcactatgagcaacaacaaacggcacacaaacggaaaaaagagagcatacgatacaacgagatacggggagaaaactacaacgacaggggaacaacagagaggaggaacagatatgagcgacaagtggagctaaagaaggagcaggaactatcag

SEQ ID NO: 604150 - DNA, 261 bp, Homo sapiens
gttttctaaaactcatcaaactgtacatttaaaactgatgattttaagtaaattgtgcttcactgaatttgttaaaatagcaaccaaataattcactacactaacaaaaataatgagaattatgtttctcaataaatgcagaaaaaggatttgataaaagtaaacacctataaatgacacaatcttagcagattaggaataaaagagaacctccttaacctgataaagaggttatttcaaaaagaaggagaaggagagaag

SEQ ID NO: 604151 - DNA, 288 bp, Homo sapiens
ggggctgaccctgctacctgggcgtatggtcactttaagaagtatgacaatgtggcatatcgcacactacgtgtgatacaccagaaagctagattaacactctgtaccaaaaaaaaaaaaggccacacacacaacttagggaaagagatggtttccgagtcaattttcccatttatgtggctgaaaataaatttggccacttcccatggcttactcttcacgcaaaatttaggtcaaattaagggcggggcgcagtgggctcatggcctattaatcccaggcgcattg

SEQ ID NO: 604152 - DNA, 506 bp, Homo sapiens
atactactactaaattcgcagcaaggtcgacacaaataatattaaagtaataaatgaactttttaagatgaagcagttccccatgaaaaagttaatgcagcatctccatcagaaatccactcttctagagatatgaaaatcatcttaacacccaccctacatacacagacacacacacacacacacacacacacacacacacacacacaaacacacacacacattcaccctaaggatacaatggaatactgaaaagagatcacttccatgaaaatttaattaaaagacacacaaaaaaacaaaaagcctgtccaacctatgagaatcattactctactaggaacgtcaatgtttgtgtagatgagaccatctcatgctctgaggctccagggatactgttactaatttatgcacttgggagaaggcttagaatagaggatgtagcacattttgcaatcccatatattgtatggccagctatgccaatgtggagcaattggttcttt

SEQ ID NO: 604153 - DNA, 934 bp, Homo sapiens
gacaccgagcgaagaaacatcgcagaagtctctcttctcgcctgcccgtcatgtctacggtccgagtctcctcgcgaggctggagcagacttggacgctaagctcgacattgagcgaggttcgaggctgttcgagagacgagacttgaatagagcacccttgaggagccgtgttgctgcggccatggaggataccgctcacggacatgttgtgcctgaatcgaggagcatacgcagagatagccacagacgactgcgcagcggggctgcgggttgtagtgtcagcatcatgcaccctaggtggcggcgcgtagggaatgctgtctagtgcaataatgcggacggcgcgagcacgagagggtgggactcgcgatacgcatgtctgatgggaaaccacagatccgagcttgtcgtgctcacgagtaaccagttcctacccatacagccatagtagtccaccttaaatgtgtcgctccatccctctcatgcccgagtggccttcaaagcacggcatacgtgtaatgacacaatctacacgtacagggacgctgttactcttgttgccctcaggggtggtggaagggtcagactttgaccccgatggagtttgtacacacttcttgttccatgcgtaagaccggacgggcaccgtgtgacgaaccgccaggctgcgccgtctgggggggctagaagcgtaacaaccgacctggaggaagcgaatgtgggttccccctcgctaagttgagtggccctctgtgtcgcgatgacacgaaaagacgcggagagagcgcttagcctgccgtgatagaggtatgagagacacccccaaagcagttgttcgactaagcgctagattgagaagaaatcgcggccccgtgggtattccaacatattacccaagccgtaaggaaagtatcgtggctcaatagggggcc

SEQ ID NO: 604154 - DNA, 117 bp, Homo sapiens
acatttaagaataatccgagaatgcattcaaaaactcttctcagtgcatcgccaggctcatgagggctagaagcactgctgattgctttctctactagtaactccatagcccagctt

SEQ ID NO: 604155 - DNA, 612 bp, Homo sapiens
  misc_feature (114)..(114): n is a, c, g, or t
gcattaaaagaaaaacatgccgtgaaaatgccgcacgttaaatttcaatattaaagcaagttctagtgtattgtgttggagttccttggtaatcaacatacgttgttcacatcntacacctgtacttcaataggtatgactttcgtcaacgaggaggcgaattgtgagggtagaccagtgttacagttggacctttgttccttcttaatgcatgctgggaagtactaacgctaaaaaagtgattttgtgaccgcatattatgttcagaaaataactaatatgtgatacctttttcatagatacctggtatataggggtccagggggatcggaggggaaaaacttatgttacaaggagattactaagctacaaggtttaaaggtaattaaggatggaaccccattgaaaatgcaataacagtccattccacgtcgaaaaggagaatcatggttgaattgatgtgaggctttggaaacttgagtggcacttttgcgaaaaaatttgtccgaggagggaaccttggggtggatttagacgagtttaggggtacaagaattgagattggaggctggacattgaggtcccgagtgagttaagaaccatatatttggc

SEQ ID NO: 604156 - DNA, 405 bp, Homo sapiens
tccctagtgccaggtttttcccctcacttggggggttctacataccccgcacagaggcccgggcccctggggagagggcagcatctcctgccttctgaggggtttcttgggcctcacgggtgataagaagggagaggagtggttctctcttcgtgccctcactagggccttagggcaacccaggagcaaactcccacacacgcctctccatctctcagccaaggagaagccacctgggtgacgttatagtctccaaccatatatagtaaggtggagaagagggtatgggcctggtcccaaccattacagggtgaaagaattataaacgagataaaggaagatacgagttgggatgaggccccaggaaaggagcagaatgcaccccatcagaagcaatatgcaggg

SEQ ID NO: 604157 - DNA, 354 bp, Homo sapiens
gcgtccgtgtaatatcatatctggagacagtcatgatcttgctagtgatttactatggttgggactccaaagttcagtgccaagaagctgccgcgaggtgagatcaagtgtgagcctatcgatcaggatggtcacctggcacgcatggcacaatctacctcactcttatcagagtctgagctactggcagtgctttcagctctgagttgaggcacctcgaagcttgtatctgtggtgaaggatcctacagtgctgtgggagtgctcacatttttcacaagagtaagtcccttaacaaagccttccagccatccaaggcctaaaggggggctttggcagacaaggtagagccgag

SEQ ID NO: 604158 - DNA, 255 bp, Homo sapiens
  misc_feature (155)..(155): n is a, c, g, or t
atcagcgcctcaaccccaacagggctacccttgctgcatcctggatcctgagtcctggccggtgctcctgcccacgatcactcggtctctcttcatcccattcctgcctcccctctctccatctggccacctctcccgtgcctttcaaaaccggngtctagggagttcccatcgtggcccagtggttaacgaatccgactaggaaccatggggtggcgggttcgattcccgcttttgtgttccggggatcctcta

SEQ ID NO: 604159 - DNA, 222 bp, Homo sapiens
tacggctttgccaatggcattatcgaagaattcacaaaaaacagtacctcatcatcccctaccatcataagccaccatcagcctccttaacctctacttctacctacgcctaactctactccacttcattcacatgctctctccttttttaaaaatcgtaaaaatacaaatgacagtttgaacatacaaaacccaccccatttctccccacagtcatcgccc

SEQ ID NO: 604160 - DNA, 180 bp, Homo sapiens
ccggtgctcatctcaatatttaacattttttgaaatttactctcttagcaattttgaatgtataataccctattattaactatattcaccactctatgcaatatatctcaaacatatacaaaaaaattcttcttgtgtaactgtagctttttgtacccattgatcacatggccactcaat

SEQ ID NO: 604161 - DNA, 267 bp, Homo sapiens
cccccagggcccatgccctgttggggggggtgtatatttacaaaaacaaaaccaccaaacccccccttgggatataaggtagcattcccaaattaaagactggggcttgttgaggggcaatcccctgactcccaaagttagttccagtgggttttattgtttttgtgactgaaggatttattcagactgtggacttttcttttgatgtaacaaaatgcttttattttaaatatttgtaaataaaggccctgtttttagattaaatta

SEQ ID NO: 604162 - DNA, 3109 bp, Homo sapiens
  misc_feature (3093)..(3093): n is a, c, g, or t
  misc_feature (3095)..(3095): n is a, c, g, or t
ggtcccaggcgtgcggctggccatggcgctgttctacgtcgcgcggtacccgggccccgatgcggcagctgcggcggggccggagggcgcggaggccggggcgcacggcagggcccgcgcgctgctcgagcggctgcagagccgggcccgcgaacggcagcagcagcgggagcccgcgcagaccgaggcggctgcatcgaccgagccggcgaccaggaggcgacggcggccccggcggcggcggcgggtgaacgacgcggagccggggagcccggaggcgccgcagggaaaagcgacggaaggcggacggcgaggacgctgggcgcagaaagcaacgaggaggcgccaggggagcccagcgcagggagcagcgaggaggcgccaggggagcccagcgcagggagcagcgaggaggcgccgggggagcgcagcaccagcgccagcgccgaggcggccccagatggaccggccctggaggaggcggccggacccctggtccccggcctggtgctgggggggttcgggaagaggaaggcgccgaaggtccagcctttcctgccaaggtggctggctgagcctaactgtgtcagaaggaatgtcaccgaagacctggttcctatcgaggacatccctgacgtccatcctgacctgcagaagcagctgcgggcacacggcatctcgtcctactttccagtccaggcagctgtgattcctgccctcctggagagcgcagcctgtgggtttctggtgggcagaggtggctaccggcctagcgacctctgtgtttctgccccaacaggcagtgggaagacactggccttcgtcatccctgtggtgcaggccctgctttcgagagtggtctgccacatccgtgccctggttgtgctgcccaccaaggagctggcccggcaggtatgtggaccctagacctggagcgtggcaccgcccgcctcagcttccctgctgagtgcacagcgatcagcccctgggggacccagattagatctggggtcctttttgctgcagtaggtggacaccagctacctccaggccagtgacagacttctcctagcaggtgagcaaagttttcaacatctacacagatgccacacctctgagagtctccctggttacgggacagaagtctctggccaaggagcaggagagcctcgtccagaaaacgtaggttgtgtcagggtgcgggtttttcagggggtccctgctcagccctgcaggtggcctgaggcaccgtgggagcagaggaggggccaccatctttaaccacctgttcccgtgaagaggaggagctcccaccggcccccttcccatgtggggtggagtcggggctgtggggtgaggcagcgtcttgctatccggaagcccttgagaaagcttccttctctcgagctgctctctggtctgtagagctgatgggtaccgctgcttggctgacatcgtggtagccacccccggccgcctggtggaccacatcgaccagaccccaggattcagcctccagcagctccgcttcctgattatcgacgaggctgaccggatgattgacagcatgcatcagtcctggctgccgcgggtggtggcggccgccttccagagcgaggaccccgcggacccctgtgccctgctccagcgaaggcaggcccaggctgtgacagccgccagtatccagcagcacgcccaggtgctggcctcccctgagcagagtcctctgcacacagctctccttccttaatgcccagagataagggtggcttgagctctggtgcacagaaccgcatcgtactgtcacgtgagctggacccaccttgctcctggtctgcggcagtctctcagcacctgctgtccccagatgcccctgcagaagctgctcttctcagctactctgacccagaaccctgaaaagctgcagcagctgggcctccaccagccccggcttttctccacagggctagcacacaggggcctggaagatacagatggggacggggattcggggaagtatgcctttcctgttgggctcacgcaccactacgtgccctgcagcctcagctctaagccgctggtcgtcctgcacctggtcctggagatgggcttctcgagggttctctgcttcactaactcccgagagaactcccacaggctcttcctgctggtgcaagcttttgggggtgtggacgtggctgagttctcctcgcgctacgggcctggccagaggaggatgatcctgaagcagtttgaacaggggaagatccagctgctcatcagcacggacgccaccgcgcgaggcatcgacgtgcagggtgtggagctggtggtgaactacgacgccccccagtacctgagaacctacgtgcaccgggttgggaggacagctcgcgctgggaaaactggacaggccttcacactgctcctgaaagtgcaggagaggagattcctccgaatgctaactgaagctggggcacctgagttgcagcggcacgagctctccagcaagctgctgcagccgctggttcctcggtacgaggaggccctgtcccagctggaggagtctgtcaaggaagagcgcaagcagagggcggcctaggctggggctcagagggccggagggactgaacgctcaccaccctgaccctccttccagagcagtgctgatcactggatcctgtatgtgaggaaaggaatcccccagtggacacagccttcctccccaagcacgtggtctctgcgccaggcagcccgggcgtcagagctcaagcacctgccccgactggagacttcagggcttgtcactttcagagtgtggaggtcaggatggctgcgggcaatgaagccttagtaaaacggtgaaaagtactcccagacggacgcgggcacccgtcatgcttttgctgagagttgggggcattaaccttgagctaatgttaaaaatcaagctcttggccaggcatggtggctcatgcctgtaattccagcactttgggaggccaaggcgggtggatcacctgaggtcacgagttcgagaccagcctgaccaacatggagaaaccctgtctctactaaaaatacaaaattagncnggccagtctgtgag

SEQ ID NO: 604163 - DNA, 103 bp, Homo sapiens
cgagagatcggtctcgttcgagctgcttgagttccaggcggaatggccgcgttgcccgccgaatcagtctgatcttcatacggcggaacaagcggcgcatgat

SEQ ID NO: 604164 - DNA, 2825 bp, Homo sapiens
  misc_feature (2809)..(2809): n is a, c, g, or t
  misc_feature (2811)..(2811): n is a, c, g, or t
ggtcccaggcgtgcggctggccatggcgctgttctacgtcgcgcggtacccgggccccgatgcggcagctgcggcggggccggagggcgcggaggccggggcgcacggcagggcccgcgcgctgctcgagcggctgcagagccgggcccgcgaacggcagcagcagcgggagcccgcgcagaccgaggcggctgcatcgaccgagccggcgaccaggaggcgacggcggccccggcggcggcggcgggtgaacgacgcggagccggggagcccggaggcgccgcagggaaaagcgacggaaggcggacggcgaggacgctgggcgcagaaagcaacgaggaggcgccaggggagcccagcgcagggagcagcgaggaggcgccaggggagcccagcgcagggagcagcgaggaggcgccgggggagcgcagcaccagcgccagcgccgaggcggccccagatggaccggccctggaggaggcggccggacccctggtccccggcctggtgctgggggggttcgggaagaggaaggcgccgaaggtccagcctttcctgccaaggtggctggctgagcctaactgtgtcagaaggaatgtcaccgaagacctggttcctatcgaggacatccctgacgtccatcctgacctgcagaagcagctgcgggcacacggcatctcgtcctactttccagtccaggcagctgtgattcctgccctcctggagagcgcagcctgtgggtttctggtgggcagaggtggctaccggcctagcgacctctgtgtttctgccccaacaggcagtgggaagacactggccttcgtcatccctgtggtgcaggccctgctttcgagagtggtctgccacatccgtgccctggttgtgctgcccaccaaggagctggcccggcaggtatgtggaccctagacctggagcgtggcaccgcccgcctcagcttccctgctgagtgcacagcgatcagcccctgggggacccagattagatctggggtcctttttgctgcagtaggtggacaccagctacctccaggccagtgacagacttctcctagcaggtgagcaaagttttcaacatctacacagatgccacacctctgagagtctccctggttacgggacagaagtctctggccaaggagcaggagagcctcgtccagaaaacgtaggttgtgtcagggtgcgggtttttcagggggtccctgctcagccctgcaggtggcctgaggcaccgtgggagcagaggaggggccaccatctttaaccacctgttcccgtgaagaggaggagctcccaccggcccccttcccatgtggggtggagtcggggctgtggggtgaggcagcgtcttgctatccggaagcccttgagaaagcttccttctctcgagctgctctctggtctgtagagctgatgggtaccgctgcttggctgacatcgtggtagccacccccggccgcctggtggaccacatcgaccagaccccaggattcagcctccagcagctccgcttcctgattatcgacgaggctgaccggatgattgacagcatgcatcagtcctggctgccgcgggtggtggcggccgccttccagagcgaggaccccgcggacccctgtgccctgctccagcgaaggcaggcccaggctgtgacagccgccagggctagcacacaggggcctggaagatacagatggggacggggattcggggaagtatgcctttcctgttgggctcacgcaccactacgtgccctgcagcctcagctctaagccgctggtcgtcctgcacctggtcctggagatgggcttctcgagggttctctgcttcactaactcccgagagaactcccacaggctcttcctgctggtgcaagcttttgggggtgtggacgtggctgagttctcctcgcgctacgggcctggccagaggaggatgatcctgaagcagtttgaacaggggaagatccagctgctcatcagcacggacgccaccgcgcgaggcatcgacgtgcagggtgtggagctggtggtgaactacgacgccccccagtacctgagaacctacgtgcaccgggttgggaggacagctcgcgctgggaaaactggacaggccttcacactgctcctgaaagtgcaggagaggagattcctccgaatgctaactgaagctggggcacctgagttgcagcggcacgagctctccagcaagctgctgcagccgctggttcctcggtacgaggaggccctgtcccagctggaggagtctgtcaaggaagagcgcaagcagagggcggcctaggctggggctcagagggccggagggactgaacgctcaccaccctgaccctccttccagagcagtgctgatcactggatcctgtatgtgaggaaaggaatcccccagtggacacagccttcctccccaagcacgtggtctctgcgccaggcagcccgggcgtcagagctcaagcacctgccccgactggagacttcagggcttgtcactttcagagtgtggaggtcaggatggctgcgggcaatgaagccttagtaaaacggtgaaaagtactcccagacggacgcgggcacccgtcatgcttttgctgagagttgggggcattaaccttgagctaatgttaaaaatcaagctcttggccaggcatggtggctcatgcctgtaattccagcactttgggaggccaaggcgggtggatcacctgaggtcacgagttcgagaccagcctgaccaacatggagaaaccctgtctctactaaaaatacaaaattagncnggccagtctgtgag

SEQ ID NO: 604165 - DNA, 2893 bp, Homo sapiens
  misc_feature (2877)..(2877): n is a, c, g, or t
  misc_feature (2879)..(2879): n is a, c, g, or t
ggtcccaggcgtgcggctggccatggcgctgttctacgtcgcgcggtacccgggccccgatgcggcagctgcggcggggccggagggcgcggaggccggggcgcacggcagggcccgcgcgctgctcgagcggctgcagagccgggcccgcgaacggcagcagcagcgggagcccgcgcagaccgaggcggctgcatcgaccgagccggcgaccaggaggcgacggcggccccggcggcggcggcgggtgaacgacgcggagccggggagcccggaggcgccgcagggaaaagcgacggaaggcggacggcgaggacgctgggcgcagaaagcaacgaggaggcgccaggggagcccagcgcagggagcagcgaggaggcgccaggggagcccagcgcagggagcagcgaggaggcgccgggggagcgcagcaccagcgccagcgccgaggcggccccagatggaccggccctggaggaggcggccggacccctggtccccggcctggtgctgggggggttcgggaagaggaaggcgccgaaggtccagcctttcctgccaaggtggctggctgagcctaactgtgtcagaaggaatgtcaccgaagacctggttcctatcgaggacatccctgacgtccatcctgacctgcagaagcagctgcgggcacacggcatctcgtcctactttccagtccaggcagctgtgattcctgccctcctggagagcgcagcctgtgggtttctggtgggcagaggtggctaccggcctagcgacctctgtgtttctgccccaacaggcagtgggaagacactggccttcgtcatccctgtggtgcaggccctgctttcgagagtggtctgccacatccgtgccctggttgtgctgcccaccaaggagctggcccggcaggtatgtggaccctagacctggagcgtggcaccgcccgcctcagcttccctgctgagtgcacagcgatcagcccctgggggacccagattagatctggggtcctttttgctgcagtaggtggacaccagctacctccaggccagtgacagacttctcctagcaggtgagcaaagttttcaacatctacacagatgccacacctctgagagtctccctggttacgggacagaagtctctggccaaggagcaggagagcctcgtccagaaaacgtaggttgtgtcagggtgcgggtttttcagggggtccctgctcagccctgcaggtggcctgaggcaccgtgggagcagaggaggggccaccatctttaaccacctgttcccgtgaagaggaggagctcccaccggcccccttcccatgtggggtggagtcggggctgtggggtgaggcagcgtcttgctatccggaagcccttgagaaagcttccttctctcgagctgctctctggtctgtagagctgatgggtaccgctgcttggctgacatcgtggtagccacccccggccgcctggtggaccacatcgaccagaccccaggattcagcctccagcagctccgcttcctgattatcgacgaggctgaccggatgattgacagcatgcatcagtcctggctgccgcgggtggtggcggccgccttccagagcgaggaccccgcggacccctgtgccctgctccagcgaaggcaggcccaggctgtgacagccgccagcacctgctgtccccagatgcccctgcagaagctgctcttctcagctactctgacccagaaccctgcagggctagcacacaggggcctggaagatacagatggggacggggattcggggaagtatgcctttcctgttgggctcacgcaccactacgtgccctgcagcctcagctctaagccgctggtcgtcctgcacctggtcctggagatgggcttctcgagggttctctgcttcactaactcccgagagaactcccacaggctcttcctgctggtgcaagcttttgggggtgtggacgtggctgagttctcctcgcgctacgggcctggccagaggaggatgatcctgaagcagtttgaacaggggaagatccagctgctcatcagcacggacgccaccgcgcgaggcatcgacgtgcagggtgtggagctggtggtgaactacgacgccccccagtacctgagaacctacgtgcaccgggttgggaggacagctcgcgctgggaaaactggacaggccttcacactgctcctgaaagtgcaggagaggagattcctccgaatgctaactgaagctggggcacctgagttgcagcggcacgagctctccagcaagctgctgcagccgctggttcctcggtacgaggaggccctgtcccagctggaggagtctgtcaaggaagagcgcaagcagagggcggcctaggctggggctcagagggccggagggactgaacgctcaccaccctgaccctccttccagagcagtgctgatcactggatcctgtatgtgaggaaaggaatcccccagtggacacagccttcctccccaagcacgtggtctctgcgccaggcagcccgggcgtcagagctcaagcacctgccccgactggagacttcagggcttgtcactttcagagtgtggaggtcaggatggctgcgggcaatgaagccttagtaaaacggtgaaaagtactcccagacggacgcgggcacccgtcatgcttttgctgagagttgggggcattaaccttgagctaatgttaaaaatcaagctcttggccaggcatggtggctcatgcctgtaattccagcactttgggaggccaaggcgggtggatcacctgaggtcacgagttcgagaccagcctgaccaacatggagaaaccctgtctctactaaaaatacaaaattagncnggccagtctgtgag

SEQ ID NO: 604166 - DNA, 1154 bp, Homo sapiens
  misc_feature (1138)..(1138): n is a, c, g, or t
  misc_feature (1140)..(1140): n is a, c, g, or t
ataccgtgtgggcagagggttgcactgggaacctggggcccctaaccaaccctcacctccaccccgaccccctgccgtccctgtagcaccactacgtgccctgcagcctcagctctaagccgctggtcgtcctgcacctggtcctggagatgggcttctcgagggttctctgcttcactaactcccgagagaactcccacaggctcttcctgctggtgcaagcttttgggggtgtggacgtggctgagttctcctcgcgctacgggcctggccagaggaggatgatcctgaagcagtttgaacaggggaagatccagctgctcatcagcacggacgccaccgcgcgaggcatcgacgtgcagggtgtggagctggtggtgaactacgacgccccccagtacctgagaacctacgtgcaccgggttgggaggacagctcgcgctgggaaaactggacaggccttcacactgctcctgaaagtgcaggagaggagattcctccgaatgctaactgaagctggggcacctgagttgcagcggcacgagctctccagcaagctgctgcagccgctggttcctcggtacgaggaggccctgtcccagctggaggagtctgtcaaggaagagcgcaagcagagggcggcctaggctggggctcagagggccggagggactgaacgctcaccaccctgaccctccttccagagcagtgctgatcactggatcctgtatgtgaggaaaggaatcccccagtggacacagccttcctccccaagcacgtggtctctgcgccaggcagcccgggcgtcagagctcaagcacctgccccgactggagacttcagggcttgtcactttcagagtgtggaggtcaggatggctgcgggcaatgaagccttagtaaaacggtgaaaagtactcccagacggacgcgggcacccgtcatgcttttgctgagagttgggggcattaaccttgagctaatgttaaaaatcaagctcttggccaggcatggtggctcatgcctgtaattccagcactttgggaggccaaggcgggtggatcacctgaggtcacgagttcgagaccagcctgaccaacatggagaaaccctgtctctactaaaaatacaaaattagncnggccagtctgtgag

SEQ ID NO: 604167 - DNA, 1463 bp, Homo sapiens
tcagtgggcggacagaataacatttgaataataattgtgtttgagcccgaaatgaatgtagtaccccagagttactatcagtaagaacaggatacagaagagatctgatgctgtgatcttgcgttcatctgccacgatggttccattaaaagtagacctcaagtgttggaacgacagaaagtatgccacgggacagtcaacatatatgttgatgtatggacagtcatcgtcaatagcgtgtgcacaacgagtacatctgaggtgagtcaagacgtcgccagttacacctatgtggtagaggcgatgtactgtaaagttgtcgaagctaaagttttagcatgcagtgggtaataagaaaagtctaacaagcacctagtctgcatgactctcaagctgggtaaacaccacagtttggcaacggctactgtcggcactacatttatctttagaataattgcacgtgaatctgtgggtacggtacctggtgtgtgctctccctgtcacaatcgtgacactggtaaacttacagttccatgtagacttaaaagtcgacatggtgtatactggtttgaaagggaagtgcgttagtaaataactgttttgggggatagatcggggggcttgatatgacttaaaatcaagagttctagcatggtgtatgtttagaccattttaacaggataacttacggcttgcgaagttcgtggtaggagagtttagagaaaggaataaggttattgtcttaacaaggttgcgcagggggaataggtggggaaattataaatggtttgggcagtttgtttgttgaagaaaagttgactggcaaagactttgggattagtactggggggatatgggggttgggtggagaaaagggttgcaaactgggacaagggaagattccatagcgctggaatagtagcacgcggcgggcacaacgggtacactagaggccagatgcctggcaacaccgcaaagaccacaaaaccgtaaaggagcctaaaaccggggaatccgggaaacaagcacaaggggagagggcccacaccaggaagaaggcggagggaacatagaagaccaaaggggaggcgtagccccaaatggaatataaaccagtgttgatagaaggggacaccaaagagggacccgacggcaaaaaaaggagaaagagaggcgcaaaaggggggaacgagacacgggggggaaccacccccgggaagaaaaaacgcccgggagggccaaaaacacctgtgacgagaacaaaaggggcgacacagcccaaacatctgcggggaaagaatccagtcgagcagatcctaaaaaatgaagacaacaagactaagtaacaacaatacgaagagaccaacaaacgaaaacgacacaaaggaatgatatgagagagatacgaccaagtgtagacgaaaagcacgacagagacgacacactcaacggacaacagcgcc

SEQ ID NO: 604168 - DNA, 100 bp, Homo sapiens
gttgtttagctttggaaagttactgttaaatgccttgcttgtatgatcgtccctggtcacccgtactttggattttgcaccatcatgtttcagtgaagat

SEQ ID NO: 604169 - DNA, 322 bp, Homo sapiens
  misc_feature (111)..(111): n is a, c, g, or t
tagtgatgagtttgctaatacaatgcctgtcaggccacctacggtgaaaagaaagatgaatcctagcggctcagagtcactgcagtcatgagtcatttcatattagcttcncgtgggagtgctgtgcgagttcagtccataattactcttgaccgccgtgtttgtggacgatgcggatgtattactgtgtaagcgcgacggtgcaatttatgctccgtcgctgtctcacgttcttacttccgtacttgtccacatcctggtcggtcgtagcttaatctacgactaaaaccccctcacggcaacgcccaactgtggatacttc

SEQ ID NO: 604170 - DNA, 608 bp, Homo sapiens
ccttactattgaatgggatactatatgccttccgcgggcatctgtggtatgatacgtgcctatgggatgagcggttttaacacctcgggtttactcatgatgtatgttatatcaaaggtacatttactgcttccagtatacaatttggcgcttactgaccgacctgactataaaaggcaagttaaaaatatagctgctttgcattggaacggagcgaagacaacggctctataagttctgttttataataaggcttttattacaaactggatgcctttattatacttactgtccatatgcacatcagtcgtatgtataagatgtgttctataattatgcagttgctgatactgccatgcattgaccagtgacatcataaggcaggcgctactgctgcatcgttgctactttcttatctgtaatacaaactatagagtgtctgactagaaggtctctttgagattgacttctgtaagaagatattaccttttgcttgtgaaaaatgcatcactgggagtggaagtgttttattccgacgtaatgtggtcgaaattgattgccgggggaagaattttagacattgatccctgccggtacctgggattttt

SEQ ID NO: 604171 - DNA, 285 bp, Homo sapiens
  misc_feature (27)..(29): n is a, c, g, or t
  misc_feature (57)..(57): n is a, c, g, or t
  misc_feature (64)..(64): n is a, c, g, or t
  misc_feature (67)..(67): n is a, c, g, or t
gcaaaaggcttggtcatgggaggcagnnnaagtgacatggaaaagccaggactacangacctgngcngatgaagtacggaataattacaagctgtcttaggcccctgatctaagcatgccccttgttctccacactcagaccttagatagtttttgtgtgtgtgtgtttgtttgcttttgagacagggtctcactctgctgcccaggctgcgacgcagtggcacaaacatagctcactgcagccttgaactctcaaactcaagcagtccttccaatcacctaatg

SEQ ID NO: 604172 - DNA, 243 bp, Homo sapiens
gctttcaggccccatgcaggcagccctgcaggccgctgcccacgccagtgtggacatcaagaatgttttggacttttacaagcagtggaaggaaattggttgatactgacccccaggccctgcagtggggctgactccagatttttcctgccctccctggcagccaggaccagcacctgtataccccccactcaactttgacattaccaaatgtgcttcagaaaaataaataatattttttta

SEQ ID NO: 604173 - DNA, 365 bp, Homo sapiens
ggtagggaaaaccagaaatatagaaggatcggagaaaagtgtttattgccctaacggtgattaacctggtggggacagttctattctttctcattttgaaaccagattctgaaaatgtcctaggacaacatgagtcttctgatcaccagggcctcgaactcacccactctgcccataacaatctgacaaaggcagtacatgcttttaaaaactctttctacttatgtgtcaccaaggagatcctccttcttactattacaactgcttatacaggtctggaattaactttcttctctgctgtatatccaacctgtattggtgctacaaataaatttggagcacaacataaacgccttattgcactt

SEQ ID NO: 604174 - DNA, 152 bp, Homo sapiens
  misc_feature (33)..(33): n is a, c, g, or t
  misc_feature (134)..(134): n is a, c, g, or t
aaaagactatttgctaaatatggagaaccaggngaagtttttatcaacaaaggcaaaggtttcggatttattaagcttgaatctagagctttggctgaaattgccaaagccgaatctggatgatacacccatgngaggtagacagcttcgag

SEQ ID NO: 604175 - DNA, 754 bp, Homo sapiens
ctgggattacaggtgtgtggcaccatgcccagctaatttgagtatttttagtagagacggcatttcaccatgtatggccaggctggtctcgaactcctgacctcaggtgatgcacctagcctacgagcctcctaaagtgctgggattacaggcatgagccacactgcaccctggcctgccagtgtctttttaagtacactatgtgatgcttggtaatttgtatagaattagtagacagtatctagcatattgcgttactctgaatattcagtacttttcgaataagcgaatattgcttccttgcttggaatcatcagagtttaaacgtagcttcgtggcatggaccatgatcctaagatgagtttcagttgttgtgttctatagtcatctcttgtacaagcgtggagaagaaaagatatacttactacttagcttcaggtacacatagatgaaaaccgtctttgataaacaaaatttttattgattatacataatagagacaggggctcgctgtagcttccaggctggcctcaaactcctgggctcaagcaatcctcctgtcttggcctcccaaagtgttgggatttcaggtatgagacaccacacctgcccatttacgtgaggattattaatagggcaggttctttgctctcccaggctggagtgcaagtggtgtaagtcacagctcactgcagtctcaaactcctggactcaagcagtgctcccacctcagcctcctaaagcactgggatta

SEQ ID NO: 604176 - DNA, 574 bp, Homo sapiens
  misc_feature (140)..(140): n is a, c, g, or t
  misc_feature (193)..(193): n is a, c, g, or t
tgttggatactgagtggatgtactccctgccttcctcacggccctggctcccagctcccgggctttgtgcctagtggccccatctgcactgacaaaatcaatgctagcaactatgccagtgtgaaggtacccttgtgtgnggacagctgaggtgcccctagcatggagccatggaagggtgcatccctgggcntttcctcactctgggggctggataatcaagggggtgtcttcgtgggaggagctgaccagccaattccacccttttggtttactcagcagactactgtgccaagccctgtgctaaaactgtgttctggggcagacaccaatctgtgcccccacccagtgggccagcttgtctctctccctcatatggggtggtcccaggaagagactgaagtggggagggctggggatgctatggcaggtccctgttgactctgccccaaccccctatccttcctctcagactccagctctgattgtatatggagaccaggaccccatgtgtcagaccagctttgagcacttgaagcaggtgcccaaccactgggtgctgatcatgacgggg

SEQ ID NO: 604177 - DNA, 136 bp, Homo sapiens
agtacacaggctcaagatggagacacaggctcaagatggagaactgcagacggggagtccatcgtacagatgttgtcatactggctccccctcagttactcctgtggtatcacacataacatctgtacgatggact

SEQ ID NO: 604178 - DNA, 404 bp, Homo sapiens
cttctgactgaatctcttccatagaggaattccagggctgccactgacttagttctccatcctcctagccaacctgcttctcctcttgtattctttctttcagtgaattgtaggcaccacccggtcattgaaactaaatatctgggatcatcctagtgtcttctcccatattgctctgacaacaaataaccaccacaggctgcccatgtacttcctgaacctgtcttgaatttgttttctcctctcatcctcaggactcctgcctttaaaaaacatctctcctctgcatcatctcagcagcttcctaactgatctccttgtctccattttgctccgtatccacccccgaatccgttcccattcaggatctctccaaaaataaatctgaccatctaatggacctg

SEQ ID NO: 604179 - DNA, 1493 bp, Homo sapiens
aaaagctacacttgagctgacacacaataggggcactgaagatgatgcagacccagagattaccacaatggcaatatcagaccctcgaggattcggtcatataggaattgctgtacctgatgtatacagtagcttgtaaaaggtttgaagaactgggagtcacatttgtgaagaaacctgatgatggtaaactgaaaggcctggcatttattcaagatcctgatggctcctggattgaaattgatgaatcctaacaaaatggccaccttacatgtagtgctagtgagaattctccttatgcagattctcagcaagaaaggaaacaatgtgcattcaagatatctacataccagcaagcactctcaggactgacatggatcaactgtacccgaattcacactataataactatacagattcacaattatacacccttcactatttacaggactgtccttgttacacctaactgtacagttccatcctgggttttcacagccagaagcatctacatcctcaatgttccctcgaaataatagattgtcgtcaaccataccatcacctacaggctaataactaacgaaacacgtaacccctatcaaaaaggacagacatccaggacctatcaattcgtagacaccacacataatgaatagtataccatcagccactatccgaacaatgtattgacccttatgggaaactgaatccgagtatatcaaacacacaaaaaagacattagacatcacgatgatcatacgacgaggagtcacaacagagacgcaatggagcagcgtgcatcacgcgacccgcgcgacgacgccaagcaccatacaagtacaacaccgggagcgggagagacgagcaaaaagagtaacagagaccagaaggcggaccacatggacaggaaacgaaacaaagacaggtggaatcagcccatcaaacgagaacacagacaaagagtagagcacgaacaccgatacaatccaagagtacgtagtcagaagacaagtgacatctatcgtaaactgaactaagcaggtaagactatgaatagaggaataacgacatcacggaaagcaagaacagcgtaacacgaaaacagcacacaccaagaagaagagggaaccatgagagaggagaagaaagaaaacgaaagatgggagaactaggagcagaagaagagcaagagagaagaaaaaagagaaagagacgagaagaaggcaagagataagaagaagagaagaagcgaaaagagcggaagacgcgacacatagcggaaggaacaacggaggcaacacgagaagaccatgcagacgacgacgacgaagaagtaaagcagaaacagagaaagaagacagagaagagcgtaagagagagacagaaaacaggagcacagagacgagaggaagaagcgagcaggagtgatcagggaaagaaactaagaacgatgagtctgagagacagttgggagagatcaaaagacagaaaaa

SEQ ID NO: 604180 - DNA, 817 bp, Homo sapiens
atgacatgcctggacccttgctgccggaagatcttgcacgatggatcggctgcaggtggtggaaaagcagaaccttagcaaagaggagctgatagcggagctgcaggactgtgaaggccttattgtccgcttctgccaccaaggtgaccgctgatgtcatctaacgcagactgataaacgtccacggtggtcggtgcacgtggttggcacagggctgtggacaatgtggatctggaggcctgtacacaggaagggcatcttggtctctgaactaaccgccaaatgggatctgcctcagtgaccgcagaactcacgttgctggcactgatacattgtgccgtggccaggtcgagaattccccaggctgagcgggcttcgcattgcaacgtgactgggacaccttgggaagcggacaggaaagtaccacgtgggaacactaagaaggggtagaacctgcgaacactgaacccaccgtaggggggaaaatacctgtgaggcgcccttaggggcaatgggaaccacttgggcgaaggaacgacagggacacagagaaagaccacagggcaattacaccgggtcccacaactctggcgaggccagttggccccaagaacagggtagatcaggcgcggcaaactgacaacgcccacgcgcaatgttcgattatgcatccccagcgcaccaggaacagaatctacttccggagggccatgttccacgctacatcgatcgactgcgaatcgacgacaacaagcgaacatagaaggccccactgagcaacacgacccgcactgcctgtggaggaactgcgacaccg

SEQ ID NO: 604181 - DNA, 274 bp, Homo sapiens
agagatagtgcactacatgcaaagcaaaagcctcccaaactgatgtctaagcttgtgaggcaaaaacatcaaaatctggccgggccgcagtgctcatgcttgtaatcccagcacttagggaggtggaggtgggcagatcacttcaggtcaggagttcgggaccagtctggccaacatggtaaaatgccgtctctactacaaatacgagaataagctgggagcagtgcttggcacctgtaatctcagctactcaggcagctaaggcaccagggta

SEQ ID NO: 604182 - DNA, 191 bp, Homo sapiens
gaaacccactagtgtaacacttggagtgacccctctctatactaggagttatacattatcctgatcaggtcatatggttgaactacgttaacagtgctgtacgcgcttgtaggtgtagtgtagggatatgtgtatacatatttcttaccattctcactctaatgagaagagcggaatgacccatatttatt

SEQ ID NO: 604183 - DNA, 442 bp, Homo sapiens
aagccatttacccaactcaagtataggcgatagaaagtagaaaactggacgcaagtacatatagtaccgcaagggaaagatagacaaatactaagcaagcataatatagcaaggactaccccctataccttctgcatcatgaattcactcagcaaatacaccttgcaaggcagagccaaagctaagacccccgcaaacccgacgcagctactacagcaccagctccaaagagcacacctgatctatgtagcaaaatagtgagaagattaataggtagaggcgcaaagcctaccgagcctggtgatagctggttgtccaagcataaatcttaattcaaattagaatttgaccacagaaccctctaaatccccttgtaaatttaactgttcgtccaaagaggaacagctctttggacactaggttaaccgcgcccgggtaccgc

SEQ ID NO: 604184 - DNA, 371 bp, Homo sapiens
tggcacgcgagaagggcttcatcatatgttacgagaactaacagctataaggcatatctgtcactactgttgagacctgaagcgagaccttgaggctcatacctggtgagatcttatgacaagataaggatataagaggataggcgtgccccgaatagtggaccaactggacgcgtgacagtgtatgtctggagcactgcaagggttatagcccagaggatccaaggtgggcccatattgagaggagcaccctgtcatgggagaaggagagctgtgttcgtacatattgaatatgtgagtgcacggtggatccactacccttatgagtctggagttccctgaggctttattcagagggcatggaccgtgct

SEQ ID NO: 604185 - DNA, 226 bp, Homo sapiens
atagccgattccagaggtatccccgctctccagtcgcatcatcatactaacatatatatggaacttctcttcaactattcagacataaaccacataacgttttctgtttttttttttaaaattgagtctcactctgtccacccaggctgcggtgcatcggcgcactcttgcttcacggggacctccaccccccaggtccaagcaattctaccagcctcagcctccc

SEQ ID NO: 604186 - DNA, 88 bp, Homo sapiens
gacagcagcttctacatctgcagtgctgcctgggcagggggtgactacaatgagcattcttcgggccagggacacggctcaccgtgct

SEQ ID NO: 604187 - DNA, 132 bp, Homo sapiens
  misc_feature (28)..(28): n is a, c, g, or t
  misc_feature (47)..(47): n is a, c, g, or t
  misc_feature (59)..(59): n is a, c, g, or t
  misc_feature (79)..(79): n is a, c, g, or t
aattcaaagcttctaaccgatgtacggnggacatgggctcttacccnttccctgcgggnctcttctcccccgacacatnttgttaaaatcaaacctgaataaaactacaagtttaatacgaaaaaaaaaaaa

SEQ ID NO: 604188 - DNA, 561 bp, Homo sapiens
gtatcatatagccttattaccatattctatagcctccccctgatctgctcttcagtcactggagtctgtggtttatgattcagttcataaaagatgtataaatagagaagtcctgaaggagtccctagataaatcttggttatctatacagtcttccacttttacaattatttcaagtcagcaagcctttccttaatgccaatcctagcactaagaaccagggacccagagacagacaaagcacaatccctgccctcaaggaactcattctagtgaaggagactcaaatggaacaactgcaattcaatgcaatcacttggacagcagaaagatcagagaaggctttctagaggaggggaaacagaagctgaggatgtgaacttaaagtttgcctggaaaatatggcacggaagagcacttcaggcagatggaagtaggtgtaaaggaatgaattggggattgggggagcatagagagataaatgagatggaaagggagaaagagataggaaacagagataaagaaagagaaagatcatggaactacacatggtcctggttg

SEQ ID NO: 604189 - DNA, 152 bp, Homo sapiens
ctgacttcgatagagaaaggttagactgtttggaccaaagatgaaggaaagtgatggtagagaaacacctggactaatcttattagtcgtgtcactcttcttgaacagaatgctttgtctaaaagatgtgaatttatagagtttgatgagtt

SEQ ID NO: 604190 - DNA, 378 bp, Homo sapiens
agcttaagcgtcagggtcagggtggtgggagtggcaccccagaggaatatcccttgagctttagcgacatgctgcagggcaggacagtctgcggctccgttaagagctgccgcggtcacaggacccacattagcttgcacggcaaaccaactccttggcttcctcaaggatcgtggggaatgtctcactgtccttggacacctttggcaggaacagcaagcccatggcatcaatccttgggtcagctccgaaagcaggcagagatgtggacttgcaaaccccgggccttccttgttgggcttgaagggggcccctcttcttccggtcggaaattgcttgcccctttgacttgccaggggtttcctaagaaagaacctg

SEQ ID NO: 604191 - DNA, 884 bp, Homo sapiens
ggtgccccgatcgtctgagacgtgtagggtctttaggaatcctgaggtgtctcatagcgttcccccgtgttttgtgcgcgccttgtatgcccgttcaatttccggggtatcttaccccgctgccggtgttgccgcccagggacgcctgtccccggggttttttccccgctttggcgccgcctggggtttaataattatttttcgggtgccccgttgagactgttagcttaacgggggcaaaccacaaaagggcctccttttgggcgtgaggagacccgccgttgtagacggcgttagccctttttcaaaggggccgcggtttgtctctttgtttctttggaccgggaacttcgcggttggttttgctcacgcgtggagacacaaggcggttatcagtgccgcgcaataccgacctatgcgccttccgggcttccaaaaggattgtgcctggccgccggcacatctcctgggttatctcgggattcaccacgcggcgcgcctcccaccgcataaccccacgtgatattttagtagtatctaagagaacaacggggtctttttcaaattggcgccaagtgcggtgttccgaataccggggcctcccaagggtgctcatgcgctcgcctgtgggcgcttccccaaatgttggggggtaacaagggctggcacgcccccacatgccccagcccgtacaggacattcatggcttataaaacaagagcgtcaccacccctttctatgcgatgcatgccaggcacttctgatgaaaaatataccatcgtgtacgaagttcatgggaatatttgcttgaatgaggagccctccatatccccttggtggaggaaaaaaaaatacaaaggggcaggggcgggcaatccatgaca

SEQ ID NO: 604192 - DNA, 236 bp, Homo sapiens
  misc_feature (4)..(4): n is a, c, g, or t
  misc_feature (13)..(13): n is a, c, g, or t
  misc_feature (40)..(40): n is a, c, g, or t
  misc_feature (49)..(49): n is a, c, g, or t
gggnaaaagaaanactttattgattgctcagaatgcaggntggacccanacttaaccacacttacgcaccactctgccactcccgccactttgcctctccagctgaaatcttctttcagcaaggcttcgccagccttgcattagtctcagctatggcttctgaacccagtcctggatggaagtcaccttcacatacacaccatactcaccacacaggctcttatcaaacttagatc

SEQ ID NO: 604193 - DNA, 163 bp, Homo sapiens
aacccgatccctatttgtgagaaaccagacagaggcctgaggtttcaggccagatttatggggaatggggttttcacgtgtggtccacgttgttaggacccacttagggaaacaggtcgcctgtaaaaatagcgacgttaataaaccagaacaatggtttata

SEQ ID NO: 604194 - DNA, 749 bp, Homo sapiens
  misc_feature (219)..(219): n is a, c, g, or t
  misc_feature (385)..(385): n is a, c, g, or t
  misc_feature (402)..(403): n is a, c, g, or t
  misc_feature (409)..(410): n is a, c, g, or t
  misc_feature (422)..(422): n is a, c, g, or t
  misc_feature (425)..(425): n is a, c, g, or t
  misc_feature (433)..(433): n is a, c, g, or t
  misc_feature (438)..(438): n is a, c, g, or t
ggcggcttgctcctcttccggtcgcggacaccgggtgtagagggcggtcgcggcgggcagtggcggcagaatgttggctaccagggtatttagcctagttggcaagcgagcaatttccacctctgtgtgtgtacgagctcatgaaagtgttgtgaagagcgaagacttttcgctcccagcttatatggatcggcgtgaccaccccttgccggaggtggncccatgtcaagcacctgtctgccagccagaaggcactgaagggagaaggagaaggcctcctggagcagcctctccatggatgagaaagtcgagttgtatcgcattaagttcaaggagagctttgctgagatgaacaggggctcgaacgagtggaagacggtggtgncggtgcatgtcttcatnngttacnngcgctcgtatcntgnggcagaangcacnatgtttacggcccctccgcaaagtttgacacaagagtgggtggccaagcagaccaggagggatgctggacatgaagggtgaaccccatccaggtttagctccaggtgggactagaaaagaacgagtggaagaagtgagagattgtggctgtgctgactgggctggtctgtcacgcatgaatcaatgctattaatggaactgttatgcaaggttgacatgtataatggcagttaccaaaaaaaataaaagaaaaatttgggggcgggaggaaagtttaacaactgtgggcgggcaagatatgaaggagtgca

SEQ ID NO: 604195 - DNA, 739 bp, Homo sapiens
  misc_feature (219)..(219): n is a, c, g, or t
  misc_feature (432)..(432): n is a, c, g, or t
ggcggcttgctcctcttccggtcgcggacaccgggtgtagagggcggtcgcggcgggcagtggcggcagaatgttggctaccagggtatttagcctagttggcaagcgagcaatttccacctctgtgtgtgtacgagctcatgaaagtgttgtgaagagcgaagacttttcgctcccagcttatatggatcggcgtgaccaccccttgccggaggtggncccatgtcaagcacctgtctgccagccagaaggcactgaagggagaaggagaaggcctcctggagcagcctctccatggatgagaaagtcgagttgtgcggtattgacagggacccatcagggcgcgcccagctacgcttctcgagaacgcgatgtctgtgacagaagccatcgtgctcatcttcgtggagccgtacttgtctaggagagcangtctctgcagacaggaggggttgactctgcgtgggctattcggaggtcactgtagcacagggccccgagttgtatgtgcgtcaccgagtcacttagctctgctcagctgacaggatcttctgctgggcccccttctctgtgctgagtggaggtagcctctcagcgatatctgctgggataagacatagttaacgtgtaagattcattcgaacagacacactcagcataaactgcatacgtgtctggtctgaaccggggcaccagaaactaacaagattacaataggaccctaatactgtaactccca

SEQ ID NO: 604196 - DNA, 206 bp, Homo sapiens
tacagaggcatacagctacaccatcacggacgagcgggaaatcgtgcgcgtacatcaaggagaagctgtgctacgtcgccctggtacttcgagcaccgagatggccaccgccgcgatcctcctctgactctggacgaagagctacgatgctgcccgagtggccaggctcatcaccacttggcaagtgagacggttccggctgtccg

SEQ ID NO: 604197 - DNA, 432 bp, Homo sapiens
cattttttcctctccgtatggcataccacacctgtgatcccagaactccagagtcagtaagaccttgtctcaccgtgcagcagcaaatcacggatgacagatgaacagcaaaggaactgtccctccacgtggcaggaaggaacaaaagagctttgttgagcagcctggttgtcgaattttacgggttttaggaattctccttaattaccggggaactggcaaagttcataaatggtatcctcagtatgaaagtgcttttctcaaaatatcagccatacattaatggctaccagcacacccctgctcaggcccagaaatctactctgccagctcctaccctgttactccacctccccatcaacttcgaagttctgtttgactcccattgcttattttattttgcttttaaaaaacaaaacaaaacaaacaaac

SEQ ID NO: 604198 - DNA, 256 bp, Homo sapiens
  misc_feature (189)..(189): n is a, c, g, or t
  misc_feature (197)..(197): n is a, c, g, or t
  misc_feature (242)..(242): n is a, c, g, or t
  misc_feature (252)..(252): n is a, c, g, or t
caggaagaaaatctatggaaagagaaggctacgagtcctcgggcaatgatgactacaggggtagttacaacaccgtgctctcacagcctttatttgaaaagcaggacagagaaggtccagcccttccacgggaaagcaaacttcacccatttcaggacatctggtacccccgggccttcatcaccttgngaaaagancagcttgcttgggtcccgaagaccccaattggaattggtattgantggtcggcgnttca

SEQ ID NO: 604199 - DNA, 362 bp, Homo sapiens
ctggcctcccgagtagctgggaccagaggcgtgcaccgtcacacccagcttcaagtctcttattataaagttctggccacgcacagtggctcgcaactgtaatctcagcactttcggaggccaaggcggtcagatcacctgaggtcaggagtctgagaccagtctggccaacatggagaaactccgtctctactaaaaatacaagaattagctgggcatggtggcacacgcctccagtcccagctactcgggaggctgaggcaagagaattgcctgaacctgggaggcagaggttgcagtgaaccaagatcaagccatttgcactccagcctgggcaacacagtgagactccgtctcaaaaa

SEQ ID NO: 604200 - DNA, 190 bp, Homo sapiens
cagaagtgaattagcagatattgaggctaccttactctgcaatgattactagatacttgcagggagcaagtagacccgaacagcggctactaggcagctaaggcaaccgcttgagcaatgtggagttttgtgggcgaagctacagctgggtgtgtttcagtagatttagtaattaattgccaagacccta

SEQ ID NO: 604201 - DNA, 179 bp, Homo sapiens
caagctgctgggtcatgggaggggcctcaggccgcaggagggacacgccccttcccagactcctctgagctctgccccgggctccctggctgcgttcgcgcgagaggctgcgttcgcgagcgagtctgctttagcgcgagcggctgcgttcgcgagcgcggctgcgttcgcgcgcgagt

SEQ ID NO: 604202 - DNA, 148 bp, Homo sapiens
attctatcactgattagagaaatgcaattgaaaccaagtgagataccatctcaacagtcaaatgctattattaaaactcaaatataccttctggtgaggctgccgagaaaaggggatgcttatacactgttgatgggagtgtaaatta

SEQ ID NO: 604203 - DNA, 159 bp, Homo sapiens
aaaccatcatgcgcaaacccatcagccgcctggcggcttttatcggcttgggcgttagcctggtcgccagcagtctggcagcccctgccgtggcacgagcagaaggcaagatccgcatagccgagcagtttggcatcgtctacttgctacttaacgtgg

SEQ ID NO: 604204 - DNA, 741 bp, Homo sapiens
  misc_feature (73)..(73): n is a, c, g, or t
  misc_feature (241)..(241): n is a, c, g, or t
  misc_feature (245)..(246): n is a, c, g, or t
  misc_feature (248)..(249): n is a, c, g, or t
  misc_feature (253)..(253): n is a, c, g, or t
  misc_feature (257)..(257): n is a, c, g, or t
  misc_feature (259)..(259): n is a, c, g, or t
  misc_feature (261)..(261): n is a, c, g, or t
  misc_feature (269)..(269): n is a, c, g, or t
  misc_feature (275)..(275): n is a, c, g, or t
  misc_feature (328)..(328): n is a, c, g, or t
ttttttttttctctcctgcttccctcatctgttctcttccaaagaagctggtccttagcctgtattgcggacnagctttcggcgaccagctggaccctgggcacccttcttcgaacaatggcttttaattctcagactagaacgtttaggattacaaaagaaactggttcttttcacattcttattcttgtgatgtagcattccgcatatatatatatatatatatatatatatatatatntatnnanntatntaanananactacctncatcantccatgccattagacatgtataggaccatgcatggtgatctcctccagacaanagtaaatgctggtgcagaacaggatttgagtttgatgtcttgcatacaatgtgatcccactgtatgactacacaaatgttggcaaaagtgagttcagaggaaatggtaggcaagtacttcccagttttggccagaagatggagaaaaaagaattctcaaaaaatgttaaaggtgtctacagagaaatagacaagtgatgcacgacagatacatgtgtcagtctggtccctgcagttgtatttgtaataatacacattggagcaatttcatggccatcggttagagaatgtttgaagaatgatccattcatatcaagaaggacattttaaagatcaaaacctgatggaaatgctggagaccatggcgctgataggagctcatgcctgtggaccaattactacgtgacatgcttt

SEQ ID NO: 604205 - DNA, 1794 bp, Homo sapiens
  misc_feature (339)..(339): n is a, c, g, or t
tggcccctggggattcccgcaccactagccccagctgcagctgagccgctctcagtgcctcccctacctaccctacctgcccaacgacgcacatacacacacagactgaaacaaaaaacataaacgcaaaagaggaacatacaacataccacattcaagcaactacaaacaaacaactacggagaacaaatacccagactaacctctacagacatacatgtaaactaagatatactacgaactacatgacgtcacacgacgataaacatagactacactatatgataacatagctatacatacagacatggccacatatacacagaagattaactaagntaagcacacatacatatacacatacacacatacatatacaccacatggagagacactacgtatataaactaacagcacatgaacacagaaatgtaacatatgagctaaatacacataatactaaacgaatacctaggcaccatactctgaatagtgtagggcgtacacagagccacatgtgtgaaagataacaaaacataggaacacaaacccgacaccatacccggcactaataaaggaacaacccacacatacaaagaaatcccctacagaacggaccgaccagacgatagcaaaacatgggcgacacgtggcaaacaataccaagtcccaccaatataggccagcagtagacaaaggaccaaaaaaaacaaccaagccacaaactaccacgtaaaccacatacattataccgccacaaattacaggacagcggagcacccaggcataagtaaaacacatcaccacacaatacaaacaaaacaaaacatacatcatgaaacagaaacccacagacagaggagtccgacccaaggaccacacaaaccaccaaaccacaatcaaacaaacaataacaataaatccaacccaaaacacaacaaacaaaaaaggagagagaaacacacaatacacacacaagaaatggcacaaacacacacaacacaagggaacacaacaaacaaaacgacacacaaaaaacagagcagaacgcaaataaaacagccagagaaccaaaaacgaacacaacatccacaactcagccaaacaatacaaccccaacaaacgaaataaaaacgacccaaagaccacacaaaaacaacaaaagagaaaaacatgaaaaaacaagggaagcgaaacaagaaaaaaaacaaaacagaacggaaaacacggcacagaaacagacaaaaataacgaaaaaacgaaacacaaaagaaaacacacgaaaaacaacaaagcatacaagcaaaaaacaaagaccctacaaccccaaaaaaacacccaaaacaacgaaaccaaacaaccaaatcaaaaacaccaacacaatgaacaacacaacacaaacacaccacaggaaacaacaacaaacaaacaacgaccagaaacaaacataaaaaacaaacaagacaaacacaacacaaaaacattcgaacaacacacacacaaagagacacacaaaaaccacaagcagagcaaaaaacccacaaaacacacagacagtacgatcaacaagcaaaacaaccaccacagcaacaaaatgacaaacaaacacgaaagcagaaacacaagaccaacagaaagaagaagacagagaacaaacatgaaaaatgagagacaaacacaacaacacaagagaaccaaaacaccaaaaacaaaaccgaccaaccaaacataagaaaccacacaccaaaaaaagacaaccatccacaagagaggtggagaaacaccaacacaaca

SEQ ID NO: 604206 - DNA, 706 bp, Homo sapiens
cgcttccagatctcgcctgcttctgagaaagatccgtgatgctgatgcggaggatggtctgactggatcttctctcggctggcattgagccacagcatgtatgcagagatgggcctctggggggcataggggtcttagcccttcttcacctccacaggcttcttgcgggtctagcggtcgtgggccatcgtggcctttatgagctgtttccggttcttctcatcccggtcattgtcaccctcattactggaggagctggcagaggcgtggctgtcaaactcctctgccacatctgtcctcctcttcaccgtgggtggaatgactcatcggtttcttctcctgagtcatcgctgctgtcagtggcattctcctcccggatcttgccttcctccttcatcctctccaagtaggcatcatgctggtcctcatcagagtcagcatattcatcgtagcttgggttcatgccctctttcaatcctcggttttggatgttgagctttttcgcgttgacaaaatcaaacagtttcccgtactcctccctctcaatgctgctgaaggtatactgagtgccctgcttggtctcaattcaaagtcaaaggaagagtagtagtggtacacgagcaaagttgacaaggagactcatcgaagcgggtgcatggtcagggatctctgagtggacgcggttgagctggacgggggttaaaaa

SEQ ID NO: 604207 - DNA, 1174 bp, Homo sapiens
gcatttgtgagaagcaaggtggcctccacgtttcctgagcgtcttcttcgcttttgcctcgaccgccccttgaccacagacatgtctcgggatcggttccggagtcgtggcggtggcggtggtggcttccacaggcgtggaggaggcggcggccgcggcggctccacgacttccgttctccgccgcccggcatgggcctcaatcagaatcgcggccccatgggtcctggcccgggccagagcggccctaagcctccgatcccgccaccgcctccacaccaacagcagcaacagccaccaccgcagcagccaccgccgcagcagccgccaccgcatcagccgccgccgcatccacagccgcatcagcagcagcagccgccgccaccgccgcaggactcttccaagcccgtcgttgctcagggacccggccccgcatcccggagtaggcagcgcaccaccagcctccagctcggccccgcccgccactccaccaacctcgggggccccgccagggtccgggccaggcccgactccgaccccgccgcctgcagtcacctcggcccctcccggggcgccgccacccaccccgccaagcagcggggtccctaccacacctcctcaggccggaggcccgccgcctccgcccgcggcagtcccgggcccgggtccagggcctaagcagggcccaggtccgggtggtcccaaaggcggcaaaatgcctggcgggccgaagccaggtggcggcccgggcctaagtacgcctggcggccaccccaagccgccgcatcgaggcggcggggagccccgcgggggccgccagcaccacccgccctaccaccagcagcatcaccaggggcccccgcccggcgggcccggcggcgcagcgaggagaagatctcggactcggaggggtttaaagccaattgtctctcttgaggaggctggagagaaaattacacacaggatgtcggtagtaagttgggaatctacctgctgatatcacggaggatgaattcaaaaggactattaggctaacatattggagaaaccagggagaaagctgtatggatacaaacaaagaggacaaaggattcggaatgtattaaaagctatgaagtgtaagaagcatttggactgaaattgggcaaaagccagaactggcttgataagagcca

SEQ ID NO: 604208 - DNA, 319 bp, Homo sapiens
  misc_feature (57)..(57): n is a, c, g, or t
  misc_feature (82)..(82): n is a, c, g, or t
  misc_feature (89)..(89): n is a, c, g, or t
  misc_feature (94)..(94): n is a, c, g, or t
  misc_feature (99)..(100): n is a, c, g, or t
  misc_feature (102)..(102): n is a, c, g, or t
  misc_feature (104)..(105): n is a, c, g, or t
  misc_feature (112)..(113): n is a, c, g, or t
  misc_feature (118)..(119): n is a, c, g, or t
  misc_feature (121)..(121): n is a, c, g, or t
  misc_feature (123)..(125): n is a, c, g, or t
  misc_feature (131)..(132): n is a, c, g, or t
  misc_feature (134)..(134): n is a, c, g, or t
  misc_feature (137)..(137): n is a, c, g, or t
  misc_feature (141)..(141): n is a, c, g, or t
  misc_feature (143)..(143): n is a, c, g, or t
  misc_feature (145)..(146): n is a, c, g, or t
  misc_feature (152)..(152): n is a, c, g, or t
  misc_feature (154)..(154): n is a, c, g, or t
  misc_feature (156)..(157): n is a, c, g, or t
  misc_feature (161)..(162): n is a, c, g, or t
  misc_feature (164)..(164): n is a, c, g, or t
  misc_feature (169)..(170): n is a, c, g, or t
  misc_feature (179)..(180): n is a, c, g, or t
  misc_feature (186)..(186): n is a, c, g, or t
  misc_feature (189)..(192): n is a, c, g, or t
  misc_feature (198)..(199): n is a, c, g, or t
  misc_feature (213)..(214): n is a, c, g, or t
  misc_feature (222)..(222): n is a, c, g, or t
  misc_feature (224)..(224): n is a, c, g, or t
  misc_feature (233)..(233): n is a, c, g, or t
  misc_feature (240)..(241): n is a, c, g, or t
  misc_feature (244)..(244): n is a, c, g, or t
  misc_feature (246)..(247): n is a, c, g, or t
  misc_feature (253)..(254): n is a, c, g, or t
  misc_feature (258)..(259): n is a, c, g, or t
  misc_feature (266)..(266): n is a, c, g, or t
  misc_feature (293)..(293): n is a, c, g, or t
  misc_feature (296)..(296): n is a, c, g, or t
  misc_feature (302)..(302): n is a, c, g, or t
  misc_feature (311)..(311): n is a, c, g, or t
  misc_feature (319)..(319): n is a, c, g, or t
gcctccggggtcagtttttgtagcctcggctcgcgcccgtccggcctctggcacgcncgaacttccggcccttggagcggangtagggnttggnggggnngntnncccggcnnccccnntncnnnaaagcnncngcnaaanantnnaaattnanannaaannanggatnnaaaggtaanngaaagntcnnnncgtaanncaatcaccctactnncgcccccnangcaaaaagnaaaggtnntgnannaggatnnaaannagccganttttttttttttttttttttttttttnttnattatnttaaacatntttttatn

SEQ ID NO: 604209 - DNA, 869 bp, Homo sapiens
gcatttgtgagaagcaaggtggcctccacgtttcctgagcgtcttcttcgcttttgcctcgaccgccccttgaccacagacatgtctcgggatcggttccggagtcgtggcggtggcggtggtggcttccacaggcgtggaggaggcggcggccgcggcggctccacgacttccgttctccgccgcccggcatgggcctcaatcagaatcgcggccaggcccgactccgaccccgccgcctgcagtcacctcggcccctcccggggcgccgccacccaccccgccaagcagcggggtccctaccacacctcctcaggccggaggcccgccgcctccgcccgcggcagtcccgggcccgggtccagggcctaagcagggcccaggtccgggtggtcccaaaggcggcaaaatgcctggcgggccgaagccaggtggcggcccgggcctaagtacgcctggcggccaccccaagccgccgcatcgaggcggcggggagccccgcgggggccgccagcaccacccgccctaccaccagcagcatcaccaggggcccccgcccggcgggcccggcggcgcagcgaggagaagatctcggactcggaggggtttaaagccaattgtctctcttgaggaggctggagagaaaattacacacaggatgtcggtagtaagttgggaatctacctgctgatatcacggaggatgaattcaaaaggactattaggctaacatattggagaaaccagggagaaagctgtatggatacaaacaaagaggacaaaggattcggaatgtattaaaagctatgaagtgtaagaagcatttggactgaaattgggcaaaagccagaactggcttgataagagcca

SEQ ID NO: 604210 - DNA, 364 bp, Homo sapiens
cccttaaaaaatttaaaaagaaagtgaaattaattttaaggttttatttaatcctaggtatccaaaatatttaaaataggtaatcattataaccaaattagagattttatattattttgtttgggactatttgaaacccaacatatatttttacatttccagcccatcccaattccccctagccccgttttaagggttcaataaccccatggggctagtagctatcatactggccaactatggtaatattggatttttaaaaccaatacatatcaccaagggctgctattaaatcatagagaaacccagcccctttatgtctcctgattaaagccccctacttaatttgtccaggggtctccta

SEQ ID NO: 604211 - DNA, 335 bp, Homo sapiens
tttgcaaatttacaaaacttaaaaatgttcaattaacctcccaaagtttttaaaggccagaggaaaaattaagccagcctttatagcaaacccctgaaatttcccggaatcgttttgactggtgccctttggtttttagggcagcttttttgcaatggaaatggaatgctttggatttcaagttttttacccccaagacttcaaagttaaggacttgtaccccaagtattgcaatcccctttttttttttggacaagcaatgtaacaccccccagttttgggggttttaaaaaaaatcctctttttttttaaaaaaggaaatttttttgttttta

SEQ ID NO: 604212 - DNA, 218 bp, Homo sapiens
tagtatgcgtgcagctcagagacaggaggcagcaaactccccagtgccaggaggtgcttcagccctgaagtcttgcacctgtgagcaccaatcgcaggtagaggctgcgtgatggactgacattggttggacatgatagcttgagggccagtgtccggtgattgcgttacacaccctgtctgggcctagtccgggggggggtacccgagcctccgaat

SEQ ID NO: 604213 - DNA, 474 bp, Homo sapiens
ataatagcccaaaattgaaacagccctaatttctatcaactaacaagtgaataaacaaaacgtggcatatccatacaaggaatattattcagcaataaaaaaagagatgaagtactgatatgcaccacaacatggaaaaaccttgaaaacatatcaagtgaagaatgccagacatgaaaggccacatattatatgatttcatttatatgaaatgtccagaacaggcgattatatttggagagaagccagattattggtcgctaagcctaaaggtttgggaagaccaaggggttaactcctaatagtaagggggttcctttttggggttatgttaaactttgaaaggtgattgtggtaattgttgcaccactctggattttcttaaaaccactgaattgtatactttgaatgtttgaactgtgtggtatgtagattttatctcaagttgttataaaaaattaaattacaaatgca

SEQ ID NO: 604214 - DNA, 179 bp, Homo sapiens
agagcaagactttgcctcgaaaaaaaaaaaaaggctttttttgggcaaattttaaaaggggggcccttttcggggaagatacgtcctaatgccagggggcatggcctggcaatgggagctgggcctaaatgtcagccccaactcacccttttagacgagagcccatgtgcaatatgcca

SEQ ID NO: 604215 - DNA, 187 bp, Homo sapiens
  misc_feature (43)..(43): n is a, c, g, or t
  misc_feature (67)..(67): n is a, c, g, or t
  misc_feature (87)..(87): n is a, c, g, or t
  misc_feature (163)..(163): n is a, c, g, or t
tgcaatcgcagccgggagcccgcagcccgcgccccgagcccgncgccgccttcgagggcgcccaggncgcgccagtgaaggtgacgntaacttccgtctggccggaggcaagaaggacgagcccaagagcggtagaggcctatatccccccgacgcgcgcggngactgaaggccagatatgtggacc

SEQ ID NO: 604216 - DNA, 249 bp, Homo sapiens
  misc_feature (150)..(150): n is a, c, g, or t
  misc_feature (174)..(174): n is a, c, g, or t
aagcactggggcgctgcgagaggggattctgctgaagtggagatgcagtcagatgccctggatgcagctagaggatgattctctgtacatatcccaggctaaatttccagtcctggcaccttacacaggttaccgtccagattggtgccnagcttgaatcgtcggcctctgggncagtcttgtgcattggcgcatgatgaggacgtttgccactttgtgctggccaactcgccatattgttcagtgcag

SEQ ID NO: 604217 - DNA, 218 bp, Homo sapiens
tataaggctctaagggagctttttaaaatgataaggtggctgggctcggttggctcacacatgtatcccagcactttgggaggcccaggcgggcggatcacctgaggttaggaattcgagaagagcctgacatcctctctgcgtttcaaacgccagagaggacaacccagagaggcaacgcccagaggtctcccgttgaccaaggaactccttgtttg

SEQ ID NO: 604218 - DNA, 464 bp, Homo sapiens
ccaggagactccaggaagagcatcccaactgccacgcaataaaggccatcaagctacaaatggccttacaaatggaacctcaaatgaatttaactcaagcttctaccgaggaccccaggatcagcccactggtctcttaactggcctagaaagttccctctggaggacaatacaacagcagggccccatcgtcgcccctaaccagcaggaagtagctagagcagtcatcgcccagttcccaacagcagttggggtgtcctgtttagaggggggactgagaggtgatgccagctgagcttcctgggttgagtaggggcttggaaagctgtaaaactcactcatttcctgcatcaggacttacttcagttctggataaataatactgaggatatatgcttaaaatattcctaacaccaggatttgcttatatgttttcttcccaagaaagctataaacagcgagaa

SEQ ID NO: 604219 - DNA, 816 bp, Homo sapiens
ctgcttcattctgccattcactcactgcagcatattcaagaataaagcaatatcgtttactacattttttattgaaggtcagccatgctttctgtattatattgcatatgaaattgtttacaaaagaaacactaactcatacttctctttacttggttgcaagtggcacgcaggaacagagggagagtggggggctggtgggggaggggagactttttgtgtctttgtccctgtgaagtgctgcttcgcagagccaggctatctctccaaggacacggcacgaccagtgggaatacgcacgagggactagactgccggcaagcacatttgcagcaaggacacgtggcggggtttccccacccgtcacgcccaaagcagaaacagctagcagacgtcgagcctcagccccgatccggggcgacagacactacagcaaggagacgctggaagtttaagcagatacgtttaatagcggtaatactgtgcggtctaactttatactctgtcttgagttattcctaccagagaaaaagacgtaacgtaacgctaaacagcacaaaagccttttacattaaagttccatccctcttgtcggggacctgcagggggggcaaccttaatccaaacaccgtggctatcaattatctcagaaggtatggtctcagacgggattccagtctccgggaggcaggggcataatgggggagggggccgaaggctgagagaccaaaagttccaaagcctccctcgaaggctctcctagaacgtgtattccggacattaatgtaccatcccatgtggactctgcgagtgtcc

SEQ ID NO: 604220 - DNA, 262 bp, Homo sapiens
tgggtattgtatgacacggcatatcaatggcaaactgtttcttcccaagtacgcactctcccaggatgtctgtacatacagagacttcatctacaggacggtagaaataccaggatgcccacaccatgttgctccctatttctcctaccccgttgccctgagctgcaagtgtggcaagtgtaacactgactacagcgactgtacacacgaggctgtcaaaacaaactactgcaccaaaccacagaaatcctatctggtagga

SEQ ID NO: 604221 - DNA, 356 bp, Homo sapiens
ttacctggtcccccacttatccgtgggctggggaactcacaggggctcatcagaggttccaggagacagagttcgagaccagcctggccaacatggtaaaaccccgtctctactaaaaatgtataatcagcgaggcgtggtggcttgcacctattatctcagctacttgggaaactgtggcaggagaattgcttgaacccgggaggcggaggttgcagtgagcagagattgcgccactgcactccaacctgggcaacagagcgagactccgtctcaaaataaaacaaaacaaaatcatgatgccatgatcagtgtttacttttggattaacacccggacacatgatagagaataaa

SEQ ID NO: 604222 - DNA, 111 bp, Homo sapiens
ccctcccacagaatagcagggttgggtgttatgtattgtggtttttttgtttgttttattttgttctaaaattaaaagtatgcaaaataaagaagatgcagttttatacaa

SEQ ID NO: 604223 - DNA, 809 bp, Homo sapiens
caggtgagacagcaggctggctcaagtggacagacgggattgcagagcgtgcggcgctggaggagctggtgaaacttcaggccagagcgcgtgcgaggcctcaagcagcagaaggccagcgagctgatcgagaggaggtggaaatctgaatgaggccagtgggtctgatgaaagcaacagaaatttgtgctcaaaccccaaggccaagagactatgtccccggagatggatcgcgagaaggtgttgacgtaatcatccgttgcttcaagcgccaggtgcaaatcattgatacacctgtattgaactaaggaaaactgatggaagtatgggaagactccaagcttatctatactgaaggacagggcggggagctcctgtcccttcgctatgactcactgttccttttgctcggtatttggcaatgaataactgacaacattaacgctacacatagcaaggtatatcggcgggatacccaccatgaccgtggcgataccgggaattctaccagtgtgattttgacattgctgggaactttgatcccatgatccctgatgcagagtgcctgaagatcatgtgcgaatcctgagttcacttcagataggcgattctggtcaagtaacgatcgagctctagatggatgtttgtactgggtgttctgaacagtccgtacattgctctcagtaacagtgcaggtgccggcgaggtgagaatgaatgtgaaaaggctgcacctagggtgcgctaggacattcacactggggactgtgacaggcccgatctaaacgcaaaagcgggctgacatagctt

SEQ ID NO: 604224 - DNA, 446 bp, Homo sapiens
  misc_feature (1)..(1): n is a, c, g, or t
  misc_feature (11)..(11): n is a, c, g, or t
nttgccctcangcccaagaattcggcacagctgcaacctccacctccacctcccaggttcaagcagttctacctcagtctcctgagtagctgggattataggcgcacaccaacatgtctggctaatttttgtgtttttagtggagacggggtttcaccacgttggccaggctggtcttgaactcctgacttcatgatccgcccgccttggcctcccaaagtgctgagattacaggtgtgagccacagcacctagtgaaagtgtggtttttttgtgtaggttttactgttgttagtgttgttctgtattgtttgtagaggatacgtggggagatttggataaaagcaactatcattattatcctcatcagacttgtaggtctaactttttaattttttaatttttaatttaaaatattttcatggtcttttatcattaattaagcgg

SEQ ID NO: 604225 - DNA, 417 bp, Homo sapiens
ggacaggaataaagagcacaagcgtgaggggagacaagacgaggacgtcagaaaggggggaaaggcaaaagaaaaaggggaggacagggtaaggggagtaaaagaagagagacgccaggaaaaggagagaacagggaggaagagaaggcggacaaggagagacgtagaaaaggagggagggaaaaaagccaaggagaggagaagagagagagcagagaagagagagaaggaaagagggcaaggtgaaaagaagaaacggagagagaaagggaaggacgagaaggggaggaaaaggagcgcaacagaaccgctcgcactcgctctcgctctctcgctcgcactcgcgctctcactctcgcgcgcactcactcgctctcacacactctcgcgcacgcacacacacacacaccgcgtgga

SEQ ID NO: 604226 - DNA, 491 bp, Homo sapiens
  misc_feature (413)..(413): n is a, c, g, or t
  misc_feature (486)..(486): n is a, c, g, or t
gtttaacgggtgacagcatctgtaaaacaggtgtggcagaagtattccatgactgcattaggaagaatgcaccttatgggttatatctcttttggtagacagcccacctgctcttttttgtccccaccctcagcccaagcaatgtgaagacagattatggcaacttaggagctccatgtttccataataattcataactttaagagtcctccagacttacaagattacttcatggtgaaagtttggattgatcaataatttattcctataaaggtctgcaggattttttctgtaaccagaaaagtaactgcatagccattctttttttttttttttaatttgttgttgtttttgtttgagacagagtcttcattcttgttgcccaggctggagtgtaatggtgcaatctcggntcactgcaacctctgcctcccaggttcaagtgattctcctgcctcagactcccaagtagctgggcttacaggnacgtg

SEQ ID NO: 604227 - DNA, 104 bp, Homo sapiens
cttttctgccaacgatcgctgggagagttctctctgcatcaccagtggcagatggaaagtgatttgccctgctgacactatcagatcacgagtcgtgggagaaa

SEQ ID NO: 604228 - DNA, 316 bp, Homo sapiens
acgcgtcaagcactgtctcacctccgatgcccctcttcccgatcacatcatccttgtctaacacctcggcctggccgggtgagttccatctccgacgtcctgtagcggcacacgctccccgtggtgtgcacgtgctctcctgcggccgtccatgtgcggccttcagcagcatcgtctcacggctacagagatactgcaactgcaattcccagcccccgacccccgtgaagatcgccgtgagaaaagcggcaagaaattaactcagagccatcctgcggctctatgtgaagcagctgtcccaacaaagacacccgat

SEQ ID NO: 604229 - DNA, 215 bp, Homo sapiens
gtacatgaatggaacaatcatggtatactagctgtaacctagaccttccaggctcaagtgatattcccacctcagcctcctgagttgctgggaccacaggcatgcaccaatgtgccaagctaatttttaaatttcttgtaaaaatcgagtgtcgccatgtagcccaggctggtctcaattcctgagctcaagtaatccacctgcctcaagtaaag

SEQ ID NO: 604230 - DNA, 881 bp, Homo sapiens
ctgggggttcgggaccagtcctgggaccgaagctggttaggacccattgctcaaaaaaaaaaaaaaaaaaaaaaaaacgggggagagcccaaaaacgtaagccacctgcctcgcgggggaataggtgtgttcacctctgtggggacgcgtcttctgttgtcgtctgtcccccacgtcgtcgtgtctattttgggggcacccccccgggcttctggtgtttccacccctgttgttacaccacctgcgggtttgttgtgcaccagattgcgtgtgtgcgtctttttctcagctggtggggttccacccccatcttcgccccccggctgttgttcttttcactctccttcttgttggccccaacggggggtttgggtgcccccagagcaagagcgggagagagaaacttggctggggggcacaaaaccgggggggacacaaaaagtgtctttacggaccaccccgggggctagggaggaggaacccccggagggtggctgtggggcccccccaccaacaaaggggtgggcatcaacgccggcgaaaaatgcacgcccacacaaaaagtggtggtgttcaagacaggggggaggggagaaggaatacacccccagggagtattgagcagcggagcggagcgatcacagaaaaaaactagcgacccccatgtggttggtattcacccccctgtggtggttccccccagaggggtgtggtagatcaatcggacgagggaatgaacccaaaggtggcacccggaccgacggtgttgggcgtaactaccaaaaacgaccctggtgcaaaatggacaaaacgctcccgtggtgtataaaagacagcaacaagttttttgtatcacacaccagacagtacaacacttgggt

SEQ ID NO: 604231 - DNA, 789 bp, Homo sapiens
accagcctgaccaacacggagaaaccccatctttactaaaaatacaagattagctgggtgtggtggtgcatgcgtgtaaccccggctatttgggagactgcagacaggagaatcacttgaactgggaggtggagcctgcgagtgagccaggatcgcaccattgcactccagcctggttaacaaagagcaaaactctgtctcaaaaaaagaaaaaaagagaaagggtggaaaagagggattccagagtgccaggcacacagattttctggaaggtttacatgaggtactgctgtggtttgaatgtgttccccaaagttcatgtgttggaaactcaacccctaatgcaacagtgttgatcagtggaacctttaagaggtgattaggtcatgaaggctctgccctcatgaatggatgaaggtagggtgggttagttatcttgggagggggttcctgataacaaggatgaggttggcttcctccctttctgtctttccccttctccctctcacatgtggtcactctcttgcccttttaccttccagcataggacaacacagcgagagcttcacctagatgcaggcccctcactttgcccaggtgttcagaaaccatacatcaagtgaacccttataaatcagccagtctgtggtattctgttatagcaacacaaacagactaggacaggacactcgtgagctctttctctcttgtaggacctcccgggggggctgattgggactgtctgggaggcttggggtccaggctttttgaggggtacaaaaccgagtt

SEQ ID NO: 604232 - DNA, 1099 bp, Homo sapiens
  misc_feature (1099)..(1099): n is a, c, g, or t
cgcagtggctcaggccgtgtaatcccgaacattttgggaggctgaggggggcagatcaccgtgaggtcaggagttccaagagcagactggctgacatggtgagaacatgtctgctaataaaaatagaataaattagcatagtgctaattcagcgtggtgaatgcgccagatactcagggaggcgtgtggcacgacgaatcgcttgaacctgggtggcgagagggttagtagtagagcctagatcgtgcctagtgcactccagtcctaggtgaccagagtgagaccccgtcttgtaaacacatgtaatccacatataacatggaagttttagcaatactaaagataacagaacttcgtaagcatggtcacagggatatcgtatgtgaagttagaataggtacggctttgcgataaggggatgatgaagacctacttgagcgcgcaaagcacgtggtcatgcgcagtccagggtccaagactgttcccgtgggggtcgcataggttacatgaatccagcctatcagccgcgaggtctggaacccaaaacttgctggcaggcctcagccaaatcgtcagaacgtactcttggggaactctggagacagcttccaaggaatgccccatttcattccttctatataggggacctctcagaccgcagggggtgatcgcttgaagcctggcctccatgcactggatgtgtcctccccccatgtgtggtccaggaacttagtccaccctgggcctcctgggccccgggtgtaggtgcagcaagcccccaaaacacaggcctttcctagaccaagggacttaccaccaagggagcgacggccgccattcgcgcctacaagaacgcacctgcgcaaggcgaccttcggataaggggatgccccctgtaccagacacgacagagcctcagacgtgctcaggaaggtgaaagtcctctgtgtccaaaaatcagcgtatgtaccaacgtaaaacgataaacgaggcgtacaactaacgcatacacacgtagccttacgcgacgcatgaggacgacgagtaaaagacaagtcgtgcaacatccgctggcgtctgccttatttcctcctctggn

SEQ ID NO: 604233 - DNA, 182 bp, Homo sapiens
  misc_feature (6)..(6): n is a, c, g, or t
  misc_feature (14)..(15): n is a, c, g, or t
  misc_feature (43)..(46): n is a, c, g, or t
tctaanaaaccccnnaacagtatcgctcatggtggtcttagtnnnnccatgaaacatcttttcatgtgcttttcgtcatcctttttagtaaaatatctcttcctatcttttgtctattttctaattgaatttttttttgttttactgttgagtttttagagttcattatatactctagatat

SEQ ID NO: 604234 - DNA, 271 bp, Homo sapiens
acactctgtaacttcctgttatctcagtgtcttcatctaggcacggtgagcatgacaataaaaagcacttatcttgaagtagggaggagggctgcactgagataacacatagagctagagagtaacacaggcacatggtgtagcataagatgagtgtggttctgatcacttattccacaagtgtgtaatgccctactatgtcaaaggcactgtgatggcggtgggggatcagttgaataataacagacatgattcctaccccacgatagca

SEQ ID NO: 604235 - DNA, 485 bp, Homo sapiens
ccagaaacagctccagagtagctccagagtgatgaaggtgaaaccagcatttctgttatttataacaagcccctttcaaccacacctgagactatgttaatgaggtgattattggaaaatccctagataactacaggatgaagggttggttgccaaggggacttactgtgtgcttagagggttgagactcacagccccacaccccatctcacatccagagaaggagagaggctgaagtttaagttgatcaccagtggccaacaatttaatcaatcatgtctacataatgaagcctccataaagtaccagaagagctgagttcagggagcttccaaattggtgaacaagaatacattaacctgctggaagggtggcaccctccacctccacagggacagaggctcctgggcttgggacatttccaaaccttctttctttggctgttcatttgtatcctttcatgtatcctttataataaatgcata

SEQ ID NO: 604236 - DNA, 81 bp, Homo sapiens
gagagagatgaagggtcttactactgtgcctgtgacacgggggaccctcgggctttctcctgggacacccgacagatgttt

SEQ ID NO: 604237 - DNA, 201 bp, Homo sapiens
gatcacctcattgaggacatctgggatgctcacatttcttggactgtgatgaataaggctggtatgaacattgatgtacaggattttgtgtgaacatagttttcatttctgtgggataaatgcctcagagtgtagttgctgggtcagattgtagctacatgtttagttttttacatagtttgaatgcgtccgtcgaatttg

SEQ ID NO: 604238 - DNA, 144 bp, Homo sapiens
gagcccagcggctgtggcagcaaagatgtgtgttgacaagtagagtgagcaagaagtggctgctgtgagatgggtggagtgagctggatgaagatggagcaaagatgaagagtgctgagtgtgtgtgtgtgagctgtgggcctt

SEQ ID NO: 604239 - DNA, 295 bp, Homo sapiens
caggtggatcgcctgaggtcaggagatcgagaccagcctaaccaaaatgatgaaacccagtctctactaaaaatacaaaaattagcggagcgtggtggcaggcacctgtaatcccaactactcaggaggctgaggtaggagaatcacttgaacccaggaggcagaggttgcagtgagccaagatggcaccactatactccagcctgagcaacagagtgagacgccgtccaaacaaacaaaaaaaaaatacagttattcagttgtcctagccacatttcaaatgaccaccatatta

SEQ ID NO: 604240 - DNA, 514 bp, Homo sapiens
gactgcccaggcaccactgcaacgacagaaaaggttgttttcacctttaatgtaataataacggccacttatgcaaaaggactcaccgcgaagatggttggaactgggtggcatataacaaactcacaaacttatctggccaaacaatacagctgaaaatcaaatttaattatgctgactcactgaagccagaaaaaaacacctccagatagctagcatccaaaaaatttgtcaggtcacccatggtagttcacacctataatccctgaactttgggaggcagaggtgggaggattacttgagcccaggagttcaagcccagccttggcaacatggcaaaaccctgtctctacaaaaaattttaaaaatagctgggtatcatggtgcacacctgtggtcccaactattcaagagacagaggtcggaaggctgcttgcgcctgggaggtcaagggtatagcgagccatgattgtcccactgaactctaatctgggtaataaagccaggaacctag

SEQ ID NO: 604241 - DNA, 190 bp, Homo sapiens
ataagagtgactccttcaagtgtggcttgacttgacttccctcgcgggcccacttggacatccccatcccagaaccctccacccaaggatgatgagatggaaacagataagcaggagaagaaagaagtccctaaggtgtggatttctcccgtggggcaaggacgaagtgatgtaaagtggggcgagtaac

SEQ ID NO: 604242 - DNA, 1182 bp, Homo sapiens
  misc_feature (237)..(237): n is a, c, g, or t
  misc_feature (267)..(267): n is a, c, g, or t
gtcctccaaagacggttctaattttggacggccgccttatttgttctaatacataaaagttcgtgtcctccccaatatgtcacgtgttctccatccgccccggggtttgtttctccccacgctggcctacccgtttccctcgcgggttgatctcctagttctgcctcctccgccttgctttgtgatcttttaaacaaggctccccccttccgtgttcttctaaaaccggtaaccacntgggccaacccgctgttgtttgacaacccncctgagaaatctctgcaaaacctcgtttggtgaaaagatcttccctccctcctttttgatgccgtgcaaacaacatatactgcgtctcttcttacaatcatcgggcgacaactatccctcgctatctgcccccaccacttgggcctcgggtcttttcatatcctttatcgcacctggcgtggggagcctgcctgttgcggttttaaataaaccacacgaccagtagtaacatggcgcgtaccaccaaagatgttccaaatgagagagtgacgggcgctctctatcaaaggatacaaaatacaaggggtgtggtcgtcccagagactcccttccccgtaaataagatgccgggttttattagaatcaacaaacctcaaatggagccacctctgggtgggctactcccaacaaataaatacattggcaatgaggacaatattaaaggaaccatcttatagtgggcaagcggcaaccaaccccactggtttaaaagaaaggtggccgccgtccagttgtttgggtgcaacacgggatggtgagtgtagcagtgcgtaagtgtgaggagcagcagttatttgtattttgttttattacaacggggagaaggggggtactttattaatctattatccaccccgcttgcggcattcatacagtactcgcggtcagtaaataataacatttgatcgaaggacatagatggataagtgcctgtgctttccaggcaccaccgtagtaaattcatgggagtgcgtatataaattatttacaaagaagcactcccactcgcgggagggtgagcttgtttaccacagacatagattttgagttgtacataccacccccttgaaaaagatgagtagccccgcccttttccacttgcctgccaaaaaactttttccaacacccaaaaca

SEQ ID NO: 604243 - DNA, 308 bp, Homo sapiens
gattaccccaagctttggtcagtccgagaatgtagtctctgatttaccactcctgtgaatggccctaggcagatgcctaggtattgttgttactgttttgagacagaatctctgttgcccaagctggagtgcagtggcatgatctcagctcactgcagcctctgcctcctgggttcaagtgattcttctgcctcagcctcccaagtagttgagactacaggcatgtgccaccatgcccggctaatttttgtattttagtggatactgggtttcaccatgttggccaggctggtctcgaattcctgacg

SEQ ID NO: 604244 - DNA, 269 bp, Homo sapiens
gagggtgtcactgactattttgtgtttaccttttatatgtgtaaaactttgcagtagctttaaagggtaatcaatttttctatcaagtgcactattcatttagtgtgttgcaggtttatatgacttgtattaaaaacactgctctgagttgtttgtacactgaaaggagaactctagatgttactctatgtaaataaaaccttctgtgactttcaactgaatttacaaatgcaaagtactcggggggggtccctgtacccaattcggcc

SEQ ID NO: 604245 - DNA, 278 bp, Homo sapiens
tgaggatcccccagctcgctgtcgctgtggctatgctaatacagtttacaggaggggaaacagattttaccagtatgtatgtgaagcaagtaagaaattatctaattaggccaggcgcagtggctcatgcctgtaatcccagcattttgggaggccaaggtgggcggatcacaaggtcaggagatagagaccatcctgggcaacatggcaacactcctgtgtctggcccaaggcagaacgagcggggacaggacccgtcgccgagcgattttaacaca

SEQ ID NO: 604246 - DNA, 418 bp, Homo sapiens
gtatccagagatgagacctttgggaggtaattacatttaaatggattaatgaggttgggaattccatgatgagatcaatatccttatgaaaagaggaagagagaccagagctcactctctttctacgatgtgaggacacagcaagatggcggccatctgtaaaccagaaagaggaccctcgctggggaccaaatctgccagcaccttgatcttggacttctcagccttgagaactgtaagaaagaagtctgttcttttaaccacccagtctgtggtattctgttatgacagcctgagcagaccaaggcaattgtgctgtgggtagcacaaatacgtgcatttgtcaaaacttatcaagttatatgcttaaaacatgtgcattttacaatattaaattgtatcttaaggaaccgtaaaa

SEQ ID NO: 604247 - DNA, 181 bp, Homo sapiens
  misc_feature (134)..(135): n is a, c, g, or t
  misc_feature (162)..(162): n is a, c, g, or t
  misc_feature (170)..(170): n is a, c, g, or t
tcccaatcagcatctctcgcatgtggcacgtgcctggtagtctgtagaggatccgctctgtgtccaggctagagtgcagtggtgcgatctcagctcactgcaacctctgtgtcctgggttcaagccgattctcnnctgcctcagcctcctagagtagctggngactacanggcgtgtgcca

SEQ ID NO: 604248 - DNA, 202 bp, Homo sapiens
tcacccttcgcatcacgaagcacaaagtgctgttgtctgccaaaatgacctccctcatgaccatcatggcaagattactttgcgtatcgcggctttaaactacctcagtgcttgatgcgaaccacgataggcggcaggacctggggcatgctgctgcaaaaccattcaatcgagcccgcgctctgagatacttcactcttcc

SEQ ID NO: 604249 - DNA, 269 bp, Homo sapiens
caccagatgctcccacccttggagactggaggcttgcagtgaccctgagattgcgccactgcactccagccttggagacagagtgagactctgtctcaaaaaaaaaaaaaaaaaaaaaaattgtaggaaaattataaagttcaaagttaatccaaacttcaagttttggatttggataaattaaagctgtttggaataataagaatagtttcctctatttcatgccatgaagtccatccactattggagactggttcacaaagcaatgc

SEQ ID NO: 604250 - DNA, 881 bp, Homo sapiens
  misc_feature (316)..(316): n is a, c, g, or t
  misc_feature (323)..(323): n is a, c, g, or t
  misc_feature (520)..(520): n is a, c, g, or t
agcggggtgggcggtggctcaggctcctggaataggaccgtccacccctccgacgctggctggtgtggacgcggaatctcagcggagtaaacgcgcattgacgaatatggtacaatagcaaaatgaacatagattcagcagctctatgagtgcatgcagcctaatgagaagctatggcgaaccatcgatggtgacgtgtcctcagcaacgatgcaatcgcgagggcagcatagagcactgctcggagtgcgagttggacggctgtggttctcccctgctaggtgagcgggagtcatcagaccacgaagtgaacgcnttgtgtngcgaccagttcagtcgtgaacttgagcgctatgctcggacctgattggagatcgcctagctccagcttttattcggaggaggtagcaattaacaattctttatccctgaagtacgaaaccatcgtgcagaacttgagtgagctggtggatgcagccgttcgcggtggctgcactgttgagcgttacaattcccgtgnctgataccattgctgcgcgagaacgcctacgttgggtactgcacgtgtacgaagcccccgtagggacaacggtgtgcgcaaggactgacaacgagctagctttcgcggcatggccttagttgcgaaaacctccttggagatagcgtcccagcgtttggggaagaaatgcttgggccgagaacccagggccatcggaaacaaatctttaaaatttacgcaacaagttatgttcaattccccttgctatgaaacttaaataggcacaatcgcccttgtaaccgggacttatacacgggtcccatttccctgggggaaaccggttgggggcctttggttgagtgaaccttggggggaattccag

SEQ ID NO: 604251 - DNA, 497 bp, Homo sapiens
tagaggatccctcgccaggtctctaccttgataacatatgaatgtttattataatggtaagaatacccggcttattaacatatgctcaaatcttagacttaaaaacaatattacttttcctaacgaaggtaaggacaaaaagtctcccctcccccatttttttacatacctcctatagacgtgccagtggtactatggctggtaagagtagctgaagtctctgacacggtggaagggtgggctccgggtgacagccgaagcagtatcagaggccggctcagacggtagatggcttggattggtcaagggaacgcgctagtagctggtgattccattctggcagaaggggtgggaacctccggtaggttcatctacatcaaggggtaaggtccacaatttctggctgcattctggcctcaggggctggtataacagtagaaatcctagggcggttcggtggctcgtgtggccgatttgcatgagaatgtgaagcgtgg

SEQ ID NO: 604252 - DNA, 335 bp, Homo sapiens
ctgcctcaaaaaaaagaaagaaagaaagaaagagagagagagagagagagggagggtgggagggagagagagacagagaaagaaagaaagaaggaaagaagaaagaaagaaagaaagaaaaaaggaaggaaggaagaagagagagagaaaagaaaaaagaaaagaaagaaagaaagactgaagtctatgcaaaagagtgcagggtacggaccgggcgcggtggctcatgcctgtaatgccagcactttggaaggctgaggcaggcggatcacctgaggtcaggagttcaagcccagcatgaccaacatggaaaaaccccgtctctactaaaaata

SEQ ID NO: 604253 - DNA, 734 bp, Homo sapiens
ggaggttctgctcttgtcgccaggctggactgcaatgacgcgatctccgttcacatgaagctcctgcccccttcccccattcctccccgatgaaccagattctcctgccctcagcctcccaagtagctgcgactagaggcgcccgtccaagcaaccccgggctaatctttgtattatcacgtagatgacacgggtatctgccactgttggccaggcttgtgctcaaactgttggcctcaagtagatcctgcccggcctctggacttcccaaacgttgctggagcattacaatgcgttgacgtccagcagtggaccccgagacccgcgcagattcgggtcgtcccgcgcaacagtcccattgacaacacgctttgcgacaagttatttccagaagctataaccgatacgcgaaatagcaccaaccagagaaccaaacaaccataacggccgtgtactcattgatccgttggtgttacagcctctgttcgtgacacacgcgcggaccacaaccagaccccatggctggaaccacccaagcagcccggccacgcggtcgcaacctagcccgaccgcaagacactggcacgcacacccacacggagcacaaggcgtccacagatacccacaccaaggctcaagccacgccccgacaccacactccccacagcccagtccacgccccgcccacaccaaggacagcactcgcggcaaaacaaccggaagcgcacacgtac

SEQ ID NO: 604254 - DNA, 843 bp, Homo sapiens
tactacactaatcaggacataatgtctggggaaggtaaagctggtcctccatggagcgcagttcccgtgcagcatttccacaaggtgcgtaggaggacggtggccgctgttccatgcgctgttcctgtgtggggacagcatttcctgggccatcaggaccaggagggcctccccaccttttgcaggaaatttcgatcagacatcttgttacaggacactcggcctttgttcctggaaactaggattccatggcatatggggcacagctatatgaggaaatacccattttaggcctaaaagctgagtaactagactccgatcacgtgccacccttaagtcctccaggcccacctgttccaccaggttcctccacctcctggtcaggttctgcctcctcctcttagcttgggcctcttacactcgaggagatcgccctccaccgctctgttcttttgtccgtggacaaccgtttgtgggctggcctcgcgattgcggtccggcttcctcctgggcctcgcatctccaatgttccaggctagctgccctcctccgtggtccctaccaacgtcctatctaacagtgtatcgtctccagcttccatggtcctcttctgacacctgcgtaccaccccgtgttccttctttggagccgccccttacactgagctcctcctccgagtcttcctggatccgctccaggtggccccgatcggcaggtccgcatgttgaatccagctttcttttcttccactacctaagagtggggttgcctagctagatacccgggtccacggcgaaagttcctatggggctcccccttgattcgggtggtatgggccccggg

SEQ ID NO: 604255 - DNA, 84 bp, Homo sapiens
gcctcggacaccgccatgtattattgtgcgagagcctacggtgactattattttgattatccttttgatatgtggggccaaggg

SEQ ID NO: 604256 - DNA, 331 bp, Homo sapiens
gacactggatttcagtacatgctaagtacagtctgctgcagttttgctttgtactagcgttcgttgttcgtgcttcttctattcgtatctagttctagttttggtttttggttttctcgccgtggtgcaaaactgtagaaagttgcttattcactggccttggttccattgaagtctgcgtctcgagtgtccgtttcctcctcagaaccatctgcattttcaataactctacgtcctccagaccttctagaaggaacgaaagaggtctcgtttcctcgcctgagcttgctcttgagtgcgttcacctcgcggcccatggcctcgttgctct

SEQ ID NO: 604257 - DNA, 126 bp, Homo sapiens
gccttaggagggcagttggtccaggacccacacttgctttcctcgagtttcctgattctgccttgggtttttaggcatacttctggaaattccctttgggtccaagacggggagggtcccctaaga

SEQ ID NO: 604258 - DNA, 183 bp, Homo sapiens
  misc_feature (10)..(10): n is a, c, g, or t
tacagcggtnttactgatttcagtttttattgttgaccactcttccttggcaatgtgtgtgaaatgggtttcatccttgtgaatttaggacttttccagaccttgtctctttgataggccggtattggattagaaggagggagtagagctaattgagaaacaaaatgtctttttcttagaaac

SEQ ID NO: 604259 - DNA, 101 bp, Homo sapiens
acagacaagtgctacatctcgggaagtgagaagccccattggaccagtgtttgcttagtgtgagtccatgactgctgcagatgcagccagcccagctgacc

SEQ ID NO: 604260 - DNA, 386 bp, Homo sapiens
ctcctttacggcgacgacaacctacgcacacgagagcatgcctttcgcacaggatctccttaatccctctgcagacgaggagaggaggacccgcagcaggaaccgcctggcgcatagccccaagtcctacgccatggatgcgaaatgcccaccacgctataaaaccaccacggtctttagccatgcacaaacggctgtttcgcgggtcggttgctccactgacctctgccagcctacatgaggaaaagcagggcttacagaaggatgctcctttaggaggacgctgcactaagagcactgtgagtccagatgagtgggaacccttcggaataaacacattttggaaaaaaaaaaattgagcacgcttatgcagcgcgccggaacaa

SEQ ID NO: 604261 - DNA, 298 bp, Homo sapiens
gagactctagaggacccccctcaatcatcaatctaggcgaacatgcttgattgccttcactgttttagcatgagcaggatgatataggccagagtttcttccatattcaaaatgtcaaagcgatcaatgcgaaccttgaccttgcgcttcctcttggagtgaatccagttgcagaattttgtcaaccaagaatcgtctccattcttatcttctgcaagccaagtgccaaaatcatgcacccagtctggatgacgcatgattccatattcatcaggaaccttcttgacccaaaagcaga

SEQ ID NO: 604262 - DNA, 563 bp, Homo sapiens
ctgagtatctaaggatccgatcagtgcattgtgggaaaagggtggcatagtcaatatgtactagatatggataagagttcgttatgaaattcagtatgcttttagcacacatctttaggtggccagtgctgtaatcagtgctaggaatttaaagattgagtaagacatggtgtatgcccacaatcaaatgaggaggacacacgtatactgggctactttgcaccagcgtggcaagggctctgcaagtaggataaacaagccaggttgaagcacaaggagacaaccatcaccaaggcccggaaagaattacggtaggaatcatagagtaagggaacttggcatctggcacaatggcacgtggatcgatccacgtgccattgtggatccacgtgccattgtgacaccaatcccaacacccactggcagacagaccccaaacacgaaacccatcaacaacaacaccacggtgaccccaaacccaaaaaccaccggcacacagaccccaacaacgacacccatcagcaccaccaccacggtgaacccaaacccaaacaatggcacgg

SEQ ID NO: 604263 - DNA, 696 bp, Homo sapiens
gcacgggaaagggaaccaggaaatggaagtgaagggtgcacatccacgatctagaaagggctgcgtcactgcagccagaaagacagtggtaaacagagttataagtggcagcaggggcattcaaagtgtcaaagaagagaaaaagaggtgcagaatggattgccaaatgagcttccaggtaggactaagagagtctttaagaaaatccaaaaatgagactgaaaagcatcctgaactaactaagtgaaaagatacggaaacgatgcatggacttaagcagtactgacagataactgaaaaagtactagtagtagcacgtaagaaagaactgcgtgaatgggcgactaagacggacctggaggacgtacactgagaggacagttcctaagagggtggaactcttggcgcagcctgctggtcacaaggatactgtaaacccttgcaacgggctacggaccaactactctacacaactacacgacaccacgacaacactactcagctacccggaggtcgttggacacgcctactccagcgcccgcagtaccgcaacgcgcgcgcgctctcacggaagcttactacgagatccggacatgagcccagtgctacactaggaacacgcgggatccacacacgacaaccacaagagctcacacatcctatgacagcaagaaccatccccatcgcccacacgaa

SEQ ID NO: 604264 - DNA, 371 bp, Homo sapiens
cgactctagcaggatccccactttcgccatgtttccctcactatcccttttgttatgtgtccattttcgcagtggcagtacatggagaaatctccaccgtcaccgcactatccaccaggcgcattaccacctgaatgtgaaggtctcatctcgaaggtgcgctcagccattataagaaaacatatttcagaatggaataataagtgtgctcttcccacccgcatagcggtctcaccttcagttctagctttctttactccaaagtcttctgagtcttccaagcatctctttcgatttgttcccacactaatattattaggaaatacattctgatgacccccatttaagatgccattgttatagaattggtt

SEQ ID NO: 604265 - DNA, 275 bp, Homo sapiens
gaaggtcaatgccaagtatatctgcatatctgttgataacaacatgaacatctctagcaggtgtgattttgtttatagtcagattaatatctttggaactgaattaccataacctgttagaatagttcattaaaattgcttttaaaacccgaaccaaaggacacatgtgaaataggaatctcttaaataacagtctcctgaattttatttctaaaactaatagaaattatcacaaagtagtgttaatgaatacttctgctacctttcttagatgc

SEQ ID NO: 604266 - DNA, 381 bp, Homo sapiens
tggccggacactagcagtatgataacaaggccaggagtttgagacctaccttggcctcccaaagtgctgggattacaggtgcgagccaccatgcctggccaggagtttttaacttacttaggcttgtccactgtcagcctgcagctgtttaataattaccctgcaaatgtgtccatcaggtgctggctccagcaggaactcctagacaagcacaattccacttgccacctgtctgtccagtcttcaggcagcatttcgtcttgtgatctctattttctgatggatcgcagagttgctgattttcagtatgttctgctctttgcctattgtgaggataggaattaaaatgcgcaagctctctacatgttagtgaagtggcta

SEQ ID NO: 604267 - DNA, 168 bp, Homo sapiens
ttcctcctcaccagacctgactgtctgcgttcgtgcctcctccacctccgcttcagggttttcttttacttctatataactgtgttgccttctactttttctgtctcctcatcactggccatagctgctgcctgattcaaaccagcatcctcagtatcttcttcttct

SEQ ID NO: 604268 - DNA, 167 bp, Homo sapiens
tccgttacgagccaggtgagaatggagtgctcacagtgcgctgggaagggaggacgtgacggcagtgtggatagggactctcttcggtcagagcaggtgtcgaaacaacacctttccttattcgcccggatcaaagtctgtcgggctagtcgggggggacgagctcg

SEQ ID NO: 604269 - DNA, 871 bp, Homo sapiens
cttagcatcagtcggaagcttgggtcatgacttacctgacttgtggcccgggggcaagcaagaaacaataacatcggtgcttataaatggcaccacatcttgttagctcccccccaaatacgtctctgaaagctcgatgcgacgatacctatgggattttacacaggcccaccagcgttataaatgctatggtctctatccatcagaaatagtcgattattcatatgtttgaaggcagctaacaagacaaagaagaaaacgacttttcctgagggatttctaaccatgtatcctaatcctcccattgggcgggtatagggtgtagttcagggtttctttggtttaagaaaagaagcttgataacttttgacatctgacgagatgtgttgcaagggatacggctgcagtattactaatttccatgtgtatctgggaaggtatattgcaaagtggcgatagctaaaattccagaagtttaaagatgcctatagaaagtaaacaacatttatttaggaaagaacgctgaatatgccttcttttttaattagaaatatttggagatagggtgtggttaagtaactaataatggagtaggttacaggatctaaagcagccctgttcacagtctagtaggagagagaaaatattggcagattagcactttagaggcaaagaacaatgttattatcagcaggttcctgccatgtgtggcaatttgaatctgttagaaaagggtttcaaaagcaaaagatgtctcgggtgcgaaactgaaataaattccggttgtgacaagggaaaacattagcaatttctgtggagcacgaatcaaaaagaagaaacattggggcgcccaattcaaatggggcctaga

SEQ ID NO: 604270 - DNA, 442 bp, Homo sapiens
cacatccacattgacatctccagccacacaggacatcaacaggacattcctactcctcctcatggtatcttctcacctcgtaagctagctctacattcaggctctcgatcagcatatccaggatcagtcttagacagagtgagctcatccagcacccggagcaggcacgaagatgtcaggcctccacgctctggcgcaaggccagctcattctcatacttgagcctgaagtcgtccacagacagcctgaaattgtcaatctccaggatgacccggttgtatacaatggtggcggtcaggatcttgtcccggaagactactacagaaggtcttgtaataggggctgtagtaccgctcagagatagctgggctctgcttcaggtgccagtcacggatcttcaactccaggtcagagttggactcctccagggcgcgcaccttct

SEQ ID NO: 604271 - DNA, 204 bp, Homo sapiens
ctcaggttatggagggtctatctactatataggactttgcgcttcgaaacttacggctcctcaaatcatgaaacttattaatattactgctgttagagaaatgaatgagcctacagatgataggagttcatgtgggtgtatgcatcgcgggtagtccgagtaacgtcggggcattcccgcctcatcaaaaaaggacgcaggggt

SEQ ID NO: 604272 - DNA, 809 bp, Homo sapiens
cgagttttccggagcactctaactgggccttatatctacggggtctttcctctagggaagcggtcgccctcggtgtcaattaaacacagcttttcttcttgttccgcctccgccgtcaattttatcgtccaagggattaatgggacgattgttccccgcctcaggggggggaagatttcggcccaaatagggaggcgcccacatggttttcccccgaagtattgttgcccgccgtgcacttagtcaataaaaccggcccgcatttttccaagtactcaaaagctaagcctcatctttcctcaagcccgtttttacccccttgcttcaaaacccgcggttccccaaagcaacaacggtctcattcagaattttttccccaagacattttgttggaaccctgtattctctgggagtactgtcacaccccgctccccggtggcagattattaataaatacatgcctgtacacccccccttcaagtatattaagaatctatggtattcttccctacataatcccttctatccggcttctcctggcgtctgaattaaattgttatctataaaattcctcttgccgacaacagtattttgccaagaactttcttagataggcttttcacctagcaatcccaaacatatatattgtgagttgcgaccacaccctgtctgtgtatatccccccaccagtctagcacactcatgtacaattaatggaagatgaaacacaatatgatctttgttttccattatgacagttgcaattactccgctaaaatccgtaacaaaaattgaacccccacaagaca

SEQ ID NO: 604273 - DNA, 341 bp, Homo sapiens
tgtatatatttatggggtacatgagatattttgatataggcatgcagtgcataatgagggtaaatggagtatccatcacctcaagcatgtatcctttgtgttacaaacaattcaattctttcagttattttaaaatgtataattattattggctatagtcaccctgttgtgctatcaaatactatttcttatttattctttatattttttgtatctattaaccatccccactttccttcttacccccgccacctccacccttcccagcctctgacaaccatccttctactctctatctaaaagttttaatttttagttcctgcaaataaatgaaacaatgc

SEQ ID NO: 604274 - DNA, 459 bp, Homo sapiens
cactgtacacacagttacactccaagttcgcctcattttaatagtagagtacacacccccaggtgaggattctatatgtaatgatacatgcagtgtgtgttggagcatgtaggtactgagcatgtgtgccaaccacaggcctgtctgcctttacacgcccgacctcgccgtatttcatgaacaggcacgcacagccaaccgcgggcctgtctgcctttacacgcccgacctcgccgtatttcatcaacaggcacgcacagccaaccgcgggcctgtctgcctttacacgcccgatctcgccgtatttcatgaacaggcacgcacagccaaccgcgggcctgtctgcctttacacgcctgacctcgccgtatttcatgaacaggcatgcacagccaaccgcgggcctgtctgcctttacacgcctgacctcaccatatttcatgaatgtgcatgcacagc

SEQ ID NO: 604275 - DNA, 722 bp, Homo sapiens
ctcggcgtcgaggggagtttgtcctgcgcacgtgtaccggacttgcgcatgtccctgccgggctcgctccgcgggtgccggcaggactcggccgcggtgattctggctcgcggtgcccgagtgtccggtgtgcggggctcgggaaggcacctccacctagccgtctgttacgacccccgaggcgcaatgtgagccccatctcgctatccgggtccggaggggttcaccttagaaggatttttgaagctcttggcgctggctctaatgagaacccacttccttgctggattgtcaggagtcaagaatccttaaacggagccaatttgcgtttgtaaagccaattgccccaagtgacttgcagtttcgaaagggagagtacttcctggacaactgcgtataaaaacgaacgaacaaaatacgttttattaatacggggagcctggtcaccaactggatgctcagatggaaccctgagcagcccatgtacatggaagatctttattgcagagatcttcaaaccagatggctcgcagagattgaggaacttgcccaaggctacgcagcttgaaactgaggctaaagagttagtattctgccaaggccagctaatagttacagagcatggttccaaattcagagctgtcggaagcttaagcccatgtgatgaaccacgaatgtgattttacctcatttaagccttgcagaaactctgccaaactagt

SEQ ID NO: 604276 - DNA, 203 bp, Homo sapiens
cttggacctcagcctgaactcaggcgtttagagatttgcgggtgcgtggtacagagagcgctttactcctcgtcccattgcgtatagattagctgggcctgaccatgctcaggctccagtctttagattggcacatgaagggcaagaattaagatcactagtcccagaattaggacaatccatgagccccgccccagctgcgg

SEQ ID NO: 604277 - DNA, 1030 bp, Homo sapiens
gaagaagcagagctactgcttccaaaaggatgctcctcttggcacgcttcccgaggggagtccatgcaagaaacacgaagagcctcttgccgacagtctctggttcccctagtccctcctgcaggaaactccttgccctacagaggcccctaagaagcactgctttgacccagtccctcctgcaggaaactcctcagcccacggaggcccctatgaagcaccaccttgacccagtccctcctgcaggaaactcctcacccacagaggccctgaatgaagcagccgctttgagcagggctaatgtttcactgctaaatcctgcccattccttatgttgcccgagctctcctctattacctctcactgtggctgaaggctgcagtgtggggaccgtggcgggggaggacaacacgagggaccccccagaaccctgtctgactgtgtccccgttgatgcaactggggaactctgatcccccgaaggaatgggagtacacgagtcgcagctctggtgactgggtgatgcatggtctcgtgttcagagatagcatgcaaggggcgctccgccttctcctgtccctaccactgtccctttagctgcccggtcaggaagctgggctctggaggactcgaccagatccggggtgtgccccctctagggcacgtctggagagctgcgactcgcagcctctgcccattcacgtgctcctgctgtcactgacttaaggctccaaccagaagcggaagcaccccaatgcagacccagcccgtgggccccagacaccatctaccagtgtgggaccatggtggcactacacccctgctaacgcacgaggaccaccagaattgcaagcaggcaagccgggggacgtcaaagcaacgaaccggacgcgtgacacaccccactacgagaggcaccacattactcgctgacccgcacgcgacaccacgcacgacgggcgacacggcctacaaacaggctcaccaagatacgcaacacaacaacgcacattagggccgcaatcccacaa

SEQ ID NO: 604278 - DNA, 312 bp, Homo sapiens
tcacaagctgaattttaagaattcaacgtaaaggccgggcgcggtggctcacacctgtaatcacagcactttgggaggccgaggcgggtggatcacagggtcaggagattgagacatcctggctaacatggtgaaaccccgtctctactaaaaatacaaaaaaaaaaaaaaaaaaatttggccgggcgggggggcgggaccctgtggccccagttactcggggggctgagccagggaaatggcgtaaccccaggaggtggaccttgcagggggccgagatcacacttttgcggtctccagcccttttgggac

SEQ ID NO: 604279 - DNA, 992 bp, Homo sapiens
gctgcgccatggtggtggtttgtgggtcgggtggtcgcgtgctccggcctccgtgggccttgctggagactcacgcccttcacgcgtcgctgcccccagctcagatcttactgcgggccgctccgacggcggttccatcctgtcaggcactatgcgggcaaacatctccttcgccaaaagcaggcgccgtcatcgggcgcaatcgtggcggtcggattggcgcagtggtgtgactgtccagtcatgatgcagggactaccaccaagttctaaatgccgctggaaagtgcaaggcgaaggagaccagactgggtttcggaggtgtgcccagcgattgggggtgagagcgacaggtgaaggactacttgctatggatggtacagaaggcttggttagaggtccaagaagagttactggatgctggctgcaccaatccaaaggattcctgttggatcctgtagacttgtgggcaggaatcactgtaaatgtgacttggagaacctattgatgacagatgtcccatcagaaacaaaagaatgtgatcccattcatgctgaggcttctgaggtacatggaagagtgagtgttggagcgaggacagtactggtgactggtatcacggttgtcgatctggtagctacccatatgcaggggtgggaacaatggggttaaggaggtgctggaggtgggagactgtcaggtgctggagtaaatcaaccaatggacgcgaagaccatggtggacagctgcgaaggcggtggggcggcgaccggtaaggcactgtattacctgaatggtgatcagaggtctagctaaaacggccccaagtccccttgaatgtgcaactcagtacccgggggccgccgggcgaaggggtgctaaataacccaagggagactgaagaacacagacacaaggaagagaaaaggaacatatgatatcggcatgtctaaaaaggatccagaaaaagaagacaggcggcaccagaggatt

SEQ ID NO: 604280 - DNA, 1606 bp, Homo sapiens
  misc_feature (883)..(883): n is a, c, g, or t
caccatcacccaaaaattaacatgtactcagagacataaatgtaaaatctaatactacgaaacttctaggctgggcgcagtaagttcacgcctgtaatcccagcacttgtggacagactaacgaagggcagatttgcttgagctcaggccgttgaaaacccagcctggataacatggcaaaaccccagtctctacagaaaaatacaacaagtagccaggcacggtcacatgtgctgtgaattcccagctactcagcaggcctgtggtggcgaggatcaccttgagcctgggggaggtcaagaatgcagtgagccaagatcattccatatgaaatccagcctgggcgaacagactaagacgcctgtatttacacataacaaggacagagcaccagacacttctagtcagaaaacatctccatgatcttgacggtaacgccaagatttctatataggacagacacaagcaagacatcatacaggagaaaaaactgtcgtctatgggtgacgtcagtctctactcaacctcaccaactaagaccttcaaagagtgcctcttttacaacgaaccagacaacacgggctgggcgtgatgaccacaggcatggaaatatcaagcacttgtgacagggcagccatagcagcatacttcgcgcccggcatctcacgaacagcgtgcaatattggttaagccattgtcaaactttgtaacatacactacaaggcggactacgccaccattgcacaacagcgatcaagtaaacctgatacccaaagggctgtggtaccacgtacttctctatgtgcagatatcaatcctcaaacaacatggacaatagccaagaggcaacactaccatcattgtgtcctacatcagacttttntactatattatcgtcgtattaagtatacagaagacaacacacaacaacacgcagaaatacaaagcacatacacatgaacctatagctaacagcaagcacaaaacataacagatcgcaagacaacaaccaagcagcaaaacgaaccactgcacaacaccacaagcaagaggaaagaggaagaagctattagaggcgagagagagagcgtaacccgaacaagagacaggaaggaagaaagacggcgagatgcggacgtagcgagtgagtaagaaagaaagaggtgaaggcagagcagaaacaaagagcatacaaggagagcacagcagataacgagaaggaagagcgcgacgacacagaggacgaggaataataggcggaagaacaagaagactcgagcgagagcacgagagacaaaggaacgcagaggagcctagccgagagccagggagaaggagagagagagaagacgagcaggagacagaaggaaagaggcgcgaacgcaagagaagcgcaagggaggcacagaggagagcggacagcgacagagaatagggataacgagagagacgaaggagcaagagacggcagggaaaggaaggcgcacgaggcggcgaaacaaccgaagaagacgcggacagcggcgagagagcaacgacagacaacgacgaaggaacgagaggacagcaagacagcacgcgacacaagcacaagagcagcggcaaa

SEQ ID NO: 604281 - DNA, 1373 bp, Homo sapiens
  misc_feature (117)..(117): n is a, c, g, or t
  misc_feature (198)..(198): n is a, c, g, or t
  misc_feature (219)..(219): n is a, c, g, or t
  misc_feature (222)..(222): n is a, c, g, or t
  misc_feature (235)..(236): n is a, c, g, or t
  misc_feature (273)..(273): n is a, c, g, or t
  misc_feature (305)..(305): n is a, c, g, or t
  misc_feature (646)..(646): n is a, c, g, or t
  misc_feature (1298)..(1298): n is a, c, g, or t
  misc_feature (1305)..(1305): n is a, c, g, or t
actggaaagaaaccatttaaatgtaaagaatgtggaaaaggtttaagttcagacacagccttgattcagcatcagagaatccacactggagaaaagccctatgaatgtaaggagtgnggcaaggccttcagtagcagctctgtcttcctccagcaccagaggttccacactggggagaagctctatgaatgtaacgantgttggaaaactttcagttgnagntcaagtttcactnnccatcagcgaatgcacactggggagaaaccttatgantgtaaagagtgtggaaaacgattaagctccancacagccttgactcagcatcagcgaattcacactggggagaagccctttgaatgtaaggagtgtgggaaggcattcaatcagaaaataaccctgattcagcaccagcgagttcacactggcgagaaaccttatgagtgtaaagtgtgtggtaaaaccttcagctggtgtggaagattcattctgcatcagaaactacacactcagaagacacctgtccaagcatagggctatccatagttaggcccactgtgcctctccttttttctctttattttcatgctttttatcagtgtcctcgctgtccttcctggttagacacttggctttcatcatgaactcntctttaagttttttgaacctgtttccccaacatgaagtctctttatggttagagaagaccaaaaaacaaacaaacaaacttagaaacataaaaggaaatgtaagtttccagatttaaaggacatgctgggtgcccagcaggatggattcaagggaaacctacattaaggaaaattgctgtgaattatgaaaacaccaagtttgaataagaggatcatggagaaaaaatgagaccctaaaaagtttctagagagagaaaacaaaagatcagaaatgaaagcggggccaggcgcggtggctcgtgcctgtaatcccagcactttgggaggctgaggcgggtggatcatgaggtcaggagttcgagaccagcccgcccaatatggtgaaaccccgtctctcctgaaaaaaaaaaacacaaaaattagccaggcatggtggcgcatgcctgtaatcccagctactagagaggctgaggcaggagaatcacttgaatccctgaggcagaggttgcagtgagctgagatcgcaccactgcactccagcctgggcgacagagtgagactttgtctcaaaaacagtaaaaaatgacaatggctagatttttcaacagcaaccttcaaagtcagatgaacaatgtgtatgccttcagactnctcatgngaaaatgtgtccccctgccaattctatactccgaagtttaagtatagaataaggcttttcagaccttt

SEQ ID NO: 604282 - DNA, 549 bp, Homo sapiens
  misc_feature (18)..(18): n is a, c, g, or t
gaagaacttgaatctaanaggttccagctggtggattcaaggtctcaagggcggttcctgggcaccgaccggaaccggatacagtaggactggactcgggccatatccgtggtgccgtcaacatgcctttcatggacttcctgactgaggatggctttgagaagggcccaaaaaagctccgtgctctgttccagaccaaaaaggtggatctcttgcagcctttcattgccacgtgccgcaagggagtccccgcctgccacgtggccttggctgcctaccttttcggcaagccttatgtggccgtgtacaatggctcctggtccgagtggttttcccgggcccccccaaaaaaccgtgtgttccaaggaaatttcttaaaaggcctgaaccgtgaccttttttgctttctgtaactgcggccggtttagtgaccccatgacttacaaccggttttttccttttaggtgaaggagatgacatgtttttaaaatttctgtgcaaggctccccctctttctgtcaaccctggaataaactttgccttttttta

SEQ ID NO: 604283 - DNA, 258 bp, Homo sapiens
attatagaacctggcgacctccagcagtgatagaacatgtactctattttatggagttgatacgactggattgattgagacagagtatcactcttgttgcctaagctggagtgcaatggcacggtttcagctcactgcaacctcggtctcccaggttcaagcgattctcctgcctcacactcccaagcagctgggattacaggtacccgccaccatgccaagctaatttttgtatttttagtagagacggggtttcac

SEQ ID NO: 604284 - DNA, 292 bp, Homo sapiens
gcataagcatcacatcgtcgccgcaaagtgacatacggatgtggcgctatagaggaatgtccacagaggcaaccacgcatatacagcattgaggacagtgatcccatagtcggaagatctctccaaatgtagcgggacttaaagatgtacctgtattcactaggcaacacggcggtgcttcaagaatatgcggctcacggtatacagatgatgaagctcatttctgtgtgtatctctctctcactctctctctctctctctctctctctctcactctctctctctctctctc

SEQ ID NO: 604285 - DNA, 435 bp, Homo sapiens
tacttttcgacaggaggaaaaggcagtgagacgttgggagtactgcttacaaaacaggatcaccagtgctttatgtggtcgtgttcatccccacgccgtgtgtctacgggctagggctggcgtgttcatccccacaccgtgtgtcatcatataggactagggcacttcatgatgtccctatcttgtttcgcagacgttccaaaaactatgtcgcttgcttttcctgtgtttttccgttgttttctgtccgattgagtgctacgggtcttacggactctcacccgttcccactctctgcaatatggatcaggcagtgtttctgataggatgtgaaatggactctcctcgggtgggtccagcacgggccctgcccaccagaacacagtccgtgctgtgctgcgcttaggagctggccctccactctcctttgtgcag

SEQ ID NO: 604286 - DNA, 345 bp, Homo sapiens
tggaaagatttaaaagtaaatgatttaattctagtaactgggctacaagaaaaacaggggaatggataccatcccggggcagcgccaaacagccgggtgctggaaatgcagctgaggacaaaatgattttcacaaacacgggcaggaggctgggaaagctcacagccccacaggacggcggggcaaaccgtggagccaccaggcattacggcacatggatcttggcatgtctcccaggtgctggggaaacacaagcattagttggtgtacaaattagtcataggcttgtgaagacatctgtgatcatctgagtccatctgatcaaaatatttataaaaagtcata

SEQ ID NO: 604287 - DNA, 134 bp, Homo sapiens
gcagtcttttttctcaaatgtgtctctgccaccagaatgggtcagtttacctgtaggtataggaaacccagggctcaactaagagtcccacacagctttctccaagtctggtctggactcaacatcagtctggc

SEQ ID NO: 604288 - DNA, 416 bp, Homo sapiens
ctccagctttggctcaaagggccccaggtacagctcaggccaccacttcggagggcacaagttgtaagccttggcggtttccttgtggtattaagactgcaggtgcacagagtgcaaaagtgaaggtgttttggtcatgggggtggatccctcatgagtggtttggtgccttcctcacagtaatgagtgagttctcattctgagttcacacgtgatccggttgttaaaatgagtcagggacctccccgtctgtcttgctcccacttgccgtggggtacactgactgcccttcatcttgcaccatgattgggagcttcctgaggccctcaccagaggcagatgccaatgctatgcttcttgtacagcctgaaccaaataaaccatgaagcaaataaagctcttttctttataaatga

SEQ ID NO: 604289 - DNA, 250 bp, Homo sapiens
agagatcccagcgctccgcagaagtatgtcctaaataactatctggtccggataacacacaatataaagagcattaataaaaaacagacataacatatactcctaaggtctaatgggaaatatccggtgggcatgggataaccaatcataggtgcagctgcggtagcaggatatgcatatgccggtgggtccataccatggtgcatattgggaacataacttccgtatggctcagcgcggggtaccggag

SEQ ID NO: 604290 - DNA, 1014 bp, Homo sapiens
  misc_feature (252)..(253): n is a, c, g, or t
  misc_feature (279)..(279): n is a, c, g, or t
  misc_feature (310)..(310): n is a, c, g, or t
  misc_feature (359)..(359): n is a, c, g, or t
  misc_feature (372)..(372): n is a, c, g, or t
  misc_feature (390)..(390): n is a, c, g, or t
  misc_feature (421)..(421): n is a, c, g, or t
  misc_feature (485)..(485): n is a, c, g, or t
  misc_feature (495)..(495): n is a, c, g, or t
  misc_feature (614)..(614): n is a, c, g, or t
  misc_feature (693)..(694): n is a, c, g, or t
  misc_feature (714)..(714): n is a, c, g, or t
  misc_feature (729)..(729): n is a, c, g, or t
  misc_feature (731)..(733): n is a, c, g, or t
  misc_feature (735)..(735): n is a, c, g, or t
  misc_feature (744)..(744): n is a, c, g, or t
  misc_feature (748)..(748): n is a, c, g, or t
  misc_feature (752)..(753): n is a, c, g, or t
  misc_feature (774)..(774): n is a, c, g, or t
  misc_feature (779)..(779): n is a, c, g, or t
  misc_feature (781)..(781): n is a, c, g, or t
  misc_feature (784)..(784): n is a, c, g, or t
  misc_feature (787)..(787): n is a, c, g, or t
  misc_feature (796)..(796): n is a, c, g, or t
  misc_feature (819)..(819): n is a, c, g, or t
  misc_feature (827)..(827): n is a, c, g, or t
  misc_feature (916)..(916): n is a, c, g, or t
  misc_feature (947)..(947): n is a, c, g, or t
  misc_feature (954)..(954): n is a, c, g, or t
  misc_feature (966)..(966): n is a, c, g, or t
acatacattcttgattgtggggcagacaattgttcatttcaacaggactttcacatggtaacagtcatcaaaattggcatactatattaaaaaatgaaatcaaacagcatagacaaaaagtatgcagctttatgccaatttaaatctcaacatgcaccacccctcacccatgatctcagaattatctgatgtgagcttattaaaatattagccagagagtgtctgaggtcacaaatgatcgtttacaaaatnnaacctcttttcctagagctacttgtnttgttatagaaaacccccacaaataaaaatnagccctattcaaggtgttcatttcaaaatcacatatgtatacacaagtntcaagccattgtntttgtgtctcacattganacatcacaatacatgatgtgaaactgatttnctgttttaatgtaccttgcctctgcttgtgtatacccattgtctactatgtggactgcttacanatgagagtgngttaaaacattttcagttattgggtacacttgtaatttgttcctcctcagtaactactcagaaaaactgcttgagtgacatgtcaaaatttgtgtttcttcctgttacaagaaatttgngtaaaaatctgtgattataaaacagatttgttttttgggtttttttagtaaagaaatggctaaattttttttgtggttnntatcttattttcaagatgantcagaattcaacgtntnnntnttttttttntttngggnnaagtggctaagagaaaaaaanaaaananganaanacggggggnttcaaagaggacgacaaggcacngtcacaancagtccaactgtaattctttcctttcttgtgattatgtaaattttaaagaaaagaggtttctcacaagctatatacagcagctttaaanctcagtgtttcattttcacttgatacacaantaaaatnaatttacgacanatacttgtcacagaaatgtatgtaggccatagaaactctacagcttta

SEQ ID NO: 604291 - DNA, 636 bp, Homo sapiens
attgatcaccctagcagcagtgatgcatataaacctaattataaccacaccagtcaatcgaagctaaaggatttggtccttttattgttgcttcgagggttatattgaaggggctatgggcgggacgggattctctttcagatctttgtagtacaataactaagatgttactcagttgctttagtagtctatattagtggattgcttagcgttataagcgtgtgccactggcctcctagttgttgatgcttacggataatggtaggcctgttggtgagttttagtggtgacttgggcatgtcttattcaaaaacaaaaacataaaacacagaaacctttcttcagtcataccaaggcaagcagccatttcatgactcacttaacacattgcagtgtaccagtttacaagatgattgttccctttttgcgtgacatggcagttctaacccccagagaattccttatttgtaaattggaagtttctactatgccttacagagcttaaattcagaagtttgtgcctcatatctgaaacaagggaaataacacacccattcaaaagtaaataaatctgcctagaagttttgtttttaacatttccatataaagagctctgttgaatgtcatgaatagacg

SEQ ID NO: 604292 - DNA, 354 bp, Homo sapiens
agatctcatggaggcagaacatagaatggtggttaccagaagctggacgggaagaagggagataaagagaagtccattaaggggcacaaaaatacagttagatggaaggaataaattctagtattcagtagtacagtagggaaattatagttaacagtagtttattgtatactttagccagaagagaaaaattgtaatattcccagcacaaagaaaagataagtgtttaagatgatggataatccaattgccttgatttgatcatcacacattgtatacaagtatcaaacatgtacccccaaaatgtatacaatattatatatcaataaaaaataaacatttttaaaaattaaa

SEQ ID NO: 604293 - DNA, 573 bp, Homo sapiens
  misc_feature (1)..(1): n is a, c, g, or t
  misc_feature (22)..(22): n is a, c, g, or t
ngaattcggccattatggccgngataaaaattttgtttaaattttggtagatttttatctatacaaatttaaataaaattatgttttgtaagctgtaaaaaaaaaaaaaaaaaaaaaaaaaaaaaaaaaaaaaaaaaaaaaaaaaaaaaaaaaaaaaaaaaaaaaaaaaaaaaggaaaaaaaaaaaaaaaaaaaaaaaaaaaaaatttggcccgcttggcccaagccaatttaaaattgaaaaaagttaatcaatgcggccaaaattgaagttaattgggcaaattccccttaaaggaagccgattaaaaataaattggccgggttttaaaaacgtcgaaattgaaaaaaccttggggtaaccaaattaaatcgctttgaagaaaatccccttttgccaagttggcgaaaaaccaaaaagccccaaacgaatggcctttccaaacatttgccaaccctaattgccaattgaaaattgaaaccgtaaatatttggtaaaaatccgggttaaatttttggaaattaagctatattttaaaccaataggccaaaatcggaaaaaacctttataaat

SEQ ID NO: 604294 - DNA, 285 bp, Homo sapiens
gcctcagcctcccaagtagctgggactacaggcacccaccacctcacacggctaattgtttgtatttttagtagagatggagtttctactaaaaatgttagttaaagtgttagccaggatggtctcaatctcctgaccttgtgatccgcccgcctcagcctcccaaagtgctgggattacaggtgtgagccaccgtgcccggcctgctaggatccaaatattaagattctgcatttaaagtcacttacgctctctgcacttaagcttctgtaaccttcattagga

SEQ ID NO: 604295 - DNA, 551 bp, Homo sapiens
tttgtcctgcggcgaaggggcgaggcctgaccctgagcatcagctacgttggccttcaatttagctataagcagtgaagaccaaagtctaacctgctgaaacagcaaggggcaagacagcattgacttcaacaggccttttttgtaaagcaaaaggtaagatgacaagatccggtcttgtctgagaacagctgcacagaatacacattataaatgagcactttctcctatctcagcaccctggtgaatgggtgtcagagaagtttctggacctgtcagggactcccagggcttagccagagggtcaaagtgttgtgcccactcactttttcttatttaacatactgtggagtgagacatgtgggaaaatcggatcccagagattacctaagcatcactttttagagacgttttggttaagggactaccttcctgagaaacgttatacattatgtgggtattgagcttgaatttttttaatcataaaatcttaagctgggcgtggtggttcatgcctgtaatcccaacactttgggaggccgaggcaagcat

SEQ ID NO: 604296 - DNA, 864 bp, Homo sapiens
aactagaaaaggttgtgttgggtaacccagcccaagattcaatcttaatcggtctaagccagtggtggcattcctagcctccctcccactgattggccgggaagggcatatgacctaggtgctgacccatgagaggtaaggagagttgccggaagccttcttggatgacctgtgggcacaggaacctctcttttctgtaagtgcaatatcccttagggtagtcactgaaaatcttcatgtttgaccatcctctgcctttcccaagttgaattgtgctcagtttcatccaaacaacgactataactcagggttgcattcaacatatttaacaaccgagataacatggaccctgactaactaatagccactggccacagactgcaggccatatggtaattaccagctggatgtcaacccaagtctgctccctattatgggctgcatgtagttggctcctgggggatacagagatacacacttatgtgcatattactgttctcaaggtgggcagtctggtagcttctgtaagacaacagtaggtaaggtctagaatgccaatgttcgcaattttccctgtaaatctcaggttctgaccgttggctgacattagggtcaggggggagcttggcccaggctgattcagcagatctggaggggcatgggcatgtatgtacaaagaaagtcccaagtggggaaaactctgcatatcagctgatccattccagcaggacgacgttcaagcggccagaacgtaatacctgagacctcctggcgaggtacagacagagaaaggactgaagtcagctgcaaggggcgagactagaccaatcagaaggtgggtcatagcatttctctaaacaagga

SEQ ID NO: 604297 - DNA, 102 bp, Homo sapiens
atggcatgtatgataggacacttaggcgaagaggaatcaaaagcccagctaccaaatagaaaagaccttgtcaacattgctaactagaagaaagtacaatgc

SEQ ID NO: 604298 - DNA, 268 bp, Homo sapiens
tgtaaatatgcgatagcgatcgatggcggatctgaggtgagggaggaatttggagctcttttgagcgggatacagatgataagatcgtggtgaacaaaaatgcatgtaagccggatgtggtggctcacgcctgcaatgccagcacttcgggaggccaaggcggccggatcacccgaggatgggagttcgagaccagcctggccaacacggcgaaaccctgtctctactaaaaaatacaaaaattagctgggcgtggcggcacagcccc

SEQ ID NO: 604299 - DNA, 351 bp, Homo sapiens
ttaggtttttgttgttagttttgttgcgttgcctttatttttttagagggggtgggccccatgaaagtgggtgccccacatcacttctctgagaatcgaacggacggtgaatccgctcttggatcgagaagctgagcaagctgtgcgggtttatgtacaagtgggttgggtttgatctcagttagggcaggtgtagactttttaacgtggggctttagaaaatctggggttagcctggaagacaaattggcctcagcctccacagtaccatttgaatttcactataaaagatggaaagctcctgggttcatgtgccaagggcttcatggctattcagggacttagtggtaa

SEQ ID NO: 604300 - DNA, 123 bp, Homo sapiens
  misc_feature (75)..(75): n is a, c, g, or t
  misc_feature (79)..(79): n is a, c, g, or t
agaataaaaaggagggttcactggtctttgtgctttaaaactatggccatagtcactgacaaacatttgggtccntggntaattttggctcggattgagggagatgccggtttttttttggga

SEQ ID NO: 604301 - DNA, 338 bp, Homo sapiens
agattgcgtgtggatcaacatgacggtcgttacttcagagatggtcactgctgaatcattgaacatcccgaccctcacgatatccagtaccgcctcggcctccccatgtgctgcgatttaccagggcgtcagccatcccttgcctggctcttccagtgaggctagttgaattaacgttgatctcggcgtgctgtatcatatattgatggttcattagctgtttcccttgttttaaaatgatcagatcaatttggatggagtgctgggaacaaaaggctaattggagtgaatttaagagagaacaggaaaaaaggaactggagactgggtatagatgac

SEQ ID NO: 604302 - DNA, 146 bp, Homo sapiens
gagacctgtttgtttcttatgctgttgttcgtgggtggttctcatgtgcattgtctgagtttcccttgacagggccccctcccccgaggaaatgcgcccaccaaggtgcctagaactcatcttggatccgtcctcaggcactcctt

SEQ ID NO: 604303 - DNA, 333 bp, Homo sapiens
ctccttgctagtgagcctcctgctcccgcctggacccactgcttcagcaggtactcatagtagctgtctggcctggtgccagtgtgaatatgcctggtgggtgaagaggcactgtgggtattgatgaacatgggcaccagccctatgttcttcccagacatggcgtgaatgtgctgtgtaagctatctccattgcctcctgaaacttcttatcccctgtgagaggggcgagctcccgggaactccagctgaatgctggccacctcggccacagtgctgtcggacggtccaccgtggcggatgggcaactccagtaccgatgttcacatccgag

SEQ ID NO: 604304 - DNA, 699 bp, Homo sapiens
gaccttatggaatcaccagactcttggaactgttatgcccagtataacctgtcttatctgtcagatgctcgatagtttaacggataatgcggctcgattggccacgaatattaatcctgaatgtgggaaaccctcaattgatgcatggtattcacccagctgccaacattatactattagccagatcttcgaataaatcaagttattatttcgatactgaatagatcaaagcagtaagtacatcctaggaacagtcaggtcatgactccagtctctcgtaacgggaaaaatggaacgaacagccgcgtgtgtttcttgggtatacttactaaagccggacggcgaacactctgtggggaccgaacacggcctgggtcagtcgacggcgaacaccttttgggtcaacgggtgcgcaagctacttatcgcggacgttagaagcgtttgagaacagcaaatatactaatgcaagaggtttgagacaccccctgcgcggaaaacaataccgggcttcggttcctttacactacccctttaatgccgccacaatagcgggggacacatatatggttcgggtttggaacaaccccctttaacagacgacgaccattatgtggcttgagaccccttatttttgtaactttcggtagggtgtggacccggcggaactcgcaaacgggtccataaaagtcttgaagac

SEQ ID NO: 604305 - DNA, 879 bp, Homo sapiens
attcttttggggcctccgtttccttccccattggcgatttgcccagggtgtgcaggtgcctgtggggattctcattgcagaggggtttcatataggtgggcccctctgggtgccgtgcgacgtggccccagggtctcatggggggcctccccagtatggacgccgccttgtgagtgcctttttgtgggtgcttgtcctgcgcaactggtagggctccgtaggcccccggggttgtgaggccagtgaccccgcccactgggaagttgggaaatgtagagcgctttttcttgtggccccctgggaccgctgggagtgcagcacacttgtagtgttgagacgctgcttgcacacctggggatgtagggaaaggaaaaattttttggaaggatgcccttggtcccagaggatgtcccagatttgaccattcttgggcgccaggattccccgcccccgggatggcgcccgcgtctccaggatgtctccctctcagaaacaccttctgctcgcgcgtctcccactttattttggtccgctgcgggggtgacccacaccccacgtggcccgcaacatttccgctgtggcccgacattgtggggccccactggggtttttcttggggctgagtgagattctggataattgcgtatccaatccgccaggtgagtcttgttcccccctgtgtgaggcttgtgagccctctcagattctcttttcttagcaaaccagccgttatttagagagcgcaacatcccttgttgacctgaaaatggcgaagcccagataaatttttttgttttccttgttttctgctttttttccccctttgtggccttccaattttgggatccagaaattaacccttgtgaattgccaaaggga

SEQ ID NO: 604306 - DNA, 1140 bp, Homo sapiens
  misc_feature (2)..(2): n is a, c, g, or t
cntctgggccgccgccccttactctgcacccgcaacgcaagacggtgtctctcggtgtcgttttctgtggcgctcctccctcccaccgccccgtcgcccctcctcgtgcgtgtgtgtttcctctcgctcttgttgcgtcgtcgacaacaacaacgactcttctctaacgaccgctctactctcttcactcgagcgtcgctgtcgtccgactccactacaccgcggggggggcgccacgacgtcttccctccacgccgctcgtggtgttcttcatcacacggctggccctcactcacgtcttttcccatcactcctgggtgtcgggggggagacgtactccacggctgatgatactactccccccctccctcctgctgttttgtcctctcacctctgcggcggtgatgtctctcgtctttctctcccaccccctccctccgccactcggcggtgatgtaccgcctccttctccttctcccaccacacgcgtggtgtatttcgtcgtccgccaccactcctcgcgcgcagcgcacgctcgtgtgtgtttttaagtgactgtccttctctccctctctcgcgagtgttgtggtggcggcgcgtctttctcctcttctgttgcgtgccgctccacaacacagctccgacacgcgcaccacactctgtgcggcactttattatcagcgctcccaccaccgactctgtctatcttttctacgcgcgctgtgtagaaaacattgtcctcccgcgagagacagtcgctccacagacacacacagagctttagagagagagacacaggcggcgcgacatagatataaaaaatcactcagcagtccccacgtattaatgtggcacacatgtgcggcccgcgaggatctaatgtgtgtgaagcacttcctaactgggagtggagtggtgatacccctcattcacgagccgcgtctttgtttgtctcccaccccccgcagtatatttctccatccccgcgataagagagagagtaactcgtcctcaaacagacaatcacgtttgcggtgtgacctttttcctggcgaatcaaggtggtctcccgttcttttctccccccaatctttttttttttttttttccaaaaaaacgcctcccccaaggggtgccaca

SEQ ID NO: 604307 - DNA, 486 bp, Homo sapiens
  misc_feature (76)..(76): n is a, c, g, or t
  misc_feature (109)..(109): n is a, c, g, or t
  misc_feature (154)..(154): n is a, c, g, or t
  misc_feature (200)..(200): n is a, c, g, or t
  misc_feature (309)..(309): n is a, c, g, or t
gtgtgtccaaagggacctgaaaaatcggtgctgtggctcaaaaacagcttccagtgcccctgttaggagatgaacnacatcaacgcgccccttcttggtcatgggacanaaacagggtggggagctggtgttcccctcggttaaacggtggcanaaggggcaaaaaaagttcaagcgcttctcccccagcatccccaagntgcagtgctagtcccggcatccttatgggtccgccaggcctgctccagagcacgggtgaccatttttggtccggggtttcagctcccgttccccaagcccactcctaantggtccagtttcagcctggggagcttccccccgccttttgcccgtttgcatcccccgcctttcctgggttataaggcccccgggggggaaagctgttttcccctaaaggaaaagccccccccaattttgtagaaatattccaactaataaaatcctgaatatttttttgaggtttta

SEQ ID NO: 604308 - DNA, 573 bp, Homo sapiens
  misc_feature (135)..(135): n is a, c, g, or t
  misc_feature (172)..(172): n is a, c, g, or t
  misc_feature (211)..(211): n is a, c, g, or t
  misc_feature (240)..(240): n is a, c, g, or t
ttttgtttcggccatctgctgaggggggggcttgaatctccattcacttacccacttccagtgtttgggaagaattcccgctggtgggggcgatctgtgttgagggtggctccaccggcctcttcatcttcctcnaaccagttttttattaggcccggcgctccaacatgtntggggcagacaagacagtagagtttttcggctactcctnactcacggggtaagtttttttcctcaagntgggccccatctccttttttttttccctaaagttcatccgggaaatttatgttaacctcaagatggactgagttttgtatggcagaactattgctgttctctcccttttttcaggccctggtgaactctcctaccagctttttttttgattgactgaattgggggagggcaatggtgccttcccttttgccctttgggcattccttccccagagagggcctggaaattataaatttctatcccataaggattaaaaatttgaactttttaaggtgcctttagttttggtcctgatttttctttttacaattaccaaaataaaatttattaaga

SEQ ID NO: 604309 - DNA, 99 bp, Homo sapiens
ggcacttccctcatcatcagattctgtgttcatgagtgcctgactagagtagaccgctctgggtgccatccttgaaacaaatgccttcatttatctttg

SEQ ID NO: 604310 - DNA, 180 bp, Homo sapiens
gagccgcgtctgcaacctacaccacacacaccagatcgttaacccactgagcaagggcagggattgaacgcacaacctcatggttcctagtcggattcgttaaccactgcgccacaacgggaactcccccctggtgaatttttaatcaattagcccttactactcagagtgagatgcatg

SEQ ID NO: 604311 - DNA, 423 bp, Homo sapiens
cctatttaccaatcttttcactttttgcactgtaatcgtggctaagggaaaaaaaggatggggaaaggaggagtggccgtatctatagactagagggtcatcctatttgtggaaaactttattgtctacttcagtagggtcctgaatattagtccagtccttactgcccagtacttaaggaagagaggtctaagtgtgactgtatggggctagaagtaggtaccaaaggaaaagctagttcccaacagctccaaggagcaggagctgttgctcttcaggaagacggatactggtatggttgtgtaacattaatggccatggcacatatgttgtgtcaatctgatactcagagctcaatcctgtagtcaaatcgatcacagtcactccaggaaatgaggaggaatgaacccagatccctccaac

SEQ ID NO: 604312 - DNA, 347 bp, Homo sapiens
gggtctggggggggcctttttttttccccctgggggcaaaccggggggggccgaaaaaaacccaccccgggttttttggtgggccggggggaaaacagggggttttttgggccccggaaaagaaacaggggggccccaaaggcaggttttgggggggggggttttgcattggaaaaaaagccttgggggggcccccggggtccccaaggtttggggaacccctggggggggggcccccggggaaaaggccccctttttccggcttccaacggcctttttataggttccgggaaaggagggttttttggaaggtgccccgggggggaaaaaaaatggttcccccctta

SEQ ID NO: 604313 - DNA, 1155 bp, Homo sapiens
  misc_feature (613)..(613): n is a, c, g, or t
ggcaaaatggtcctgaagggagctgaagtcgacgacttctcctgtggagcccccgactgaggcggagacgaaggtgctgctatgagagctgaggggagcggctaagatcggcatctcccggctcatgtggcgacctatctgctgcggcggattaccgtcatgcgtgtgccagaaagcagtgtgacgtgactgcggagactgaggtcctccgtgccagagacaatagcatgcgggagaaaatcgtgattgccgtgcgcttaagtcacggtacaggtcggactcacgaccgtggggatgagaccgatacatcgccaggtcatgaagggcgcctaggcatgtcgctctcgcctagtgcgtcggtgagcaagctaggctggcgtccgctacaaggtccatacgaaaaagggcataacccgccactggaagacttcttgcggaaagcacatgggtggactccttgaagtcgcaccccaatgtttaaccgtacggatgcctggtaacgccacctagttcgcacgcgaggaagatttgtcaagaccaagggaatcactcaagggcatgggccgctagggggggcaccaacacatgttgtgccctggcctggtgtgcgtancactaatactagcaaggaatgcttcaatgagagcgctgtaagcaaccggcaacagtgcacctctttgcacgggaaggaggtgtatcctggaggacactactgggcatggaaacccgtggggtcctcataaacggagcggtcaccctgtggagaactttagtcatttccaaaagcatatgttcggatgagccctattacttctcaggaggggagtttgttgcgtaggtagtgggcccattgtggtcaaagacccttagttcatagcaagagctaacttggacgcattacagaaggaaatcgtccggtggaaggaaatcaaacgtttctggaaaccaggaaattcaagacaagttggctcctagaaacgggaagctaattctttgaacgccgggccgctgaagttcccctttggataagagaaggaacttagttaacgcaactcgtaaaatcgtgggcgagcctaaggaaagttaccgacggaaactttacaacacacgcgcgttggttatcaacagggcccgtcgccacctcatggtgagacc

SEQ ID NO: 604314 - DNA, 607 bp, Homo sapiens
cggggtccagagtggcagtaaggaggacgatggcggggtgccggggtctctgtgctgctggctgcgtgtggtgctgctgctgctggtgagcgtgagtgaccgcacgcctcgaggagctgaccatccttgtgagaaacagcaggaggaggaggatgagattcttcgcagggaacagatctatgagagtttggagttatgatcgcagtatcaagtgacccgttagctgggatgttatggagaccatggataagtaagaaaggtcggaagatctgaggcggttgaagtggcagtgcgtggtgttgaggccattgtgagctctgccactgggccgtgtcggtgttcccatttggtgggactctcgaagctgcggcacgatcgttacacccaacgtcacaggtaccgcggaggtagtgccacaaggagcaagtcgggagcgagtcgagtgcaggccgaagaataggcttatcctcagtctctaggtcttctaccgttggaactccgtaggtttgatataactacgacctagaaggtcgttaccgagtggaaagcctaccttgtatcttcgatatggagccgcgtggcaagcaggctcacaccgggataccca

SEQ ID NO: 604315 - DNA, 404 bp, Homo sapiens
  misc_feature (15)..(15): n is a, c, g, or t
  misc_feature (72)..(73): n is a, c, g, or t
  misc_feature (133)..(134): n is a, c, g, or t
  misc_feature (152)..(152): n is a, c, g, or t
  misc_feature (165)..(165): n is a, c, g, or t
  misc_feature (188)..(188): n is a, c, g, or t
  misc_feature (194)..(195): n is a, c, g, or t
gcttctgcacgtccnaccccaatccaaccagctcagggcagccagttcattcaacttctcctcaacttgttnnctgcttccttcccatgcgcacatcacatggccatctgtccagcaagtcaggcatgcaacnnagcacagatttctcaaanattaactggtgcnatgcttcagtcatcacaggcacntgctcnnatcactggtcactcctttgatccatcaagggacacagaagtccaggaataccagctttgccatgagaccgctacacagccaccacacaggacacaatctctcatggccatggcccatgatgcttcgacagaactgcagaagctggcagcacatgacaggatcctgcacagctgcacatggacccatgtgctcactctggtacccctcac

SEQ ID NO: 604316 - DNA, 278 bp, Homo sapiens
ttatgtcagcgggatgtcagttagaagacagcggcgtgatgttctcagatgtccacagcgcatgtaaatgagggatagcagtagtgacgcccatctccactggccgtcgtgatacatcagaaactcatctcgaatgaagtacttggcccgggtcacgcgtgggtcctctccgggctcgggagtagcatcctcaggagtagtgtagcgagcaaattctggaaagtagtcctcaatcttcgatttcccagcaaagaaccacacgaagcacaagaaccaca

SEQ ID NO: 604317 - DNA, 260 bp, Homo sapiens
gataccgtacagtggggcatctgtcaggaagtcatggctatgtgggttggcacgggtcaggtgaccagacctctgggggctgcagctgtacctacttcacacctatatgaaagtctccttgtatgtccttggagcagcctggagacccccactgctggctccgcatcctgggcactctgccagcagtgtggatgagcttgggcggacgtgttctagcaagtatgccccacttggtggtagggtaccgatgctcgaatatc

SEQ ID NO: 604318 - DNA, 871 bp, Homo sapiens
  misc_feature (871)..(871): n is a, c, g, or t
agcgtgatgtacgggttcgtcagctgcccagctgccctgtgccctctcgctgttgctggtctctggactccctcctcccagggccaggcgccgctcagaacgagccaaggattgtcaccagtgaagatggtcatatattctgagaacagcccctgtactcccatgtcaccctgcagtgtaacctcaccatacagactctcacacccttacatacagctactggactaaagaatgggagatggaactgagttgcacaattcgtaaggaatgccaggcaacgatgggagcttacaaggattcaattaaaggcctgaatcagccttgatgttgatttctagatgctgaaattaccaaccttgcggctactaatccagctcttgttcacaggcgcattacgtagacaggcaacaacagcacatccaagttgacaagttggaaacggccggcgtcacatgaacaattcacttgtgccaataaaaactggaagattcgaagcacacaataatcgaaatttgaccaggtgggccatgtggaatttgccatcaattaattggttatttcggcaaaatcttcccacggattggtgccgtaaccacccgaccaaacccccaagaaacctttgacaattactattggacggaccaatatgcaaactatataacgacaaaccagcgtcaattctccccccaaattgtactcccccatcatgatcaaacattacccattctatctacccagcatcatcatatcccaattccaaactcaaaactacagagacaccaaacttcaccaccactagaacttataacacccacattatgttagaaagacactattgctatagaattcacaacagcaacataaacccctn

SEQ ID NO: 604319 - DNA, 874 bp, Homo sapiens
aacactacagatcatatgactctggctcggtacagtgggtatcttgatcatcaccttacttggaactgtaacccgatcctcttccctatggaaatatgtccacagttgtctcacccagattcttccattttgcaacgtataaatcttgagctttggttgaatttattcaaagcaatcctttgtgtgtgcatcaacggtcttctcataatctggacctttagaacttacctttataatgcttctatttgccttccatgtttctacttgctcatattttgccctttatgttattcactctttctggccaactgctagtaatccttcaaagctcagtgaaactgtcaccttttcatacagtattccttactctcagccactcatatttaattgcttgggtatttgagcaatatataatgtgttgtcaaaagtgtatatttatgtacacgaaaagttaccactctaaaagaacttaataaactagtgaaaatttgttttgtaatatttagaaggttgctaatagcatgttttccaagtttaatgtgctgtgattaaatatttgtttctgttcctgtgaagggatttaccaattggaataagagagattttaaccagtttatcaaagctaatgagaagtggggtcgtgatgatattgaaaatttagcagagaagttgacggcaaattccagaaaagtcttggatattcagtgtgtttgggaacgtgcacgaggtccggagcttgagaaaatatggttcattgaaggggaagggaattcaaagaatattcgaagtgtacaaattgggggaaaactttctgggaatttggttcggaacattctggaaaattttttttccctttacaattttgggttcccag

SEQ ID NO: 604320 - DNA, 756 bp, Homo sapiens
tatttttagtagaggcggggtttcaccgtgttagccaggatggtctcgatctcctgacctcatgatccgcctgcctcggctcccaaagtgctggaattacaggcgtgagccaccaacccagcctccatctttaaacttttaaatgtgaaatttctatcatgtaccgttagcctaacaagattttctttcctatttctgactggtgcctttcccctttttaggagcaacgaaagctactctcttagttatgtctgtgtgatgtgaccacattgtcacgaagataggagaagagaatatttaattcgtttgatgctttgtgtcccaagtgtgaccctaaacttaagcttgtgtaggagtggacattctttcatgtcccttccctttatcatgccgaaatatcaatgggacatttggtgcttgttggttcaaaagtaatgtgatatatactggtggttttatctaaaagagtaaatggtattgtgccttggacaaaaagactgacacaagagcaaaataaagcttaaaaatcggggtgttatgtgctttcctcccattttttgaggcatatttatccaagatggtcttgtataatataacatgagactgatgcagttaaagtaaggcctggtttataccattgttcattggacccctgttataaaggcaatttctgtgttgtgtttggagaagaggatatggattatacagattacttgtaaattgggtggggatttgggtaatttttcaataagggtg

SEQ ID NO: 604321 - DNA, 440 bp, Homo sapiens
  misc_feature (21)..(21): n is a, c, g, or t
  misc_feature (37)..(38): n is a, c, g, or t
  misc_feature (44)..(44): n is a, c, g, or t
  misc_feature (260)..(260): n is a, c, g, or t
  misc_feature (268)..(268): n is a, c, g, or t
  misc_feature (288)..(288): n is a, c, g, or t
  misc_feature (380)..(380): n is a, c, g, or t
  misc_feature (400)..(400): n is a, c, g, or t
  misc_feature (418)..(418): n is a, c, g, or t
ccacggaactgatatatcagnatggagagaacaatgnntatgcntgcacaaatccagaaatactagaagaaaactagccgaaacttctttctaaatgtgtaatgtaactattgattactgacatccttccgtttaaatcctatgtgttgaaaatgcaatcttggcagcctgggacaaatgttcagtggatgcttcaagttgaaatctgctgcattggcatgaggtttggtgaaactgcaaacgtcacaggcctgtgctcnttcttgantgtcatcaacatgtcaggcnttcccagaggctcaatcagtgtcaaaccattttttcttgtccacgtcaaacacacccttttctgtaattgatgcggttgacacactgttttnccgtcagtggtagtgtacanttctccatgattttatgngcatttcccttcgcagaggtgc

SEQ ID NO: 604322 - DNA, 301 bp, Homo sapiens
cggcgagacgcagagcacgagagccgctcgagaggagcgcaagacgagcgctctaaaacgacagccgcggtccccacgcgccgagcgccgacatcatcctgaaacgctgcagcgagagcaccaagcggaagctgcgtctgccgtctgaggtaggagcgcagtccccagctagcgtctcgcccttgccgccccgtgcctgtatatacgtgttctataagagcctgcgtctggacgccgagggcagccccgacccctgtcccagcgcgtcccgccaccctcaataaatgttgcttggagtgga

SEQ ID NO: 604323 - DNA, 471 bp, Homo sapiens
aaaactgaggcacagagaagttaagtggctgaccaaggtgacacagctggtgaaggacacagccaggactctaaccagctccacatcacaaacgtgctgtaatgagctactggctgcccagccagccgactgaacaggttgtttataaaatggagcaaatactatcaatcccacttgcccttagaaatgcccagagaattaaccaagctcaaggacagtggggatggcacagaactgactgtacaggtgtaaagtgtgatgatttatgcaggaactagctatcaaagttacggaaacctagaattttatccattgttgggtatctcccagtagtgcatgattagccattcttggcgatgattctgtgagctgttagaagtttttgtgtgtctaagtagatctgtctgaaactattttcaggttgtatgaatctttgtctaggaacttgcttccctggcctacccaaaaaaa

SEQ ID NO: 604324 - DNA, 276 bp, Homo sapiens
attgttatcgactcactgctgtatatgatagattggagagtgcgagacgctacgttagtgcgagagattggatatgatggatggggcagtttttgtcatgtgagagagcaggcgatgtcaagggtggttttgatgtcaactgcatttattttacgtcgtagatatgggagtactgtgattgaggtgagtaataggcgtagtagagtaaggtaaggaggtatgtggcatatgtgggatagaggctatgttttgtgatctcgatatgccattggcaaa

SEQ ID NO: 604325 - DNA, 872 bp, Homo sapiens
ttaacagtccttcgtgaatagagcaggcacagaaatacaaaccttcattccttgaatcaaggagcactactggacttcaactgccaaaattttttaaacggtttataggacttactataccttgatactgtctaagatctactgaactaacaggacgttctctcactaacggaccaggtgctttctaacggttaacgtgctttacaagacagtactccacagacacaactctgccttctctttcatacatcttgtctttactgaacttctactccaatgctctgccttaacctgccttctgcctacagctgtatcagcccagaaactcctacgccgatatctataactttagcttcgtcgtcaacaacctaacacacttcacaacatggctgctacgtcactttctctgctcggcgccaaactgggtaacctaattattacccccaagcatcaaccagctacgcaacaatccggtccaccacggcagccactggttccacgccagcacactatcaatccacgggatcatcagcacccagcacctcggccaactggctggcctacggaaataccctctctaactccagcccaccctcccttctaaaccaaggcccccatacacgtctcactactccaggaacatggcccaaaaacaagcacacaacgtctccccacgcttcctatagctaccaagcgcacttaacacatgtccctcggcaacacgaacacagctccacccaatcacgaccctcgtaccacacattaaggccggaacgactctccactaccccccaccaacatctgtccacttcaagcgtcgggcaatcaaatctcacaaccatacccttcatacccccaactcaacttacacc

SEQ ID NO: 604326 - DNA, 656 bp, Homo sapiens
gagctgtgagtgcttctgctgcagtcagagccctgtgctgcctgccctgctcctgtgtgtgctgaattccatgtgctgtggtgtgacactgatgccagtgctgcctgccgcctgtgatgccatgctggatgcctgtgtggccagatgcctggatgctgctgtcctgctgtccacgcatgcctgcctggccggccagcacccatgtggccctgcattgccatgtgtctgtatggatgtgtgtgcagctgagacatgcaccctgtgccctgtgaatgctcctcagcctcctcttcctcatccttgatgggcactgaactcactcaagtgcttgcccaccaaccctgagtgagagctggcaggtgtacagctctgcccagtgacagcgagggcaggtgtatctgcacagtggtctgccccacatgcatgaccatgtgttcacgggatgcccgcacaaaacagctgagtgcagctactggagaaggtgcagaacatgtctcaatccatatgactgtctttgtgacagtgcggacccagagagacttgcatgtacgtgtgagcaagcatggatgaaccaaatgaaacggactggagtccaatgttcaacacaggtggacgtgagaggtcataagcaacacctggccaggcagttaaggcga

SEQ ID NO: 604327 - DNA, 990 bp, Homo sapiens
gggcgagatgagactgttcgtgagtgatggcgtcccgggttgcttgccggtggtggccggcgacgggagagctccggggtcagagcagagggtgctcatcagaactgtaggcccggaagattgtgtggtcccgttcctgacccggcctagaggtccctgtcttgcagctggatagacgtgcagactacctctgtctgccagcatagtgcaaatcgtgccggatattttttattgtcgtgatcttggctgggagcaaggatgactctcactaaccaggggcttggcacaatgggaaagtcgacagaggctgcagccagctatgtctgcgtgcccatggtacatatattaagtggtccaacggcgagagaacgggggacatgatgtctcttggtatcgagttgcggagagccctctggactcatcgatctgatcgcatcgaggcttgatgtgctgtgcttgaatcggtggctgtgtccatgtgctggagggatgaccaagaaattctctaagactcggagcaatgagtctctggtagggggaggccctttatagcgccatatacttgtagagatctcccgaactacctccctgaagggagctgagtgccctgatcacgtggttccaagacatctgagtacccagagaaaccattgtcaagcgaggctgcaggagactgtacttgaaacagaaggtgtcgctggctctccggcttaccatccaaaagcagccccagccagcccgctgagggaagggtgcagcaatgagcctgaggaaggaggagctggtaacctatctgaggaggagatgtgcgaatggggtgaagggcggggagaggggccaaaaaggttccccgtggggcccaggaaatcaagggtgcctggggtggggaaaggagggtcacacgaggggcaccgtaagtaaaagggccactggaacacaggggtggccgggccggctggggaccgcgaggaacctatttggtgaagtcgc

SEQ ID NO: 604328 - DNA, 388 bp, Homo sapiens
tcttctccgacaacaatctggaagatagatgttatcattccatcaaacctttgctggagtaggtataaaaacgataaaagctggggtcagaatttcaaccctggtctgtctgactctaaagtcacagtttttttcttttccatgtctctgacctctattatgggacttgcttgctatgctttatggcatttctcagcccacatgtctctttccccggttagatgtatggtcagaggctggttcttacttatatctacatcctggaggtcaagcccaggaatggtcttatataagggtctcaataactgtggttaattgaacaaacaagtgagtgaatgcatgagtgaatgaatgaatgaacaaactgaggattatgttatgcccctag

SEQ ID NO: 604329 - DNA, 270 bp, Homo sapiens
aaaaggcggcggttgcaggcaaaaagcctttgggaggtaaaaaaagaaaaaaggcttctgttggggttaaaaaacaaaaaaagcctttggggggaaaaaaggcagccggttcccaaaaacccgcccctgaaaaaaagcccgcaaaaaaaaaaccccctccaaaggaaaaaaagcctgctgcataaacttttaaatttggttattcccaaaagggccaatccttttgggcagccttttttgaaaaaaaacccggttataccggccggggga

SEQ ID NO: 604330 - DNA, 429 bp, Homo sapiens
  misc_feature (265)..(265): n is a, c, g, or t
ccaaggctgcttccatgggcattcaagtccaccgtcggggcctggctctgcacaccaggaaaagtctgcagaccccagcctccgcaataattcccagccaaagccactggtgtacagagaacacttaaaaaaatgtttttatgtgaaaaaaaattaaactctgatctgtatcagcagtttgtgtaaaatggcatcagagagtctaaaaatttaaactttttaaaaaaatttccagatctttgatatcgtatgaggtaacttccangtagccccttgccccggcccggtgggccttgggtccaaaactgtggtcaccacatcccaaagggggcacatgtccctggagttgcttccagctgccaaggcctgtgcaaattcgctgttaagagtttttaattaaatattaattccttttaatacaaaaaaaaa

SEQ ID NO: 604331 - DNA, 325 bp, Homo sapiens
accctgtgggtagcacataacggaagggtccccaggttggggagagccccaagttgagaacaataatgaacaattattgtatgaacaattgttagagacagctaatcacaaacaacctgcgggcacaatgacctcattccacacgtagcacccttcagcaggaccctataaaactttcctccagcccttgcctctttgcaggtagccccttctctgctgagcagcccactgcaacatattttcacaatttctctaataaatctgcccttctttacctacaactatcttggtaaatggctttaccacctgcaaaactgaccctagg

SEQ ID NO: 604332 - DNA, 364 bp, Homo sapiens
  misc_feature (3)..(5): n is a, c, g, or t
ttnnnttttctggagacagagtctcgctctgtcacccaggctggagtgcagtggcacgatcttggctcactgcaacctctgcttcctgggttcaagcgattcttctgcctcagcctccggagtagctgggactacaggcacccgccaccactcccggctgatttttgtatttttagtacagatggggtttcaccatgttggccaggctggtctcgaacccccgaccttgtgatccacctgcctcagtctcccaaattgttgggattacaggtatgagccaccgtgcccagcagtctctctttttaaacctgaagtcatggtgaataaattgccaaacccagggaatgactgccctcgtgccgaa

SEQ ID NO: 604333 - DNA, 153 bp, Homo sapiens
gcgctacccagatacctcaggaaaccgcctcgggagggaactggaaggtcacaaagggcatcaggaaaccggtgggtagcaggaggaccagattcaacaaatcatcaggtctgggggtggtggacaaacttggcacgtggacaggacataaac

SEQ ID NO: 604334 - DNA, 272 bp, Homo sapiens
tttgtttcgtgggccccgaggttcaaggacgcctcgggggcgagtcatttctggaggtcgggccttcgcccgctcaccccacgcccatctccagggcgaggcggacgaggtcggcggtgcgggcgacgccgagcttggccttgatggaggtgaagcagttggccacggtcttgtagccgatgcccaggctgtcggcgatttcggcgaggctccgaccctgggcgagcaggcggagcatttccaggtcccgcaagtcaaaagaaattagagct

SEQ ID NO: 604335 - DNA, 381 bp, Homo sapiens
cccatcactgctcatcaatgcttgcctcaacaagttgctgctctacagggtcgtagacaacgaggggaccctgcagctgaagagaagcttccccatcgagcagagtctcacatcctgtgcgcagcatcttctagtcccctgatgtccttccgctcaagggggcctgcgtggtgacgggcagtgaggacatgtgcgtgcacttctttgatgaggagacgggacgtgccaagtgcctgcttgtcaacatagctgcatgggccacagtgcacctgtgcttgatgtcagcttcaacctgagacgagagcctactcccctccagtgacgccagtcggcatggtcctccgtctggaggacgggagcagaagtagggtccctcggtat

SEQ ID NO: 604336 - DNA, 812 bp, Homo sapiens
gtgcttgagcagaatgtagttgcgggttgtggcaccatggcttcaataatatcactgtggttctaggaatatggccgccgtgtcctcatcgtgctggatcggatggaaagaccgcgcttctgaggcggaattaatgggcttcaagatgtaatgtaaatgaggacgtgacaatgggtgtcattgcacattgctaattgaagtcaactctaagggttgtgacgcacataggtgggctgggtattaaagatgagtgcggttggacttagggactgcggtatgtagactgtgaaataattgatgaaggccaactattgttaaggccatgatgcggatggtggagtcatcatgaatatgctgataaggcctgatctgggtggaaagttgagatccaatggtttcagggatgactgataattggacgatgagaacccaacaacgcgacggtggtatggtccttgagctgaggtgccctgtggttatagagagaaggcgggagcaaaattgttagaaccggagggctatttaaacccatattcaagaattaagactgattggctaattgaggacagtgctgggatcggggtgagctatgtgaacaaccctgaagcaagaatcaggacgataagacgttcccttggtgggacaataaaggggaaacccgaatgcccccatgattcaggaaagcacaaaaagcaaggctgtggagttccaaaaaggggctcccacacaagtttgtcacccgacagatgtggctggagacctgctggtcaatgaccgtcccccactgggagccaaaaatggaggcggaaacc

SEQ ID NO: 604337 - DNA, 233 bp, Homo sapiens
atcagtactcgtccgtcactgttcctaggacttctaacagccctatatctcaaatactctaatctagcatacttagaataaaattcccactatgcacattttatttctccaacatactcggattctaccctagcatcacacaccgcacaatcccctatctatgccttcttacgagccataacctgccgctactcctcctagtacctgtttgggctgatttgccttgttgtaaa

SEQ ID NO: 604338 - DNA, 222 bp, Homo sapiens
tctgtacactgctgccactgttgtgtcctcggtcttctgctggtggctcacgcaaggccccccccgcgcgtggacaacctcatatcttacccttggggaccccaagggcaaggttgggtcaaactgtttggggggacagaggttgggctctcatatgggaacacacttgtgctcaagagttaccatattctcacaaccagagtggagaggggaacacaccca

SEQ ID NO: 604339 - DNA, 220 bp, Homo sapiens
accaggtgagttatgagccatcatggagatgcccttcttctacagcaatggcttgctacggcgttcaccctacaagaaactgacagagggccaactgatgaacctcattagcgggctgttacatatgcccagatcgctcgcaaaacctgtgagtccaacatggtagagcatagcgcaccaccccatgtacctcgcaatctgtaccccgctggcatcaatg

SEQ ID NO: 604340 - DNA, 126 bp, Homo sapiens
gattaaggatccccgggtgcatgatgtgtctgtgcactaaggcagccattcgttcattgtatcgtaccatgttatccgggtttctggaacacgctgcagagataaccagtggtacggagctcgaat

SEQ ID NO: 604341 - DNA, 497 bp, Homo sapiens
  misc_feature (17)..(17): n is a, c, g, or t
  misc_feature (267)..(267): n is a, c, g, or t
gagactcggtctcaaanaaagaaaaaaaagaaaaagatttttgtcaaatttggacctgatttggaaaaaaaaaacaaaaaaaacttacggctttgactctgtgaccagtgctcttgaggtgacctaacaggttggatttaaaataaaagtagctaattgattagaggtgatatgtaatatatgcaaataaccatggttgaattgtgttccccgaaagatatttattgagtatttgtgcacaccactttacatttattatctcattcngttttcctaaacaaccctgcaggttattaccaggtacttctctgctcccactttacacgtgaggaaattggagcaaggttgttaacttggaaaaggccacaaaggtagaacattgcactgcctgaatttgaactcaggggctctaatattagagcccattctctcaaaagtttagatgtgctacttactacttgatgaaatgtatggtatttttattagtgagtgcatac

SEQ ID NO: 604342 - DNA, 180 bp, Homo sapiens
cctgcggcatatggatgttcccaggctaggggtccaatcggagctgtagctgcgagcctacaccagaaccacagcaacgcagaatccgagccacatctgcaacctacaccacagctcacggcaatgctggatccttaacccactgagcaaggccagcgatcaaacccacaacctcatggt

SEQ ID NO: 604343 - DNA, 1791 bp, Homo sapiens
  misc_feature (397)..(397): n is a, c, g, or t
agagagtaacagagaaacatacaaccgatcctcaacaatgtctagatcgtagacatagcatgtacccttcatgacaccatacttctccacgcagacatcctagccttacgcgatatttccctctcatcgctacgtgcatgcctctcctgcgctccaacgtcgaactgttacacaaccgtcgcctgcacgagttgtcattgcgcaacgcatcgcgtccgaaacgtgctgcagggtaacttgcttccccgaggctcatgggacttcgcaacccatcccggggctgttcccgtcgctcgcaccgaggactgtcctccgagccctcgcatgtcttccattagtactcgaaccaactatgcagacacgtgggacattgttccgtcgtggctctagtgactangtcggtgtcctgccatggtgctggtaatcgcgataatgcgtacacttgatatggcgtgttgtcgccaaaagtccttcgcctgcgctatcgtggcgtcgcatatacgatcgcggctaagttctctatgctcgaggactaacaccaggcgacacgcgagcctcgtggcacgtaaatgtagtggccgagcaaatgacgaagcatacacgacctgtaggcacctaggcagtacgtacgcagggagccaagcaggccaacggagggaccgccgaaagacccgggtggacttccggggagcaggcaggcacagcagaggacataagcgaacccattggatgaccgacggaggacctacgtgggatgtcagctgaatactaacccgatccctaaattgggcaaaaagattgttttgttcagttcgaacagcaggacgtggcaaccaggattacccggaaatttacaagggaggtaatccccggttgtacaactgtggttgtgcgggttaaaatcggggatagggtattagttggggagttccgatacagcggatgaaagggcgacgattttgtttgggattggacacaaaaaaaggaaacgtgatattcagattggatattcgaataacaagaaaggacttggagtagggtggggttgaaggaatatagagaagggggatataaactccgagaggaaggaataaaatggtttcttgtgtgcttgctttgaagaggccgtaggttatgtgtaaaagaagcttgtttggggccaattggacacaatagttgtttgttggaaacaggtgcggacaataacgatcgcgggtgggggtatggacacatatatgggggcacgctgctttacaatttttgttcgaaaaagagaagaggcgcacttaatgtaaatggtggcaccagaaaattgcgggggggcgagagatggttgccacttgtcctcttctgtggaaataaaaggcgcaaaacaccgcggaattcatagaagacagttttttaggtaaaataggcccagtttgtgtaatagaagaccccagatggtggggtttttttttatggtacccccggaaaagaatagaatacgtataaaaacacgcttgtttgttattatcaacggggaaaaacaatttggtagggaagggagcaactacctcctacaaacaaatatggttcacggagggagggacgacatatatcaaaagaaccacctgtttttttgacgacaagaagcagggagggatttcattatatgaggtcaaaaacacctatcgtgtcgtgacgtgaattgatacaaaaaaaagaaagcaggacaggtgttttcatctaaacacaaaaaaacgaggggagggatcatgttataatagtggaggaaacgcaaacgcaata

SEQ ID NO: 604344 - DNA, 789 bp, Homo sapiens
gactagttctagatcgcgggcggccgctcgcgatctagaactagcgacccacgcgtcgcacgaggtcaggagatcaagaccatcctggccaacatggtgaaaccccttctctagtaaaatgcaaaaaattagctgggcgtggtggtgtgtgcctgtagttccagctactcaggaggctgaggcaggagaatcacttgaacccgggaggtggaggttgcagtgagccgagaccgtgccactgcactccagcctggtaacagagcaagactccgtctcaaaaataataaataaacatacgtgtgcatgtgtctttacagtagaatgatttataatcctttgggtatatacccagtaatgggatggctgggtcaaatgttatttctagttctagatccttgaggaatcgccacactgtcttccacaatggttgaactaatttgcactcccaccaacagtgtaaaactattcctatttctctacatcctctccagcatctgttgtttcctgactttttaatgatcaccattctaactggtgtgaggtgatatcccattgtggttttgatttgcatttctctaatgatcagtgacgatgagtttttttcatgtttgttggctgcataaaatgtcttgagaaagtgtctgttcatatcctttgcacactttctgatgggggttgttggtcttgtaaatttactttaagtccttgtaaattctggatattagcccttttgtgcggatggatcagattgccgaaaattttcttcccattctgaaaaaacaaaaacaa

SEQ ID NO: 604345 - DNA, 551 bp, Homo sapiens
  misc_feature (180)..(180): n is a, c, g, or t
  misc_feature (197)..(197): n is a, c, g, or t
  misc_feature (204)..(204): n is a, c, g, or t
  misc_feature (342)..(342): n is a, c, g, or t
  misc_feature (345)..(345): n is a, c, g, or t
  misc_feature (448)..(448): n is a, c, g, or t
  misc_feature (484)..(484): n is a, c, g, or t
  misc_feature (536)..(536): n is a, c, g, or t
  misc_feature (543)..(543): n is a, c, g, or t
gtgtgcagcagcggcggcggcggtagaggcggcggcggcggcggcagcgggctcggaggcagcggttgggctcgcggcgagcggacggggtcgagtcagtgcgttcgcgcgagttggaatcgaagcctcttaaaatggcagatgacttgaacttcgagacaagaaatacaagggcctcanccaccttcccaatgcantgctcancattacgtaagaatggctttatagtgctcaaaaagccaccatataaaatcatcaagatatctacttcgaagactaacaaacaccaccacaccaaagtccatctaattaatattaacatctttactgagaagaaatatnaanatatctacccgtcaactcataattataatatccccaacatcaaaaagaataacttccagctgattaccatccaagataagtacctatcactactccagaacancagagaaatacgaaaaaaccttcatctcccttaaanaaacctttgcaaagagattaagcggaaatacgactgtagagaaaagatcctnatcacantgctctct

SEQ ID NO: 604346 - DNA, 130 bp, Homo sapiens
attcggcacaggggctggcttggcgagagggcaggtttgcgggctttcgccccgttttccaaagaccaacaaagagtccgttcccaactcccaactcaaccccttttggaactatgtgtggtggttggga

SEQ ID NO: 604347 - DNA, 132 bp, Homo sapiens
ctctcgtccgagttgtcttcctccaagtagcggtaaccgcgcactttgtgctgggaccgcgagatgcggggctggcgcggggccacgccccggcgcagttctgctccatccgcaggtaggagaccgcggccg

SEQ ID NO: 604348 - DNA, 1046 bp, Homo sapiens
  misc_feature (260)..(260): n is a, c, g, or t
  misc_feature (326)..(326): n is a, c, g, or t
  misc_feature (373)..(373): n is a, c, g, or t
  misc_feature (387)..(387): n is a, c, g, or t
  misc_feature (390)..(390): n is a, c, g, or t
  misc_feature (545)..(545): n is a, c, g, or t
  misc_feature (584)..(584): n is a, c, g, or t
  misc_feature (607)..(607): n is a, c, g, or t
  misc_feature (628)..(628): n is a, c, g, or t
  misc_feature (659)..(659): n is a, c, g, or t
  misc_feature (671)..(671): n is a, c, g, or t
  misc_feature (687)..(687): n is a, c, g, or t
  misc_feature (698)..(699): n is a, c, g, or t
  misc_feature (708)..(708): n is a, c, g, or t
  misc_feature (720)..(720): n is a, c, g, or t
  misc_feature (723)..(723): n is a, c, g, or t
  misc_feature (728)..(728): n is a, c, g, or t
  misc_feature (745)..(745): n is a, c, g, or t
ggcagacccctgggctttcctgctggccacggagactctgctcctgcatggaaagggagcctgggagccagcagcccacgcctggggagcctgcctggggccatgtgaccatggcctctccctgggaacgggctgaccacaacacaccctgctgccatccacttctgtttactctgcaaatgtaagaaagaaccacttggccagaagtgtcccccagatgctttttttttttttttttgggaaacggtttggctcttgtntccccggttggagtgcaggggatgatctcaactctcaactcactgtaacctccgcctccgggatantccggcctcagcctccggggtagcggggattacaagcacccaaccangcccagctaatttnggnatttcggtagagacgggatttcaccatgtgggccaggctagtctcgaactcatgacctcaagtgatccgcccattcggtctcccaaagtgcggggattacaggcatgagccagggcgccgggcccccaaaggctcttgaaccggaaacccaggangggagatgctcactgagctgctgcttaatgtgtgcgggngcaatgtgtgtcatgtccgcggnagctgtctttggccactatangggaattcgggccacccggggtggggtgtgnccggggtgagancccaagctgttgcganctgtagacccnncctgtcgantgtgtgccccgnggnatgtntgagcctcagttcctcnttgtaggggggcaatgatactcactccacgggtgtggggagtttcactgtggggcgttcttcgcacaacacgcacacccataccaagaaaaacaagagggcgccgctaaatatccggggcacaattgcgaaccttttgtaacgggcacaaagagatcttaaaaacagcgccgcgcaacatcgcggggacagcacggctgggaaccctcctggtgtcgggcacaccaacgccggaaaagtcttggcccttggcgttctgtgatacgtcgtatcccctgtgcgccccagctagcctccataca

SEQ ID NO: 604349 - DNA, 253 bp, Homo sapiens
gcaacgaacgagaaaaacttaactagatagcaagtgatcagaaagtaagcttccagattttcccatctagtctaattttcactccatttctctgctcaggaattttagttcaatgactaagatgtgggaggaaaataatgacactcatcttcttatctttcagaatttacattagagagaaaataaattctgaaccctatccctagaatcaggcaaaaccgtggtatgacttaaaagcaggacctcagaaatg

SEQ ID NO: 604350 - DNA, 722 bp, Homo sapiens
gttcctatactggggcacacacctgggcctccctaatggaggaacaagttttctttcgattgttgtgcttttttttgctcttttgttttcttttttggtaagactgcactgactatgtcgtgtgactgagcagacactggagaacacgatgctcccctggctccctctactgtcttaacacatcatcggctcttctctagtcttctgtgtgaactggtgtaatgtgcacagtaatagcacaatcactacaagtccaaactatagcacaaaggccaattctaacgtcattggggaaatcggcggtgaaccttgcacgtggatgaggagatcagacactagagtgataggaagcgtactggcagatactccttgttgccactgctgtgtgattagacaggcccagtgagcccgcggggcacagtagctggccgctcctccctcagaaaaaggcagtggcctaaatccgtatgtagtaaatgacgttaggctatgatgctgtgggggactggctgggctgctgcagaccgtgtgtctgtcagcccaaccttcacatctgtcacgttctccatacgggggagagacgcagtccgcccaggtccccgctgtctttggaggcagctagctcccgcagggctgaagtctggcgtaagatgatggatttgattcgccctcctccctgtcatagagctgcagggtggataataccagagcgctggaacctt

SEQ ID NO: 604351 - DNA, 271 bp, Homo sapiens
tgacctccacgagctgagtactaccagattgcctaagaaggggtgaaccacgcccaggtcggacagatgatgagtgactcacacttgtaatcccagcatttagggaggccctggcgggcggatcgcttgaggccgggagttcgagaccagcctggccaacaaggcaaaaccccaactatattaaaatacaaacattaactgggcatggtggcgggcatccgtaatctcagctactcaggaggctgtggcacaagaactgcttgaacccggg

SEQ ID NO: 604352 - DNA, 230 bp, Homo sapiens
cccccggcccgggttttttcccccttttttaaaaccaaaggggggggggttttttttggggggggcttggggggccccctaaagtcccccccggttttcgggggggggcccctcccttttttccccccccgggggtttgggggccaaaactttgggtggggtggggggggggggtttttctttgtttttttttttttttttcaggtaattaaaggtgcccccccttccca

SEQ ID NO: 604353 - DNA, 141 bp, Homo sapiens
atgtaatgatttctcgacagtattcacagctctttctagactctgtatctttggatggatatcttagggaagtaatttcagcaagtgacaattttaagaagctggagggttttttcgtttagttttagtttggtttggttt

SEQ ID NO: 604354 - DNA, 856 bp, Homo sapiens
gttcgcagtggtatgggctctgacgcccacggaccgcgtttccctatggttcccccgggcctgccgtttttggtgggccccatctgtgtacacatagtctcctccgtccggcattgccggttcccctcccggtgaatataaccgttccggaggccaagttccgggtttgcccgaaactttcttttccggcgggagggttaccttttaaggcttgtaagcgggggtccatccatggcggattgggccccgccccccacacccggttgggcccggcggaccacttcgcccgggcatggaaagggaaccccccctcgctcggcaagaagctttttgcccgtaggaatgccccccctctctcaaggaaaaacaactcctctggggggccccggaataactcgaaatgtttcaaaaagaactttagagaatcttttctccaacccaagactttagacagtctttccgaacagcatgtgtcgcccccaccctgggagaaaaaatctgaacacaaaacagtgactcatttcaatctcccacaacaaattggtccgcccgcgcccattgagccctctcgcaaccacgccaaatttcctatggtctgcttcacataagacgtacagattttcttttctggagccctcgaaaagctcccctcactcagggccccaataaaacgtggaaaaataattggaacccacaaaacgtgcgtccccaatataccgaccccctgaatacattgaatactagtcaacgtacccctgagatatttcctgcaaaaatctaaatcaacactggtgatttacatctgaacaaattttatttttaagaaaaaataacccggtcttaaaccccgacaaac

SEQ ID NO: 604355 - DNA, 142 bp, Homo sapiens
ctgcttcagcttcccaaagtgttggggttacaggtgtgagtcaccacactcagcctactcttgcattcatcaaatatttgagtgctgcatgaatcccagatgcagatgttcttttgttttttctggtccacatttggactaa

SEQ ID NO: 604356 - DNA, 687 bp, Homo sapiens
  misc_feature (403)..(403): n is a, c, g, or t
  misc_feature (423)..(423): n is a, c, g, or t
  misc_feature (456)..(456): n is a, c, g, or t
  misc_feature (461)..(461): n is a, c, g, or t
  misc_feature (466)..(466): n is a, c, g, or t
  misc_feature (474)..(474): n is a, c, g, or t
  misc_feature (476)..(476): n is a, c, g, or t
  misc_feature (478)..(478): n is a, c, g, or t
  misc_feature (492)..(492): n is a, c, g, or t
gggctctcagctctcggcgcagggcccagtcttccttcataatgtctactgttcaggaaatcctgtgcgaagctcaggtatggacgggtgatcactctacacccccaagtgcatactgggtcgtgtcaaagcgtatactaactttgatgctgagcgggactgctttgaacattgaatacagccatcaagaccaaaggtgtggatgaggtcaccatctgtcgaacattttgaccaactcgcaggcaatgcacagagcacacggactattgccattcgcacgtaccagagaacggaccaaaacaggaacgttgcatcagacactgaacgtcaagccttcatctggccacctggagacggtgacttattgggcctattgaagacacctgctcagtatgacgcttcngagctaaaagcttccatganggggctgggaaccgacgaggactctctcattgngatcntctgntccagaancnancaggagctgcaggnaaattcaacacgagtctacaaggcaacatgtacaagactgatctggagaagggacattaatttcgggacacattctgggtgactttccgcaaagctgatgtgttgccctggtgcaaaggggtagaaagagcaagaaggattggctctggtcatttgaatattgaacttgatttgacccaagaatgctcgggggat

SEQ ID NO: 604357 - DNA, 418 bp, Homo sapiens
gaatggacagacatcgtgtcatggatgaccattattctccagatagagacagggattgtgaagcagcagatagacagccatatcacagatccagatcaacagaacaacggcctctccttgagcggaccaccacccgctccagatccactgaacgtcctgatacaaacctcatgaggtcgatgccttcattaatgactggaagatctgcccctccttcacctgccttatcgaggtctcatcctcgtactgggtctgtccagacaagcccatcaagtactccagtcgcaggacgaaggggccgacagcttccacagcttccaccaaagggaacgttggatagaaacaatggagtcaaggagatagaaccttatgaagaagcaggaggtaaaaaattaaggagcactgttccaaaggaagt

SEQ ID NO: 604358 - DNA, 256 bp, Homo sapiens
tgttaatgcaatcgataatgccgacattgttgttgctttacttgacgcaaaagatcaagatactggtacaatttgggaaatggtatatgcttacgctactcataaacctgtggttgtattaacagttggtgatacgtttgagtataccattaatctgatgccggctcaaggagcaattcatcatctcggaaacaatactctagcaacaattgatttttatggaaataacaaacgtttctatgttggaaaacaatct

SEQ ID NO: 604359 - DNA, 221 bp, Homo sapiens
tgggattctattgtacttggggtgaatcgtgatagacgcgggtggctggtaagaaagtgagcaagcctgggagtgaggtatagcttagttaaagctttcgtttattgctaaaggttaatcactgatgtatcccgtgggggtgtggctaggctgagcgttttgagctgcattgctgcgtgcttgatgcttgtcccttttgatcgtggtgatttacgagggtg

SEQ ID NO: 604360 - DNA, 805 bp, Homo sapiens
gcgtgctttctgctcttctgggcaatttctcacactggcaaagcagtccagcctccgtcttctggctccactctgctctgagcagcctgggcatgctgcaactcttcagagcagattttatttactacgagcagatttctataacttctgatacaacggtcatgactatcctacgaactctctgtggttttccgaaaatcattgaacttctattaactgctcggtaccctaacagatgacccctctaacctgacactgatgcgactgaccgcctgtgcggcctggctgctgcgagtctctcctggccccgcctctcttccacaccgcttgctaccccaccataatgctgcgccaccctccacacgagtcccaattccccaccaccttgccatttggcccaccgcacgccccattctgcttgaggcttacccacaattaaccttcataccccttaacgcggccccaacctatctccctagagcgcggcccttcagccgccgtagggcgcacctcgacacacctcgacccatcgaatccccctctggccatggcccactatgccacaccacaccatcaccattaaagttgccctaccaccaatttcggcggcaacaaacggccctccaacaaattccccggcagcaatcactggcctcagccacctatgcacccattcggcgatcggtccacagacaccgggagccttcaccttcagattagaccacgacctcgtaatccccttttaaaacgacgttgatcccacccaccacgcctcacacacaccagccacgcaacacacgcaaat

SEQ ID NO: 604361 - DNA, 128 bp, Homo sapiens
agacaaacgttagaagttatgcgtctcctacccctatgcccgccaaactgattaggagcagaagataaaagtaggactacctcatatataaaggagcagaactgggagtaactacctgatctctggga

SEQ ID NO: 604362 - DNA, 427 bp, Homo sapiens
ccccaggtccacctgctgccgccgccatcggaggagctggccctcaacgcgctggtgacgctgacctgcctggtgcggggcttcagccccaaggacgtgctggtgtactggacgaacaaaggcgaggaggtccccaaagacagcttcctggtgtggaagcccctgcctgagcccggccaggaacccacaacctacgccgtcaccagcctgctgcgcgtgccggccgaggactggaaccagaatgaaagctacacctgcgtggtgggccatgagggcctggccgagcacttcacccagaagaccatcgaccgcctggcgggtaaacccacccacgtcaacgtgtctgtggtcgtggcagacgtggaaggcgtgtgctactgagccccgtggccctgccctgaataaactccgtctcgcccccagcaaa

SEQ ID NO: 604363 - DNA, 638 bp, Homo sapiens
  misc_feature (615)..(615): n is a, c, g, or t
cgagccacaatgcaatcacaagtattaacagcagaaaaaaaaatctgaggaacgaatctcagaacttgaagattggttctctaaaataagatggacaaaaataaaaaagaatgaacaaaaccttcaaggaggatgggattatataaagaggccaattctacaaatcactggcatctctgaaagggaggtggagaaatcaaacaacttggaaaacgtagttcaggatatcatctttgaaagcttccctaaccttgctagaaaggccaacagtcaaattcaggagatacaaagaactcctacaagattctacacaagaccatcctcaagacacataaacatcaggttttccaaggtcgaaatgagggaaaatatgttaaaggcagccagagagaaagggcaggccatctacaaagggaaccccattaggctaacagcagatctctcagctgaaatcctacaagccagaagggattgggggactatatttaacattattaaagaaaatcttcaaccaagaattcatatacagctaaactaagctttctaaatgaaagagaaatgagatcatttacagacaagcaaatttctgaggtattcatttaccaccacatctgncttacaagagtatttagaaaggg

SEQ ID NO: 604364 - DNA, 120 bp, Homo sapiens
acagaatgatacgattgcatgatgggctagaatgtacacgtactccttgcctgaataagccatatatatgctcttaaacaaaagtttgaaattatccatctcatcccagctgaaatccca

SEQ ID NO: 604365 - DNA, 219 bp, Homo sapiens
cagcattccagcacagaacatcatatttatatcttcttcgaaaccacacttatccccacctatgctatcatcaacccggattgaaggcaaccagccagaacgcctgaacgcaggcacatacttcctattctacaccctagtaggctcccttcccctactcatcgcactaatttacactcacaacaccctaggctcactaaacattctactactcactct

SEQ ID NO: 604366 - DNA, 717 bp, Homo sapiens
gagagcgaccaaacgtcccgcgcttccaggcgcactccagagccaaaagagctccatggcggcgagggccaaagccacaacaacctttccctggtgttgcacggaccgggggacttgcgctggagaacttatcctatccctgaaccaggcccaaatgaggtctgtgcttgaggatgcattctgtgtggaatctgtggctcagatgtccactactgggagtatgggtcgaatgcgggaatttcatggtgaaaaagcccatggtgctgggcacatgaagcttcggggaacagttcgaacacagtgggactcattcggtaaagcacctaaaaccagggtgatcgtgttgccatcgagcctgtgtgctccccgagaaaacatggctgaattctggcaaggatgggccgatacaattctgtcaccttccatcttcttctgtgccaggccccccgatgaaggggaaacctctgccggttctataagacacaattgcagcctttgtgttacaagcttcctgacaaatgtcactcttgtgaggaaagggcgccctgatcgaggccactttctgtggggggatcccattgcctgcagaaagagggcggagttaaccctgggcacaccaaggtccttgttgtgtgggagcctgggccaaatccgggaatggtccatttgggctcgggtggccaaaggcaatgagaacaactccaaagtagtgggtgc

SEQ ID NO: 604367 - DNA, 548 bp, Homo sapiens
ctacagtcatgtatctctccactcttaacagcacgacagttgtcagcacagaagacttctgtgactgaatgtggggaatttctccccgcacaccaagcagtggacaccagctgggtgtcctttcagttctgacgccatctacctagagatagagtcagatcccacaggttgagggctcagtccccaagactgccccagtccccaccatgcatgagcctgggcctcctaaacttcagactgactggcttcaagttggggttcccacagccccctccttggattcaattaatgtgctggagcggctcccagaacttggggaagcacatttaccagtttattataaagcagcggtctgcagccttttcggcaccggggactggtttcatggaagacagtttttttcatagggggatggcttcgggatgaaactgttcccactcagatcatcaggcattagagtctcaggaggagcgtgcagcctccatccctcgcgtgtgccgttcacagtggggttcatgcttctgtgagaatcgtatgctgccgctgat

SEQ ID NO: 604368 - DNA, 156 bp, Homo sapiens
tagatctaacgcacttagctgatactgcacttaccagtattctcaatccttccagagctcagctgagactccagggttaccagaagaccagtcttacagctccttctctgtcagtgggacgtcatcagcaagcacgttggtgggtacgagctcgat

SEQ ID NO: 604369 - DNA, 355 bp, Homo sapiens
cggcggctggggaaggtggcgaaagagcgggtccacgcaacttggctgagacggaagcgaaggcgctggagccccccggagcggagccgggcgcggcttggcgcggcgctgcggcgggcgctgcggcggggccccgcgctcgcacctgagcgcctcgccctcactgcctcgcgccaggaagggccgccggcggcggagacgggcaggtcgtcctcgccgcgggccggcgggcagtggcgcggagcaagcttggtgcccgggagagccggccgcgcgggcccgctcacaggcggcgccgagccctcggccgcgggccctgcagtcctcccggcgcgtcacacggcaaagttgtctc

SEQ ID NO: 604370 - DNA, 859 bp, Homo sapiens
gcccaagtccagcagaggattgattacgccaacctgaccggaatctctgtcagcagcctgagcgacagtcttttgtgcttcatgtacagcgtgcggacaataagcaaaagggagatgtggtgctgcagaggtgaccacgtgattgatgacgctgaccaagacagccctcagtgccgaaaccgcgtgaacagcatcaacatcaaccagggcagcatcacgtttgcagtgggccccggccagggattggcaccacttgacttcacacccggctcggagtctgctcatcaccaaggccaagaacgggcaccttgctgtgggtcgccccacggctgaattctcggtgataaaggcgcccacatggacccttcccaacgcccaaatgcttttgcttttctcctcctccccttgcccagttaccaaagactcgaacttccagagagggacccagggacaccccgaagcccactcgcgaatctcccagctcctggccatccctctcttgagggagcacgcaggggccaggagctaccccaggagtgggccaggcgggcaccagtcaatacggaaagccaggccagagcgagccattgccaagcgctactgccgatgcccaactatatgagaagaacgggaactcttcgactgaggtctctctcctgaggctttgctgtgatggctttatagggacactaatttttaaagacaaggcattttcccagcccaaggtcacctgtgattgtgttttcccctgattcccgcggggcagggatgttgcccgagacagttgtgtggcggggcttgatgcccttcctggccggaacctctctctgtccctgtgctggtcctggtgtccctctcg

SEQ ID NO: 604371 - DNA, 109 bp, Homo sapiens
tctgagcatgtacactgaacagcaggctgttagcatgtactgtggctgtgcattaagatgttgctgagagattgcgaactcctgcagcatatttatactgcttccggat

SEQ ID NO: 604372 - DNA, 912 bp, Homo sapiens
  misc_feature (210)..(210): n is a, c, g, or t
ctgagcaccgctgcacctgctgtcatggtgggcctgcctcgtggccgccgtgtgggcctggggctgctgctgcctgctgcctgctgctgttgcttgctgcctgccgcagccctgccctggctgttggaccccgtggctgcagccctgtgcaacttttcttgctgacgcaggcctgtgggctgcagctcttctgctgcagagctacaactnccagctgcctgaacgaggtgctgttccagatgcgtggcctgccagctgggctgcacgacaccaacatcaccgctggagaatgcaatggctgccaggaggaagcagccctgctcagccagtgagtttgcggatggcctgggtgccataatggccaatggagctgtattgaacctgatcttggcagaacttcactggaccctgcagctgcgcagtgatcatcggagctgtgcgcaccctgggctctgccaacctgcccctggctaagcggcatgcatgtacaactgccctgctaagcaacatgagcaggatctactccacctggccaaggtctgcctccccaacaatgactgccacctgctggtccctggacccagatctcaccaacatcctggcttcctctgcgaagcatacgccatgctcctgtttgcctgggagggctgtgaccaacccgcttgcgtggcattccctgctgaaaccgctgtacggaggatctcactgccctcagcaattgaatgcctacaaagcagggacgggttcacaggacacagggggcctactggcgctcctggtacaaattccccaccttcgaggaacgatctggaacaactctaccaaagatagagccctctactgaacttcatgcctttcgtcgccgcgcaatgcatcgcgatacggagacgataacatcacctcatgggacca

SEQ ID NO: 604373 - DNA, 986 bp, Homo sapiens
gcgattcttctgtgaaggtactgcgtggtatgtgtgtatgtgtgtatgtgttgtgcgtgtgctctgtgccgagccctggtgtcccccgacatctgcgcccctgtccttcgcgtgcggttcccagtacggcaccctctctgagctggtctgtgctgcaccggcacgccctctggatggggggtcggggcctgtggtcgcgcctacagggctctccagtcacgcccactgagcgtagatcgcctactcgctggcctattcatggttcactgatggcgcgcacgcgtgtggtcggtgggacagtcctggatggttcgacatcagcgtccatgcttggctcagggcctgtggcagggtcctgtgtagagtcctagccccatagccccagccctcatgtcttgccgccttcctccatgtgtttgtacaactaactctggcaattccttttgtgaccctgagaaaggttattataaactgtggttatttatgcttcttctaagacatgagcgacttgcgtactatacaacagtaaacccgacaaagtttacgacaaaatcggaaccctttacaacggtagtatcaaagtaacgcgctgggcgtctctccctgttcgcgtgcggcgcaacaaaggggggaaagtcaaatgagggacgttggcccctccgtgtacacgaagccgagtggtccttggggaactagggggcagacaaggggacgcgggcctccctccagcgtgaccacaagaagaagcacatgaacgcgaggtaagacagcccagatgatagcgcccaaaaaacaagattataaaacttccctcacctggccatctcctgaagtacaacgtgacaccactggggtcaaagaagccaaggaagtaagcccaagtccactgggtgtatcccaagaactggcaacaatggtgtgtaactgctaataaaatcgttaagggcgaaatcacagcgaaaacccaggaaacgaccaacacaaac

SEQ ID NO: 604374 - DNA, 344 bp, Homo sapiens
tgtcgtcagaagtggtgtgagattactggcgtgagcattacgcctgctggccctctttgccttctcttacactacttcttcacctggaattccctttcctacctcattgccacattataacatttctctctttcattggcctagctccaagctgtctgtaagctgtctacttaataccgtaactggaacagatctttgcctctgaacttccctagactgttattgacgtccctgacttgaattttaattatgggggtacatttgttatctcctctgctgatctgtacatttttttaaatcaggaggtatttagttgaaaacaagaactaaattatcttctttcg

SEQ ID NO: 604375 - DNA, 145 bp, Homo sapiens
acagcgatgactttctgcaggtaccctcgcgctgttttgggtacccagcaattcattgccttgtttcttccccagggctggttcaggaacctgagccgacctgcgccagttgggctgtacccattggatcggtgcgttggcccca

SEQ ID NO: 604376 - DNA, 569 bp, Homo sapiens
gtcacgtgatcattgctgtttcttttttaactttttacttgtggtttattgtttcacggtacaccaggttgtccaagtccctgctgtactctttttgtgtaacgcacatgtgtctgggctgtggtctcgaagctcagttcctatgctccctcgttcgcctagtagctcaggatggtcgtctcgtctggttatagaggtgttgttccccgacctgaggtctgtcaggcggctcccctctcgccatccaatagggttcacctgcacacattgaatgtacaacgccactcaccactgtcgggtaaggcctccgtcgtcggcgcgctgcactcttgctgctgtcctgtccccgagcaccctgcaggtccgcctcctccgccgcctccgcactcaagagttagagcaggtcggctgcaggccttgggcccggagggtaaggccactgccggccacttggggcagacacagacacctcaaggatctgtgcacggaaggcgtcctttttccttgtagctacgttaggcctgcgtagctcccctcatctgtaacgctccaacctactaggtgtgcga

SEQ ID NO: 604377 - DNA, 164 bp, Homo sapiens
cctaggggatccttattacaatgcagaagcttctaataaagatttagagatggcacgacccatctgggagcaagtttgatgtcttaccagtttgatactcggtgctgagcaaagtggcacgtgtctatgttttgtcacatgtatttttaataaggatcccctag

SEQ ID NO: 604378 - DNA, 190 bp, Homo sapiens
aaggaaggggaagcccccctagttttcagtgtttgggactcttatgcaaaatcgaggcagttaactcttccaagaacaaaagcggcatgttgaaaaaaatttgggggattgggatgggggtatgtgtggatttttcctcccctaaatttgcaggaaacatgttgaacataaattcaaaaattttatccca

SEQ ID NO: 604379 - DNA, 156 bp, Homo sapiens
agctgggggcaaccgagaacggcctcaattcaagggaaagtccaggatggcaagctgcaaggcagcagtttagcagccaaagcccaggcctagtgatagacatggtccaacatgtgacccttctaggcgcatatcaccatggggcgtcatggctag

SEQ ID NO: 604380 - DNA, 101 bp, Homo sapiens
  misc_feature (27)..(27): n is a, c, g, or t
aatgtcaccgtcttgcctggaacttgngaacggcgcaacacggtggccttctcaaagacgtcccgggctcggagtcagtgtagaccagctccccgcccttg

SEQ ID NO: 604381 - DNA, 879 bp, Homo sapiens
tgtggtctataaggaggcatagttctggagcagatacagacaactgaagggatggtgttctgacaagaactgttccaggatacacttcattgtttcgtaaaatttaatgttgtgggctgggaccactgcagacacagacaaggacaaacccagcgtcatttctttccaacctggagcgcccactgccctctccgctggccgtcttcccagagttgtgacagccacatcggatgctgaagcaagatgcttttccaggtatcaaggttacaattgggcaagccctagttttagggggagatagatgttactggacctcacctggtacaagcatcaatccctcgaatgggtctcaactgaagtaacctttgccgttaagctcaccatgggttatggatccttggcagccaatggatgtattcgaagataagttttggcccagacatggaggtggaggaaccaaggatctggtgaccgaagccactcgcgagctggcgatcattgcacccagacactgggatccggaagcacacatatgaccatctagcgtccatcagcaaggacgagctggattttttccgccctatacacgagtgtcctcacacagcaagggggacccggcttgtgccggtactaggtgtcgagcaaacgggatctgacgtgctctgtcctcctgtagataatcacattcctattgcgagtattgaggatgcttggtaaaggaccacagtcccggacaactggacatcttcctgatatggcatcagtggcgtggactggtccgcggttttggtaagggtggtgagcattgaggtcccagtaacgacactcaagtggtagtgtttgccgatatgaactcaaatcaatgatcaaaaatacaaa

SEQ ID NO: 604382 - DNA, 193 bp, Homo sapiens
cctgctcgccttatattgtggtacgcccggcccgtctacatatgtggtttgtccattcggccatctccagccccgcacactaaccacagctctgtttggactgatgagaatatccttcttggagcctggagggcatcttcacacgggttcttcttgagtctcaggatcttgtgtgaggagcacaagcaggaag

SEQ ID NO: 604383 - DNA, 126 bp, Homo sapiens
actagagttccctcgatcgaggtctcttgcatattcctttgtggtgttctagagtcgtcagatgctttgggatgcatgtatgattgctagctctctcacacttactcactgtgaggataatatgca

SEQ ID NO: 604384 - DNA, 292 bp, Homo sapiens
ttgtatgtcgcacgacggagaggacccatctcgcactagcagtggtagacggagatgaaatccccatcaccaagatcggagcgatcagagcgttcagaacagatctcatcacagagagctcacggctccagagtcatctcatcatcagattctctctacagaatgattatgtaaagaaagccaagaagatcacacatctggtttcaatggacacgctaaacaggtctaggccgatcacaggtctaggactctccttacaaaatcaggaaaggaagtccagatcccagctcca

SEQ ID NO: 604385 - DNA, 791 bp, Homo sapiens
  misc_feature (585)..(586): n is a, c, g, or t
  misc_feature (604)..(604): n is a, c, g, or t
  misc_feature (610)..(611): n is a, c, g, or t
  misc_feature (618)..(618): n is a, c, g, or t
tgaaagtcatgagagtcgagcccaataagatgaagaagaaatggaaatctcaggcagcatccatgctgatacagaggctaaagcacgtggctgaagatgccgaccgtaaatatgaatgaggtgggcgcgctaacgtcctggctcatcatctgagagctgatctggaatagcgtgcagcagagagtcgggctgagctctcagataggcaagagtgtgccgagcttgaacgtagatgcacattgaagagactgtgacgaacaacttgtaacgtctactgtgaggctcaggctgagaagtaatctcgcagaaggaagacgggatctgaggccagagatcaaggtccttccgacaagctgaaggaggctgagactcgggctgagtttgcggagaggtcagtaactaaattggagaaaagcattgatgacttagaagacgagctgtacgctcagaaactgaagtacaaagccatcagcgaggagctggaccacgctctcaacgatatgacttccatataagtttctttgcttcagttctcccaagactccctcgtcgagctggatgtcccacctctctgagctctgcatnngtctattctccagctgancctggnnctctctnttagcatcctggcttgagagccaggcacacactgtgagtttctattgtacagaagctcttcgttgcagtgtcaaataaacactgtgtaagctattctgtagtatctttaacttctatgatgggtttagttcaccttgatgaactaccagtggttccgaaaaaaggaaaaaatg

SEQ ID NO: 604386 - DNA, 669 bp, Homo sapiens
gggcggacgtgggtgagggcgcggccgtaagagagcgggacgcggggtgcccggcgcgtggtgggggtccccggcgcctgcccccacggcacccaagaaggcctggccatgggtaccctccgcggagccctggggtgtgtggtggcgctggtgcgccggcgccgcggatgggcccgggaccctccagcggccggagctggcgcctgtccccgcggccgctgtccctggttggcgcggcttgagctactgccggtgggccacttcctcaagcgacctgtgcgcgtccatgtggttcacctacctgctgctctacctgcactcggtgcgcgcctacagctcccgccggcgcggaggctgctgctgcttgctgggccaggtggccgagactggtgctgtgcacaccgctcgtggggctacgaggaccgaccgcgccgcaagctgtctgcgcccgctacggcccgcgcatagggcctgtctacctggtcggcaccgtctgatgtcctgtctgtccttccccttcatcttcagcccctgcctgggctgtggggcggccacgcccgagtgggctgccctcctctactacggcccgtacatcgtgatcttccagataggctgggcctccaacagatctcacactaagactcatcccggagctcgtaacgaagacca

SEQ ID NO: 604387 - DNA, 162 bp, Homo sapiens
tcgtcatagatgaatatgtgtccgtcacttttaattccaggtcatcgctgaagctaatcgttttttagtgatcgtatcggcctggcaattcatatgcacaggcgcggcgggggttaaaacgcgaaacaggacaatgaagagaatcactgccaaaaatccgat

SEQ ID NO: 604388 - DNA, 370 bp, Homo sapiens
caccgcctcgctgactttatctctcttccctgccccctgaattcatcttcccctcctgggcctgggcttccccatctctcttgctcctgcctgctgtgacagctaattgcaggatgcatttttctgcctcccatctccctatctgcatgtctccctacttcctttcagggtcattttttgattaaacctttatacttttattgagacaaagtcttgctctgacacccaggctaaagtgcagtggtgtgatcttggatcactgcaacctccgcctcccgggcccaagagattctcctgcttcagcctctcacgtaactgggacccaaggtgtgcaccaccgaacccggccaataactgaattattagcaaa

SEQ ID NO: 604389 - DNA, 522 bp, Homo sapiens
  misc_feature (367)..(367): n is a, c, g, or t
  misc_feature (448)..(448): n is a, c, g, or t
  misc_feature (511)..(511): n is a, c, g, or t
tcaacgctttatacttccagtctgtgagggaccccatatgtggtggtggtcccgtaagattataatggagctgaaatgttcccatggcctggtgacatcatagcgcagcccgttactcatgtgagtgtggttatgctggtgtaaacaaacctacagtgctgccagtcatatagaagcataggacaaacaattctgcacatacatagtatgtggtcatcgtaatacatgaatgtgttactggtttatggattcactatacagtgctttttattttagagcatactccttctactcagcaaaaaaatacttaattgtaaaacagcctcaggcacgtccttcaggagacattctagaagaaggcattgtngtcttaggagtaaaaacaacaacaaagaaaaaaaaacaggaaagcttatagaataaggatacaaagaaataaaatattttngtacagctgtgtaatatgtttgtgttttaagctaagtattattacccaagcttcaaaaagttnaccaaaattaa

SEQ ID NO: 604390 - DNA, 189 bp, Homo sapiens
ctcatctgatagaccataatgaaagatttctttcttcatgttttaggtacaaaacttagattaaggatagagagattaaggatagagattaaggatagagattaaggatagagagattaaggatagcgagattacggatagagggattaaggatagaaagattaaggatagagagattaaggatagaga

SEQ ID NO: 604391 - DNA, 775 bp, Homo sapiens
cggacgcgtggtcgacccacgcgtccgccacacaactctctacactatttctaggtaatgatagagcagatagattgattgttctgcatttcaacaagctcaagcttctcatacattactgcttcaaaacccctcggctttattgtgtgttgatttgcctcacagccaggctgcagcctgcgtaagcctgtcctatcttccagcatgtacctggagtcgcatctatagaaggctataacccatgaggcttagctccaaacgaaatctgacagatggatgctactcatgaggctgccattggcaagctctcctttgttcatgtgattgtagacacttattctcatttgctgaatgctacatgcaaaacagatcagagagcttggtcatgtacaatgggcattgtctggtcattttgcgtcataatggggttcctcgaaaaccttaaagaaagacaacacaaacaaaaaaacaagaacacagaaaacaaacaacacaacacaaacacaagaacaaaacaacaaacaagaaacaccaccacaacaacacaaccaaacaagacacaaaaaaaaacaacagaaaaaaaacagacgtgagaggggagcggggggacgcacggccgcagacaaaaaaaattctcctgccagcaggggcgaggcccccagtaagatcgactgagcgccggcccaccaccgcgagttacggttgagtgcgcaaaaaaaacgagcggggcaccccacaaccacctaggcacgacgacaggcacctattacaccag

SEQ ID NO: 604392 - DNA, 103 bp, Homo sapiens
ccactatcgcccaacacatcccccacccagcacatgaatatcatgaaagccaggaatccgaagagctgcatacacatgacatgccaagaaacagtgtgttggg

SEQ ID NO: 604393 - DNA, 679 bp, Homo sapiens
tggcacgagggggaacatggcggtgcgtgagccggggtccttgcgctccccaacagcggcgccggggtgcgcgggggcgccgtcgggcacagtcccggtgctcttctgtttctcagtcttcgacgcgaccctcgtcgtgtgccacacggggcgggctacgagctgctcatccagaatgttcctcatgcctgtacgtgcgaccagatcagacatgcacctgcaagattcgtggatgcagcatgattcgcctgatggaggtgggtgccaggatacgatggatcttgccccgaaggggcttcgcaggtgatgcgatgcagctgcaaggggtgcagccatcagtgcacgctgcatgatccatgcatcaactacccctgtgggacaatctttaccacgcttacaatgcacatgatgttattatactgcctgtgagtactgcacggaaacgggttcatgaaccaagccattcaacgtataatctggcgtgatacgcattaagctgtgtggaacatgagactttgtctgcgaaggtggccgcggagtattctagggaagttcgcgtgtcacttgtagagcacgtaacaacataccgctacaacggtctatggagacgcccgtgttcaagcacaattggatgttaacagggtgtaaacacctgggtactttccaagaggaacccagg

SEQ ID NO: 604394 - DNA, 313 bp, Homo sapiens
  misc_feature (13)..(13): n is a, c, g, or t
  misc_feature (65)..(65): n is a, c, g, or t
  misc_feature (67)..(67): n is a, c, g, or t
  misc_feature (74)..(74): n is a, c, g, or t
  misc_feature (78)..(78): n is a, c, g, or t
  misc_feature (92)..(92): n is a, c, g, or t
  misc_feature (110)..(110): n is a, c, g, or t
  misc_feature (118)..(118): n is a, c, g, or t
  misc_feature (143)..(143): n is a, c, g, or t
  misc_feature (147)..(148): n is a, c, g, or t
  misc_feature (152)..(152): n is a, c, g, or t
  misc_feature (155)..(156): n is a, c, g, or t
  misc_feature (194)..(196): n is a, c, g, or t
  misc_feature (222)..(222): n is a, c, g, or t
  misc_feature (225)..(225): n is a, c, g, or t
  misc_feature (251)..(251): n is a, c, g, or t
  misc_feature (272)..(272): n is a, c, g, or t
gggcgggcttggnggccttgccagctccggcggccttcttgtccactgctttggtggcccccacngnaactgtntgtntcttttcacggacngcaaagcggcccaaaggngggtggtntggggggctctcaacacacatgggnttgnngggngcnntttcaacaatggcggcatccccaggcttcaagattttnnngccttcttccggctttttaccagggnggnggtcaatcttttccttcagctcagcnaacttgcatgcgatgtgagcngtgtggcaatccaatacaggggcatagccggcgcttatttc

SEQ ID NO: 604395 - DNA, 509 bp, Homo sapiens
  misc_feature (49)..(49): n is a, c, g, or t
ccccagagcccaggccttgtctgtctgctccagggatgtctttccaccncaggccggtcacccccttggcttgctgacctccagctaatgtggcaaggggtcactgggagtgggtgattgtcaggtaagattgtgggagtgaaaaagtttggaaatgttagccattgtccttaattacaaatgatttcaggacaggaaccctgctgaactcgcttatttaacagacactgggaggtcctaccctgagccccacagcggtgctgagggctgcagtgcaggggccgggtctgaggcccagcccgggaggggcatggtctcgggaaatgcaagcagcgagctccaggggaggtcagaactggtgtttaagatggcttgaaggggccggacccagtggctcacgcctatagtcccagcaatttgggaggcctaggcaggcggatcacttgaggtcagagttcaagagcagcctggccaacatggtgaaaccctgtctctaataaaaaaatacc

SEQ ID NO: 604396 - DNA, 478 bp, Homo sapiens
taaagaaaactctaaaatatcagcaagcttgactcccaacttaaaattatgtgtgcaggaaggtatatcataagataagatctattgatgtcaggatggtaaagacagtgttatgaaacgtttgttacaatatcagggtttggatgttaggattgagaacctcagggttagataattccagaagccactcctggagctgtgggtagggataatcccacccaaactgcctggctgttttctggatggaaggggtggggtggtgctggggaggaaaccacaatgttggcagccaggaggaaacaaacttcactttccaagtttactgtacttctatattgtttgtgttatttgactattttacaatgactgttcattccttttgtaacaagcaagaccagtaaagctttttttattttaaaatctcctataaaatatagaaaacagataaacaaaataataaaaatcacctgtaatccta

SEQ ID NO: 604397 - DNA, 212 bp, Homo sapiens
taacggctttctgaccctttgaaacccatggcagagggggaacaagagttcacctggcccaaaaagtgtgccccattattttcaatcttccaacttgccagagtttgaccttgatgtttcgaggagttagtcctaattttaattgggagtattcctccaattagtgtaaatttcactcagttcagagattgtcccgctctccccctcatgtg

SEQ ID NO: 604398 - DNA, 1627 bp, Homo sapiens
  misc_feature (761)..(761): n is a, c, g, or t
ctctgcgcagcgcgcggagaggaggaggagcgagtcgatgtccgtgcgtcgaggcgtcaggagatgaataggcctggaggaaactgatggaagagggtgtggaggagaggatcaaattagagggaggagccttggaggacggtcgtactgttgaggccgacgtggaaacagagtggatactatcgaatgatagaacttcgtaatgatggacgagacgctgattgtaagagtagactattaggaagtgagcgcagggctagtgcgtgatagaggcgacgcgcgattgtcgactcgagagcgacagggcgacggatagtaggatgcgaagggctacccgggcaggccagtccgacaaatgtgaagtgacggtccgattccgcgatgcatctcgtcgcctgaggggcaagctcgtagcgtagtgaagggactaccaagcggagtcagcgtctgcaagaggtgcccggggactgtgggatagcttgtgaccagtgatgtgggtcattctcctggggtagaggcaccgtggcaccatgctttctcttgagttgatcatcctggcgatacttatggcgctatgccgggggtacatcaatatatcctgggggcgagggggtggaccggcgcgtggcggtataatctcatgggccggggtgcccctggaacgccgtgggttgcggtcggcggaacttacggccccacggggcgtcgtttccctgtctgcccttcctttgtatagtttggttgggacccacttgtgttgncgcaattaggggactggggctgcaagtgggagaggttggatcacttttgtagagtttggaggttccacaaggtggttgaacgcgaagaaaggctcataaggtatgagcgagaggaaaaaaggattattataggggaaggtattatgaagacctttactgcgtaatttaagttggcttttgtgcccaagagtggattattaatgcgtttccatttgcaaagggagtttgcaatcacttttgggaccggcttgaaactttggagttatattatgtagttttagtttgtggcaaaaaagagtggagcagttcggggaaaattatgtataagaaatatcactaaaatttatgatactggggaacatttatgtggctacagaggatacataaattaaaggaggcaaagaataggagagaaaaataaataagcaagaataagtggtgtgtgtgccgcaagtggatagtgatctaattgaggaggagatttaaaagggtaaattatcaggaaataataggtggtcaagaggagcgatgaagtaagatggaacaatatcacgcgcacacgtggagaatgtcagtaaaaaaatgtagtatattgaaaggaaagattgataaacagagagagatggaggagtgaaaaatagagagtgagaatgagggaatgaagacaaaaacaataaataagatggaggataaaaataatgatattaacagagaagagagattatatgaatgtactagtaagtgagtaatgatagggatgagaagaagggaggttagacgaggagagagaaagaagcgagagtaaggaatatagacgtagagaatagataagtgaggtatttattaacagtaaaattagaataaca

SEQ ID NO: 604399 - DNA, 626 bp, Homo sapiens
  misc_feature (117)..(117): n is a, c, g, or t
  misc_feature (119)..(119): n is a, c, g, or t
  misc_feature (121)..(121): n is a, c, g, or t
  misc_feature (124)..(126): n is a, c, g, or t
  misc_feature (128)..(129): n is a, c, g, or t
  misc_feature (132)..(133): n is a, c, g, or t
  misc_feature (137)..(137): n is a, c, g, or t
  misc_feature (139)..(140): n is a, c, g, or t
  misc_feature (150)..(150): n is a, c, g, or t
  misc_feature (153)..(153): n is a, c, g, or t
  misc_feature (169)..(169): n is a, c, g, or t
  misc_feature (174)..(174): n is a, c, g, or t
  misc_feature (176)..(176): n is a, c, g, or t
  misc_feature (181)..(181): n is a, c, g, or t
  misc_feature (183)..(183): n is a, c, g, or t
  misc_feature (192)..(192): n is a, c, g, or t
  misc_feature (230)..(230): n is a, c, g, or t
  misc_feature (352)..(352): n is a, c, g, or t
  misc_feature (364)..(364): n is a, c, g, or t
  misc_feature (372)..(372): n is a, c, g, or t
  misc_feature (377)..(377): n is a, c, g, or t
  misc_feature (382)..(382): n is a, c, g, or t
  misc_feature (384)..(384): n is a, c, g, or t
ggcaggccgcgtcgcctcacacgggaccacaagtagcttaggacctaagtagcggggcagatatgtggtcgagatactcccagacctgctctggcatgatgtgtgactgtttccagnanangannncnngcnnacancnncaggttcatnagngggggcaaggaaaaangggtngntcatntngggtatcanggagtctgatggaaagagataggcgcatctctggagtngatcgtactatgtgtcaaagggttggagaacattgattaaggaagcatttcctgattgaggtgaaaaaaataattcagttatggccatctacccctgctaggaaggggttacagggtattantgtagcaggcantgggttantgtanggttncnttaagttaaaacaccccgcccggggggggagggcaaaaaaacacaacttattgttgggggggccgcttcagccacagaaaaaaaagtttcttgaaaagacccaatctctcgttggggacagcgggggcacccacagaggtcacagagcaaaacggggacaccacagcgtttccccaagaaaagcccctggggacagagcaaagggcgtggtgtgctctccaccaaaaaaaaacgccggggga

SEQ ID NO: 604400 - DNA, 82 bp, Homo sapiens
tgtcaatcacatgagcggtaagggaccaagccaagactaggactaagccatctgattctagccctcatccgcttatccaatg

SEQ ID NO: 604401 - DNA, 410 bp, Homo sapiens
caaagatgctggccatagcaagttcgccggagcgggctccagcgcgttagcaagccaagaagccgcagtgaagctgtgttggtccgcatatatgtggtgcgaatggctcctttaccccagtgcagtgccatacttacactgggtactgctggtgtgtcacccgcggatgtgaagcccataagtggctcttctgtgcagaataataactcctgtatgttcaggttcagtcagccgagcaggccttgagccaggggtaactcaggaaggaaagatgacggggtctaagccgtgaccctacgatggagacccaaccggtgttcgatggagatgaaatcacagccccccactctatggattacacacttggtgatcaacggactccaaactgaacaacaccaacatacgacatt

SEQ ID NO: 604402 - DNA, 381 bp, Homo sapiens
tggaatattccacacctgaccttatgtaatgggttgtagtcaaaatgaaggcacacaacacacagtttcttcagcatcctcaagggaaaaaagaccctcccaggccccttcagctgtgatatttattttccacacatgcccagattcccccatgcaagcacaaccataaagggtcataaaatggcacatgtgtaggctgcacatgccaatggcaggttctccacgtgaaaagagagatttctatgaccattgttgatgaggcagatgactgcagaaaaatatttttaaaagccatccagcagaatgtttcctcatccacagaggacccacttactggtcccttaaccacttctgatgtttccttgcttgtcctgtcgcggg

SEQ ID NO: 604403 - DNA, 255 bp, Homo sapiens
ttcaggctagactgtcgaccaggttgacaggagctgggaacactctggaaaccttacttggatctagggaagagagcattcttatgtctctctatagcaacctctggccttttcagaagcagcactggcagaagtaaaacatgtatagcctctaattcaagaaaaatagtgtcactgtgtaccacattagtctgtcaaatatactctgcccctaccatccgcctacctatttcttcccttattatcacccaaata

SEQ ID NO: 604404 - DNA, 265 bp, Homo sapiens
ctgccctatcccctttgctaacgggggcccaatgccccttcagcacctcccaggttagctctgggggaggtgagggctgtatcccactctagggcaacaagggccattcaacaggagacctccatggtgtgccccgagggccccgaagaaagagttccagactcgctgctctgggacaggctgcgagagcggcaccgtttgccatcaacggatgctgcactgttcagagaggctgaacgagaccgggacaggccagtcatgcagg

SEQ ID NO: 604405 - DNA, 180 bp, Homo sapiens
gacccttcctgatagtgggcagctgtgttgttgccttctggagaatagcagagatacacgtgccatgatcagcacgaggggcatgccggaccccctcaccctgagatggaagctgtcttcccagcccaccatccccatcgtgggcatcgttgctggcctggccgtcttggctgtcctagc

SEQ ID NO: 604406 - DNA, 543 bp, Homo sapiens
gacgttcgatctagaggatcccgacgctcgtctctgttggggaagtgaatgacagaagcaacatgttcctgaagtttggggtggggctcaccgatgttgtccagtgcataatgatgatgatggttatgacctgaagcaggtgagagcttgtacatactggagagacgggaagagatctggggtagggttggaatgcaaaaccaacagcacttatgaatatgactagacacatggagtgaaggagacaggtagatggcaggtgccttaataagagataggacaacatcgagagcagcgagtgtggtcaagcatcaggatcttggactttatgtttagctttgccaatctctttgaaatatccaagatagacatagcagtggtgctcagaaattaggtctgaactgggtacaggagcgtgttaacatataggtcataatcaatgcaaggattggggatgggatagctaagggaaggagtataaggcacgggtcctcggctacgacgtggggaattattctgcccctcaggtgatatctgacaatg

SEQ ID NO: 604407 - DNA, 242 bp, Homo sapiens
tgatcgtcaaacgataccacttccattaccccctgcgggattcgtcctcatgcggtatgttctgaggttcttctgtttgtgtccacaaaatattatatgccatcctattaggcctgctgcacacgagtagcttcttctggacttccacaaagattgctcgattctcctcctgggggcttcatggccctggagccggcgcggccgcccgtcggcggtatccgggcacctggattcgcgaccga

SEQ ID NO: 604408 - DNA, 310 bp, Homo sapiens
gtcgacaacaaagttgattaagaaaggaagtataggctaggcacagtggctcacacctgtaatccttgcattttggaaggctgaggcaggaggatcactttaggcctggtgtgttcaagaccagcctggtcaacatagtgagacactgtctctaccaaaaaaaggaaggaagggacacatatctaactgggacaaaattagatatatgtgattatgttctaaggggcccccagttcaacacttatttggaatgtttgagaagagttggttaccgaaataaccgttcgtgagggccaaaaaggaattgtgt

SEQ ID NO: 604409 - DNA, 399 bp, Homo sapiens
gcctcacatttgacggccacgcacagcagaatctggatttgtggtgagtcgttcctccgaaggcagcacgcagtcgtgacctggaattgcaaggccatcttcttggaagctgctgcctgccccagaataacgatggtcgtccatctggctcatgggtcttgagtggctccagttgggttgctgagggatgaagactggatgtgaaagaaatggattcaagctaccagaggagcagctccagggcaaggcagcagggataggcctcctctcgtcactctcacggtcagctttctcgtcgcgtcatgtctgtgggcatgcttgttgcccaccacttataaaataagaatatatagaaggagatagaatggatataaccagaaaactatagagaaacataaa

SEQ ID NO: 604410 - DNA, 132 bp, Homo sapiens
aaaaaaattagattttttttttaccaagggtctccatattaaaaaaattttcagcccttttaaggcccattaaaggacaaagtaaaaaaatttttgttttcaagggcaaaaaaatgttttttttcccttgga

SEQ ID NO: 604411 - DNA, 335 bp, Homo sapiens
ggacctgcatcagacaacagcactaattctagaacattttcatcaccctcaaaagaaagtccataaccattagtggccactccctatttcctgtgtctccaagtcttaaacaccaatctactttctgactggatttttctattctggacatttcatgtaaattgaattataaaatatgtgacctttgtgacaggcatctttgacctagcatgttttcaaagttcatccatgttgtagcatgtcactacaacttcattcctttttatggctgaatattccattgtatcaatatatactgcattttgtttatccattcatcagctgatggacatttg

SEQ ID NO: 604412 - DNA, 174 bp, Homo sapiens
cctaggatccttattatcccaacacattaaaatacaaaatagcggtgtggtgtggcgctgtatccagctacttggaggctgaggaggagatcactcgaactggaggcggaggtttgagtgagctgagatttcttcactgcactcagcctggtacagagcgagactcatctcaag

SEQ ID NO: 604413 - DNA, 186 bp, Homo sapiens
agattcttgatgatcaatgcacggccgtggggctcatggatcttacctcgtaaccgatcaccaaaatgtgcaagaacaatgcaccagtttgtgaaccatttccatgtcctctacgaccgagtaggcatcggcaggagaatgcgcgggctcttttactgatgagggtacttgaagggctgatggaca

SEQ ID NO: 604414 - DNA, 935 bp, Homo sapiens
gtcagccaccaattgtctcacagtccaggtggggtggcctcaagccaggtcattctccgcagtgtggtgtggtgttcttatcctcagaaagagagctgaagggaatggagtcagtgaagcaaggaagcagacattctgtttctgccacacaagaatcgatcccttttttggagcgtgctgtggaggacagggaacacgctaacctgggtctgcagaggtgagggagccactaggtggcgctctggcttcacatttctctagacttctccctcctgcccctggtcaccacccacaccccagacaccctacccattgactagctctcaagaattcccagaatccccctggttattcttcaggaacgccccgccccctcagttcaaacctctacgccattggtagcacactgggcttctagctctggaactctcccaggactctagggggcagtgaccacacaggtcaggtcaattaaggaggggattaaggactgtaagcttactggcaatggtgatgcacgcctttaatcccagcctttgggaggcagaggcaggctgatttctgagtttgaggtcagcctgatctacaaaagtgagttccaggatagccagggaaacaaaacaggactgtaggctctagaaagtgctggaatcgattttgaattatttagcaatgcttttatgtcacttgttaacaggctttaagtgccagggcttgttaattccgtgctagacaagacaggtgaaagggtggctccattccccaatgttaaaccgtcggcggtggggctggagggatggtcaccgctgaggacaaggcgttttcagaaacccggttgattcccgacgccatgggcccaaatgtggcgactcagtccgggggagttccttggctggggacggacaacccggcaatacacaaaagacccctttgaa

SEQ ID NO: 604415 - DNA, 219 bp, Homo sapiens
gacacgatgtgagtattcagcttgtatcccaggaatggctgtaaggtggaccgacttgtgatgatcatccgtagaggtagctcttcaggttccctacgatgcctgctagctgctgcttccgagtgtaggaatgcctgaggaacccatgtctgggcatcggagaactttctcgtgagacatcaggccatcaaatcccgaccgttatagccgatctgggga

SEQ ID NO: 604416 - DNA, 151 bp, Homo sapiens
gcactcctccgtaatcagtgagagaccgcagcttactctctgtgttttgccaccagtattgttttcccccggccccctacctctgaagccatttatgatctgtcatgtgccacctgagcctccagtaaacaaacagcttcctgtgaaaaaa

SEQ ID NO: 604417 - DNA, 746 bp, Homo sapiens
gtttgtatagtgtggattatttaaagcttgatctgttcaccctcctgccaggaaaatcccagaatagcttaagtgataccccaaaatgattacatcccaggtaggaaaaaagggagcgctttctagaggtcagaatcgtggagagaatactcagaaatgaaccttctttatagagcctatgctagcgagatgagtctactcttacttaatggaaatgttaaagccacattgaaaaagcatgctgtgatgcccaggttccctttccacagggtgctatgcgtctcctgtctggtgaatcacatgcggctgagtaggcaactggctccatcgagcctggggatgctgcctgtaccgaagatggaataggaatgcatgcacaaaatgcctttacgttgttctaaacccccgacgcataaagtgtagaggagggatggccaagggtgggtggtagaaagtgtgttcaggctgacactggcaatgagtaccagataatttcactttcctcttccaggggcaaaggctgatggcctctacctttgtatccaggagaaactgcagagcagccctgtgactttacaaaatatgctacctcaaagtggtaccgataaacctttctaactgtatgtgcccttactaatgggcacatgtcttaatcaaagttagaattggtatcctggatttgtataaatataaaggaatattgatgaatgacgatcttacctatttaagtatatacatgggaataa

SEQ ID NO: 604418 - DNA, 110 bp, Homo sapiens
cccttaactacaaccctttttacttttggtagaaaatcataaggcatgagttgtcaaggagcacactttgggaaatgtggttcgactagccttactagagctcgcaaggg

SEQ ID NO: 604419 - DNA, 790 bp, Homo sapiens
tgttatagaccagagggttttgcgcccgtggtgcggccggggttagtcggcggacaaaaatgtggcgcccgcggggatgtttttcgtcgcccactatcgcgcccgcggggcgcgtatcttttccgctgcgtcccccgaattttgtgtctgccgttcccctccacgcgagggggtggtttgtactcggtccgcctgtagatagccctgcgcgcggccacactctgtctcgcgcgtaaagacagactgtggcgtgagctacgttcgcgccgccacgccgcccacataagtgggcgtcgcccgctcgcgctccacacgatggcggccagcacaagggtcttcttgtaaggaagtacgacgccccccgcgctgagagaatcgcgagcgtgcattgtatgcgcacagcacgcgtatacgccacgcaagtgtgggtttacatatggggggggggcgccacagacccatatccgcgcgcggttctcgcgtgcggaaaaaagtagggtgtttgacgcccatcccacataaggacgcagcgtgcttggccgtatacgggggcgtccgatgtgaagccgccgggtttgtggccctgcttcgcgtaacgattgttatacgacgagatggcgggtcggtgtaaaaagaagtcacccacgcatgttgtatcgcgtggggggcccacacaataaagacaagaaggcgctccaggccgtgcccctgatgtgtacgtgtcacccatttctttgcggtgagccccaattcagctgctggggggtttcttgccgcccaacatggtcaa

SEQ ID NO: 604420 - DNA, 176 bp, Homo sapiens
  misc_feature (167)..(167): n is a, c, g, or t
aaaaagaatgccctatacagaagactatctatcgtggtcctgaaccagttatgtgtgttgcatgagaaaacgccagtaagtgacagagtcacaaatgctgcacagaatccttgtgaacaggcgaccatctttcagcctggagtcgataacatactccaagagttatntgaacatca

SEQ ID NO: 604421 - DNA, 412 bp, Homo sapiens
  misc_feature (333)..(333): n is a, c, g, or t
  misc_feature (359)..(359): n is a, c, g, or t
  misc_feature (372)..(372): n is a, c, g, or t
  misc_feature (400)..(400): n is a, c, g, or t
  misc_feature (411)..(411): n is a, c, g, or t
aggataatcgcttcaggccaggagttcaaggccctggacaacatagcaaggccccatctgtacaagaaataaaaaagagtagtcaggtgtggtggcatgtgtctgcagtcctagctacccaggaggctgaggcggaagaatcgcttgagcccaggagtttgaggcttcagtgaactgtgatggcaccactgcattgcagcctgtgtgacagggcaagacctcgtctcttaaaaaagagtcggccaggtgcagcgactcacgcctgtaatcccagcactttgggaggccaaggcgggtggattcacctggaggttcaggagtttgagaccagcnggaccaacatggtggaaacccctgtntattaaaaatacnaaaaattagacgggtgtgatgatgctgnctgtaatcctnt

SEQ ID NO: 604422 - DNA, 876 bp, Homo sapiens
gagtcaccatggacgctgaaggcctggcgctgttgctgccgcccgtctaccctgggcagccctggtggacaggtggctccgagaggatctgttccagggctcaattattgcatgtccgttggtcaggcggggcaggccccattgcatgcgtgggctgttgtgccaaatcctccttggggttgacctggcgaggggcatggactttccttccgaatgccgagtatttagcccctagactcatatctgccatacgtcttcctgtgttcgctcccgcgacggcgatcggaacgctgtgtgccgccggtgcggcgagagcgtggccggatggtcgcggggtccttgacctcactgccgtgtctggctggcgggacaccggcgtgtggcgctgcgaaggcagaggctgagtccgctgcgtggtgtgcccctttgcccagttgtctgacagcgcgcgttccgcccccgtggacgtggcccgacctggtggggcgcccggcgtgagcactgggagcatccggtggctacggcatcgcaggaaagacgcgacgcctagggattccggggtatgcgtggtgcaagtagtgggcttcgctggtgggcaagggtcggccttctccaccgctcaggaactgggaagggctaggtgatggtgaaggatgactcattgttcggtggccctgctggttggggtggagtcccctgtcggttgcctgtcggccgagggatcggctgggtggggggcagcgtctggtggggcagtggcgttgaatgccccgttgcggtgggctttgttggcagtttgctgctggtgccgcttgtcttgggtcttgggtcgggccggggagctgcccccgggccccgtgctgcggccgccccctg

SEQ ID NO: 604423 - DNA, 858 bp, Homo sapiens
  misc_feature (181)..(181): n is a, c, g, or t
  misc_feature (228)..(229): n is a, c, g, or t
  misc_feature (246)..(246): n is a, c, g, or t
  misc_feature (261)..(261): n is a, c, g, or t
  misc_feature (455)..(455): n is a, c, g, or t
  misc_feature (480)..(480): n is a, c, g, or t
  misc_feature (494)..(495): n is a, c, g, or t
  misc_feature (513)..(513): n is a, c, g, or t
  misc_feature (521)..(521): n is a, c, g, or t
  misc_feature (530)..(530): n is a, c, g, or t
  misc_feature (534)..(534): n is a, c, g, or t
  misc_feature (545)..(546): n is a, c, g, or t
  misc_feature (562)..(562): n is a, c, g, or t
  misc_feature (568)..(568): n is a, c, g, or t
  misc_feature (582)..(582): n is a, c, g, or t
  misc_feature (587)..(587): n is a, c, g, or t
  misc_feature (604)..(604): n is a, c, g, or t
  misc_feature (620)..(620): n is a, c, g, or t
  misc_feature (644)..(644): n is a, c, g, or t
  misc_feature (660)..(660): n is a, c, g, or t
  misc_feature (665)..(665): n is a, c, g, or t
  misc_feature (670)..(670): n is a, c, g, or t
  misc_feature (688)..(688): n is a, c, g, or t
  misc_feature (694)..(694): n is a, c, g, or t
  misc_feature (697)..(697): n is a, c, g, or t
  misc_feature (699)..(699): n is a, c, g, or t
  misc_feature (701)..(701): n is a, c, g, or t
  misc_feature (704)..(704): n is a, c, g, or t
  misc_feature (708)..(708): n is a, c, g, or t
  misc_feature (719)..(719): n is a, c, g, or t
  misc_feature (721)..(721): n is a, c, g, or t
  misc_feature (731)..(731): n is a, c, g, or t
  misc_feature (743)..(743): n is a, c, g, or t
  misc_feature (754)..(754): n is a, c, g, or t
  misc_feature (786)..(787): n is a, c, g, or t
  misc_feature (797)..(797): n is a, c, g, or t
  misc_feature (808)..(808): n is a, c, g, or t
gggctgggcttgctgaggtagaggcagcgccaagaagaggcctttgccgctggtcgggattgggatgtcgaagaacacagtgtcgtcggcccgcttccggaagtggacgtggatgaatatgacgagaacaagttcgtggacgaagaagatgggggcgacggcaggccggcccgacgagggngggtggactcctgcctgcgcaaaaacatgacagctgccctacaggcnncttgaagaacccccctntcaacaccaagagtnaggcagtgaaggaccgggcaggcagcattgtcttgaaggtgctcatctcttttacagctaatgatatagaaaaggcaagttcaatctctggacaagaatggtgtggatctcctaatgaagtatatttataaaggatttgagagcccgtctgacaataagcagtgctatgttactgcaatggcatgaaaaggcanttgctgctggcagaatagggtccantgttcgtgtcttgnntgccaaaaaaactgtgtnatctggcnggcaatggnttcnctgcctcgggnntggggaatgctggtanaaaaancaaaaaaaacaaangccancgctgccctgtgggtancatctgtttctctcanctttgccttcttgctttttcaaanctgtaaaaaaaaaaantaaanatcanttgtcctttaatgaaaantggganaanananaanaaantgtgttaaaananaagtgtttcntcctttcaaaancatttccgtgntgtttataccaatctgtatatagtataatttnnattcaagttnaattgtgcacntttaaaccctgttggctggttttttgttctgttttgttttgtattatttt

SEQ ID NO: 604424 - DNA, 299 bp, Homo sapiens
cccacgaagtgtagtgtgtggaactagactgcggagccaagccagaagattcggggtgaataacaagttgtggtgcttgccttgaagccttgtttcttcgtatttgggtagttgctaacaagacaaacaggtcccagcaattctcaaacgttattgctaaggactaagggacaagcttgctgctaacttcctgaggcttgtaaacagtaatctgccaaaaataagtaagtaaaagaacaagaactaaagacataaacactaagaatagtacccaaccgcccttggcacttcgtgggcag

SEQ ID NO: 604425 - DNA, 206 bp, Homo sapiens
  misc_feature (17)..(18): n is a, c, g, or t
gtgtcatttcagaatcnnggcaatcaactagcttatcttcatgtcctgggattaacgttcctcacatagggcagtcctataagctcccagtacagaagtaacacaattccccttgacactcactttttaaaaccttttggaaaattcttcatctttattaataaagcttgagattttggatcagttcacatagggtaccgagctcg

SEQ ID NO: 604426 - DNA, 396 bp, Homo sapiens
gagagagagatgttgtgaacccatgcgcatgtgttctcgggcccctgagtgtggtggggggtctcagtcacatatatatgggtcttttgtgtgcgctgtgttctccacacactgtgaatcttgtgggggttatctcgtggagactgtgagcatatgtcacaatatatatgtgccccgcaaatatcttcacacacaaccctgtcacgaggatccctatactgaggttgtgagtgtcattctcccccgtggggaaacacatgtggcgcgggagccgagagatggggaaaacccaaccctgacaaaacccctgtcctgtgtgacacaaggtgccgctgtctccacaaagttcttttgtgtgacgcactgtggggcacagcgcaaccccacatctcgcga

SEQ ID NO: 604427 - DNA, 201 bp, Homo sapiens
cctggcgctgagaagtctcatttaacaaacacccaacacgcttgttaattccaagtgtgctgtctattgcgcttagctgctctgtgaggtggagagggtggatggtgtggagataaatgagcctggatgccagtgtcatactggaccgtggcactgtcacctatcctgtggagtgtctaacaccctgacagaagggaaata

SEQ ID NO: 604428 - DNA, 314 bp, Homo sapiens
ataaagtcacgtcctttgcaggaacgtggatgcagctagaagccattcttgtaagcaaaccaaagcagaaagagaaaagcaaatattgcatgttcttatttataagtggtagctaaatcttgggtttacacagacatagatgggaataatagacatgggagactctgaaagggaagggaccatggctgaaaaacttcctattgggtactatgttctctacctggggtgtggtatcaacaaaagcccaaagctcagcaccatgcaatatacccttgtaacaaatctggtcatgtaccttctgaatctaaagtaaa

SEQ ID NO: 604429 - DNA, 359 bp, Homo sapiens
acaactagttaatttttagtaagataggattctcatagtttcccagtctagtcttagaatcctaggtcaagtagatctcctacttggctccaaagtagtaggctcccaaagtagtgggattacagccatgagtcatagtgccagcctttattttcatcttaatttcttagtcaaccgcaggaggtcattccggagcatgtttccccgtcaacccagccatgtattcgtagaattcttcttagtattaatttaagttatatttgaggtagagtctcgcggtttcaccccagataggagtacagtgatagcagatctcagctccctgtagccttagacctctctgggctcacgtgatttat

SEQ ID NO: 604430 - DNA, 108 bp, Homo sapiens
agctggtcctacttttcacagtgtaaaaaaatgagaccccaatagaagctgatgttgggaagagtaagcccatgagggtggtggatgggtaaaaacatcaactgtaag

SEQ ID NO: 604431 - DNA, 203 bp, Homo sapiens
ataggatcccgattgtcagcatcatgtcaaacagtgacttcaatctgagtgaacacctcggagtgcaggaggtatgcctgtgagttcacacttgccaattcaggttgtaatcctattgtacatggcactgctcgccattcataaaccgtgaataagcacaccatggctggttgtcagaatacgtgtagtgacggtctagtgtc

SEQ ID NO: 604432 - DNA, 909 bp, Homo sapiens
gaggatgcgtacacttacagcctgaggtccagagcttgttatacttatactcataatcacatggctcccaaaaagaggtctggtcatcctggctagaggagcagaggcaatggtgacggtcatccatgtcagaatgtcattagtaggcgctgagtgggtgttaaggtccctcgatgacgaggggctggggtggataaatgggccagtcacatgcgtagccgatgaatgtggctctattcgctacttgatgaccaacacctggaaagatgtcacaaaccctgtagggcaccatattgagtgtggtgtgtgctaccagtgaggtaatttgtgcagcacagtaagccatcgtggcagtctgcttgatgtgcatagggaagtatactgaaggcacgcacggaaataactgcgacagtgacattgataagccggccactctagtgcatggtccatacatgaactcgttcgcgctctatgacattagcgttctggggaccagtacctggtgtaccataatgactctatttggatgcaaatcagctagtctgcattgaattgcgcaggtcattaagatgttactacttgaggaagttgagtcgtgtaacggacgggatgaatacttcacaagaccggagggaacttggatgccagtatcacaatagttgcagcttgagttcggtgagacagctcactgaggtggcactggagagtggctggctcaaagatgcatcaggtcccaactctggttgtgaatatgaataggacacatgggaaagtgggacgtattactaaggagaaaatagggcagtaagggaatccattattccatggatttggggctcgtagacaaacacgagagggagggtaacaggtggccagcaacagcgcacgtcgttacacaatgtgggagga

SEQ ID NO: 604433 - DNA, 217 bp, Homo sapiens
  misc_feature (80)..(80): n is a, c, g, or t
  misc_feature (200)..(200): n is a, c, g, or t
  misc_feature (216)..(216): n is a, c, g, or t
aatgagttctttaatcatacttaagtgctatactgttttagtgtggtattttgtcttgatcctgttttttttttttattngagagagaatcttgctgtgtttcccagcattgagtgtaatggcggcatctcggctcattgcaagctccgcctcccgggttcatgccatttcgtgcctcatcctcccgtactacctgggantgttggcgcgtgccanc

SEQ ID NO: 604434 - DNA, 392 bp, Homo sapiens
ttcagcgtgtgtctgtgaacgcaagggtcccagcaacagtgcgggtttgcgctcggccctgcccgtgggtgcagggacgtgtgggtgtgtgggcatgtgtgggtgtgttggggagggtgcccagcgacatgtgacaaagacgcccgtctccgggagatggtgaaggggcccgcgagcaggcgctttgtctggctgtctgcagagtgaggttcgcgccgcggcggcgggcgcccgtgcggtgcaggatgccggggcgccaggatggccgggggcgcgcgcgcctgtgccagggtgagtgcgctgcggcagcgccgggggacagcgcggagggcccgcgccggcccgggcctcgggcgtgactgggcgccacccgtgggcgctgcagcggccgc

SEQ ID NO: 604435 - DNA, 347 bp, Homo sapiens
ttcagcgtgtgtctgtgaacgcaagggtcccagcaacagtgcgggtttgcgctcggccctgcccgtgggtgcagggacgtgtgggtgtgtgggcatgtgtgggtgtgttggggagggtgcccagcgacatgtgacaaagacgcccgtctccgggagatggtgaaggggcccgcgagcaggcgctttgtctggctgtctgcagagtgaggttcgcgccgcggcggcgggcgcccgtgcggtgcaggatgccggggcgccaggatggccgggggcgcgcgcgcctgtgccaggggcgctcaccatggccccgccgctcctgctgctgctgctggccagtggagcggccg

SEQ ID NO: 604436 - DNA, 315 bp, Homo sapiens
  misc_feature (62)..(62): n is a, c, g, or t
aaacagccaggggggactatcctctggaggctgtgcgcatgcagcacctgattgcccgtgangcagaggctgtcatctaccacttgcaattatttgaggaactccgtcgcctggtgcccattaccagcgaccccacagaagtcaccgccgttggtgacgtggaggcctccttcatgtgctgtagtggtgccataatcgccctcaacaagtctgggaggtctgatcatcaggtggacagattccgcccacgttccccccatcattgctgtgcaccctttaatccccaagacagctcgattaggttctacctctacc

SEQ ID NO: 604437 - DNA, 158 bp, Homo sapiens
ttaaaagccttttttttttccgggggagggttttttttaaaaaaaaacctatttccccgggaaaggccggggaattttttccccccaaagaaaagggaccttttgttttttaagaaaccaaaatgggcccctttttaaaaaaaaattttcccttttta

SEQ ID NO: 604438 - DNA, 361 bp, Homo sapiens
  misc_feature (229)..(229): n is a, c, g, or t
ctcgggttcttcataacgaaaccgccagaggtgcaacttgagtcagtatttgcccaatatttataccctcgatatgtgtgaaccttaaacagggtatcaaagacacttcgaggcgcccggtgtcgagagcatgcccatgtctgtgtacgccttcaccggcttctggtctgacgtgtcaacctggtgtgaagtggagtccgaggtcatgaagagtgactatgagagcggngaccacgggcacttcgaagagaggacgataccggccctggatttccagcagcacccggaagtctgactcttaacttcccccgtgcctgactttagagcctagaggtgatgtgagtgatcgcgctgttctttg

SEQ ID NO: 604439 - DNA, 1269 bp, Homo sapiens
ccctgctcctactctggaagaagtcaacgcctgggctcagtcatttgacaaattaatggtcactccagcaggaaggaatgcattccgtgaattcctccgaacagaattcagtgaggaaaatatgctcttctggatggcctgtgaggaactgaaaaaggaagctaataaaaacattattgaagagaaagcaaggataatctatgaagactacatttctatactttctcctaaggaggtgagcttagactcccgggtgagagaagtgatcaacagaaacatggtggagccatcccaacacatattcgatgatgctcaacttcagatttacaccctgatgcacagagactcatatcctcgattcatgaactctgctgtctataaggacttgcttcagtccttatcggagaaatctattgaagcataggatttttcaaatatatttattattaataaaataataaaagaattcatgggctacaactagcacagggaatttagaggttgtagcatcttctgctggagtaatactcaggctattctaataacagatgattccttcaacagactgctatatattcaccatgtaaactgcagccacctttagtgatacttttgaaaaaaaaaaataaagggatatggctgttgtagaaagatagcgtatttgcatttacaataacagtagcatgttgtcagtggccaaggctacacagaaggctccctgctgcccggagcaggtacatccaccagagcaaagggaaccacttttattttgcatgagtttggtaactgattactctcccctcaaagaaaagacattcaggtgtttctcaacgacatcttctgtccagcaagctcggtttgaatacgtcacttaccagtgccattgcaggacccaaattcacagttcataaaagatgtgaccactacatgtaaaaatagcattctacttgatcttacagtatgtatgtatgtatgtatggagacatatgtgtgcgtgtggatgtctacatggttaatggaaagcactgtgctctgaagtggatcagtctcaagtgtctggtaacagcagcagtgcttagaaaattcttttgttgaaaagagttactgttattatcagaatttgccaacctaaagaatgaatttttaaattcataacttggtcatgttcacaacaaaactgtcaaataagcatatttccatttttattactgaaagaaatatgggcattttcattctttaaagaaataaagcacaagaattttatctcaa

SEQ ID NO: 604440 - DNA, 793 bp, Homo sapiens
gtacatatgaatcgcacgcatagccttgctttctaacagcactccccaggcctatgggagtatattttgaaaagctactatactttctgagtctccatttttgtgtgttatcagagaacacgatatttgcgtctggtcactccatgcactggtagtcaagcaggcagcgattaaggctcgacgtgcagccttaatgctccgtggctgctcaagcgaccctcctaccgtcttagcctctctgagtagctaggactacaggctgtgccccacatgcactccgactgaattcttgtcaatttgttagtagagaccaggtcttgccacgttgcctaggctgatcttgaactcatgggatcaagcaatcttctatgccttggtctcccaaagtgcttggattacagaatgtgagccaacacatcctagccagtcatgtttcctatttcgtctcagtctgaatccttcgtatcggctttctctatacataacctttgaaactcctatggaataatcagaaatgtcttattcctgacactgcgccaatgtgaaagacacgtaggataatacacaagatgtgttcaaaggacatctgtcattgtagagtaagcagaatatggagtagcaaattaatgctgaagtccagtccaacactgaaccacatcattctttgattccttcatttctatccatagtacacaagtcatctatctagagcctccactgcatgccaggtcctgttctgggctctggataaagcacagggaggataatagcaaaggctttgttctcacgggta

SEQ ID NO: 604441 - DNA, 618 bp, Homo sapiens
ctcgtgccgaattcggcacgagtaacagtagcatgttgtcagtggccaaggctacacagaaggctccctgctgcccggagcaggtacatccaccagagcaaagggaaccacttttattttgcatgagtttggtaactgattactctcccctcaaagaaaagacattcaggtgtttctcaacgacatcttctgtccagcaagctcggtttgaatacgtcacttaccagtgccattgcaggacccaaattcacagttcataaaagatgtgaccactacatgtaaaaatagcattctacttgatcttacagtatgtatgtatgtatgtatggagacatatgtgtgcgtgtggatgtctacatggttaatggaaagcactgtgctctgaagtggatcagtctcaagtgtctggtaacagcagcagtgcttagaaaattcttttgttgaaaagagttactgttattatcagaatttgccaacctaaagaatgaatttttaaattcataacttggtcatgttcacaacaaaactgtcaaataagcatatttccatttttattactgaaagaaatatgggcattttcattctttaaagaaataaagcacaagaattttatctcaa

SEQ ID NO: 604442 - DNA, 241 bp, Homo sapiens
ccccctgggaaaacccccccggggttgggggcccctatccacagggggggcccccttttttacaaagggggccccccccctttaatgccccagggccccgggggggacttgcccccttgttggggattgggttttttggaaaagccggggccccccaggggggggaaaaaacccccttttggcccccgggggggggggggggggttttttttttttttttttggggaaaaaccccccttta

SEQ ID NO: 604443 - DNA, 724 bp, Homo sapiens
agcggtgccgtgcaagccatgcgtgctctagcgagaatctgactggccggtcgttttaacaacctgccttggccagcctgcgagcgcgtggtacgaaggcgcgtctgcatccatgccccagcccggagagctggaggcgctcgcagtcagagtgcgagtgatgctaggctgagcagctgtggcggcccgtgtcgtgcccctgctgagccaagtgcggaagggcagcggcgcgctccgacatctgctctgccgcacgcagtggcgtgggctgcgggcatggggggcggtggggcctggccgcccgcatgggaagctgcggacgaagccatggcgccgcctgaggaaccccgaggggcagggaacaccgaggatataaaggcacaatgggctatagctcaacagtgtgtgaaacgcacgaaatagaggcccactaccagtaagaggcgcaaagcaacgctgctacactatccagaaaaggcctccccgtatagggcgcgcccagaagacgcgacgagaaagggcggagcgacgagcctgagtgtcaggacgcgacgaaagcaacgaggatcccttttctagtcgccgggataccaagttacgggcggcgagaacaacagcactcaagacttcgctgcgggggcaagcccagggagaccgagcgtactgaaggtcattagcactccatagttgtcaattctccgtgtggagtgcatgttagggatag

SEQ ID NO: 604444 - DNA, 609 bp, Homo sapiens
caacttctatatatcccctccccacatctttcccagtctctggctaatttttgtattattatttttagtagagacaggtttcatcatgttgaccaggctgggcttgaactcctgggctcaggttttctggctggctcaagcttccaaaatgctgggattaccggcatgaagcaatgggcctgggcctggttctttatacttcttgtctttgccaagattatttcttttctgaggctttctacagtttcatttgcttgaagtgtgtttgcagttgctcactgaagcattttttttttccagggttgctttaaatttatggtccaatcagtctaacatctctggatctcagtattggcatctggtgatggttatttttcatttagttggagttctccctggttggttgttatgaccaatgattttcaattaaaatctgaacatttttccattatatgaagagactctgaatcttaattaaataagatccttctgttttggctggcttttttgggataccattctggcaggggaaggggctgcatcctcattatggccagatggagctagaagtccagattccacacttgtcctccacggaccacctggaga

SEQ ID NO: 604445 - DNA, 148 bp, Homo sapiens
atctatacgccaggcatccatacttgaacattctaggtgttgtctgatacagaaagataaacagatagtgccttttatgagcacaaaaaagagttgctgtagctattaactttataatccattttttttcagattaaactaattgtga

SEQ ID NO: 604446 - DNA, 127 bp, Homo sapiens
cgttcgagctcggacccagctccgacacctcactgcggctgctctgtaccagttcgctgttggaggccacttctttgttcagctcctcggtcttgctcaggaaccaggtctcagcgtctctgcggtt

SEQ ID NO: 604447 - DNA, 203 bp, Homo sapiens
gttggtgtagcccatgtactcctcaccccagcccatcttctcccgcttcttgcgctccttggcctcgctcttggccgtgccccgtgcgcgcttctcctcgggcgtctcgaaggccttcatcagctcctcctgctcgttccgctcctcccgcagtcgcagccgctcctgcaggtctgctgctggctcaggagcagccgcggtcc

SEQ ID NO: 604448 - DNA, 300 bp, Homo sapiens
cccccaaataaaacttttttttttatccatataaatatataaaacccaaaccagactggatatccccccactaatttttgatagtagttccctctactggattagggaatccagcataagggattttaaatttatctgtgatgtttcttgtcccttaaaccatatggcaaaaaatgttaatatttatttccttggaatggaggattatttttttgaaatggaggatatgtatgtgggggtttattttctttttttttcctatattaaattttgttttcaataaataaaattgctacctta

SEQ ID NO: 604449 - DNA, 496 bp, Homo sapiens
tcctttttagctgcagactcccaaatcttttttatggggggaaatggccctcttgggggtccaactgcacggattgttcattggcactgcttcccgagacctggggcttaataacatcgggcagctctggcgggctggaaaacggatcgatgcacagggcctcaaaggtgtcatttgcccggaaggcccgtgtactagtgtactgcttaatgaaacctattcacagtcaagatgggtatatttagaaaaagcctatggtccatgagaactgtgagataaatatcaaactactacccttacaggcttccaaaaaaattctatgagcctcaggaaagcataagccattgggggtttgtttcaggtaagctctacagcagaatctggaccagaaatactatttcacattatatattgaaaaaaaattcgggctgcaaattgcattcaacgtaacactttaaactgttccatatttgagggcagagtttatacatattaa

SEQ ID NO: 604450 - DNA, 181 bp, Homo sapiens
ctcagtctcaaaaaacaaaacaaaaaacctgttggtatagtacgaaagacacgtcttgcagttttctgttgcagagaattaattaggcaccaacctgttggattatacacattcacctttcaggattctttcttctctgttggaacccacactctcagacagtttgttggcacacacgatg

SEQ ID NO: 604451 - DNA, 524 bp, Homo sapiens
tttggttgttttgtttttttgacccgagcttttgactgcctttttgagacagggtccctaggttggagtgcactggtatgatctcagcttagtgaaacctctgcctcccaaggtcaagcgatcctcttggccttctgagtggctgggactacaggcatgtgccaccatgcccatggggtatttttgtatttttggtagagatggcatctcactatgctgccctggctaatcttgaattcccgagctcaaatgatcctcccaccttaccatgccaaagtgctaggattacaggcatgagccaccatgcctagcccatatgtttctaatacttgaagagggcatttgaaggccccagtggcgttcagtacagtttcagtgcttgtttatccccagagggagcgcaggagcttcaaaatagtgggatgtgttaggtgcattgggaacttgtttcgactggataaattttagaacttttaaaggacttgggttttaattttatggccctttggaagggtttattttgg

SEQ ID NO: 604452 - DNA, 270 bp, Homo sapiens
ttttttttttaagagacagggtctgtcacccaggctgaatgcactggtgtgaccttgactcactgcagcctaaaccccctgggctcaagtgatcctcccatttcagtctcctgtggtcccaactacttaggaggctggggtgggaggattgcgggaccccagggaagccgaggctgcagtgagccgtgatggcatcactgcactccagcctggatgacagaacgagactggatctcaaaatatagataaatttaaaacccaaccccccca

SEQ ID NO: 604453 - DNA, 137 bp, Homo sapiens
gatcatatgtgttgtgtgtgtgtgtggtgtgtgtcatgtgtaattgctgtgagtgcgtgtggtgacagtgtgtcactcgactgtggtgtgtgcacgcatgtgtgtacacgtgccggcatgtgcagtgtgcttctcta

SEQ ID NO: 604454 - DNA, 85 bp, Homo sapiens
tactttcattgtatataggtcttatttcataaacagatatcctgtatcaaataaaagtatttgttatatatttgaaaaaaaaaaa

SEQ ID NO: 604455 - DNA, 249 bp, Homo sapiens
  misc_feature (145)..(146): n is a, c, g, or t
cgtgacgtaggcacaatgcacgtttctcatagaaggcgatgaggggttctgtggcctgtaataggtctccagccgcttttgatggtctcctcattgtcgtccacacgcccgcgtggtctcttccaccgtttcaacgagccgctgnngtcactggtctgagggcctgcgtccaccatacagcagcagtgtgggctgtccaatccgtcgctcaaactcttctccttgctgcacctccgtggcggtcgctat

SEQ ID NO: 604456 - DNA, 199 bp, Homo sapiens
gtctgggtatctgtccagaagttctgttggtatcttgtggtgtctgcgagcgaggtgggctgtcacagtgagagctcttggagctactccgtccagactcatgctgtgcgtccagcagtattttttccatgtctccattataaatagaaaccgaggctggaacgctgcccccgttcccattattgctgaagtgcagttc

SEQ ID NO: 604457 - DNA, 397 bp, Homo sapiens
cgacggtagttcttagacctcaatggaaataaactagaaatcaataaccgaaagctgtaaaactcccaaatatttggagattaatcaacacactctgaaataatgcatgggtcaaagaagaaagctcaagataattttttttaattcaactaaatgaaaatgaaaatacaccttatcaaaatttgtccattgcaatgaaagcagtacttagaaggaaatttacaacattttttgcatatattagaaaagatgaaagggccaggcacggtggctcacgcctgtaatcccagcactttgggaggccaaggcggtaggatcatttgaggccaggaactcgagaccagcctggacaacatggtgaaaacccatctctactaaaaattcaaaaattagccgg

SEQ ID NO: 604458 - DNA, 155 bp, Homo sapiens
taaaaaaaattttttttggggggggaccggtcaaatttttttccttttttgggggggcctcctttttcccccggggtgggcccttttaaaaaagggcccctgggtttttccattttaaaattttttttttttaaaaaatttttaaaaagggccca

SEQ ID NO: 604459 - DNA, 112 bp, Homo sapiens
gcacacgccgaatgccacaccccgtggtgccaggtcattgtggacgaagttgttgcgcaacaacttcgtccattaagatttcgcatagtggtatggttgctcggcgtgtgca

SEQ ID NO: 604460 - DNA, 302 bp, Homo sapiens
  misc_feature (188)..(188): n is a, c, g, or t
tgggtcccttgtagcacaggagattggggttaagggcccctcccagggaagggacaccatcaggcctttggttgaggcagtagcatagaggatccatttctacctgcatttcccaaaggactagcaggaggcagccttaagaaaccggcagttcccaagccagggcctggctgttctttcattgtcantgccctttccccaacctttcctttaacccactagagattgcctgtgtcctgcctcttgccttttgtagaatgcagctttggccctcaataaatgcttcctgcatttttttgcca

SEQ ID NO: 604461 - DNA, 261 bp, Homo sapiens
catgatgggagcagttgatgccgggtctctgggcctgagagacacgccagtccgtgttgggcggggcttgcacgctgggaagtcactacactggaattacaaagtggaaatacggacccagatgaatcaccgcaccgtatgtcttgtcctgaactcaactgctcactacatattaggaaattaaactccgtcttacctgtatgtgcaacacctagattgtaggaataaggcaaagtcccctcgctggcgctcgtaggggta

SEQ ID NO: 604462 - DNA, 410 bp, Homo sapiens
tatccgtgtcggggttttctggatgattttcccatcgtgatcaaacaccagtcgagtcccaaccttcgccgatccgtggcagggagaaatggagacatcattaagcctccgaagagctcttcttctaccccacatccatagcctgaaacttcaatgagacccattccatagtccttaagctttagatcaacattagtggcaccagcatccagactgttttctactatcttcttcatccagtgcttagactcagtaccacctgcccagagcaaatctgatggactgacttccgatcaataggtttgatggccttagcaggttctgtacttcttaatattcctttgaaattccttatggcgcacaggtagcgtagaaaataactgctttacgctgactgtggtccctctggg

SEQ ID NO: 604463 - DNA, 971 bp, Homo sapiens
aagacgcggactccacgtcttgggacggcgcgctggctatgatgacgaagctgaaggagattgtggcgcactgagacgtatgacatagagcgggttgtggagcggtcctgcaagccggtcgatggactcatactccacgacacggaattctgatgaggcgctttctgtctccgccgaggaacttcctctgcgagagtaccacagacggcgtggttccacgtcgatgtcctgctatataagcacgagccccgagggtttccggggcgtggtctggccggggaaggtcgaggcgtggtgtggcacgcacatgagtggtcccatggtcgtggaatgcatgaacacaagtttgccagaagactgcaggccctaggtgaatggacgacaaccaccgcgtgaagatgaatgggttcacgggcatacggagaaagcatgaagccccaggcatgcacgtccgggaatggtagggcaggacaaaatggcggctggcccctgcgtcctggaggagcgcaagattggctgaatgtagagcaggggctggctggtgagccctaatcgaccaatgtggaccccttcagctcgacctgccctaaggagtaactttggtcgtggggattgaatttaaagtcgcagtgtgactccagatgaggacacaactctctgtggcagggccatattctcgtggggatgcccctttgatacggtggttgggcgcctgtggtgctccggagtatcgcttggctgatggagctcgcctcatgaccttctgtggagctggaatctgatcacgtggttgtgttccgcgactgggccagcgtgaggaacgaattgccttcggcaggcgttctccctttttggagcccgacaaaggcgttccatttgctggggctggggccacggggcaggaggcttgcttttccgggaagccggatgggcgggggccgggtctaaatggcggggaccggttctcgggg

SEQ ID NO: 604464 - DNA, 909 bp, Homo sapiens
  misc_feature (71)..(71): n is a, c, g, or t
  misc_feature (116)..(116): n is a, c, g, or t
  misc_feature (130)..(130): n is a, c, g, or t
  misc_feature (134)..(134): n is a, c, g, or t
  misc_feature (137)..(137): n is a, c, g, or t
  misc_feature (164)..(164): n is a, c, g, or t
  misc_feature (166)..(167): n is a, c, g, or t
  misc_feature (171)..(171): n is a, c, g, or t
  misc_feature (181)..(182): n is a, c, g, or t
  misc_feature (184)..(184): n is a, c, g, or t
  misc_feature (192)..(192): n is a, c, g, or t
  misc_feature (196)..(196): n is a, c, g, or t
  misc_feature (201)..(201): n is a, c, g, or t
  misc_feature (213)..(214): n is a, c, g, or t
  misc_feature (223)..(223): n is a, c, g, or t
  misc_feature (226)..(226): n is a, c, g, or t
  misc_feature (232)..(232): n is a, c, g, or t
  misc_feature (240)..(240): n is a, c, g, or t
  misc_feature (246)..(246): n is a, c, g, or t
  misc_feature (251)..(251): n is a, c, g, or t
  misc_feature (258)..(258): n is a, c, g, or t
  misc_feature (261)..(261): n is a, c, g, or t
  misc_feature (286)..(286): n is a, c, g, or t
  misc_feature (302)..(302): n is a, c, g, or t
  misc_feature (322)..(322): n is a, c, g, or t
  misc_feature (339)..(339): n is a, c, g, or t
  misc_feature (342)..(342): n is a, c, g, or t
  misc_feature (347)..(347): n is a, c, g, or t
  misc_feature (349)..(349): n is a, c, g, or t
  misc_feature (359)..(359): n is a, c, g, or t
  misc_feature (375)..(375): n is a, c, g, or t
  misc_feature (390)..(390): n is a, c, g, or t
  misc_feature (392)..(392): n is a, c, g, or t
  misc_feature (396)..(397): n is a, c, g, or t
ggttccgtcacttgagctcatccaggctgctgaagccatgaaggggaacagaatgggtagacccagaggancccacagtcattgctgagaatgagctcctgggagctgcagccgcnattgaggctgcagncaanaangctagagcagctgaagccccgggccanannccangggaggcagnntnagtccttngaantatgnaggagcagatanntagaagctngcnaagtcnattgcagnagccancagtncactggnaanaggctgcgtcggctgcccagagagnactagtggcccaaggnaaggtgggtgccattccagncaatgcactggacgatnggncagtngntcccagggcnctcatttctgctgccnggatggtggctgggnancaannaatctgtgtgaggcagccaatgcagctgtacaggccatgcagccaggagaagctcatctcatcagccaagcaggtagctggctccacagggccaggctccttggtggcctgcaaggtcacagggtgaccaggactcggaggcaatgaaacgacttcaggctgctggcaacgcagtgaagcgagcctcagataatctggtgaaagctaggtacagaaggctgcagccttgtgaagagcaggagaatgagacagatggtggtgaaagagaaagatggtagagggcattgcccagatcatcggcacataggaaggaaatgcgacgagaaggaacgaacaggtggaagaggccgcggaagcaaactgggcccagaatccgggcaggagccagtacaagtttctgacttcccagctgtcacgatgaaccactaaagaaagctcttcttattcaatgcagaaccgggcccagagactgtgcggtgcactacaaaagccttctgggctgagggggccaa

SEQ ID NO: 604465 - DNA, 340 bp, Homo sapiens
  misc_feature (22)..(22): n is a, c, g, or t
  misc_feature (83)..(83): n is a, c, g, or t
  misc_feature (93)..(93): n is a, c, g, or t
  misc_feature (122)..(122): n is a, c, g, or t
  misc_feature (184)..(184): n is a, c, g, or t
  misc_feature (300)..(300): n is a, c, g, or t
  misc_feature (307)..(307): n is a, c, g, or t
  misc_feature (310)..(310): n is a, c, g, or t
  misc_feature (314)..(314): n is a, c, g, or t
cgcgtgcgtctgtgccctctgngcgggctctcctgggtccttctgccatcatgccgcatgcttcatcgctaaacaccaacgcngccccgcgcnctccgctgcccggacgggttcctctccgnagctcacccagcagctggcgcaggccaccggcaagcccccccagtacatcgcggtgcacgtngtcccggaccagctcatggccttcggcggctccagcgagccgtgcgcgctctgcagcctgcacagcatcggcaagatcggcggcgcgcagaaccgctcctacagcaagctgctgtncggcctnctngcangcgcctccgattcagcccggacaggg

SEQ ID NO: 604466 - DNA, 442 bp, Homo sapiens
  misc_feature (101)..(101): n is a, c, g, or t
  misc_feature (308)..(308): n is a, c, g, or t
cgtgggaggtgcctaaaaccacaacgctaatagttatgttaatggcattatagtgagctgggtcaaattaaggacatttaggttgatttgttgcacctgtnctaagttgagaccgtccctgctgagcaacatcctggcataagggcaagttcttaaccacatttcttcctgttagctgcagaggcggggtaggtgctgtcctgcagttgttcctgtgaacattgttcctttctgtcccttctccctagaccctccatctctatctgcctatccagcccctaactcctctctcagtgctttccctccangtacatacccatattttaattttcaagtgtgcaattttcacatttataattcgttaagaaagaatgcaagggaatgattcagatagtcatcaacacactgcagctgagtccaagactctggctacctttcttcc

SEQ ID NO: 604467 - DNA, 283 bp, Homo sapiens
ggaacggggtgtctggctacgctgaccctggtcttaggcgaggggaagatttctccctggtagagtcagtgtcctatcgctgtgctgccctgtctgcccagcccagggcgatgcctggaagtctactgactttgcagggagtcagcctcggccgcaacccctactggttttccaatgtttagactggagggcaaaattttactacgtactcatctttatggagaccagggctgccctgctggcaacctgccttctaatgtaaagttgccacgggcgtttggct

SEQ ID NO: 604468 - DNA, 281 bp, Homo sapiens
accagttggtcgtggtcatggtgtgttacttcatcctatctatcattgactccatggtacaaagttatgccagacgattcctgcagcggttgaactcagaggagaaaactaaataagtagaggaagttataaccctgcagcaaattggagtggatgggtactgccttaaattgggaggactccaagccgggaaggataattccctttgccaacctgtatcaatttgttacaacttttttcctgaaagccgtttgtccatctgagccgtttgtccgttctga

SEQ ID NO: 604469 - DNA, 1712 bp, Homo sapiens
aaagagccctcctgggtaggaaattgccccggtggaatccctcaccagagaagcaggtagcaggccctcgcagaggattaacacagtggctgaacaccaggaaggaactggcacttggagtccagacatctaaaatttggtatcgtgccttggatccaccacagtcagctgaaattatcagcccaggaccagtggaccaaccagcaggacatagaccatctgacccgaatgatcctgcaatgagaccacattgccagtggagatgacaacagcactgctctggtcactctggaagatgaccagtctatgcatggtggaagcttgagaaaatagcaagccctgctctagtcacaccaagaactgactagtctatgcacggccgaagcttgaagaatcgtcatcagatgaataaatgtggccagaaatcttaggcccagtaatcttctttgtattattcattatattgctcttgtgctattgtttaaccaaccccctaaatgcctttactgttcatgctggctgtaagaatgctactgtttgctttgtttgtgctgatccccatatctatgctagaaggaggacccgtattaggatgccgtcactgcatgcacactacatggataagaaacacagtaattgctcacgcctgtaatcccagcactttgggaggccgaggcgggcggatcacgaggtcaggagatcgagaccatcccggctaaaacggtgaaaccccgtctctactaaaaatacaaaaaattagccgggcgtagtggcgggcgcctgtagtcccagctacttgggaggctgaggcaggagaatggcgtgaacccggaaggcggagcttgcagtgagccgagatcgtgccactgtactccagcctgggcgacagagcgagactccgtctcaaaaaaaaaaaaaaaaaagaaacacagtaattaagactttattataccatacatactataggtacctgggcacaagataggtcagggggtactgtacccctatttacatgcttaatcacatcataaggttgcaggtggtacttgaaatcatcactaatgagacagcaaatatgttagacttgctggcccagcaagccacagaaataaggatcaccatctattagaatagactggcttcagactgcctcctagcccaaaaagaaggattatgtggaaagttgagcctgatgaattgctgcctagaaattaatgataacaggaaagccatcatagaaatagctgccaggatgtggaagatagctcatgtcccagttcagacctggaacccagatggtctccagattccctcttaggaggttggttttcatcctttggtggttttaaaacagtaggggtagtgttggctatattaaaaggttgcttaatgttcccttgcctcttaggcctcctcatcagaaacatccaatcaatcacagaatccatcgttaacagaaccacctccactccactgatggctctaaacaagtatcaacccgtaccaaacagagaagaactgacttgtaatgaggaattaaatgatagtgatgccttctattgaattccatttacaggaggcatcaaaggggaagatgagatgggaaagaaagaaagaaagacagaaagaaagaaagaaagaaagaaagaaagaaagaaagaaagaaagaaagaaagaaagaaagaaagaaagaaagagaaagaaagaaaaaa

SEQ ID NO: 604470 - DNA, 115 bp, Homo sapiens
atcgaaaagttgggagtgggggagtcttttctccgcttcattcctaccctttccaaattgttctctcctttccctgtatctcccatggatcactgataaatatttattatataat

SEQ ID NO: 604471 - DNA, 193 bp, Homo sapiens
tatgtagacagttcttcattttcatcattgaatcatgttacttttgtaattcaagtaagcggctgggttaattcatgcatgtatgcccttttaatcaaactataagggtagagttcatatttgaatgcaagtagcctattcattatacaatttgagtttgtcttggttatacctttgccatgcataacctcag

SEQ ID NO: 604472 - DNA, 443 bp, Homo sapiens
aaagagccctcctgggtaggaaattgccccggtggaatccctcaccagagaagcaggtagcaggccctcgcagaggattaacacagtggctgaacaccaggaaggaactggcacttggagtccagacatctaaaatttggcctcctcatcagaaacatccaatcaatcacagaatccatcgttaacagaaccacctccactccactgatggctctaaacaagtatcaacccgtaccaaacagagaagaactgacttgtaatgaggaattaaatgatagtgatgccttctattgaattccatttacaggaggcatcaaaggggaagatgagatgggaaagaaagaaagaaagacagaaagaaagaaagaaagaaagaaagaaagaaagaaagaaagaaagaaagaaagaaagaaagaaagaaagaaagagaaagaaagaaaaaa

SEQ ID NO: 604473 - DNA, 2234 bp, Homo sapiens
aaagagccctcctgggtaggaaattgccccggtggaatccctcaccagagaagcaggtagcaggccctcgcagaggattaacacagtggctgaacaccaggaaggaactggcacttggagtccagacatctaaaatttggtatcgtgccttggatccaccacagtcagctgaaattatcagcccaggaccagtggaccaaccagcaggacatagaccatctgacccgaatgatcctgcaatgagaccacattgccagtggagatgacaacagcactgctctggtcactctggaagatgaccagtctatgcatggtggaagcttgagaaaatagcaagccctgctctagtcacaccaagaactgactagtctatgcacggccgaagcttgaagaatcgtcatcagatgaataaatgtggccagaaatcttaggcccagtaatcttctttgtattattcattatattgctcttgtgctattgtttaaccaaccccctaaatgcctttactgttcatgctggctgtaagaatgctactgtttgctttgtttgtgctgatccccatatctatgctagaaggaggacccgtattaggatgccgtcactgcatgcacactacatggataagaaacacagtaattgctcacgcctgtaatcccagcactttgggaggccgaggcgggcggatcacgaggtcaggagatcgagaccatcccggctaaaacggtgaaaccccgtctctactaaaaatacaaaaaattagccgggcgtagtggcgggcgcctgtagtcccagctacttgggaggctgaggcaggagaatggcgtgaacccggaaggcggagcttgcagtgagccgagatcgtgccactgtactccagcctgggcgacagagcgagactccgtctcaaaaaaaaaaaaaaaaaagaaacacagtaattaagactttattataccatacatactataggtacctgggcacaagataggtcagggggtactgtacccctatttacatgcttaatcacatcataaggttgcaggtggtacttgaaatcatcactaatgagacagcaaatatgttagacttgctggcccagcaagccacagaaataaggatcaccatctattagaatagactggcttcagactgcctcctagcccaaaaagaaggattatgtggaaagttgagcctgatgaattgctgcctagaaattaatgataacaggaaagccatcatagaaatagctgccaggatgtggaagatagctcatgtcccagttcagacctggaacccagatggtctccagattccctcttaggaggttggttttcatcctttggtggttttaaaacagtaggggtagtgttggctatattaaaaggttgcttaatgttcccttgcctcttaggcctcctcatcagaaacatccaatcaatcacagaatccatcgttaacagaaccacctccactccactgatggctctaaacaagtatcaacccgtaccacaaaacaaaaaaaaaaaaaaaaaaaaaaaaacgtgtgttgcgcccgcccccgggcccccgaagaaactttcagaacaccatgcgtcgagggccgccgcggcgccccagcgggtaacggcgaaccggggccacacgaccggtgtctcccccagggaacacccgcgggccaccaaacacaggcgctcggggcattctccaccaactatatcaaaacgcccccggggcgtacacacgacgagccgttctgcgtaccacaccacccccagcagtgcgacatctctcgagggtaccatataacggggccactcatacatcacaccacgcgcctcccaccgacgaagccccccgaattatacaaactataaccgcccctcgacaagcggtgtaacacactagcaccacaccacaccacacacccaacccacctacacacaacactacccagacgcaagacaccacacacacgcaacaccccacagcacacaccgcgcaaggacactaaagacacacaccacccaaaacaccaacgccacccctccgcagacacgcatacaacaacgaacgagcacacggccacagcgacctacaactagacgccaagcgcagagcacacccaagcacgcgcaacccgaagactcaggacacacgccctcagacgacagaccaccaaccgccagcacacccctgaacaacacacttcagccgccaagagcccgccgaccggcacc

SEQ ID NO: 604474 - DNA, 196 bp, Homo sapiens
ctggcgcactccgttcctttgcggacatctcctttcctgtcagttcctaccattgccttgtttggttgtgcttgtcctcggtttttcgttcggttttgccagtaattggccttcgtaaacatatggatttgaacagaatattttgacttttaaattcatttgtcctctttttcatgcagagtctggtccgagcgga

SEQ ID NO: 604475 - DNA, 727 bp, Homo sapiens
caggagctgggtgaccgatggcttcatctgcctgaaagactactggagcaccgatgaggacaagtcctctgagatctggaatttggaccctgatgtcataccaacttcatccgtggttgcctgagacctcaataccccaagtgcatctgtctatacatcctgtcagctccttgagaactgcaatatccagagctgcccctgtaggtggcttaaaagggacagcattctcagagctctcctacaccacctctagcctggcccagctccaagcatgctggagtcccaatatagatggacaagaagctagctttttataataaaagtacccacctcgatcctgtaagaaacacaacggcagcagcagcaattgaacaatcttgagcatagaagtcattgtaaacgaagttaagatcacccgcgtggggatcccctgtccaataagctcctaatgaagggaatatagaataagttggggccgaataaaaaaaaaaaaaactctagaaaagcgcccggtgtccaaatcttactatagtgagacggattacactttactgggcggggttttaaaacaaaaagactgggaaaacactccctttacaccacttaatcagcttgaaggacatatgcctttagtcagcctgtataatatgcgaaaagaccgacaaatattgcttacaggtagtgcttaacaatagggccagagaagaggctctatatttcgttaccg

SEQ ID NO: 604476 - DNA, 105 bp, Homo sapiens
gtaaggcacatattgaagggtccctgctggtcctggtaccagcacaccaggccctcttcccggctgcacgtgcaccaccttggcccatggtgttcgcatgctcac

SEQ ID NO: 604477 - DNA, 948 bp, Homo sapiens
ggtattatattgaccgctcactcgtgtcatacttcaaagatcagagtagattatttctcccagcatgttctacttccgaggctagtgagacgtatagggtcgcggtttccttacaccaagcagcaatttccgttaggcacggttgagcagtgacagcgacggtgccccggactccgaacttcgacgtgatagtcattggtaggaggacatgccgggactagagtgcagccaccgccgccgctacggtgcggctactcggactactgctcctcactcaccgtgtggacacgatcggtcagatgtcatgtaatccttcctttggtaggcatcggaaagggacatatataatgagggaagtagatgccttggataggcctagtgttactcgcatctgtgaccagtctggtgtacattataaagtattaacaccggcgtaagggaccagctagtgtaggggtctgagcagctcagattgctaggaaactctataacacagaacatgcagaaagacatcttgaatacaccacatgcttactgcttcaggacgtgagctgtcgacagatcttaattctatacagaaccagagcctgaacacactggcgacatgccgtgtcacgtggcgcgtcgtacatggctgcatggaaagccacagtactatgcagacgagtgtgctactgactactgggaccatttctagagacagcactgcaccgatacctcggccatggccgaacgcctccacgccgcgaacgttcacgcgatcaacccctttgtaatacggcaatgcgggatcagcaaagaggtgagacaatgttactggctaagcatgtaagcgaaatgtgtatgccagcacgataccctcctccccgaagactagccaacataactctacataccttagcagcgattcacacaccagcccatcatccgggacaaacccgattaaca

SEQ ID NO: 604478 - DNA, 264 bp, Homo sapiens
aaagctgagatagaggaggagaagtctcttgaacgcgggagggtagatagcggtgagccagatcgtgccattatactccagcctgggcaacaaaagtgaaactctgtctcaaaaaaaaaaagaagaaaggaaagcagatgcaattatacaggctagtaaaagaagttttaactaagcttttttctggtggtgcattttttctggtctattggtttaggcccaattaaaatggtcaaaattgggtggtagccatagcaaagggga

SEQ ID NO: 604479 - DNA, 240 bp, Homo sapiens
tagaggatccggctatacataatcgttgagcgatggccacccacgcgggacacccggatcactatacgacttcgtctctgctcgacatgtccgtctcgcaagtcaaagcggggctttattgccatttgcacgcaaacgagcgaatttccgaaccgcttctagagccccaacctatcgttacgcccttcccgtttaccgcttttgcgaagggcgaaccggcgcacaagttcaaaacttggc

SEQ ID NO: 604480 - DNA, 142 bp, Homo sapiens
taaggatcctattctgcaccacagcaattgcacaataccaacttacagcctgaaagctgtcaggcatctgaagaggcatttttccccctaatgcgaagaaaactggtgtttccaatcaggggtcctcttgctattttttttg

SEQ ID NO: 604481 - DNA, 605 bp, Homo sapiens
gatctgaggatccccagagacgcagagaacccaggatgatagactgaaatagatagatagatgatagaagatagatagatagatgatagatgatagatagatgatagatagatagatagatagatgatagatactgatagatagatagatgatagatagatagatggtagatgatagatagatcgatgatagatagatgatagacagatgatagatagatgatcagcatagcatgcatagcatcagcatcagcatgcatcagcatgcatcagcatagcatcagcatcagcatgcatagcatgcatcgccatcagcatagcatgcatcagcatgcatagcatcgcatgccatagcatcagcatagcatgcatagcatgccattgcatcagcatagcatagcatagcatcgcatggcaggcccttcaaaggccctccattgagcaggggcaggcagctgcagcaaaaggctgacaggcggtgagacgagccacgccaggaaggaggtccctgggggaaaacagcatattccaagcagagaaaacagtgaacgagacgggtcctggggcagcatagggccccatggcccatggtaagacttctctgca

SEQ ID NO: 604482 - DNA, 238 bp, Homo sapiens
cagatcgtctgttagattctctatgccctgcacagagcaaagctctctaagtgttggatggatggcggacagacaggcatacaaatgaggaaacaaacccaacctcattcccagtaatctctacctccgtggggcccccagaaggacatctcgttcactcatgttcgtgtgacaacctcttcagaggttttgcaggcatgcaccctctttccggtggatcctactagcagtcgacctg

SEQ ID NO: 604483 - DNA, 191 bp, Homo sapiens
ctcggcgtatgacgggggcagcgcaagtgcacttcaaagttcgagaaggatgggttgcctgtctttggaatctacagcgccaggaagccgtcgaccgcggcgcttgacgtaatcgggacgacctcaactcggattacgtcaccctcgcgttcatcgagtcgctcggcttagccgacgtcgcacaaacccaa

SEQ ID NO: 604484 - DNA, 153 bp, Homo sapiens
atcccgggtcgacgcacgcgtgcgcagattttatgttggttttttgctgtgaagtgctgcgctctaataactgccttaacaactgtagatgtctcggataaaagtcctgcattttccattggttttcataatgggtgtttatatgaaactact

SEQ ID NO: 604485 - DNA, 108 bp, Homo sapiens
ccgatgttgaggatccgtgtaagaggactgggttacaccttcatagacccaccatatgggataagtaacttgtggaaggccttaaacctccaaaggtggtcccgggtt

SEQ ID NO: 604486 - DNA, 155 bp, Homo sapiens
tcaacgctttatacttcctcaaaataaaaaaaatggataagcagaagtcttcctagttttcttgattttaaaccttaacccagggttatttggcttctttcaagattggtggtggtggagggccacattggcagtacggtggtatgggagggggc

SEQ ID NO: 604487 - DNA, 914 bp, Homo sapiens
cttcgatgtctgtagcagtcgctcgcttggattgcgttaccgcccgtcccggcatttgtgatagtctgtccgcgcccctcttggtcctcgtcaaggcccctgtttcttgatgtgtattcactctttgtgcggttgggtcgaccacattcttgccgccggggaacaccccaatttgtgggtgtgggacatcggcccgccctatattggtcacccacctctgtgcgttgtttggctccgcaggttgtcgtgtcaccgccgagtgtgttgcgcgccagcgtcgcacattttcctcggccgggtgcccccctggcctgctcatactgggtggggtgtcccccccgcgtctgttttctgcgattgcccttattgtgtgtaaaaaacttcctgccaacggggcgcctcttttattccactcctcggcgtgcgtccagcgactgtttccttactgtcggcgccactgttgggcccccccccgtgcattcggcgcgcccctctttttgggaggccgcctccatttagtgtgaagatcacccagtgatcgctcgtccgacccccgtggtgggcggccacttcgccttgcacgggactcacgcactcgttccgtctgcaggctcttgagcttgtggagctcccccctggtctttctcacccccgcgctcgtaaccactcgggcgctgctggcccccgctgcgccgccccccgctggttgtggactattaggaggctctccgccctcgcacgaagcagttaacaggtgtgcccgcccttctctgggcctcgaatgcgttccgtccccttcctcggggtgtccggtagactgctgcacatcccgcgatccgtggtgtcttccccccatcatggagcgtagtcttgcttcccccctccccccttcccccccccaggccaaaataaca

SEQ ID NO: 604488 - DNA, 1695 bp, Homo sapiens
gaggcattgaggcagccagcgcagggtcttctgctgacgggggcacggcggacgcttgacggacacacccgccagactaacgtttttttctgcttttgacaacgactacgacgaccttacactaccacaacctacctttacacacacacaactactacgtgccactacggattacctacacggactcctgggcttacgacgtctacacggtcttcttacaccgtacactttttacactaccgctatacagactttttacacgacgacaacactacttgacacgacctttacgacacgaacgtacggcacttgacgtgacaccggacaacactgactaacacacgggtattctacaacaacacttgaaccgggagggtcgaagacttagacacggcttttccttcacctgggacgtacacaacaaaacttgctacctttaacaacacagacacaccttgagcggacgacaaccgggaccctacacagaggagcccccgcggacaccgtgagacactacacccacaccctaacggacacggggtgacaaacgtgcgcttatattattacggaacgtttacccaacacgtgacatcggggtgacccttttacaccacacaccgggcttgtaaccaacgggtatttagcggtttatgaacccaaacggttctaggtaacggggatggacctctacacaagacttacacgtattaggagcgcgggggcgacttcagtgtatataacgaaaacagaacgactgtgacacacgcgcgaaaaggggtggacttctacagacaagcaccacgttggaaacaacttcccccattggaagtgccaagagggaacgcacattgtggcgagtcccatttatataacagcgccctatgagttttacacacgggcgattttgataaacttacagaacgggccatgcaactgacaacacagttggcacagatgcactttgcaaatcgttggggcaaagttgggggtcagggcgatttggcaagcacgacaactttgggggagaacacagacatacacgcaaccaggctgtcacgggcacaggagtggcggacacacacccctgaggcacagagacacggacaaacgtatccccggggtcaacacgtgggcgcacaacgccacacaaggcacattctcccgacaggcacacgcacatacagagggacacaaagctcaggccacgcacatcaccagaacacacggctacctgaagtcggcaacggacacaacacagagagattacaagattcacaccgcccagcaagcacacccaccaccagtcagaacaacatgaccgacgacacgacagaacaccagcgcagacacggacgccgctgacggagcaacgagacagcagacaaatgaaatgtaacacaacaccacgccacactaattagagcccgacatccggaacccgcacacacagcacgacacaaggcacacaccagacagggcgcacacagcgagaagtaccagaacgagaagcagaaaacacgaagacaaaacaaactaactaggcgaggaccaacactaaacacacacaataaaagacagccagcggcaacgaaccacacgacgcagagtcgagaccacaagcaacccaccgcgtaccatgtacggagcagcacacagtgagaaactaacacaacgagatcgagagacaagaacgga

SEQ ID NO: 604489 - DNA, 570 bp, Homo sapiens
  misc_feature (569)..(569): n is a, c, g, or t
gagtccttcgagtctcccttcagcatttccggtgtggagtctggagacgacgtgcagaaatggcacctcgaaaggggaaggaaaagaaggaagaacaggtcatcagcctcggacctcaggtggctgaaggagagaatgtatttggtgtctgccatatctttgcatccttcaatgacacttttgtccatgtcactgatctttctggcaaggaaaccatctgccgtgtgactggtgggatgaaggtaaaggcagagcgagatgaatcctcaccatatgctgctatgttggctgcccaggatgtggcccagaggtgcaaggagctggggtatcaccgcccctacacatcaaactccgggccacaggaggaaataggaccaagacccctggacctggggcccagtcggccctcagagcccttgcccgctcgggtatgaagatcgggcggattgaggatgtcacccccatccccctctgacagcactcgcaggaaggggggtcgccgtggtcgccgtctgtgaacaagattcctcaaaatattttctgttaataaattgccttcatgtaaactnt

SEQ ID NO: 604490 - DNA, 1018 bp, Homo sapiens
cgtgggtggtgtcatgcttgtatcccagatgtttgtaaacaacgaatctcgagtggtgattcactgagaatggaggatgatcgttgacgtcctagcttaatttgcaagaatggcctgatataatcatgagactccctgatttgagctgcgggactgctcgagttcggatgcctgtaatacggactcatttggggccagggttcaaaggattcaagacactgagtgataaaggcctgttgagcaggtacctggacaagatgaggccattactcgtgctatgtttgccaccccagagatgcacgagaagattaagtgactccggcgtaggaactgaaatgcctttgtaggataatatatggggatgagcaataaggcacaaccaaagcatggtgtctaggaaaaggggtgaaagtgcgaaagggtggatgtgaggatagattttcctgcatgtgagataatagggagtagtaaaggttacagtgggactgtgagcagtgagtccatcaggagtgtaatagactggggctataaggattgaactaggaatttgtttaacgaggtagtttgaatgaactgatttgctacataggtatgagtgaaaccttgatgcagagaatattattgcatgtggcggggatatgctgaaatatgcctagtatggtggtgaagtaagacttacaagtgctgtttgtaggcagatgtcttgggtgtgaaggtgaaaagtgtattgtgtctgaccataggagatgctaggggagtgagcatactgcaggattggtcatgtaaacgcatggactgttttcagaagaatacacgtggaggaaagacaagcctaggactttattcctttgttaaagtgcagttgagcggcgggatcacaggacagtgctgggggtgcaaggtatgagaattggaagcaatattgtgggtagaaaatgaacgagagggacaagacgggtgcatgaataaaatagagggaaaggggatattgaaaagggaaaaaaaaagtaaaatcagg

SEQ ID NO: 604491 - DNA, 88 bp, Homo sapiens
tacagcgcctccgaatatagtaatcttgaccagcaatgacaagaaaaaagaggagcacctttacaagcagttgatagctctgttttgg

SEQ ID NO: 604492 - DNA, 316 bp, Homo sapiens
cagttccaatctcattcccgtcaccttcagccggctcagtcccagagctgcatttaccggcgtaatgccgaaatagatgccggcggcgtatgcgcccatggcgttcatcacattatgccggccgagaacgggaatacagaaagaacgatcaataccgtcgatagtgaaatatgtgccttcttctgcctgctttatttctttcaagcggagatcattgtccgcaccttcgccgtatgtcgttgtccggcaagtgtacgccttctcgcgcagcagcggctcatccccgaaataaaacagcactccgtcttccgtagac

SEQ ID NO: 604493 - DNA, 672 bp, Homo sapiens
  misc_feature (569)..(569): n is a, c, g, or t
  misc_feature (580)..(580): n is a, c, g, or t
  misc_feature (599)..(599): n is a, c, g, or t
  misc_feature (607)..(607): n is a, c, g, or t
  misc_feature (666)..(666): n is a, c, g, or t
gagtccttcgagtctcccttcagcatttccggtgtggagtctggagacgacgtgcagaaatggcacctcgaaaggggaaggaaaagaaggaagaacaggtcatcagcctcggacctcaggtggctgaaggagagaatgtatttggtgtctgccatatctttgcatccttcaatgacacttttgtccatgtcactgatctttctggcaaggaaaccatctgccgtgtgactggtgggatgaaggtaaaggcagagcgagatgaatcctcaccatatgctgctatgttggctgcccaggatgtggcccagaggtgcaaggagctggggtatcaccgcccctacacatcaaactccgggccacaggaggaaataggaccaagacccctggacctggggcccagtcggccctcagagcccttgcccgctcgggtatgaagatcgggcggattgaggatgtcacccccatccccctctgacagcactcgcaggaaggggggtcgccgtggtcgccgtctgtgaacaagattcctcaaaatattttctgttaataaattgccttcatgtaaactntttcaactccngccttctctccttcatcanggggtacncagggatttgatttcttcctcctattttgcttctttggagaaaagagcctgaagagagnagagat

SEQ ID NO: 604494 - DNA, 370 bp, Homo sapiens
gaaatctagacagtgatcttactggacattttctggtacacgtattcactctagcttattagaatactccctaaatgcagtagattacacaacaaaaatccaatctaccacgtggtacagtattatgtacgaatggtgcacagaaatccgaatttaccacgtacgattggtgtgctaccaagttcacacaattaattcgatatttttaatcatattcaaccactcacatttgggctatgttaagtcatagctcaacttggacccttactgctctgcagcaatacaacctgccggtggagtacaacctgccggtggagtacaacctgccggatgaaatacaacctgccggtgaagtacaccctgccgatgg

SEQ ID NO: 604495 - DNA, 682 bp, Homo sapiens
  misc_feature (598)..(598): n is a, c, g, or t
gagtccttcgagtctcccttcagcatttccggtgtggagtctggagacgacgtgcagaaatggcacctcgaaaggggaaggaaaagaaggaagaacaggtcatcagcctcggacctcaggtggctgaaggagagaatgtatttggtgtctgccatatctttgcatccttcaatgacacttttgtccatgtcactgatctttctggcaaggaaaccatctgccgtgtgactggtgggatgaaggtaaaggcagagcgagatgaatcctcaccatatgctgctatgttggctgcccaggatgtggcccagaggtgcaaggagctggggtatcaccgcccctacacatcaaactccgggccacaggaggaaataggaccaagacccctggacctggggcccagtcggccctcaagaagcccaccttttgtggcactctggccttcggagcgattaattgaaaagtatcagggtcgtgattgaggatgtcacccccatccccctctgacagcactcgcaggaaggggggtcgccgtggtcgccgtctgtgaacaagattcctcaaaatattttctgttaataaattgccttcatgtaaactntaaaggatagatagtatattaacaataaaattcgaggggaatttgtgcggcgggggatataaaggcggtgaggatattggcctt

SEQ ID NO: 604496 - DNA, 389 bp, Homo sapiens
ctggacaccaagctcagagccctgggtctggacaccaagctcagagccccgggtctggacaccaagctcagagccctgggtctggacaccaagctcagagtcctctgcaactggatacaggacttcctgacgggcagaacacaggctgcgagcattggaaaccgcacctcctccacactgattcttaacacaggggccccccagggatgtgtcctcagtcctctgctgtactctctgttcacccacaactgagtggctttgcaggacacctactcagccaaaccaaaggaattgattgttgacttcagaaagcagaggaggaaacattcccgaatcaacttgacgtcgacgcggccgcgagtttagtagtagtagtagtaggcggccgc

SEQ ID NO: 604497 - DNA, 163 bp, Homo sapiens
  misc_feature (162)..(162): n is a, c, g, or t
attgtagtggcatcgtcgtctatgaactctgaagaagtcttggtattcagtcttagacactgtggatagattgtcttggaaatcacattctccaataagcgccgtctgtgaacaagattcctcaaaatattttctgttaataaattgccttcatgtaaactnt

SEQ ID NO: 604498 - DNA, 1231 bp, Homo sapiens
  misc_feature (569)..(569): n is a, c, g, or t
gagtccttcgagtctcccttcagcatttccggtgtggagtctggagacgacgtgcagaaatggcacctcgaaaggggaaggaaaagaaggaagaacaggtcatcagcctcggacctcaggtggctgaaggagagaatgtatttggtgtctgccatatctttgcatccttcaatgacacttttgtccatgtcactgatctttctggcaaggaaaccatctgccgtgtgactggtgggatgaaggtaaaggcagagcgagatgaatcctcaccatatgctgctatgttggctgcccaggatgtggcccagaggtgcaaggagctggggtatcaccgcccctacacatcaaactccgggccacaggaggaaataggaccaagacccctggacctggggcccagtcggccctcagagcccttgcccgctcgggtatgaagatcgggcggattgaggatgtcacccccatccccctctgacagcactcgcaggaaggggggtcgccgtggtcgccgtctgtgaacaagattcctcaaaatattttctgttaataaattgccttcatgtaaactntaaaaaaaaaaaaaaaaaaaaaaaaaaaaaaaaaaaaaaaaaaaaaaaaaaaaaaaaaaaaaaaaaaaaaaaaaaaaaaaaaaaaaaaaaaaaaaaaaaaaaaaaaaaaaaaaaaaaaaaaaaaaaaaaaatataaaaaaaaaataaaaaaaatttattccgacataaacccattgatattaaaaaaggacaaacttatttgccataactaaaacataaggctaaatttaaaaaatgaatgataaagaaggtcacataaatgaagagaatgagtattttaaaacgtatgcttagaaaaaaccttgaatctaacaagattaatcgtcatatgtataacaccctttacctgaaggtgaaaaaaaatgtaatgacacccaagcatatacttataaaacatatacacaaccttgaaggcaaaaaggaaattaagaaagctaatatttgacaaaaattaggccaaaaattttaaaacaaggtattattttataacaatgagcagaaatttaaaaaaacctttataagataaaaatattccatcaaggagtaagagatctttcaattttagcacacaattccctttttaaaaatggggtttttaatacataaaagtagcaatataccttaataggccttaatcccattattggaacccttcgtttttg

SEQ ID NO: 604499 - DNA, 122 bp, Homo sapiens
cagttatgtggtggatgttggtatgccccagcctactggggaggctgaggctgaggaggaggattgcttgggcctagtagtttgaggatacagtgagctatgatcatgctagggcattccag

SEQ ID NO: 604500 - DNA, 138 bp, Homo sapiens
gtggaagtatgtaggagttgacgattagtcctgcgatatcggtgtactcgtagtgtacagtaccattggtggactgagtgggagtggggggccttgctccacccacatcccctacgtgtgacttgctgaacaggcgta

SEQ ID NO: 604501 - DNA, 393 bp, Homo sapiens
ccctttgactcagtacacacacggaatcatcctattcatctccaaaccacagaacgatgtgtcagccctgtagctaactggatgcgttgcggaaacggaaggaaaagaaggtttttaagatgagggctgattaatgtaggatgatgccgacatggtcttgaaatctttaaacagggcggaagacttagaatcatgcagtgcagctacaccgcgtacaacattatacacatacctggttatagaggccagtgagcttcatccccaggtgggtagttgacaaaattcctccagcagtgataatactctgatgctctcataatctgaatagttactccactgttaacaaggtccctgagaccttgccgattgtgtcgatccatgtgccaaaaaagc

SEQ ID NO: 604502 - DNA, 903 bp, Homo sapiens
  misc_feature (447)..(447): n is a, c, g, or t
gcagcagcctcccacatagttacccaccgccaagagtggatcctacagccaagctccaagatcaattatatgccaacagagcaggcagctacgggcagcagagttacattccgacaggaccaccccagtatgcatggagctgtatactgggcacggagtctggaggattttccggaaccaggtagagaaccggaggcatgagttggacctctgataaccggggcaggggaatgagggggatcttgaatcggtggaggacatgaaggcacgatgcgttgggcgcgtgcgaggaaggaccgctgcgtcggaactcgaggcacgccgtcgtgcgatggatgccgcagcgctgggcttcaaactacacgtcctggtggggaaccccaatggcatagagaggatccaagatctaatgatcttaatgacccgaaccgtgtaagaatgccaagnactgtgaaagaagcatcctgagcaaatcaggtaggcaaatctatatgggtacacaagggaattgaacactgaacacgatgatgaacgtacgtaagaagtgaaatctggggcgaaggaagcatgtgctcttaacacgccccccgatggtccgtgcgcgatttcgttataacacggcattggcaaactcacacgcatggcaaacgtgcgtgttgctatcacccgcttattcggaattcccaacccattcttttactcattgcgaaccaatatgggcacaacactcattgcgccaattatgtgcgcacaaacaaggggaccgtaattgacccgatgcaaggttgtgtccccttacttgaatacgtaagcccctacccgcaagccttggcccaaaggggtccttggcccggctgggacattgggttttatggcactgggggacaaggaactttctttcaa

SEQ ID NO: 604503 - DNA, 127 bp, Homo sapiens
ggctcggtacccctacaaacaactaacctgccactaatagcttatgtcatctctcttattaatcatcatcctagccctaagtctggcctatgaattactaccatcacgaaaagaccacgcaaacgcc

SEQ ID NO: 604504 - DNA, 212 bp, Homo sapiens
ccatatggaggtggtaagtttcctgagtttttttcttttatctaatggcataggaagtttgtcttctagctaagctctgagtgaggcaaaaaaaaaaaaaaagtttgtgtagataagttttttggtttggataattttttaatcggctctgccttcatgtagatacagagttcaaatttacattactcatgtggtccaaaaacctccaatct

SEQ ID NO: 604505 - DNA, 264 bp, Homo sapiens
atcctggcatgatgtgaagactaaaatggcaaaccctggcaaataagaaattcatcaagtggaaaagagaaggcatatgtatacttctttataacatgaatgaagattactctgaaagactattgctggagaactattagaaacacaatcaaagacctcaatggctgttagtcttgaagatgtggaaaattactgcaaaacatgaactcgtttattacgtgtccactattatatattagaagactgtgtataataaacactact

SEQ ID NO: 604506 - DNA, 234 bp, Homo sapiens
gcagtgctgctgggtcgactctaacggactcccggcaccactgtgctggcattatagtcatcattactgaagaatatacaaatgaacaaagaaatgttaagagcgcagtctctctaagccgagcaactttgtaggtgtggtttgcaaagactccatgttcgtatgcacttcgtttttttgcctgatatgattccggtatcttctcatgtcatcgtggatcaaagcattggctgt

SEQ ID NO: 604507 - DNA, 511 bp, Homo sapiens
aggcttttcatgggaatggtttttaaagggcccacaaaaaagtttttgggggcggggtttagccacaaccctccaagggaaaacccagtggaggttccttttaaaggagatgtggacccacccccccaacacctcctaggagggatcccctttacgggtccctttttgggagcagttaagctcaaaaagttgggcaggggaactcccttcatccgggtccccccccgggctttccttgggggggaagcaaggaagccacccgttttagaaaattatcccaaaaaatcaaatgggattttggggccccccccccccctcctgaagattttttaaaggaaaaaatggtgtttgggccataatttttttccaggcccttggtttaaagggggcgggcttttaaaatcatgttttgttaacccccttccctaaattggcccttcccaattttaaaaagctttgaggggtttgttttttttaaatccccccataaaaagagggccctttgcctgta

SEQ ID NO: 604508 - DNA, 908 bp, Homo sapiens
  misc_feature (78)..(78): n is a, c, g, or t
  misc_feature (616)..(616): n is a, c, g, or t
  misc_feature (624)..(624): n is a, c, g, or t
  misc_feature (692)..(692): n is a, c, g, or t
  misc_feature (702)..(702): n is a, c, g, or t
  misc_feature (719)..(719): n is a, c, g, or t
  misc_feature (748)..(748): n is a, c, g, or t
  misc_feature (758)..(758): n is a, c, g, or t
  misc_feature (765)..(765): n is a, c, g, or t
  misc_feature (768)..(768): n is a, c, g, or t
gccagatgaagaaaccaaagttcagaaaagtgaagtccaaggccgggcacagtggctcaaacctgtaatcccggcacnttgggaggctgaggcaggcagatcacctgaggtcatgagttcaagaccagcctggccaacatggcgaaacactgtctgtactaaaaatacaaaaattagctgggcatggtggcgcacacctgtaatccaagctactcaggaggctgaggcatgaaaattgcttgaacccaggtggcggaggttgcagtaagccgagatcaccccactgcactccatcctaggtgacagagcaaaactccatctcaaaaaaagaaaagaaaagaaaaaggaagaaaaagaaaagtaaagttccttatccaaagtcacacagcagagccagacagagctaggtctcatacctgaatctctttatcctaaatccagtagttttttctacattaaaataatgaaactggggctgggcatagtgactcacacctgtaatcctaacactttgaaaggccaaagcaggaggatcacttgaacctaggagttagagatcagcctggacaacacagtgagaccctgtctctattttttttaagttttaataaaaaantgatggantgggatttgaattcaggtttttgattcctaacaactatggtatttatatgcatatatttctaaatacngtcatcctcncttatccagtgcatgcntgaaacccaaatagtaccaaatctatatntactatgttntcctatnttncttacctttaatacaggttcatattttacttctggcccggtaggagattagcacccaatatatagttaaatttgtacccagtttttcccctggacggggtacacattttgttccggggtgacacacataacacacaagcg

SEQ ID NO: 604509 - DNA, 308 bp, Homo sapiens
ttaaggttatagcaataaagaaaagctgggctgggtgctgtggctcacgcctgtaatcccagcactttgggagagccgaggaggcggatcactagatcagggattcaagctcggcctggcctctacatttaaacctcgtctctatcacaaatacaaaaattagccaggagtgtgtgcgtgcctgtaatcccagctacttgggagaatgaggcaggattattgcttgaatctgggaggcagaggttgcagtgaatggcggtcataactccttgccctccaccatgggcgacagagggccactccttctc

SEQ ID NO: 604510 - DNA, 556 bp, Homo sapiens
aggatgaggcggtcctacaacagacaagtgacgcgatgggcatttagcgtgactccatgtctttgctactatgtgctatgattaacacacatgcatgtgtctttatagcagaatgatttatattcctttgggtatatacctaagtaatgctaggttgactggtagttcaaacttctttgagaaatcaccaaactggctttccacagtggctgaactaatttacactcctaccagcagcatttaagtgttcctttttctccacagccttgccagcatctgttatcttttgaccttttaataacagccattctgcctggtgtgacatggcatctcattgtggtcttgatttgcatttctgtaataataagtgttgttgagcattttttcctgtctgttggccacatgtatgtcttcttctggaaactatctgttcatgttctttgcccactttttaatggggttgttttttgcttgttaatttttgatttgcatttctgtaataagtgatgatgagcatttttcatgtctgttggccgcatgtatgtcttcttttgga

SEQ ID NO: 604511 - DNA, 192 bp, Homo sapiens
  misc_feature (1)..(1): n is a, c, g, or t
ntgtatagcacaacctaggtcagttctgcaggttgtaagccatttaccaacgatagttgtaggtaaagaagggcagatttattagagaaattgtgaaaatatgttgcagtgggcagctcagcagagaaggggctacctgcaaagaggcaagggctggaggaaagttttatagtggtcctgcttgaagggtgc

SEQ ID NO: 604512 - DNA, 877 bp, Homo sapiens
agcttttggaaaatttaagaaactctccagggctctccatcttgatttatgcttgagttgttatgtgccatatttgctttgaactctgattatcagaagtttactagattttgaaatatcatttcatctgctttctagattttgtacatctcagtccataaagcaaagcttgtgatagtgtagttttctaaacgctgcaaatttggagcttaaccatacaaagaagtgtggatgagggatttttttttcttggtcaaaatagtccctgtttctgtagaatttccattttagataaaatgtgatggatgagctatcataattcaggtatacatttctttttctatcagatattcattgtgtcatgcagtagtagtaaaaacatcaaagatgcagcaagcttataaagtatatatttctaaaagaaataggaggcatttcatctttataatgagtacttggggttatgcaaacatttgtgataatataaacagttatgtcccctataaaatctggtcagaacctctttgtgattgggtgggtaagtaaaatagtctgtagtaggtagagtacgtgcgtacatgtggtccaactaagataagagataaataaagtgtaaattttaaaagaactgggttaatgcctaaacgttttgtgcctggcaaatattacatgatgttgtgtacgtgccaaaaaaaaaaaaaaagaggggggggctaaaaaaccggggggcaattaagggtaccgttttgacaggggccaatgaggcgaaaaagagacgggggtgaaacgtgtgtggaaagcgtggcttgagagccctctgggggatgaaccacggacggggaaaataagtatggacgtgctgtttaaggagagaagg

SEQ ID NO: 604513 - DNA, 404 bp, Homo sapiens
gtacttaagaagagatgagatgcacatgccatgtacagaatgaagggctgccgaaaagccctctacctgagactgggagcgaacttgccaggtaccaccatccacattgtgaacgttgtctagctgagtcctggcatgactcgtcaggcacgatgtggtcactcgtatgctgcggtcgctcctgtgatgtttacgaggaagagctcatgtgtgaaaaggagggatgctactctcacggctgcgtccagcgacagtgcccaatggctctgatgtgtctctcacagcttgaaaacgccggagacagctgtcttgtgagggactgagatgcaggatatcttcactcctcccctttgtgacttcaagagcctctggcatctctttccgcaaaggcacctgaatgtgtt

SEQ ID NO: 604514 - DNA, 129 bp, Homo sapiens
catgtagagaaaaaaaaaaaagaacgaaccaggaaaataaccaaaaccaacaaaaaaaccaaagacagtatcttggcttcattagggagtatcagacaagactggtcactggtcctcatgtcatacatg

SEQ ID NO: 604515 - DNA, 398 bp, Homo sapiens
ggtagcttgtagaaggaaggtggcagggcctcagtagaacagtgtagcttgtagaaggaagatggcagggcctcagtagaacagtgtagcttgtagaaggaagatggcagggcctcagtagaacagtgtagctggtagaaggaggatggcagggcctcagcagaatagtgtagcttgtagaaggaaggtggcagggcctcagtagaacagtgtagctcgtagaaggaagatagcagggcctcagtagaatagcagagtgtagcttgtagaaggaagatggcggggcctcagtagaatagtgtatcttgtagaaggaagatggcagggcctcagtcgaacagcagagtgtagctcctagaaggaaggtagaagggcctcagcagaacagtggtcgacgc

SEQ ID NO: 604516 - DNA, 926 bp, Homo sapiens
gactccttcgacctctgctgcatgccctgtgtccgacgcctgcctcctgggaagagagtgaagctggtgagatgtgagcccactgtacgcctgtacacccaatatctccagcctgcgcagtccctgaagagtgtaacgatgttctgcctgcgccaagctctgcctgcaccccctctctgatcctgagcttggatccatgatgttgcatacagaccaagtttctagcatcagtgtacatctcgaccaagagtgctagtagtgcactggacatgggctctacgtgtatatacatgggtgcccagaaatggtgatgtctcatgctaatccaaagggagctatcacaaccagtgcaatcaccagagacatatgatacagcatgcacaaactttatagcgtgcaggtcgctgccaacagcaagtgacgatggcctgcgtactgcgtgcctgtgctatatggccaccagatcatttctgggccacgcccttaaatcattacgtctctacatcgccacaggcgatacactcactaacctaagtccccgttactcatacacgctcaacagaagccactcgcctctggcacaggacaagatatgggacacaaccatttagcacttcccttgcacaacatcaactacagcactacatattgcaccatcccagctagcttaaccttcttgctgatacttgtccataaagaactacaaacaaatcggcatactgcactctacactcaacccctccaaccataaaccatcctcacaaaacacaccaatacagcaacaccatctaccctcacaccaacaacacacctctaaactcacagaaatcataaaacaaactaagacccctaccatatatctccccccccggcacacacaccctatctacactaccactacaaaacacacactaaccacctctctc

SEQ ID NO: 604517 - DNA, 123 bp, Homo sapiens
ggactcgaagttttgtcggtgccaattgaactgccagtgaggggctcggggagaccgaggtgctgaggcaactacgtttttgtacctggcaggcctggacctgcttctccgtgctgctgcctg

SEQ ID NO: 604518 - DNA, 149 bp, Homo sapiens
tcggccccgcttactgatggccatgtgtctctttgatcatatcttcacctgcatctgcgatcatgctggagtgatactcaagattaagatgcctgcagcatgttggaagcctgacagcagcatgacctgtgggattggctatattcctg

SEQ ID NO: 604519 - DNA, 1654 bp, Homo sapiens
gaactccatgtactttggaatctcctccaagatagccagagtttaatacatcttcattctcaacactctccaaagaacttgacctaccttatgggttccatatttttcttcttcaaatgtgcatccacatccatagccttgcccccaacccgtttacacatatattctatagcacctgtgtcaaatgccactccagcacttgacgtctttagagcacatatttcaactttctttcactacattggccacttcacaatttttatctttcatcaacagctttttgcacaggtccatcaacaccacacagcacccatcacattgcatgcatcagcacctcactcaccatttccgtctgctgctgtgtcgtgtacaccattacccaacatcactcttttcttttactaattctctctcacttgctctctgctcacaggtttgtccaactacactatctacaatgatatgtcttcaacgagcgcacgtcttctctcacatggccaagttcgcttttcatagacaaaccccacattctcacacagactatcactctaccagctcgcccacgagtccttcacctacgatggtgattcaacaccccattgcagtacattatctcgagcaataaatatacacgtccctatcataggtatgtatgcattttcgctcatcacttaattttcatctaattcctagcctatcttactaggctaggcttacagtcgtttcctctacacgttggctcctagtttcaatggcgcgccttattctttaggctgttctgtcaccatcactacgcattcatcactcagttacttcccctcgtccacttggcactacggccccaccacggtccattctgccccgaaccagagcttgctcgtcgcctcaacctaacaacgggcggtcatcctcaacttctcagcgacaataacaacatacaacaacctgaacctactccaatactaatccaacacccatactcaccacccacactccactcgcccagcccctcacaccacacccactaagacgcgcagagagcgtcgcaacccaatccaaagctagacgaacaggagaggacaggcgatagcggacggagatgcccggctccggcgcgaccgcccgccgcacgagcagcgcccgcggggcgaggtgcgtggagtaggggacgagagagcgagtggcacgcgcgcctcttctcgacccacggctgtctgcgagtagacgcgctgcagcgcagacgacccatgggaggggcgcgagcatccgataggtcaggacgagcagcggcgacgagctgggactagcgagaccagtcatcgaccacgcgcagactgactgcagttcaatgacactctgcgtcgtatctttcgagcttgtctcgtgtctgcactctcgtctcgtcggcgcgtagccgtcgccggcgacgacgagatcgcgaccatcgcgagcgacccagtcttatgtgggaggtcagagtaacaggtagccgtgctctcgtgcaccgatcgtatcacgacatcataacagccacaacgcagtaatggttgggctcgatgtcagcacgcagagacggagctacaagatcgagtcgactcatactctcgctacttgataaggtagctagagtttcaatgtatccatcaggctcctc

SEQ ID NO: 604520 - DNA, 289 bp, Homo sapiens
cagattgaagataatcagtcaaagagtattcctcaaaaccctactacatatgaggaaatatagtgtagtcacagtatttactcgcatacctttgatagcctacggaagtacttcaatcctgttttcaggtacaagagggataatcgcatctacctcatgtaggctgctcacaaagattgaatgagtaacactaacactgccatgtctatggaatagtaccaggccatgtcataagcaccccaaatttgacttatccttgtgcaaggcacggggaacacaaacagactgg

SEQ ID NO: 604521 - DNA, 138 bp, Homo sapiens
tacatgatacaatcgagctcggtacctgaacattcgtgtccccaacttgagatttgaaggcttttggtctccctgggagtgggtggaggcagccaggcttacctgtacactgacttgagaccaggacacgaatgttca

SEQ ID NO: 604522 - DNA, 1421 bp, Homo sapiens
  misc_feature (200)..(200): n is a, c, g, or t
  misc_feature (436)..(436): n is a, c, g, or t
agtacactcgagtaacggggggcactaatcttcaactcctgaggcatacttcgccccatataataccgtagaaccgagagctgacctgcggatgtccgtggacgtttgatcggatctgacgtatgtactcccggaatagacagccccgcaattcgtagtaagtaacttacatcagcgagagacgtctgggcacgtgcatngaggcgtggtcccgcacgagttagggcgttaagagatacagatgtgcaggacttgccgcgggacggtcttaataccgagagagcgcactgttcgacctgacttatcgagcgggagcgcgaggggggtaatacctaacagtgtccacactgctcgtgtagacactcatatgtgagagctacaacctatcatgtattcacttgccccgagtgcggttctcttaaggaagtgtaaattntcccgcgcgtagagagacatttctcttggcagaactaagggggtcctccgtaattatataatcccacgtgagtgatgtcatctccctcgcgtgcatgaacctctccctacatgatggaggaccgaaaaaaacagagaaaacacacgacgcaacacacacacggaagcatcagacaacaaacaaagacgatataccaaagagaaacacaacacgccgcgcgcgaggcgcggcacgacgacccgcgagaaagagaggggtatacacccccccgcagggagggcgcggcgccccacacgagtgttagtcgacgcaacgcgcgctcaatacaggaggtggtgtcgacactcggcgggcacaacaaatagaggggcgcgcctcgtcgcatacaatatgagaggcgcagatggtgcacaagtttagaaaaggagacataagagaggcaacaaaaggcccccgggggggagacgagcgcgcacaatgtatatataaaaccacacaagggcgcagctccagaaacacgacaagggggagaggcaacaaacccccacgagggacgcaagacgagcacacgctgagaaaggacgacactcgtaaatgaggagaggcgacaaaagaacgtgtaaccacccaccgtgagaggaaataacgggagaaggggtagacgagaagcggacgaccacccaaccacgacgggggagggagacaaacacaccacgtgggagccaccacaacagccaaccatgtccactcataagaacaaccaacccccccttgccaaaaagcgcgagaaccaacccaagaccacagaaaaagacccttccccaccagaacgcgagaggcaccaaccaaataaagggcccgcttgcacacacaaacgtagcttaggccaaacgatgctgggccgaacgaccgacgagttcaccaacacaaaaatgaactatcagtcagctgcacaccaccggggggagaccaatgtgatcacacc

SEQ ID NO: 604523 - DNA, 920 bp, Homo sapiens
  misc_feature (433)..(433): n is a, c, g, or t
attgtgtttttttttttacaaaaatccattgtaaaaccattgtgctcgtgacggagaaaggtggtgggggggatggagcgtggcatggatatcaaagtccttccccccgacaaactagtgagctccccagctcgtgctccggggagacagcttcccaagaaagactcccattccttctccgggacatggaccccaggcgggtgagcccagtggccgtgaggcacatgctcacacacggtgagggaggcactgcccaggggatgccacgctgctcacaggtggcctgcaggatcccttgggacaggctgtattatggggcaagacatgcccaaaaccgggacgcagaggaatagccggggcctaacccgaagaggaagcgatggcggctccatagcggccctgtgctatgctctagggcacaagtggtggcgcncatcggggcggctgggcccccatatagtggaactagcgccaatgtgacagaccccggggggctccttggtggggcagcccggatatctgtcccccagcttcttcaaaggggggaaggtctccacggggcgccccagaggcagggtgttaccccccccgggttgtgttgcatgagcacgaccagccgtttgaccgcccggtggtacccctgtggcttggtgcccacccactgttagggaagcggcgccatccttacgcccttgtgagagcaatggtggccggctgtgccccccatatatagagggagcccagtgtggtcgttgtcgggggcatcccttattatagaggccccccgctgttgtttgcccgcctttgcaaggggggctcagaagggaatggggggctttggtcccttgttgtctgtggataggtacaccggggggtgccaccagtggggccccctacccccatgtggggcagcaagatat

SEQ ID NO: 604524 - DNA, 905 bp, Homo sapiens
gtgctccctgtgctacctggggacttctttgagtcctgagaagtcaacgtgcgcggttgctgcgtcctgccgctgctcccctggccctgaggcgatgtgatgaactgtgagctggtgtacatgccccactactgtgagtgagtgaccctgtgtgcccctgccataaggccccctggagctggccttcgctgcctactttttcaattggtgcctggcatcccaatttgctcctgtgcgccgttctcaacgtgtgcttgccagcattgttcgcttgtctcttgcttggcccttcattcttgttgacaggaaagttgtattcacaattgtactttattgttggagtgaccttatatatttttttctgaagttattgtacacggcttgacagttgccattttctttctagaatgtctcctttaatacctgaatttggtgtactttgcagcctaccatttttattgacgaggagtactgattacccagcagagaaacgtaacaaatcattcgggaactctttgatactacttaccttagggggaaacaaggtgattgttggtggtaagaagtgtttgggaagttccaatacaatttataatgtatatatcaacataattgaacatgtgacctttccagtcttgatgattttgcttgacaatttggttgtattgggattttatagacaaggattataaattgttcccataacatttggcacttttaattcgacttattgccttggtacatgacaacaagactgaacacgtgacagtccccagtgcttgatcgacacaaccccttggcaaattacccacttagggggactgaacggccccttcccgtttgtgcccaactttaatggacataaacgactcatgggggacgcacgaattttaccctaaatgtag

SEQ ID NO: 604525 - DNA, 149 bp, Homo sapiens
ttttttttttccgggggagggtttttttttaaaaaaaggttattggcctgggaatggccggggaatttttttcccgccagggaaggggaccttttgggttttaggtaactataatggggccctttttataaagaaatttggccttttga

SEQ ID NO: 604526 - DNA, 162 bp, Homo sapiens
agctgaagctccacgatgccctgcgatacgtgcacgtcactctccaccaccagcttagtccaacgcagaacttcccgacatcaggtagaagatgcgttcccaaacgagatttctttctttccttcgtggtaagcgttatcacaggcttacggggtaccgagc

SEQ ID NO: 604527 - DNA, 168 bp, Homo sapiens
cctcatccagtggagatggaaagtcaaatttccatgaattgctgtgtgtgtatggagcagtggccatgtgtattgcagaggctctactgcatggcgattctggatgagttccttgtaggcagtcgggcccggctaccactatgctacgggccactggatgagggcatg

SEQ ID NO: 604528 - DNA, 384 bp, Homo sapiens
cggctgctggagcaaactgtctccgcatccgatgctgatcagcaggccctccggaaccaagcgctgaatttatcactcgcctacagctatgacacgcctgtcacatctatggtaggcaccatacccgatgaccaagagcagtctcaagttgctgagaagcccatggaaggcgaaagtagatacaggaatgggcactcagctggagctgctggctcccggatgaatgtcagacctggggtgattagctccaggcagcttggactcctaggacctcctgatgttcctgaccatgctgctcaccacccattccgccgcctggccatctagcctgcttcagcaccatcagccacctttcctgatccagctgtgtgtcgtgacatgttg

SEQ ID NO: 604529 - DNA, 154 bp, Homo sapiens
cgtttcaagggagagagaactgcgagcgttggtaatgtgttaaggccgggagcggctaagctctgtgatagagcgtgtatcctctcgatcacatacagaagaggattgcacggagggagctctttgagcttctatgcatagcgagggaccactt

SEQ ID NO: 604530 - DNA, 259 bp, Homo sapiens
  misc_feature (37)..(37): n is a, c, g, or t
  misc_feature (175)..(175): n is a, c, g, or t
  misc_feature (186)..(186): n is a, c, g, or t
gacggctcaacggaactttaattaataataacatcantactgggtcatcaattgcaattaatctaccacatcaatgcaagatattaataggggaaactgcaagggggaggaaggtgagagggtttatgggagctctctgtattttcccttcagttttttctataaacctaaaatngctctaaaaantatcctatttaaaacaaacttttttttttttttttttttggggaataggatcttcgctcgtgccgccagaggg

SEQ ID NO: 604531 - DNA, 530 bp, Homo sapiens
  misc_feature (43)..(43): n is a, c, g, or t
  misc_feature (58)..(58): n is a, c, g, or t
  misc_feature (114)..(114): n is a, c, g, or t
atacacagataaatgaaggcttatggcttgattttaggtatanaaagttaatgtttanagacatccatttatccacctggataaacatggtcattattttttaaatcaaagtcncaagagctccatttcacaacctgaaactatttaaaatcatgttagaaaattaaatagtaagaaaatactagaaaaaatcagaagaatgagtagaatcatagagctacaataattaaaataggatggtttggggggaaagatcagtaagttagatcaatgaaattgcatagaaaagcaagaaattgattattatatttctatgggcacgtgaaaactgtggcatttctaatcacaggggaacttatagattataagataaaagacattaagcctattgggtaactagtttagagaaaagaaaattcagttacgatctgacctcaagaaaaaaatgtaaatagattaaatatgtatatgtaaaatcaaaaaaatcatgaatatataaataaaattcgataagtgtttctatatttcaa

SEQ ID NO: 604532 - DNA, 364 bp, Homo sapiens
cccaaggggacaagctgggaaaaatacagcagcttctcctacctaataagaagaaaatgagtatataaaaatgtactgcagtttggcccaggtgctcacgcctgtaatcccaacaccttgggagaccaaagtcgggggatagcttgagcccaggagttcgagaccatcctgggcaacatgtcaagaccccatctctacaaaagaaaaaaattttttttaattagcccaggtgtggtggcacacctgtagtctgaactactcggaaggctgagctgggaggatcgcttgaacacgggagggagaggctgcagtgagccaagatcacaccactgtgctccagcctgggcgacagagcaagacactg

SEQ ID NO: 604533 - DNA, 304 bp, Homo sapiens
gtctctatgattttgactatgctcaagtactttataagtggaatcatacaatattttttgtgtgtaactggcttacttcatctagcataatatccctaagggtcatccatattgtaatgtctgaaaatttttttgtttttttaaggctgaataatatttcattgtatgtatatgccacatttggcttatccatttattcactgatgaacactgattgtttccatattgtgtgtgtgtatgtgtgtgtgtgtgtgtgtgtgtgtgtgtgtgtgtgtatggtttttttttggagacaacgggacac

SEQ ID NO: 604534 - DNA, 181 bp, Homo sapiens
ttgagcttaggtggagctggttttcctttatagaccagaatatattctcctgcttgccatagggaaattacatgctattttatacacacttatatattactttctacacccagtatctaacttgatatttagcccttgttctatatagacaaaggtattgcatttgcccattttaccatca

SEQ ID NO: 604535 - DNA, 925 bp, Homo sapiens
  misc_feature (5)..(5): n is a, c, g, or t
  misc_feature (124)..(124): n is a, c, g, or t
  misc_feature (208)..(208): n is a, c, g, or t
  misc_feature (213)..(213): n is a, c, g, or t
  misc_feature (404)..(404): n is a, c, g, or t
  misc_feature (424)..(424): n is a, c, g, or t
  misc_feature (426)..(426): n is a, c, g, or t
  misc_feature (496)..(496): n is a, c, g, or t
  misc_feature (503)..(503): n is a, c, g, or t
  misc_feature (524)..(524): n is a, c, g, or t
  misc_feature (582)..(582): n is a, c, g, or t
  misc_feature (584)..(584): n is a, c, g, or t
  misc_feature (602)..(602): n is a, c, g, or t
  misc_feature (651)..(651): n is a, c, g, or t
  misc_feature (693)..(693): n is a, c, g, or t
  misc_feature (700)..(700): n is a, c, g, or t
  misc_feature (720)..(720): n is a, c, g, or t
  misc_feature (812)..(812): n is a, c, g, or t
  misc_feature (843)..(843): n is a, c, g, or t
  misc_feature (854)..(854): n is a, c, g, or t
  misc_feature (864)..(864): n is a, c, g, or t
  misc_feature (867)..(867): n is a, c, g, or t
  misc_feature (876)..(876): n is a, c, g, or t
  misc_feature (899)..(899): n is a, c, g, or t
  misc_feature (901)..(901): n is a, c, g, or t
  misc_feature (908)..(908): n is a, c, g, or t
  misc_feature (925)..(925): n is a, c, g, or t
atacnaaagaatagaaaaactttacataaaaatatgtcaattttagcttccatattgttgtgcacacacaaaaaaatcgaaacatgatatctttttgttaaacctgtagcacgcgaccacagtngtagcaaggtcaatacatttgctttatcatgatggaaatggaacatggtatctgtatttattaattgagtgttaaaatgcacancccangggaaatgcactgccagaaccgtagtggtttccttaatgtgggtgtacagtgaatattgctaatgcgtagagattagtacaggtctacagatcagtttttataaatattctttatcaataggttcacaatttaaatattttaaatatttttgataactttgggtcattgagaactgcagaaacagtgtgcnaatatattctggaatgcctncnagagaacctgcagtggcagctgaaagcgcccaatgaaagattaagcaagtactgcttcaaaagggcagancgcaganattttaaagcttgttcttgcngggcgtggatgaaatttagagatcaatctagaactccccactgctgcacatgcataanangtgatggtaataagtatnttgtgttgacattatccactagtggacttcaaagaccaacctacctgtngtgtttagcaagaacagatccccgttttaaaaacaggaagtnagaaggnctatgagaagcaaccaactnccaggacaactgttgtgctccaaaaactcagggttaggcaggatggatatattcttgttcaaaaaaaggtaacaaagaaagtagttgttgtngcagaatacacttgcatagtatacctgtttnctttcgacgtngggcgccacngtnccggccccnacgctgggctgttctcttctgcnanaagatcngttaaaacactacccan

SEQ ID NO: 604536 - DNA, 188 bp, Homo sapiens
cccgacgagacacgtacaagtagcaggttcaggcagggtgcatggtggctcatgcatggtggggctgctgcggctcttgttttttttgtgcattcttcgatactggcccatttgggcacccccgccggttcgcgggggcaggcctcctcgggagaggagggtggatggacttcagggtgttcgtcatg

SEQ ID NO: 604537 - DNA, 113 bp, Homo sapiens
gggagacgggcagcaagagagaaggaggtccagacagtgagggcaggagggtagagaagagacgcagaaggagagcgagccagagagaaagtggttcttgtatttgaagggag

SEQ ID NO: 604538 - DNA, 140 bp, Homo sapiens
cccactccaccttactaccagacaaccttagccagaccatttacccagatagagtataggcgatagagattggaacctggcgcaatagatatagtacccctaggggaagatgggaaattatgaccgagcataatttagcg

SEQ ID NO: 604539 - DNA, 296 bp, Homo sapiens
gaggttgcggttcggtccctggccttgctcagtgggttaatgatccagcgttgctgtgacctgtggtgtaggttgcagacgtggctcagatactgagttgctgtgactctggcataggccggtggctacagttccgatttgacccctagcctgggaacctccatatgccacgggagcagccctagaaaagacaaaaagacaaaaaaaaaagataaaataaatcagcgtgtcaaccggtgatctaggattacccacattttattaaaattagcgtgattgggagaagtcccattcca

SEQ ID NO: 604540 - DNA, 121 bp, Homo sapiens
tcttgagtatcccctgctgtgggctttgaggtgcttgttatttaaccctccagcaagcgtatgctattctccgggagaggaaatggcacccaggaaggctaagggaagcctaagttgtcac

SEQ ID NO: 604541 - DNA, 563 bp, Homo sapiens
tgtcctcctgctgctctggggggcatgtggccctgacctgagacctgggcctggctcccactccatgaggtatttctacacctgccagtgtccctggccctggcctgcggtggatgcccctgcttcatttgcatgtgtgtgctactgtgtgactgacacccatgtatcgtgatgtgttctgacatgctgactgcctgctgatgtcctgagtgactggagcccctgtggctgccactggatatgatgcatggaaggtggcctggatgtatttgggacctggaacacacatgatcttcaagaccaacacacaggacttacctgagagaacctgctggatctgcgctccgctactacaaccagagctgaggccgggtctcacacttggcagacgatgtatggctgcgacgtgtgggccggactgtggcgcctcctccgcgggcataaccagtacgcctacgacggcaaagattacatcgccctgaacgaggacctgagctcctggaccgctggcggacaccgcggctcagatcacccagcgcaagtgggaggcggcccgtgaggcg

SEQ ID NO: 604542 - DNA, 1251 bp, Homo sapiens
atcatgaacgagaccgttacttatcctgtactagaaagttcactgagcaaaccgtactatgttcaggagagaagacatagactggtcattgaatgttccttacaccccggtgaagtgcgcacaggtgcctaaccacgagaaattcgggagaagaactagccaataattgtacaaggactcgatcgaccgcgcatgtctagtccttgtgctatttgggcattcacgcataggctcaattctcgggtgcgtggcacacgtagctaatcatgtgctgtcggcgatgactgttgatgggagtttgcccctgggagttatcgccatagatggagagaagaattggcaatcgcccaacagctagtagcacgtatgccacagaactagtgggccttgtaagtagagcacagcatagaagagtacctccaagtaacacgccaatggagacagggaacgccagagatgcagacatgacatcacagaggtcatgtggtggaacgtggaccaatggggccaagtcgtctagtgttgcctccgagcatagacatgggatgatgcctggacgaccttggactcacgagccagaacggtagtataaggtgtgctggcaatgtgacttcgtgtaagcactgtgtgccagctggtcgggatttgtttcgcgacatgatactattcaatcacacgtgaccacacatttctaacatcaaacaaatcgaagcagcagcttgacggagccccaactgcgagggcagcgcaagcctgggaagcttacctgggcaggggatccagcccttaaccagtggggcctagggggattggcaggtggcatggggggcgcaggctgggttggccacctcccaagtggacatgtcgacgtaacataacttcaaccccctggaagggcttggctggaagcataaacaggggcatggcacgaagcaccaagcaagagaagtccccttccaatgaaaacacaaagcggcgattaggtagcttagacaccaaggaagcgaacacgtggccaacaaacagggagaagtgtaataaccccaccaagggaccacgaggcacaactgggggcccattctggccccagcacatgagtggagccctgaacagggtggctaaaaccccggattagacccacgcaagaagaaacggggtcgaacaccatagaaaaccaaaacaatgaacaaaaccgcggaggaaaacacacccaaggtatacaaacaacacaggacactatcaacaaactgc

SEQ ID NO: 604543 - DNA, 144 bp, Homo sapiens
cggtgaggttgtctagtcacgctcggagccatgccgtccaagcgtacgctgcagtcggtgcaggtctcggacgcaagaagacagcgacactttggcgcactgcaaacgcggcaatggtctcattaaggtgaccgggccggccct

SEQ ID NO: 604544 - DNA, 934 bp, Homo sapiens
tgggggataactattttagcaaataaatatatttctaaacataggtgccgtgattcaagcgtcgtgtcgggtccagatataaatacccagtgtgggtacctagggtgctagtctccccactaacgttgagggaaaagaggtctcccagggtggggtcctcgtgcccacttggccaccacattccacattcccaaaggggaataagtgccgtgaggggccaagaaggtggctcaggcgtgcccgtggggctgaagtgtcacccgtgagtgaggcccactcagcctctggctccacttcagcctgaaggccaaacttggtgtgcctcataatctcacacttctctcccgtgtgtgggtctccctgtgcgcctgtgtatagtgcgcttaatacgtggggaagcgtgggcccctcgtggcgcgtgctcccaaacccagaggggctccacacttctggcctttcccccttgtggtgagatccccccaatatctctcccgagtctctgtggcgcctcctaagagaaaacaacacagcgtgttctccgcgagagagaaaaagacacactgtcttgtgtgagtagagactaccccccgcggactttccgaaccgcgtggtattaaaccttgccgtggggcctatatattatcataacgccctcttcgaatacacccccatgctccccttgatccccactctgagcagccccccgagaaaacttacaggaggcctccccaagacatacaaggacaagagcatgtcgaccccgatccgcagatgtaataccatacccctctcctctcggtggggacacccccagcaggcccaagagcagaagaaacatcctcgggctcgtagaaaacacccccccggggagcagagggtggtgggccagaaattgtggaccaggggggaaacacccggaggagacaactctccc

SEQ ID NO: 604545 - DNA, 443 bp, Homo sapiens
tgaagatccccacgactgtcacaggttgcaggtggctcgtggcctgtaaccccatgcattattggcgaggctgaggctggcagatcacttatttccaggtagttcaaagccatcctggtcaacattgtgaaaccctgtctctactaaaaatataaaaattagccaggcgtggtcgtgcacacctgtaatcccagctactcgggaggctgaggcaggagaattgcttgagccctggaggcggacgtttcagtgagctaagatctcgccactgcactccagcctgagcaacagagcgagactttgtctcttaaaagaaagaacggggtttaaaaaatatttggggccgtttccttagggggcctttttttccggctttagagaaaattaggccctccttatggtgtacctttaaagccctggccaacggtcggggtcccgagctc

SEQ ID NO: 604546 - DNA, 429 bp, Homo sapiens
gttgcttcacgatacaactatattctatataaggtacaactctatatgtcagtattttaaagaaatggatccttacaagaccaaaataacccacaggccatgaggttggtttttcctttttttttttttttttggttaaaccaattgtgccccaggattttccaacaggacaagtctgccataatgtttgaaagcgtgcgttgcgcaatactcccacattaagaacccagcgaagggttcactctagcacagagggtggaagccatcctaattaaccaactcgggtacctctcacgacaggcgtgattggcagcttcaaaggtgcccattaaggttcctttttccttgatgaccagagggcccactttgtccccgagtctctcgttatgttgggtgtgagccccatccaagatgtgaaactttggggcc

SEQ ID NO: 604547 - DNA, 198 bp, Homo sapiens
agtgactagtcacagatctattcaatttgacgtggctaacagcactgtgtacaaacttatgattatcatccaaccaggactgccactatctactgaagtctgatgatagaaccagagtcactggtgtttgaagctatggcaagggctcagaactcaggcagatctacaacttctcactgtagaggaccttgtatgtgg

SEQ ID NO: 604548 - DNA, 1050 bp, Homo sapiens
ccgcccccgctgttgaaacagagaaagcacaacgccacccacaggagagtgtacgtcgtacaaggttctcccccgcgcctgccgtgggcgtccccgacaaacccgcccttttgcgccagaagcgatgtcggcctgtaaaacagcgggcctctcccatttctggcgcggccctcgggcaccaaccacaaggcgaccccccggggtccgaatcctttgatggaagttagaatgagaaagaccaccacggaaaagtagtgggccagacagaccaggtagcagcgaagttgcaccaagagggagcgatttgccagtcaaagaccttgaagtatccccgtgaatgggagaggaagacaacaatgggaccgcgttgggaaaccctggagcccatttctccggaacgccaagaaccgaagtggaaagaaaaagagcccataaaggagctagaaagaatggttaacgccgagcaccaggacgagcgcagctgaccagcaacaacccgagaggccggaccatccgggccacccagaagaagccctttgtgagaatagaccattgacgagttgctgcccccaggccactggaattgggaaccgggtggccccggcttgtgtgactttaacaccccaagtgtttagccaagccaggcccgaagatagtgctccccgccatagcggcgtccaattccgtcgatacgtccctgccagccaggcccccgctggtgccactgagagagccccccctgtgggagaaccacatgaccatctcgccaataatttttaatcctactccacgtcagagcgtcttcaccagtccattgggattaattatgtgtggagtgtctttttggaccccaacccgttttgtcgtttagaagttgttccattggtttggtggattcgccatgtttcccttccctcaactgtgttttccctggcattcagagaggagggagaggaggaagaggaaagggagggaagcttcccccgagtagcctccacctgtgcttctgtgccattattctgagaataaatttctgtttccaactgtatt

SEQ ID NO: 604549 - DNA, 245 bp, Homo sapiens
catgaaaagaacaagaaaacaagaaaaaaagaacatgtgctactgcaagagaagggagcagtctctctcttaggaggtgacattagcagctgaagacttgctggatgcagagtctgccatctgaggaactgtgggaagaggccctgaggctggacacagctggatatgtctatggggtaggacgaaggtctctgcacctggagtaccaatgagcaaggggaaaggtggcgtgcgatgtgaactga

SEQ ID NO: 604550 - DNA, 1073 bp, Homo sapiens
  misc_feature (38)..(38): n is a, c, g, or t
gctataggaatcctagctaactttaagcctaagcatcnatgaatcatgtaactctgcattccaaagggtggcatggatctaactgtctcctctgactgcctcggtggatgctgcgaggcagctcgagaggcctagctatctcgataaccatatgcggtcgatagtgaagtgcatgcgtagctccgtcgactatcttatgtaataagaccatatttctagaataatgatgacgaccgtctaaatctctctccgagcctcttaatcaaatacattacagatgcatccgtcgttgattatcatccatgcctgtcaatgacgcgcgtaggctcgagtagagtagtcgattggtactcgtccgacaagcttgatcagagatcgccacgagaagacctatttcagagacgatttccagaaggcgcgagaggttcgcggagacgtaagtttctgcatggcttcgatcattggatgtcacagctcagatggcggccagtggcagtgcctagtacgaccactagtcaggatttcccgacacatgcatggatcttgtacatggaacaaacttcattgacgcattcactccatcttactctagggtacatcaaggaataatgatggccatttctgtaggcgcctcataggtcggtaacgggaaatactaatacgttgtcgtgcaaggtcatcttgtacctatgttaaaaacgttcgcggtaacgtgcttgatatatcagagggcatgcttaaaattaaccttcgcattccgaagggcccgaacaaactacaatacacgctcctatgaaaaaaacttttcgtagcgcccttcgacgcgtaaggcattaccgttagtttttgaccagtggtcttcccagtaggccgagttacagagtcctcaccaaggagtttccccccgtcaaaagggcaaaaaaaagagggtactcccagagggagaaacacgcagcgggcggaatttagtagggggggggcgggaaagctctccacggaagaaaatttatcagcacacgcggggctggaatacgaggaggggcgtgtgccacccaaatcagcacagggaaggt

SEQ ID NO: 604551 - DNA, 841 bp, Homo sapiens
  misc_feature (16)..(16): n is a, c, g, or t
  misc_feature (63)..(63): n is a, c, g, or t
  misc_feature (75)..(76): n is a, c, g, or t
  misc_feature (78)..(78): n is a, c, g, or t
  misc_feature (162)..(162): n is a, c, g, or t
  misc_feature (182)..(182): n is a, c, g, or t
  misc_feature (190)..(191): n is a, c, g, or t
  misc_feature (198)..(198): n is a, c, g, or t
  misc_feature (212)..(212): n is a, c, g, or t
  misc_feature (215)..(215): n is a, c, g, or t
  misc_feature (222)..(222): n is a, c, g, or t
  misc_feature (226)..(226): n is a, c, g, or t
  misc_feature (246)..(246): n is a, c, g, or t
  misc_feature (287)..(287): n is a, c, g, or t
  misc_feature (316)..(316): n is a, c, g, or t
  misc_feature (329)..(329): n is a, c, g, or t
  misc_feature (345)..(345): n is a, c, g, or t
  misc_feature (369)..(369): n is a, c, g, or t
  misc_feature (415)..(416): n is a, c, g, or t
  misc_feature (478)..(478): n is a, c, g, or t
  misc_feature (543)..(543): n is a, c, g, or t
  misc_feature (583)..(583): n is a, c, g, or t
  misc_feature (599)..(599): n is a, c, g, or t
  misc_feature (754)..(754): n is a, c, g, or t
  misc_feature (806)..(806): n is a, c, g, or t
agaactgttttcttangaagagctaggaactacaaatgtcatttagtaatgcattgaaatganattacctagagnnantatagcacagaaacttcaggtcacttcttctggatctattattttggataagcttccactatcatagcatggccctgccctccngccgcccacgcagccactangccatacnngcctccntctttccgtcatcngtnggccgcngccntgaccaacctgcagccagtngctccaaatgggtgtcccagggccagagatccccccccgtnattaaacttctcccaaggcggcaatcccnccttggtttttcnccccctgtagttttcngccaacccctccgaatccctggcnttaaaatttgcccccatctgccccgcgacagcttcctgcaattccnnagcctccctctccttcatggtccctcctgccttttctagcccttttggcgtcgcctcatgtnggtccccgtcctcgttgctcttttggctcctgcgccccctccctcaaatccctccaatctgcctncggcttctcccccctggcccgccgccttttcctccgcccngcttccccttgccgcngccccctccgtcccgcccccgccagaatttgcagctgtcactgtgccgtaggccttgatgaatgcaggttttagtttggccatctgctccagtgaggaaggacggatgccattatctttggtaactgtatcttttcctggtactttgaagggtancacatcagaaaggagtccttcatcctgtgccttcttggctagactgtgagancgccgtgcataattcatcctgttccagccgagaaa

SEQ ID NO: 604552 - DNA, 277 bp, Homo sapiens
tgggtaaacccattttttttaaaaccccgaaattcctgggggggggcctttattctggaaccccttgaaaaatcaattttttccaaaatgtttttgggttaaaagctttttttttgggtacaaaaaaaaaattcccccttttggcgtttttttaaggtaaacccggcccgaaattttttgaacccgggggaacccctttttttaaaaggggccccccccggggggaaccccaatttttgttcccttttagggggggtaattttaaacttggggaaaa

SEQ ID NO: 604553 - DNA, 102 bp, Homo sapiens
gacggtgtctgtgctcctttctgctgcttgagtttttaaaatcgagactcagaatgctttcccatgccctgaatgcacctctctgtacaaacaccgtcgaag

SEQ ID NO: 604554 - DNA, 229 bp, Homo sapiens
aggattacggcagctatccggttcactttcatatggttttacaaatgacagtaatcttaagtaggttttaaaaattcaactcttaggcccaggtgtatggctcacacctgtaatcccagcactctgggaggccgagagaggattgcttgagtccaggaggtcaaggctgcggtgagctgtgatcacaccactgcactccagcttgggtgacagagcgagactccgtctc

SEQ ID NO: 604555 - DNA, 1038 bp, Homo sapiens
  misc_feature (85)..(85): n is a, c, g, or t
  misc_feature (111)..(112): n is a, c, g, or t
  misc_feature (118)..(121): n is a, c, g, or t
  misc_feature (134)..(134): n is a, c, g, or t
  misc_feature (136)..(136): n is a, c, g, or t
  misc_feature (141)..(142): n is a, c, g, or t
  misc_feature (145)..(145): n is a, c, g, or t
  misc_feature (164)..(164): n is a, c, g, or t
  misc_feature (441)..(441): n is a, c, g, or t
  misc_feature (454)..(454): n is a, c, g, or t
  misc_feature (490)..(490): n is a, c, g, or t
  misc_feature (522)..(522): n is a, c, g, or t
  misc_feature (546)..(546): n is a, c, g, or t
  misc_feature (564)..(564): n is a, c, g, or t
  misc_feature (582)..(582): n is a, c, g, or t
  misc_feature (597)..(597): n is a, c, g, or t
  misc_feature (711)..(711): n is a, c, g, or t
gctcgactgaggtttccttattcatcctctagtagttagctctgcagcagcctcctcttccagttcttcctcctcttcctctgcntcccccttcccagcttcccaggcatnnccagcnnnncccactctttccntnccccnncangcctctctgtctccaatcngcccccaagtatactcagccttctctcccatcccaggctgtgtggagccaggtcccccaccacctcctccctatggccgcctcttagccaacagcaatgcccatccaggccccttccctccctctactggggcccagtccaccgcccacccaccagtctcaacacatcacacatcaccaccagcaacagcaacagcagcagcagcagcagcagcagcagcagcagcagcagcagcagcagcagcagcagacagcagcagcatcacggaaactctggngccccctcctccntggagcatttccccacccactggagggcggtagctnccaccacgcacacccttacgccatgtctcccntccctggggtctctgaggccctanccaccagggccagcacanctgcccccacctcacagncaggtgtcctacagncaagcaggccccaatggcctccagtctcttcctcttccaactcttcctcttccacttctcaagggtcctacccatgttcacacccctccccttcccagggccctcaaggggcgncctacccttaccatcggtgactacggaacaccagctcttcggctaccttacaaggaacatgcaaccgtggcttccatcgccagcacggctacgagaggcctcaccacctgggcccaacgtacggcaaagagagcccgtaccgggggactacaaacagccgcacgagcagaatacaagccgggtcgctcctcatcggaaggcgcaccacgggcaacgagcgacccccaccgcgccggactgaggcagcccgcacgggactggccgcaacgggcctcaggtcaccgccccactgccccgccggcgcgaaccaaaagcgtaatacacaac

SEQ ID NO: 604556 - DNA, 136 bp, Homo sapiens
tcgagctcggtaccggctctttgtgcagctggaagtagatcaacttcttagaaagcaaaagggctgtgttgttgtcactctccaggagccccaccacgcgccacacgaagagccaccccatgcgccacccgatgcg

SEQ ID NO: 604557 - DNA, 1064 bp, Homo sapiens
  misc_feature (85)..(85): n is a, c, g, or t
  misc_feature (111)..(112): n is a, c, g, or t
  misc_feature (118)..(121): n is a, c, g, or t
  misc_feature (134)..(134): n is a, c, g, or t
  misc_feature (136)..(136): n is a, c, g, or t
  misc_feature (141)..(142): n is a, c, g, or t
  misc_feature (145)..(145): n is a, c, g, or t
  misc_feature (164)..(164): n is a, c, g, or t
gctcgactgaggtttccttattcatcctctagtagttagctctgcagcagcctcctcttccagttcttcctcctcttcctctgcntcccccttcccagcttcccaggcatnnccagcnnnncccactctttccntnccccnncangcctctctgtctccaatcngcccccaagtatactcagccttctctcccatcccaggctgtgtggagccaggtcccccaccacctcctccctatggccgcctcttagccaacagcaatgcccatccaggccccttccctccctctactggggcccagtccaccgcccacccaccagtctcaacacatcacacatcaccaccagcaacagcaacagcagcagcagcagcagcagcagcagaatcacggacacacctggcaccccctcctcctggcaccatcgccacccacacacctggaagggacggaaagcatcccacaaccacgcacacgcacttcacgcccagagccatcacccgtccccatacaggctctactgaacagcccctaaccacaccagcgaccacgaccaccaccctgacccccaccatccaccagcacagagatgtcacctacacgcaccatgacaggaccccacactgcacgctcacacaaccaccaacccacacaccacacactcctgaccccacataccacacacaccacagcaaccaccacaccccaaggcacaccacaaccccaccccactacccacagcccccccaaccagagacccaccggacccgatcgccccgcccgatgtcccctccccgatcaccaactagtacaccgcacacacccccatccagcgagacactgaccacgagcaacacccacacccccagcgaggacaacaacaccggacatcgcgtctccctgcaaccgccaacgcaccagcaacgcaacacagcagacagagagcgccacacaccacgcactacccggcaagcgaccagcctctccccacacgcactaactgctcctgacccccaaccacagcaaccctgagcagtacggccaaacaagcccagcagagcgtcac

SEQ ID NO: 604558 - DNA, 352 bp, Homo sapiens
taaacagcggcttcgatacaaggtcaaatctaaacaagttctacaatccagtgctgatatcagataccatgcttcaagtgacaatttcttttctgaagggttattccagtttcgtgaagggtagcatgagggtggtgttgcctttggcaggggccaatttctattctcaattaacccatggaggaaatggtacgcatttggtgagtccggttaaaagcatttgggggtggacgatggagggggcccgaatcgtcgtactcctggttggctaatccacattttggtggaagggtggacaggtgagggcaggatggagccaccgatccaaaccgagtacttgcgctccgggggt

SEQ ID NO: 604559 - DNA, 887 bp, Homo sapiens
  misc_feature (135)..(135): n is a, c, g, or t
  misc_feature (218)..(218): n is a, c, g, or t
acatacccagggccaaccacctattcctcattgtatgcaatctaatcgcaatggtatgcctaatgctgttactcggaaccgaaaaataatatactaggcttgtgataacatagtatcgacaagagtgactcccanagggtttgttaggactcacttgtaagggccagatctaaaataatctgtatcgattgtagcggcactagttgaaaaaagtactntacaacacgaagagtagggccacgctaattacacacgactacagttggagatcatttatcgctgctaacatgcatcgtcccgtagcttagggtcatacgatccggcctcatttcgttatttatgtagagctccgtcctcgtacgcaagggatattcgccacaaaacaccctgtgttctaaacttcaatccataaggccgctcggatccataatagcttaagactggtcattttaaggcacctcagctcgggtaaattaccatctaaataacatcctagattagtgagcgtagctgttattggctatttcatccaaaaatatttttggctccacttgtgatttcggccagactataggaagacgaaagttgtaatccctaacaaagggtatatcttcagttatggaatcggtacaaccacgtaacgtcacattaccgatacaccaaatctcctaccattttctaattatctcaccatatacgatcgagaggccccatttttatgccacctttgtaccaacaacctttttataaatggccttatattccaatattgaaaacaggtcctggttgggaattggtcttccctggaaccggttactccttgaaacacctttatggtgtacgccagtgaacattacgtggatttataaccttgggcggtccccttg

SEQ ID NO: 604560 - DNA, 232 bp, Homo sapiens
agcagctcatagcaattcataaagttgcatcaggcaaatatcatgcaaccatttcatgccatcactttgcatcaaatgcaaatggaaaatttctgaaaaaaacaagtccatcaaaactaacacaagacaggcagataaaatcattaatagccctatgtctactcaaagcacttgaatttgtaatttcaatttgtacctttcctgcaaagcaaatttctgtgcccatttcaag

SEQ ID NO: 604561 - DNA, 167 bp, Homo sapiens
  misc_feature (19)..(19): n is a, c, g, or t
  misc_feature (46)..(46): n is a, c, g, or t
  misc_feature (93)..(93): n is a, c, g, or t
  misc_feature (95)..(95): n is a, c, g, or t
  misc_feature (112)..(112): n is a, c, g, or t
  misc_feature (125)..(126): n is a, c, g, or t
actttttaaaactatttantgatgtaatgtatcagagaaactaganctagttactagattacaagcacgagtccatttcacaacacaagttgnanattactacatgagacantattttgccacanngacacgcacggtcaagcattggacaaattatatagatatta

SEQ ID NO: 604562 - DNA, 228 bp, Homo sapiens
cagctcggtcccggagcacactgcacaactgcaacatcttctctttgtcatataaaaagtaattgaggccgggcgaggctgctcatacctgtaatcccagcagtttgggaggccaaggcaggaggatgactttagctcagaagttcgagaccaggctgggcaaaaatagtgagaccccatcactacaaaaaaaaaaattagtcccagctactggggaggctgaggtgg

SEQ ID NO: 604563 - DNA, 375 bp, Homo sapiens
aggccgccctgtcatcagcacattcaagcagatctccgtggcggcattccgtgtgcactttggtaagatctgtcactaccttgacaacttctgcaaactcagctttggaatattggagcctggcacacttgagtctctgtttggcagaggagcgccttccattcatcccgaagttcatcgagctttggccacaggcaggcagcttatatcagcagcttgccaccattctttaaaagcagctttatctttttagcaaagaaaaggagttccgggccataaaagtaagaatgtcttctggcaatctcatataagtattttttcaaaaatgtctcttcagtgtcatgaagcgcagtgcacatcacatcactctctgct

SEQ ID NO: 604564 - DNA, 474 bp, Homo sapiens
cgtgcagctgaatctgttgtctctggctcctgcgagttcgccgtgtatcattggcatagtgcacttaggcttccttctgactgttcgttcaggggtcggtgagccggcatgggacaagccggcgcgtgctcctggatcaatcaccacccgagtctgtacatctagataccagtgacaatattccctatggctctatagaggcagagagtcacaaatgggaaatcaaaagctcctagaagcttcacaagtaggggcacaactcctgtttacaacaacatgccaatacgtacatttggaccatcagtacggtaggaaataacccaacaagtatcatgctaacacttctggatacatcatagatgccgagagccgaactacggtaggacgaatctgctcaacagcatctatcgcgggtgcaggcttcttgtagcggcaaagattagaaagtgtccacgagtaagattacgtaagtag

SEQ ID NO: 604565 - DNA, 688 bp, Homo sapiens
ggtctcaacggcactttcgttgcctattcgggtgatcttactaattggctcaactgtcaggtcatgggctgctttaagtggctccacaagtgtagtgtgtgcctactctgccaatctcgttggtggcacattcattcactgggtcctataggctcctccactatctgttccctctctgttggcgtcaggaaggctttaccttgtgtggggtatactcatacggaattcggacaatgccctctcaacatccttggtcccacaatttgcaacgggtagatcaggccacagcatgctgcgcatctatgctgcttggtatctgcactcaattccactgcaaccacaggggctacatggcactcgtctctctgcacctggtgcactaatgaagtctgctcatgatgtgcatggtactcgattgatctgcatacacactctagccacaggggctgacacttgccacccttgggcaacattcgcacaaggccaccatttgatgcacattgtctaagacactacagctacctgatcccctcgacctcgtggaaggtagactgtattcacacaagtctccctatcaggagttcactgaccaccatcgtcaagacccacaccagagtctccgtgcagcggatatcaggctgccagctgtggctacaacatatcaaccgtaggcagaatcttggtttgc

SEQ ID NO: 604566 - DNA, 1239 bp, Homo sapiens
atttcggcgtgaagtctcgatggccacgccattccgcccgcgccgataaagttgttggtgtgggtgtccttgtcgaagaacgccttgatggtgcccatgttctggtaggcgaagttgcggcctaccacaccctcgttggtaatcgggtcgtagggtttgccgatgccggacagcagcatcaggcgcacgttatggaactggaaggcgccaagaatcaccaggtcagccggttgttcacactcgcggccctgggcgtcgatgtaggtcacgccggtggctttcttcttggtgctgtcgaggttgaccttgagcacgtgggaattgggccgcagctcgaagttgggcacctggcgcaaggccggcaggatgttcacgttcggcgaagccttggagtacatgtagcacacgtagccactgcaaaacccgcagaagttgcacgggcccatctgcgcaccgtaggggttggtgtacggccccgacgtattggccgaaggcaggttgtaaggtttgtaacctacgtcggtcgccgctttctgaaacagctgggcggagacagtatttttctgcgcctccagcgggaacgggttggagcgatccggcgcgtaggggttgccgccacggccttcaccgaccagttggcccttgaccgtccaggcttggccggaggtgccaaagactttttccgcatagtcgaaaaacggctccagctcttcgtagctgacgccgaagtcctggatggtcatgtccttgggaatgaagttcttcccgtagcgctcttcgtaatggctgcgcatgcgcagctcaatcgggtcgacgcgaaaatgcacgcccgaccagtgcaaccccgcaccaccaacgccattgcccggcaagaacgcgcccaactgacgattgggcagggcgacgtcattcacgctgtggcgaatggtcaccgtttctttggagatgtcctggaacagcttcttacgcacgctgtaggtcaattcgtcgatgacctggggatagtgactcaggtggtgtgcacaccacctgagtccccctataccacaaggcctggagacggagcccgggcaatcccttgtctacgtggggctttcattacatcgtcaaattttataagtaagatcacactagtagacgctgataacaggcaaagtgagggaggtgatgacagagggtatgagcgggtgtcggacccatcgggggggcgaggggggcccggggagccgcggaacggcg

SEQ ID NO: 604567 - DNA, 672 bp, Homo sapiens
ttcgtagcaccggtcagtcttctgcctgccctgtcttggctgctccagacccagggcagagaagcagctcccagccctcatcagccatctgctcagcccctgccaccctgacccccaggtccccacactgccagccgtaccgcccagctccccactccagagctgcactcctcagtctctcaccccgtagcacatgtccccagtactcacaccaggctcttgtgatcaggccccagaaacctagcctgtagttcaaggagtttgtagtggtttgccctgcatgaatctgtcgccttttcccagtgaccggagctaccaggggatcccatggagccctgctctgtctgggtgagcatagtccccttctgcaggctggacgggtacgaacaagtgaacgccatgaggtacgagctggcgagtggatgcgactggtgtagcctttggagtggagtcaggggtccgttgttagcctcttccccagacaccaataaccctttcaggaacacccctaaatgaggcatcgtgatggttctgccttccatgtatgagtatgagccaccctgcacgtccctctgtgctcggatccaagctgtcaggcattcctccccagactcatggcctgggacttgcactttctgatggatgcacagccagggtctgagccaactccga

SEQ ID NO: 604568 - DNA, 371 bp, Homo sapiens
  misc_feature (334)..(334): n is a, c, g, or t
gcacgagcctatctgcatatttcgttgttagcaccatccctcatcccggtgggcttggaactttccatcaattctttcctgtctcgtttctctttcatcctttgcctggttgtgcctgtctcagggagaaatcagtcacctgcaggccttgcagggctcttaggctctgggaaatttgtcatacgggtgtcaggtacttcttattgctgtccaaagggaaaaaaaaaagtgagacaaagaactctcccggacctttccggctgcactcagaggctctcgagaggtgcagaaggacctggaaaggcagctaaataaaagatgccctgggcgaagnccaacctggctgttgctcgccttcctgctggtgtttt

SEQ ID NO: 604569 - DNA, 901 bp, Homo sapiens
  misc_feature (126)..(126): n is a, c, g, or t
  misc_feature (283)..(283): n is a, c, g, or t
  misc_feature (404)..(404): n is a, c, g, or t
  misc_feature (417)..(417): n is a, c, g, or t
  misc_feature (499)..(499): n is a, c, g, or t
  misc_feature (530)..(530): n is a, c, g, or t
  misc_feature (556)..(556): n is a, c, g, or t
  misc_feature (576)..(576): n is a, c, g, or t
  misc_feature (636)..(636): n is a, c, g, or t
  misc_feature (638)..(638): n is a, c, g, or t
  misc_feature (665)..(665): n is a, c, g, or t
  misc_feature (705)..(705): n is a, c, g, or t
  misc_feature (797)..(797): n is a, c, g, or t
  misc_feature (855)..(855): n is a, c, g, or t
gaccttcccgtgggcaacctcctgctcctcatagtggccatcctagtctcgaggggttaccgaatcgctaaacgaagcaaggggattgctacgtctgatttccctgctctctctgcaggtccccanatgtctgctaaggacacttatagtggcattactcatctgctcgtctcgactcgcaatgcctattaatactcatataagcctatctgcatgcctcttactatacccaagtctactctctatccgattcgaccacgcgtacataatctatccaacccgngcccccgtacacttctacgacattctacaatcgcattacagacttacatatgcttaacttagttgatattcccacaataccacgcaataattctaacacctcggcgtgtctccacatactnccagatcgattangaggcgctctctcatacatatatactcaaactcaagcgctcttctccttcgtaccactcgtagggcacctgttgtcttcctntcatagtcgccctcacgtagaggttccaacngagattaggcaggacaaattacagancccatatctgggaacttttntgaaacccctagaaatatctggacctgttctgacaagactgatacgggtcgaggcgaccntncaccggaagcatagcgtctatagaaanggctcagcaacatcgagcctctgcgcggttttcgtacaanactattgacgttatttgtcattttaaggctagtgtgcttctgtatagaagcatactctccttacactgaattacatgaaaacaacaattaanatttgactcttagggtgtacaacggtagtaggcttgctagaacaacctgtagaaccangtgacataggtaagagacgagggcgagcagcagatgggacaacggg

SEQ ID NO: 604570 - DNA, 198 bp, Homo sapiens
cgagataatgaggtgatcacgagttgcggacactcctttgatgcagcgagtgcagcggaactgggagagcgagcatcaggttttgaagttcaccaaagcagtcttcggatgagaaaccaagaagaagcgggcagtaccggggaggctcaatctctgtccaggtcaatactattaagtttgacagcgagtgacctgagg

SEQ ID NO: 604571 - DNA, 1080 bp, Homo sapiens
  misc_feature (302)..(302): n is a, c, g, or t
ggctttttagctgatttcattcttgttctgttattttgttggtctagtatgttatacagggcaagccctagaaaacgtgtcctttggagtgagctttccaagattccttttcctcagatgttgtacgacagaagctttagtgtaggttaatgggatctggtggaagagaacagcttagtctcctcttataagcttcgggaacactagaggatggtgtggatgaagactgcctgtaatagatgactcctgtttaagcactagccgtgaacagatgagacctcactaccactatgctcgctagnactacgatcgagcatggtggagagactgaccaggtgactcaaggactcacaacttgcgcgtagtgtactactagtagatgggaacgacagttagctgctcttgtcgatctaaactaatgtataacaggctttgtaggtgagttgtactataaggtcactattgtaggcgaattgggaataatcagggaatactttataggattgtgaatagaagttcttccaaatatatgctaagtaagtctggaaaatagatataccaagagaggtcggggcatgtggggtgaggatggtttatattattactcatctttgacagagctcgagtgcttagctaaatgctggaaatggacataggtggagaaatggtcagagcagcagtgggagcgtacccagaaccatgagtagacggcaagcgagctgtctgccaagccagggatggaggtgtgaggcggctggtgtgggtagaatatgtggaatctagttagaattcctggattgcaatcctgtcacagttcgttcatcagaccaattcaacttgccttttcctattattattcattttttttggagaaaagtctcaatgtttggccagggtgggggtcacatgggtgacaacttggctcaagtggaaccttaggctcccgagtcgcgcgggctaacgggtgcttgccactatggccaatcatatgggattcacgaacaaggggttacccattgttggcaggcaagcttgaactcggactccgtaaatcacggtctgggccccaagtgtgagatc

SEQ ID NO: 604572 - DNA, 220 bp, Homo sapiens
aaacctggccccgtattccttaacaacatgcatgtctttccttaccatgccagccggatagatagacagatggaaaaggcaggcgcggccttcgttgtcagtagtctttgatgtgaaaggggcagcacagtcatttaaacttggtccaacctcttcgcatcttacaaagttaaacagctaagagaagtaaaataagaaggcaatgcttgtggaatgtaca

SEQ ID NO: 604573 - DNA, 834 bp, Homo sapiens
gtgatggtgggaggctcagtctaatttctgcctgtaacagggatcagcgaatcttttctgtaaagagccagatagtaaacattttaggctttgcaagccacctggtctgttacaactatttacctttgtcccctctaagcagccatggatggtatgtaaatgaaggggtgtggctgtgttccagtacaatttatttacagacgccgaaattagaatttcacatgattttcatgtgtcactaagtagtagtaggattttcattttcccccagccctttaagagtaaaaactagctcactggtggcaggttggatgtggcccacgcgcctatagtttgccaagccccagtctggaagaagattgggaagtagtggcgaggaccggccctttgttcccgctctctggtgtttctgctcgctcacttgctcttcggtttctgatgaaataataatgtcatcagtttttatttaatgcttatcttgagacaggctgttctgcataaattattgatttagagtacaatttagtgaggtccttcctttacttaaataaaaagacaaaaaatattatctagatgtaaaaactgaggttcaggtgaagagtgaactgaccagggacgacacgtccaagacgaaaagtcgacttgaaaagtgacgtaggctggcgtgggggtcacacctgttatcccgcactttgggaaccgatgggtggatgctgaagctcagggtcgggaacagcggcactaggggagcctttttacaaacaagaacgaaaaaaaatttgtgggcccgccaaaatttaacactttggccgcccgaataaagtcagtcaaaag

SEQ ID NO: 604574 - DNA, 693 bp, Homo sapiens
aggagcttgatggtaccattcattcctaacattttcttctgaatggcttcgaaccaagcggtgtcgctcattcctttgggctgcggacagatacagttggctcggtcctctttggtcaatggagacagctgctgtgatcttttggacctgggtggtacgatcgtgtcgcttaatcttttcaaaaaccggcgttcttccacgagtttttccagttttgcatgcacatcaccatgtaccatatgccattcactgtccacctgcgccagtttggcttccaattgcgccctggattgtccataggaggcatcaaacttctgcctcatctccgccacatatgcatcgatcatgggcttccttagttggtccaattccttagaaaacgcggtctttctcaactgtacatagtaatctatctggtccagccaattgcacttagcacggtcccagggcgtattcaattgggtcctggcatccagaaacgcctccacacagcccgcgatcttgccgcttcctgttcggtccttcactaatcctctgacagagagcgtcccactacttagttttgttgccaaagcaccggtattaccgcttctggaacgataacggtggcctgcgccgttattattcctcctctcccaatggacgcttttatcgctaccgttattactgttatctctcaccattttttgaacc

SEQ ID NO: 604575 - DNA, 144 bp, Homo sapiens
  misc_feature (4)..(4): n is a, c, g, or t
  misc_feature (46)..(46): n is a, c, g, or t
  misc_feature (60)..(60): n is a, c, g, or t
  misc_feature (73)..(73): n is a, c, g, or t
tgtncactagtcagattcgtgacatttgcttgtatttgggaggctnaggtgggagaatcncttgagcccaggngtttgaggctacagtgagctatgattgggccactgcactccagcctgagctactgagggaaacccgatctc

SEQ ID NO: 604576 - DNA, 150 bp, Homo sapiens
gcggaatcaccatggcggctggaacccaggacacgaaccagaaaactggagggccttcaaggtctcaacgctgctcagtacagtggggctcaggtccgcgtgtctccgcaccaccccacttccatttagggcagaccaaccgatccctaa

SEQ ID NO: 604577 - DNA, 179 bp, Homo sapiens
cgtcgacatactttcttttttatatttatttagtttgatttttttgggacagtttctttgtgtagccctggcctggaacttgctttaaaggccagattagcctcgaactcagaaatctgcctgcctcccaagtggtgggattaaaggtcgacgcgccgcgtcgaagcggccgcgaattt

SEQ ID NO: 604578 - DNA, 395 bp, Homo sapiens
ggtaccatgtagtttggtggcgcatgcctataatcccagtactcaggaggctgaggcacgagaattgcttgaaccctggaggtggaggttgcagtgagcctagatcacgccactgcactccagcctggaaaacagagtgagactctgtctcaaaaaaaaaaaaaaaagaaaaaaaaagaggaaaggaaaggaaaggattctgattgatcacattcaaatacaattataatttccctgtaactgcttatcccctttaagctaccacgttactctccttggcacagccaatcatttttagagtgggtctacactcacggccatcacttcatcactgcctgttcattctccaatcactgcaggcgggcatccaccgacaccatagcaacaaaactgct

SEQ ID NO: 604579 - DNA, 500 bp, Homo sapiens
  misc_feature (23)..(23): n is a, c, g, or t
  misc_feature (266)..(266): n is a, c, g, or t
  misc_feature (459)..(459): n is a, c, g, or t
  misc_feature (479)..(479): n is a, c, g, or t
  misc_feature (494)..(494): n is a, c, g, or t
tcccacacttttattgtagcatntttggagtagtagtaatagataagtaaaattaattatatgaaaatttaaataataatctttattttttaatagagattttattagaaacttgcttgagaataggctttataagatacatacctatatgataccacttattgtgtgtctgttaaaattaataatgaaggctgctaactaggggttgagtcatgattagtagaataaaagaagttataggctcatgcctgtaatcctagcacttngggaggccgaggcaggcaaatcacctgaggtcgggagttcgagaccagcctgacaaccatggagaaaccccatctcaactaaaaatacaaaaaattagctgggcatggtggcacatgcctgtaaatcccagctacttgggaggctgaggtaggagaatccatttgaactcggggaggcagaggttgccggtgngccaagatcgcgccattggnctcccatcctgggcnaacttt

SEQ ID NO: 604580 - DNA, 215 bp, Homo sapiens
ccaagtatatagccggtccatcgttcactctgtgagttgaatacacacaacacaaggagttcctgagattgcttctgtctagcttttatggaaagatatttccttttctaccataggcctcaaagcgctcttagtatacacttccaaattctacaaagagagtgttactaaaccgctctctcaaaggaaatgttaaactctgtgagttgaacaca

SEQ ID NO: 604581 - DNA, 918 bp, Homo sapiens
  misc_feature (60)..(60): n is a, c, g, or t
  misc_feature (302)..(302): n is a, c, g, or t
cagtcacagtgttatactattctgggtttttctgtatacttaactgttaccagtgagttntgtgccttcaggtgatttcttattgctcactaacatcgtttactttctgattaatgtactctgtttagcatttcctgtaggacaggtctagtgttgatgaaatccctcagcttttgttgtctgggaaggtcttcatttctcctttatgcttgaatatattttccttcagcactttaaatatgtcatgccactctctcctggcctataaggtttccactgaaaagtctgctgccagacgtatnggagtgccattgtattttattggtttcttttcttttgctgcctttaggatccttccttttatccttgacttttaggaatttgattactaaatgcctgaggtagtcttctttgggttaatctgcttggtgttctacaagcttcttgttcttggatatcgatatcttcctctaggttgggaagttctctgttattatcctttgaataaactttctacccctgtctctttctctacctccactttaatgccaataactcttagatttgtttttaagtctattttctagatcttgtaggtgtacttctttcttttagtctttttcttctgtgtcctctgaccatattttccaataagcttaccttccagtcactaattcttggtccacttaatcaatcctggtattaacggtctctgatgcattcttcagatggcggtcgcatttttcaactcggaaattcagatggactcttttaatatgtaatctctgatacattatctgatggaatctaactttacgggtggggtggaattcttgaggttctcttggaagttattgaaaagtcggagggtcacgggaactggagagtggagtctcacagggaatggatatgtcgaag

SEQ ID NO: 604582 - DNA, 756 bp, Homo sapiens
  misc_feature (537)..(537): n is a, c, g, or t
ttgactccatttatgactagactacatttctgaaagatctttggtttacgattcttaagaatattgacaatgcctataaaactctgaagataacttttacttaaaattgaaaactattgttgaaaaccgttgaacagatacatattctgaacctttcttttggctccaagactatctctattatcatgttacttccaaaagctcttattctaagtctttaaatagaaatttgatctagtctcatagataaaaccatcttttagcttttaactgtgaataattgtcataattgatttttctgtttgctttgctctctcatgaggttttctgaagatgcctgacaaactgtcctgtgctcaaattttaaaataaggcataaaataattaatcagaggttctgtgctcataggcggagcttgtcaactttggggttctgtgtatggcaatcttgctagataatttacacaggaaaccttcaatatcattatctctgggtccttacaatttggcagtcagattccccagagaagaatcttncattctgacccttgggatataaatatagcctggctacctgttcatgagaagaaagctgaagacttacattcagaatcctttttttcatcagaatccctgtcctgtctgataaggcccctgtagaggccccttgattgctgaagaacaaatgaggtttgtcaacaggaaagactgccctggtattgaatggaggggaatgaggctgactcgatttccctt

SEQ ID NO: 604583 - DNA, 269 bp, Homo sapiens
tggatcccatctttaacaacctttctaggagacatgcattatcccttctgtatcttaattttctcgttccctactgaacattacacattggcattataaatttcttcaagtttctgtagtcaataaaatactctctgagtctgaattcttgatccagttaccaatgtatttcttattccttttacaaccttgtcattctttacaaatttgttgagagcctggatgcagtgtgccagtgagcctgggtgacagactgcgaccctgtctca

SEQ ID NO: 604584 - DNA, 402 bp, Homo sapiens
ccggttactgttactgggagcagctaggccatggtatcacgcacgaccctgccgtcctatctgagcattaccgcatgatccccggcagatatagcacacctgttatcagctagtctcgccgtggacctgctggggccacacggagatcctcgccgaaaggacgtacaggctcttggatgacaacatggaccagctcatcgagtacaaagcgtttgtgagctgcctcgatattatgtatactggagcacatgaatgagcggattcaactattatacaggcttcatatccctccagcactcactgaaaatgaccgagacaaccagtcgccgttgaaggaatcctctgttgtcaacatcgagacccctggtttacgggaaacccaatggtgatgcagttgactat

SEQ ID NO: 604585 - DNA, 332 bp, Homo sapiens
ggctatgacaagctcagcacgtgacttcatgcctaagactgttggaattgatccaatgtccatttacttgtgctgtaaaccagatgaaactggaaaatcagtattgggaaacaaaagcaatagagaagaagctgtattacagcggaaaactggcagccagcgcccctgccgccccccagcgaggaggctgtgtccagcagctctgaggatgactctgggattgatcgggaagaagagggctctgagtacatcagcgctccactcccgtgaagatgcacgatgccggagacagtgccaaagtgaccgaagaatgaggaacaaaccatgaaggc

SEQ ID NO: 604586 - DNA, 331 bp, Homo sapiens
  misc_feature (263)..(263): n is a, c, g, or t
aatttccggtgtgtggagtcggcggtggagtcctgctatgcgctcagactcaggccccctcactgctcctcggagttcctttctcttccgttagcttctcactctgcatcagttcctgaactccatctagaacgctagctgggtcttcagtttgaaccacttcctcatttggctcaccccctctagatttagctcagcgtccctttctgaatgcaggagcactctggttttcagactagttccttttcatagcagctagtttngtttaatagacatggtgttcttttgcaactctctgaagaaactatttaaaatttctttaaaagtgttt

SEQ ID NO: 604587 - DNA, 2879 bp, Homo sapiens
gcgacggcgccttcgcgaaacactatgctaatggcatggtgccgcggtcctgtcttgctgtgcctgcggcaggggctcggaaccaattcattcctgcacggcctggggcaggagcccttcgagggagctcggtcactgtgttgcaggtcctcgcctagagacctgcgagatggagaaagagagcacgaggcggcacaaaggaaagccccaggagcagagtcttgcccatctctccctctgagcatctcggacattgggactggatgtctttcgtcactggaaaacctcagactgccgacgctgcgggaagagtcatcacctcgagagctcgaggactcgagcggagaccagggccggtgcggtcccacacaccagggatccgaggatccttcgatgctctcgcaggcccagtccgctaccgaggtcgaagagcgtcacgtctccccttcttgttcaacttccagagagagaccctttcaggctggggagctgattttagctgagactggggagggagaaacaaaatttaagaaattatttaggttgaacaacttcggactcttaaatagtaactggggggcagtcccgttcggcaagatcgtggggaagttccccggccagatactgaggagttccttcggtaagcagtacatgctgaggaggccagccttggaagactatgtagtattgatgaaaagagggactgccataacattcccaaaggatattaatatgattctctcaatgatggatatcaacccaggtgatactgttttggaagctggctcaggctctggtggaatgagcttatttttatccaaagcagttggatcacaaggacgagtcataagttttgaggtacgaaaagaccaccatgatctggctaagaagaattacaaacactggcgtgattcatggaaattaagtcatgtagaagagtggccagacaatgtggattttattcataaggacatttcaggagcaaccgaagacataaaatctttaacatttgacgcagtagctttggatatgttaaatcctcatgttactttgcctgttttttacccacatcttaagcatggtggtgtatgtgctgtatatgtagtaaacatcacacaggttattgaacttttagatggaattcgcacctgtgaacttgctctttcatgtgaaaagataagcgaggtcattgtcagagattggttggtttgccttgcaaaacagaaaaatggaattttagctcaaaaagtagaatctaaaatcaacacagatgtacaactagattctcaagagaaaattggagttaaaggtgagctgtttcaagaggatgaccatgaagaatcgcattctgattttccatatggatcatttccctatgttgctagaccagtacactggcaacctggtcatacaggtgagtaatgttttcagaacatattaaatggtgttttttcttttaattaatataatgactttatgtttttcttctcttaaattagcttttcttgtcaagttgaggaaggtcaaaccacaacttaactgagtactccagatgacagtaactgacttgaagatggaaaaatatcaaaatagaactttatattgaaaatcactgcttccatagattggcatttttagctattactatgacttatataacttatacatataattttgaaaataacaactaaaagatgtataacatagcaaaactgcttaaacatcccattttgacacttgtcttgcagttagtttgacattttgtagttaatgattccaaattggtttagttgggccatctcattcttcacttcctgtaaaccactccatagatttgtctttcttcaagaaattagttttctttcctttatttgattgatggtcattgactacttcagaaccagtataagcttgagaaggatcacctattatgtccattgacagtgagttgtatgagtcctgagaatgtttttctgtcacccctgctgtatgactggataaagatgatgatgaagacaatcccagtctaacatatcttctttttttaccacagagtgaacaatctactggtgtggcactaggtccccggggcagctgaacttcatctctgttgtagtttctgacagctccactgtgatgaacagaacgttctctttgccagatataatgggttggtgcaatggccataacctcctcacaacatcgcctgcttacaatagccctatagtcaattctatcccagagctggtcccttaactttaagaaattagggaacaattttctccagtttttccctaaagcccatggaaaaatttcgtacttggtttcttcttcatcttcttcaactgtattagccagatacagagcaataaagaaatttatcctggtatgctcacttatagtaaatttagccctcttgaaataaacaaaggtcatagccaaaagatacttgtctgcaattttacagcagcagtccatccacaagaaatcttgaattaaatcgtcatcaaataatttaaagaaagcagtcatatcctgacgctgtataaccagacaaggtcctttggggcgtttagatttgttgttattatgtgtatttttttcaaatgcttgccaattatctttacaaataggacgcttcagagtaatgggctttttaggctgatgtgatctatttgaccctgattttacataaacagtgacagtaggtggtgtctcacaacacatctgattgtgcctcattttggtttcccaatattcctgcggaagcccggggctgcgcgggagagggccgggcaacggcggtcaaggctccgtcgcagcgctcctggcctcagacggttgctcgtcggtcgctagccagcagcggtacccccgct

SEQ ID NO: 604588 - DNA, 508 bp, Homo sapiens
ttttggggcggggccggccggctttggctctctctctttttctgtccccgggctctctgagcgcaggtagcacgacatgcgctctcctgcaccgcgtgctggtccatgccaagtgttgtcgtctatttgctgtgcccttctatttgcgcttcctcgctgttggctttagtcctgccggctccccgcccttggcgtatgctgctcattctatgaattcttttctgttccactggcttggtccgttactgtgtctccggccgggtccgcccagtctctcgtctccctgtgcctcccagtgtcgcccactccagcggccagtatgcgcaggtcctgcctatgtccctagcccgcctgggtggcagggcccagtcctgggcgcaggatcgctcctggcctcatcctctgcgccgcctgtggactaccccccacaaccaacagaacagaagaatgtcacaagatccataaggcacataccctacatgatgctataagcaacaaaatgaaatca

SEQ ID NO: 604589 - DNA, 135 bp, Homo sapiens
atcatagcacccactagatgcacccactacttctgctgatactccattagctaatgcatgcttaccagcttattcaccttttacatggttagcatctgtttgctcagtctctgctctcttatcttctacgttaag

SEQ ID NO: 604590 - DNA, 2868 bp, Homo sapiens
gcgacggcgccttcgcgaaacactatgctaatggcatggtgccgcggtcctgtcttgctgtgcctgcggcaggggctcggaaccaattcattcctgcacggcctggggcaggagcccttcgagggagctcggtcactgtgttgcaggtcctcgcctagagacctgcgagatggagaaagagagcacgaggcggcacaaaggaaagccccaggagcagagtcttgcccatctctccctctgagcatctcggacattgggactggatgtctttcgtcactggaaaacctcagactgccgacgctgcgggaagagtcatcacctcgagagctcgaggactcgagcggagaccagggccggtgcggtcccacacaccagggatccgaggatccttcgatgctctcgcaggcccagtccgctaccgaggtcgaagagcgtcacgtctccccttcttgttcaacttccagagagagaccctttcaggctggggagctgattttagctgagactggggagggagaaacaaaatttaagaaattatttaggttgaacaacttcggactcttaaatagtaactggggggcagtcccgttcggcaagatcgtggggaagttccccggccagatactgaggagttccttcggtaagcagtacatgctgaggaggccagccttggaagactatgtagtattgatgaaaagagggactgccataacattcccaaaggatattaatatgattctctcaatgatggatatcaacccaggtgatactgttttggaagctggctcaggctctggtggaatgagcttatttttatccaaagcagttggatcacaaggacgagtcataagttttgaggtacgaaaagaccaccatgatctggctaagaagaattacaaacactggcgtgattcatggaaattaagtcatgtagaagagtggccagacaatgtggattttattcataaggacatttcaggagcaaccgaagacataaaatctttaacatttgacgcagtagctttggatatgttaaatcctcatgttactttgcctgttttttacccacatcttaagcatggtggtgtatgtgctgtatatgtagtaaacatcacacaggttattgaacttttagatggaattcgcacctgtgaacttgctctttcatgtgaaaagataagcgaggtcattgtcagagattggttggtttgccttgcaaaacagaaaaatggaattttagctcaaaaagtagaatctaaaatcaacacagatgtacaactagattctcaagagaaaattggagttaaaggtgagctgtttcaagaggatgaccatgaagaatcgcattctgattttccatatggatcatttccctatgttgctagaccagtacactggcaacctggtcatacagcttttcttgtcaagttgaggaaggtcaaaccacaacttaactgagtactccagatgacagtaactgacttgaagatggaaaaatatcaaaatagaactttatattgaaaatcactgcttccatagattggcatttttagctattactatgacttatataacttatacatataattttgaaaataacaactaaaagatgtataacatagcaaaactgcttaaacatcccattttgacacttgtcttgcagttagtttgacattttgtagttaatgattccaaattggtttagttgggccatctcattcttcacttcctgtaaaccactccatagatttgtctttcttcaagaaattagttttctttcctttatttgattgatggtcattgactacttcagaaccagtataagcttgagaaggatcacctattatgtccattgacagtgagttgtatgagtcctgagaatgtttttctgtcacccctgctgtatgactggataaagatgatgatgaagacaatcccagtctaacatatcttctttttttaccacagagtgaacaatctactggtgtggcactaggtccccggggcagctgaacttcatctctgttgtagtttctgacagctccactgtgatgaacagaacgttctctttgccagatataatgggttggtgcaatggccataacctcctcacaacatcgcctgcttacaatagccctatagtcaattctatcccagagctggtcccttaactttaagaaattagggaacaattttctccagtttttccctaaagcccatggaaaaatttcgtacttggtttcttcttcatcttcttcaactgtattagccagatacagagcaataaagaaatttatcctggtatgctcacttatagtaaatttagccctcttgaaataaacaaaggtcatagccaaaagatacttgtctgcaattttacagcagcagtccatccacaagaaatcttgaattaaatcgtcatcaaataatttaaagaaagcagtcatatcctgacgctgtataaccagacaaggtcctttggggcgtttagatttgttgttattatgtgtatttttttcaaatgcttgccaattatctttacaaataggacgcttcagagtaatgggctttttaggctgatgtgatctatttgaccctgattttacataaacagtgacagtaggtggtgtctcacaacacatctgattgtgcctcattttggtttcccaatattccttccttggtgttcaaggagtgaggtacagattccccttcctgaccctcagaaatttcccttctgaaggaaggactgcggaagcccggggctgcgcgggagagggccgggcaacggcggtcaaggctccgtcgcagcgctcctggcctcagacggttgctcgtcggtcgctagccagcagcggtacccccgct

SEQ ID NO: 604591 - DNA, 741 bp, Homo sapiens
gccgccaacacgggtggagggacaggaaggggggagacaaaaacgggggcgccacaaaaaagaggggcgagagagacgccgagggaaacagactgcgggccccccgggggggagaaataggacccccgagagggagatgtgtgagccacacgagaagcccacccgggggggcaccaccccgccgtgccggggtagctcgggtccctcactagctttgtgtgtccaaagactgagtggagagaactcgcgcgttagggggcactcacatataagatggtgtcccacccgcgggggggtgtggttcgccaccccaaaaagaagatggaatgaggccccccaccacccgctggggcgggtgacccacagggaaggcggcggggaggggcacacgccaccacacacgcatccgccacgcgcaccacccccaggtgggaacaccaccacggtgtatgcacccccacaacacaccccacacacccccgcgcgagatgaggtgtgggggcccacgcacaaccccacacaacccccgtgattgtggcccccaacacacacacacgagggggcggggccaccaagaggggagaggagacgacacacaccaccagccccccccccacgcaagaaccacccccgccggggtgtgggtgggaaatatgtgtgtgtgtgtgtgtggtgggtgtgtgtgtgtgtgtgtgtgtgtgtggagaagaaaaaaaaagagtgtgttgtgcgcgcccccca

SEQ ID NO: 604592 - DNA, 2498 bp, Homo sapiens
gcgacggcgccttcgcgaaacactatgctaatggcatggtgccgcggtcctgtcttgctgtgcctgcggcaggggctcggaaccaattcattcctgcacggcctggggcaggagcccttcgagggagctcggtcactgtgttgcaggtcctcgcctagagacctgcgagatggagaaagagagcacgaggcggcacaaaggaaagccccaggagcagagtcttgcccatctctccctctgagcatctcggacattgggactggatgtctttcgtcactggaaaacctcagactgccgacgctgcgggaagagtcatcacctcgagagctcgaggactcgagcggagaccagggccggtgcggtcccacacaccagggatccgaggatccttcgatgctctcgcaggcccagtccgctaccgaggtcgaagagcgtcacgtctccccttcttgttcaacttccagagagagaccctttcaggctggggagctgattttagctgagactggggagggagaaacaaaatttaagaaattatttaggttgaacaacttcggactcttaaatagtaactggggggcagtcccgttcggcaagatcgtggggaagttccccggccagatactgaggagttccttcggtaagcagtacatgctgaggaggccagccttggaagactatgtagtattgatgaaaagagggactgccataacattcccaaaggatattaatatgattctctcaatgatggatatcaacccaggtgatactgttttggaagctggctcaggctctggtggaatgagcttatttttatccaaagcagttggatcacaaggacgagtcataagttttgaggtacgaaaagaccaccatgatctggctaagaagaattacaaacactggcgtgattcatggaaattaagtcatgtagaagagtggccagacaatgtggattttattcataaggacatttcaggagcaaccgaagacataaaatctttaacatttgacgcagtagctttggatatgttaaatcctcatgttactttgcctgttttttacccacatcttaagcatggtggtgtatgtgctgtatatgtagtaaacatcacacaggttattgaacttttagatggaattcgcacctgtgaacttgctctttcatgtgaaaagataagcgaggtcattgtcagagattggttggtttgccttgcaaaacagaaaaatggaattttagctcaaaaagtagaatctaaaatcaacacagatgtacaactagattctcaagagaaaattggagttaaaggtgagctgtttcaagaggatgaccatgaagaatcgcattctgattttccatatggatcatttccctatgttgctagaccagtacactggcaacctggtcatacagcttttcttgtcaagttgaggaaggtcaaaccacaacttaactgagtactccagatgacagtaactgacttgaagatggaaaaatatcaaaatagaactttatattgaaaatcactgcttccatagattggcatttttagctattactatgacttatataacttatacatataattttgaaaataacaactaaaagatgtataacatagcaaaactgcttaaacatcccattttgacacttgtcttgcagttagtttgacattttgtagttaatgattccaaattggtttagttgggccatctcattcttcacttcctgtaaaccactccatagatttgtctttcttcaagaaattagttttctttcctttatttgattgatggtcattgactactctcctcacaacatcgcctgcttacaatagccctatagtcaattctatcccagagctggtcccttaactttaagaaattagggaacaattttctccagtttttccctaaagcccatggaaaaatttcgtacttggtttcttcttcatcttcttcaactgtattagccagatacagagcaataaagaaatttatcctggtatgctcacttatagtaaatttagccctcttgaaataaacaaaggtcatagccaaaagatacttgtctgcaattttacagcagcagtccatccacaagaaatcttgaattaaatcgtcatcaaataatttaaagaaagcagtcatatcctgacgctgtataaccagacaaggtcctttggggcgtttagatttgttgttattatgtgtatttttttcaaatgcttgccaattatctttacaaataggacgcttcagagtaatgggctttttaggctgatgtgatctatttgaccctgattttacataaacagtgacagtaggtggtgtctcacaacacatctgattgtgcctcattttggtttcccaatattcctgcggaagcccggggctgcgcgggagagggccgggcaacggcggtcaaggctccgtcgcagcgctcctggcctcagacggttgctcgtcggtcgctagccagcagcggtacccccgct

SEQ ID NO: 604593 - DNA, 970 bp, Homo sapiens
  misc_feature (702)..(702): n is a, c, g, or t
tggctccgtctgtggggtggcgatcccgccggggtcctcgccgtgtgccgtaggaactctgctacagaggaaaatggatgctccatcatccatcctcctcagctggtggggtctggtgtgcaagttcggatcagtggatcctggctttcggccgttctcagagcttgcctccactcatctggaaagctcctttttcacgcatactccataataggatgctggtagagcattgtgacgcatcgaatgcgcctctgagagaattccctcgtggcgattcgtgttccctagcgtactcaatgtgtgcatcctacgttgtgatgctagggtgaaaaccttgattcggcgatagctgctcgtgctggcatcaatcttagcttgctggggtacgaaagagcgtggatggcttgacggatgtgtggaggtattattggcaccgctcgaagacgagcgttgcatggtgatttcaccccccactcgttcagggttttgtactacttgcccttgggatggtcatccgtctgggtgcgcaaggaaaggtgccgtggtccccgttggggcgacatttcttcttgcaggcttatcagtaggcctttctcggagatcctaccagctacgttgattgaatttgttcaatggcgccattatgtatctgtgggttcttctgttattctatgcacgtgggcaactacatagcgttagtantggtggtgacctcttcaggggaaaatggtacgcgacttgtgttctcaaaaagtattggcggaatcagggtttcgtataactgtgttgttggagagcccagggtggtttgggggctagaggaggggtccaaaaatttttaaagcccagtggggagtataaaatttgggcgcgaatggagttggctggaaaccatgggggggggaaaattacacagaaaggcgaggcggcactgtgggaaaaattttggtccaaaatttgggaatgttta

SEQ ID NO: 604594 - DNA, 3111 bp, Homo sapiens
gcgacggcgccttcgcgaaacactatgctaatggcatggtgccgcggtcctgtcttgctgtgcctgcggcaggggctcggaaccaattcattcctgcacggcctggggcaggagcccttcgagggagctcggtcactgtgttgcaggtcctcgcctagagacctgcgagatggagaaagagagcacgaggcggcacaaaggaaagccccaggagcagagtcttgcccatctctccctctgagcatctcggacattgggactggatgtctttcgtcactggaaaacctcagactgccgacgctgcgggaagagtcatcacctcgagagctcgaggactcgagcggagaccagggccggtgcggtcccacacaccagggatccgaggatccttcgatgctctcgcaggcccagtccgctaccgaggtcgaagagcgtcacgtctccccttcttgttcaacttccagagagagaccctttcaggctggggagctgattttagctgagactggggagggagaaacaaaatttaagaaattatttaggttgaacaacttcggactcttaaatagtaactggggggcagtcccgttcggcaagatcgtggggaagttccccggccagatactgaggagttccttcggtaagcagtacatgctgaggaggccagccttggaagactatgtagtattgatgaaaagagggactgccataacattcccaaaggatattaatatgattctctcaatgatggatatcaacccaggtgatactgttttggaagctggctcaggctctggtggaatgagcttatttttatccaaagcagttggatcacaaggacgagtcataagttttgaggtacgaaaagaccaccatgatctggctaagaagaattacaaacactggcgtgattcatggaaattaagtcatgtagaagagtggccagacaatgtggattttattcataaggacatttcaggagcaaccgaagacataaaatctttaacatttgacgcagtagctttggatatgttaaatcctcatgttactttgcctgttttttacccacatcttaagcatggtggtgtatgtgctgtatatgtagtaaacatcacacaggttattgaacttttagatggaattcgcacctgtgaacttgctctttcatgtgaaaagataagcgaggtcattgtcagagattggttggtttgccttgcaaaacagaaaaatggaattttagctcaaaaagtagaatctaaaatcaacacagatgtacaactagattctcaagagaaaattggagttaaaggtgagctgtttcaagaggatgaccatgaagaatcgcattctgattttccatatggatcatttccctatgttgctagaccagtacactggcaacctggtcatacagcttttcttgtcaagttgaggaaggtcaaaccacaacttaactgagtactccagatgacagtaactgacttgaagatggaaaaatatcaaaatagaactttatattgaaaatcactgcttccatagattggcatttttagctattactatgacttatataacttatacatataattttgaaaataacaactaaaagatgtataacatagcaaaactgcttaaacatcccattttgacacttgtcttgcagttagtttgacattttgtagttaatgattccaaattggtttagttgggccatctcattcttcacttcctgtaaaccactccatagatttgtctttcttcaagaaattagttttctttcctttatttgattgatggtcattgactacttcagaaccagtataagcttgagaaggatcacctattatgtccattgacagtgagttgtatgagtcctgagaatgtttttctgtcacccctgctgtatgactggataaagatgatgatgaagacaatcccagtctaacatatcttctttttttaccacagagtgaacaatctactggtgtggcactaggtccccggggcagctgaacttcatctctgttgtagtttctgacagctccactgtgatgaacagaacgttctctttgccagatataatgggttggtgcaatggccataacctcctcacaacatcgcctgcttacaatagccctatagtcaattctatcccagagctggtcccttaactttaagaaattagggaacaattttctccagtttttccctaaagcccatggaaaaatttcgtacttggtttcttcttcatcttcttcaactgtattagccagatacagagcaataaagaaatttatcctggtatgctcacttatagtaaatttagccctcttgaaataaacaaaggtcatagccaaaagatacttgtctgcaattttacagcagcagtccatccacaagaaatcttgaattaaatcgtcatcaaataatttaaagaaagcagtcatatcctgacgctgtataaccagacaaggtcctttggggcgtttagatttgttgttattatgtgtatttttttcaaatgcttgccaattatctttacaaataggacgcttcagagtaatgggctttttaggctgatgtgatctatttgaccctgattttacataaacagtgacagtaggtggtgtctcacaacacatctgattgtgcctcattttggtttcccaatattccttccttggtgttcaaggagtgaggtacagattccccttcctgaccctcagaaatttcccttctgaaggaaggactgcgcggccactgcctccctcgccaggtccctcagcccagagcccgctgcggggagcgcgtgtgtcgtcgccgcgaaggcagctgagggcgcccacgggaggcggcgtgaggacgaggctggagcgctgccttctcatctaaggcgggcggtggggtcgccggcgagcgaacccagggaccgggcacactcgaaactggagattcgcctgcgaggccccttcccgggggcgagcacaggtacctgcggaagcccggggctgcgcgggagagggccgggcaacggcggtcaaggctccgtcgcagcgctcctggcctcagacggttgctcgtcggtcgctagccagcagcggtacccccgct

SEQ ID NO: 604595 - DNA, 437 bp, Homo sapiens
  misc_feature (58)..(58): n is a, c, g, or t
  misc_feature (82)..(82): n is a, c, g, or t
  misc_feature (92)..(92): n is a, c, g, or t
  misc_feature (94)..(94): n is a, c, g, or t
  misc_feature (165)..(165): n is a, c, g, or t
  misc_feature (183)..(183): n is a, c, g, or t
  misc_feature (188)..(188): n is a, c, g, or t
  misc_feature (203)..(203): n is a, c, g, or t
  misc_feature (239)..(239): n is a, c, g, or t
  misc_feature (305)..(305): n is a, c, g, or t
  misc_feature (311)..(311): n is a, c, g, or t
  misc_feature (321)..(321): n is a, c, g, or t
  misc_feature (369)..(369): n is a, c, g, or t
  misc_feature (423)..(423): n is a, c, g, or t
  misc_feature (431)..(431): n is a, c, g, or t
gccatccccttgttcatccctcatccacagtaggacaccatccttctgttcacttganagttttccacaataattacaaaanaaaacataanangttttctaatgacactgtgaagcccaaactgatcttctctcaaccccattctatgtagtcagcaccagtgnatggtgggtttggggttnggggngggggttggcgtttnagtggggagctggggggggggttgcggcagcaaggnatccgtggccgcattcagaggctggctcccctccttgcctttactctcgagtcttacttaaccttngagacnaactgggtcnacttggtaaatgggcacagtcaaagacttagccataagaggtaagggnccagtcaatactcccaaggctggttaggcccttcaacatgtaggtgggtgtgtntatgtgtncgtcgc

SEQ ID NO: 604596 - DNA, 1449 bp, Homo sapiens
tatccgctccccgcaacggaagaccgagggcagggaagcagtgagggaggttcatgaattaccctccataaaggaaagggccgaagagttccgccctggagaccagcgaggccattttttttgtgttttttgagattacaagtaaatttattttcttcttgaaacccttttgaataaaataaacatttcaaaaaaatgattcaggctcttaaaatactgaggcttatggtgcattagttttcaacttaacataggtcacattaaaaatctgtttaggtgggtcaccacaaaacaaatatggacacaagacaaaaagtaactgaaaggggagaaagtttcaagattaatttaactcatattgttggagtatataaattattatgtatccccgccagaaaggactgactagagctcagtaaacaacatgcataaatctaattctggcatattactaaatcataccttcagaaccagtataagcttgagaaggatcacctattatgtccattgacagtgagttgtatgagtcctgagaatgtttttctgtcacccctgctgtatgactggataaagatgatgatgaagacaatcccagtctaacatatcttctttttttaccacagagtgaacaatctactggtgtggcactaggtccccggggcagctgaacttcatctctgttgtagtttctgacagctccactgtgatgaacagaacgttctctttgccagatataatgggttggtgcaatggccataacctcctcacaacatcgcctgcttacaatagccctatagtcaattctatcccagagctggtcccttaactttaagaaattagggaacaattttctccagtttttccctaaagcccatggaaaaatttcgtacttggtttcttcttcatcttcttcaactgtattagccagatacagagcaataaagaaatttatcctggtatgctcacttatagtaaatttagccctcttgaaataaacaaaggtcatagccaaaagatacttgtctgcaattttacagcagcagtccatccacaagaaatcttgaattaaatcgtcatcaaataatttaaagaaagcagtcatatcctgacgctgtataaccagacaaggtcctttggggcgtttagatttgttgttattatgtgtatttttttcaaatgcttgccaattatctttacaaataggacgcttcagagtaatgggctttttaggctgatgtgatctatttgaccctgattttacataaacagtgacagtaggtggtgtctcacaacacatctgattgtgcctcattttggtttcccaatattcctgcggaagcccggggctgcgcgggagagggccgggcaacggcggtcaaggctccgtcgcagcgctcctggcctcagacggttgctcgtcggtcgctagccagcagcggtacccccgct

SEQ ID NO: 604597 - DNA, 2164 bp, Homo sapiens
gcgacggcgccttcgcgaaacactatgctaatggcatggtgccgcggtcctgtcttgctgtgcctgcggcaggggctcggaaccaattcattcctgcacggcctggggcaggagcccttcgagggagctcggtcactgtgttgcaggtcctcgcctagagacctgcgagatggagaaagagagcacgaggcggcacaaaggaaagccccaggagcagagtcttgcccatctctccctctgagcatctcggacattgggactggatgtctttcgtcactggaaaacctcagactgccgacgctgcgggaagagtcatcacctcgagagctcgaggactcgagcggagaccagggccggtgcggtcccacacaccagggatccgaggatccttcgatgctctcgcaggcccagtccgctaccgaggtcgaagagcgtcacgtctccccttcttgttcaacttccagagagagaccctttcaggctggggagctgattttagctgagactggggagggagaaacaaaatttaagaaattatttaggttgaacaacttcggactcttaaatagtaactggggggcagtcccgttcggcaagatcgtggggaagttccccggccagatactgaggagttccttcggtaagcagtacatgctgaggaggccagccttggaagactatgtagtattgatgaaaagagggactgccataacattcccaaaggatattaatatgattctctcaatgatggatatcaacccaggtgatactgttttggaagctggctcaggctctggtggaatgagcttatttttatccaaagcagttggatcacaaggacgagtcataagttttgaggtacgaaaagaccaccatgatctggctaagaagaattacaaacactggcgtgattcatggaaattaagtcatgtagaagagtggccagacaatgtggattttattcataaggacatttcaggagcaaccgaagacataaaatctttaacatttgacgcagtagctttggatatgttaaatcctcatgttactttgcctgttttttacccacatcttaagcatggtggtgtatgtgctgtatatgtagtaaacatcacacaggttattgaacttttagatggaattcgcacctgtgaacttgctctttcatgtgaaaagataagcgaggtcattgtcagagattggttggtttgccttgcaaaacagaaaaatggaattttagctcaaaaagtagaatctaaaatcaacacagatgtacaactagattctcaagagaaaattggagttaaaggtgagctgtttcaagaggatgaccatgaagaatcgcattctgattttccatatggatcatttccctatgttgctagaccagtacactggcaacctggtcatacagcttttcttgtcaagttgaggaaggtcaaaccacaacttaactgagtactccagatgacagtaactgacttgaagatggaaaaatatcaaaatagaactttatattgaaaatcactgcttccatagattggcatttttagctattactatgacttatataacttatacatataattttgaaaataacaactaaaagatgtataacatagcaaaactgcttaaacatcccattttgacacttgtcttgcagttagtttgacattttgtagttaatgattccaaattggtttagttgggccatctcattcttcacttcctgtaaaccactccatagatttgtctttcttcaagaaattagttttctttcctttatttgattgatggtcattgactacttcagaaccagtataagcttgagaaggatcacctattatgtccattgacagtgagttgtatgagtcctgagaatgtttttctgtcacccctgctgtatgactggataaagatgatgatgaagacaatcccagtctaacatatcttctttttttaccacagagtgaacaatctactggtgtggcactaggtccccggggcagctgaacttcatctctgttgtagtttctgacagctccactgtgatgaacagaacgttctctttgccagatataatgggttggtgcaatggccataacctagggtctgttgtgttggaaaaagattcggtgctgaaaggggataaagacgttagatg

SEQ ID NO: 604598 - DNA, 1527 bp, Homo sapiens
  misc_feature (329)..(329): n is a, c, g, or t
  misc_feature (507)..(507): n is a, c, g, or t
  misc_feature (860)..(860): n is a, c, g, or t
  misc_feature (1421)..(1421): n is a, c, g, or t
ggcaacatgctaggtgttggatgagtcgcggtggccgcgtgggtcggcgccgtcaggcggtgttggggcgatagtcatgcgcgcgtataccggcgtctgcgtgttcccgcaggatcgattcttcgtgtacgttgcgcggttccgcgtcgcgcagcgggctcgtcgcgatcgctggtacaggggactgagtgccggcagcgacaccagcagtcatccctctcgggcagagcagcaggggcgaccgataaccgaggtgcatcgctcggtcggtcaatttgtgcggccgtgtgtgggtcagtgcacgttagagtgtacagggatctactganacagattacttataattgtcctcttgtgcacactgtgcccagtgtcaaggaagtacccagacttcggttgtatgtgacctgctgcgtgccaggcacttctgcgtgctgagggagtcgacgggttaagggaacgtaatttagtcgtactggtagtgggaaacacgaagaagggcccctnttgggcctcctggaggcacgaggccgaaccgaacacaaggggatcttcgggaaggtccatttgtgttgggcctaggccctaaaattccgaggagaggaacttcttacctagattgtgggctccacctggtacgggagcttctttgggggggtcgattaaaaattgcttgtccggtaccccttgcttgcgaattgttgggtggagggcacaaacccctgaattctagtacttcggaataggagggggaggcgcatcttcccaaattcccattagagaaccccaaaaaagacctacaatttccaggttcctggctcccaactctgtcttagtcggcgccttagagaaaggggctnttaccattggagcggtgtgcaattcgagaaggcaatccgagggtctagagatgtcggcaccccaaacgaggcaataggattcccccttgtggtcagaaacgtggttggaaacatcgagagacccggtcattggcccggggacttcctttggttgaccgtggtgtcttcacccgtgactcttccaaaatacgcgcgattttgcgaaccccaccagagggttgggccgaaccttgggggtgcaagattccggtgtgtcatagctcgttgcggaacagcctttgtgtggcccattgaaagagaagagaccctgtgcctcaccaatggtgaagtggagcgacatgagagattacatacgcgaaatgtggagtcctgggcgttaaacaagacgcctttccaaagttggccctggtgtgtgacactttgcgatagcgtttgcgtccaacagcgctgtggggtggtaaaagtcggttttccggcaaccgagagggggcccgaatgcccttttgtgggcacattgcaccaactttttatccttacagccgaaatgccttaaacataggnttaagcaccttgtatatgcgcctggcgtaaagctccttcctgggggaaaacagaggacgaaccgttcgcgtaacttttcacacacaaagggttctttccgccttag

SEQ ID NO: 604599 - DNA, 971 bp, Homo sapiens
  misc_feature (19)..(19): n is a, c, g, or t
  misc_feature (153)..(153): n is a, c, g, or t
  misc_feature (247)..(247): n is a, c, g, or t
caaatttacctgtccacanggagcctggtttgtgaaataatttaaatgtattaaggatgttttatatttagatcaccgattattaatgggacccgataggcaaatagcctaatattcccaaaaagcaaccttcctaagatgcctgcctggaantcttgaaagaactgagtttaggtctttgtcatatatacacattatttaggccatgaacaagttttcaagtatcagttgatttatgatataggcntatccatttggttataaaatcatatgtttattacataatcattgacaaatagtttctgtataataactggcagagtagctctaaaacatatgcaaggaaataaataaagaaaaaacttacaataaagagagtaactcatattttaacagttttgtgaaaaaaatagaaaatattttatgtagcttatagtacatatatttttttacaacagaagaatcgcattctgattttccatatggatcatttccctatgttgctagaccagtacactggcaacctggtcatacagcttttcttgtcaagttgaggaaggtcaaaccacaacttaactgagtactccagatgacagtaactgacttgaagatggaaaaatatcaaaatagaactttatattgaaaatcactgcttccatagattggcatttttagctattactatgacttatataacttatacatataattttgaaaataacaactaaaagatgtataacatagcaaaactgcttaaacatcccattttgacacttgtcttgcagttagtttgacattttgtagttaatgattccaaattggtttagttgggccatctcattcttcacttcctgtaaaccactccatagatttgtctttcttcaagaaattagttttctttcctttatttgattgatggtcattgactactgaaataaaatatgcattttaagataaaaaaaaaaaaaaca

SEQ ID NO: 604600 - DNA, 1860 bp, Homo sapiens
  misc_feature (1)..(1): n is a, c, g, or t
ncgttgcgcacggagtggcaaagcagtttcaagtaggacggatctggattaccctcctacaggaagcggcgcgaagctcccgcctgtaggctgagagggccattttattttttttggttataaaatcatatgtttattacataatcattgacaaatagtttctgtataataactggcagagtagctctaaaacatatgcaaggaaataaataaagaaaaaacttacaataaagagagtaactcatattttaacagttttgtgaaaaaaatagaaaatattttatgtagcttatagtacatatatttttttacaacagaagaatcgcattctgattttccatatggatcatttccctatgttgctagaccagtacactggcaacctggtcatacaggtgagtaatgttttcagaacatattaaatggtgttttttcttttaattaatataatgactttatgtttttcttctcttaaattagcttttcttgtcaagttgaggaaggtcaaaccacaacttaactgagtactccagatgacagtaactgacttgaagatggaaaaatatcaaaatagaactttatattgaaaatcactgcttccatagattggcatttttagctattactatgacttatataacttatacatataattttgaaaataacaactaaaagatgtataacatagcaaaactgcttaaacatcccattttgacacttgtcttgcagttagtttgacattttgtagttaatgattccaaattggtttagttgggccatctcattcttcacttcctgtaaaccactccatagatttgtctttcttcaagaaattagttttctttcctttatttgattgatggtcattgactacttcagaaccagtataagcttgagaaggatcacctattatgtccattgacagtgagttgtatgagtcctgagaatgtttttctgtcacccctgctgtatgactggataaagatgatgatgaagacaatcccagtctaacatatcttctttttttaccacagagtgaacaatctactggtgtggcactaggtccccggggcagctgaacttcatctctgttgtagtttctgacagctccactgtgatgaacagaacgttctctttgccagatataatgggttggtgcaatggccataacctcctcacaacatcgcctgcttacaatagccctatagtcaattctatcccagagctggtcccttaactttaagaaattagggaacaattttctccagtttttccctaaagcccatggaaaaatttcgtacttggtttcttcttcatcttcttcaactgtattagccagatacagagcaataaagaaatttatcctggtatgctcacttatagtaaatttagccctcttgaaataaacaaaggtcatagccaaaagatacttgtctgcaattttacagcagcagtccatccacaagaaatcttgaattaaatcgtcatcaaataatttaaagaaagcagtcatatcctgacgctgtataaccagacaaggtcctttggggcgtttagatttgttgttattatgtgtatttttttcaaatgcttgccaattatctttacaaataggacgcttcagagtaatgggctttttaggctgatgtgatctatttgaccctgattttacataaacagtgacagtaggtggtgtctcacaacacatctgattgtgcctcattttggtttcccaatattcctgcggaagcccggggctgcgcgggagagggccgggcaacggcggtcaaggctccgtcgcagcgctcctggcctcagacggttgctcgtcggtcgctagccagcagcggtacccccgct

SEQ ID NO: 604601 - DNA, 211 bp, Homo sapiens
tcggccgtagcagcgagctataatcaacaccccgctccgccataccaccgacccatgagggacacccggaacagggccaccctcctactctcccgagacatcccaacagggggactggacgtaggctcccctcccccccctaccctctccatgatatccagcgccttctgacacccttttcaccatgaaaggcgcgcgctaacggcgacaa

SEQ ID NO: 604602 - DNA, 1729 bp, Homo sapiens
tttttgggagaaccccccccttcgcccggtttccttgccctcccgtgcctcacggggccccccccccaccttgtgtttaaaacttttcgggggcgcgggcccccaaacatttttttttttttttttttgtgaaaaaaatagaaaatattttatgtagcttatagtacatatatttttttacaacagaagaatcgcattctgattttccatatggatcatttccctatgttgctagaccagtacactggcaacctggtcatacaggtgagtaatgttttcagaacatattaaatggtgttttttcttttaattaatataatgactttatgtttttcttctcttaaattagcttttcttgtcaagttgaggaaggtcaaaccacaacttaactgagtactccagatgacagtaactgacttgaagatggaaaaatatcaaaatagaactttatattgaaaatcactgcttccatagattggcatttttagctattactatgacttatataacttatacatataattttgaaaataacaactaaaagatgtataacatagcaaaactgcttaaacatcccattttgacacttgtcttgcagttagtttgacattttgtagttaatgattccaaattggtttagttgggccatctcattcttcacttcctgtaaaccactccatagatttgtctttcttcaagaaattagttttctttcctttatttgattgatggtcattgactacttcagaaccagtataagcttgagaaggatcacctattatgtccattgacagtgagttgtatgagtcctgagaatgtttttctgtcacccctgctgtatgactggataaagatgatgatgaagacaatcccagtctaacatatcttctttttttaccacagagtgaacaatctactggtgtggcactaggtccccggggcagctgaacttcatctctgttgtagtttctgacagctccactgtgatgaacagaacgttctctttgccagatataatgggttggtgcaatggccataacctcctcacaacatcgcctgcttacaatagccctatagtcaattctatcccagagctggtcccttaactttaagaaattagggaacaattttctccagtttttccctaaagcccatggaaaaatttcgtacttggtttcttcttcatcttcttcaactgtattagccagatacagagcaataaagaaatttatcctggtatgctcacttatagtaaatttagccctcttgaaataaacaaaggtcatagccaaaagatacttgtctgcaattttacagcagcagtccatccacaagaaatcttgaattaaatcgtcatcaaataatttaaagaaagcagtcatatcctgacgctgtataaccagacaaggtcctttggggcgtttagatttgttgttattatgtgtatttttttcaaatgcttgccaattatctttacaaataggacgcttcagagtaatgggctttttaggctgatgtgatctatttgaccctgattttacataaacagtgacagtaggtggtgtctcacaacacatctgattgtgcctcattttggtttcccaatattcctgcggaagcccggggctgcgcgggagagggccgggcaacggcggtcaaggctccgtcgcagcgctcctggcctcagacggttgctcgtcggtcgctagccagcagcggtacccccgct

SEQ ID NO: 604603 - DNA, 219 bp, Homo sapiens
  misc_feature (195)..(195): n is a, c, g, or t
tcggccgtagcagcgagctataatcaacaccccgctccgccataccaccgacccatgagggacacccggaacagggccaccctcctactctcccgagacatcccaacagggggactggacgtaggctcccctcccccccctaccctctccatgatatccagcgccttctgacacccttttcaccattgatgtggntgcgctgaaacggggaacccctca

SEQ ID NO: 604604 - DNA, 1564 bp, Homo sapiens
  misc_feature (1)..(1): n is a, c, g, or t
ncgttgcgcacggagtggcaaagcagtttcaagtaggacggatctggattaccctcctacaggaagcggcgcgaagctcccgcctgtaggctgagagggccattttattttttttggttataaaatcatatgtttattacataatcattgacaaatagtttctgtataataactggcagagtagctctaaaacatatgcaaggaaataaataaagaaaaaacttacaataaagagagtaactcatattttaacagttttgtgaaaaaaatagaaaatattttatgtagcttatagtacatatatttttttacaacagaagaatcgcattctgattttccatatggatcatttccctatgttgctagaccagtacactggcaacctggtcatacaggtgagtaatgttttcagaacatattaaatggtgttttttcttttaattaatataatgactttatgtttttcttctcttaaattagcttttcttgtcaagttgaggaaggtcaaaccacaacttaactgagtactccagatgacagtaactgacttgaagatggaaaaatatcaaaatagaactttatattgaaaatcactgcttccatagattggcatttttagctattactatgacttatataacttatacatataattttgaaaataacaactaaaagatgtataacatagcaaaactgcttaaacatcccattttgacacttgtcttgcagttagtttgacattttgtagttaatgattccaaattggtttagttgggccatctcattcttcacttcctgtaaaccactccatagatttgtctttcttcaagaaattagttttctttcctttatttgattgatggtcattgactactctcctcacaacatcgcctgcttacaatagccctatagtcaattctatcccagagctggtcccttaactttaagaaattagggaacaattttctccagtttttccctaaagcccatggaaaaatttcgtacttggtttcttcttcatcttcttcaactgtattagccagatacagagcaataaagaaatttatcctggtatgctcacttatagtaaatttagccctcttgaaataaacaaaggtcatagccaaaagatacttgtctgcaattttacagcagcagtccatccacaagaaatcttgaattaaatcgtcatcaaataatttaaagaaagcagtcatatcctgacgctgtataaccagacaaggtcctttggggcgtttagatttgttgttattatgtgtatttttttcaaatgcttgccaattatctttacaaataggacgcttcagagtaatgggctttttaggctgatgtgatctatttgaccctgattttacataaacagtgacagtaggtggtgtctcacaacacatctgattgtgcctcattttggtttcccaatattcctgcggaagcccggggctgcgcgggagagggccgggcaacggcggtcaaggctccgtcgcagcgctcctggcctcagacggttgctcgtcggtcgctagccagcagcggtacccccgct

SEQ ID NO: 604605 - DNA, 208 bp, Homo sapiens
  misc_feature (184)..(184): n is a, c, g, or t
tctgtaatgcgtgcatttaaatcacaccccgtcgcctacacgacatgaggacacccggaacagggccaccctcctactctcccgagacatcccaacagggggactggacgtaggctcccctcccccccctaccctctccatgatatccagcgccttctgacacccttttcaccattgatgtggntgcgctgaaacggggaacccctca

SEQ ID NO: 604606 - DNA, 256 bp, Homo sapiens
ggatcttagcgggcgcctttttttgggggggggtggtgggtagggggacaggtcctgctccgtcacccaggctggagcccagttggtgtgactgtggctattgcagccttgactccctgggctcaagcaatcctcccacctcagcctcccgagtagctgggactacaggcacacatgtctagctaatttttgatttgggtagagttgggatttcaccacgattggccagtgatgggtcttgacactttcagggctc

SEQ ID NO: 604607 - DNA, 548 bp, Homo sapiens
  misc_feature (357)..(357): n is a, c, g, or t
  misc_feature (375)..(375): n is a, c, g, or t
  misc_feature (390)..(390): n is a, c, g, or t
  misc_feature (423)..(423): n is a, c, g, or t
  misc_feature (495)..(495): n is a, c, g, or t
  misc_feature (500)..(500): n is a, c, g, or t
  misc_feature (531)..(531): n is a, c, g, or t
gcgggttaggagtttgtgcctgctgttgaacagtcactctgatttggtgtcttttttggccaagttacagaacagagtttccaggactgagaatgatagactcacctctccctttgtctctggctatcctcaggaatatttctcccttcaggaactcacaatgtttcctgtggcttaaggcagagacaggtcctctgccagggaacccaatatgttggagaagctggttgtccaccttgatctttttctagtgtggaaactctgggtcgaggggaaattttctgtatgcctggggcagattgggaggggagggacattgtataacatgggaagtgtggtttctcctactcttctggntcagagttgttttttaanttcccctgtggtccngggggaactgcctcattctcatattttgagttnctgttgataatctcagtgctgtccgttttgtttttgggtttctgtgttgggagaatgaagccagcttctatngccgncatttttgaaaccagaaatctgaatcaagangtaaattctcttttttt

SEQ ID NO: 604608 - DNA, 931 bp, Homo sapiens
gagtgaccggagccggcggggcgagcggttccttgtgggctagaagaatcctgcacaaatgtctctctatccatctctcgaagacttgaaggctcaaactgctttttctgcaaaccctgccaatccagcaatttgtcagaagcttctgttcctatccctcacgatggaaatctctatcccagactgtatccagagctctctcaatacatggggctgagtttaaattgaagaagaaatacgtgcacattgtggccggtggtttctgtgcaccacttcaggggcagttggtagcaagaccttccagtataaaccttatatggttggctcctgtaactggtacatgatgtttgcaattcgtagaggcagaaattaagcaaggggattcgtgaagtcatttggtgtaacggatcaagacttggaacaaaccttgacttcaggcttaaactcaatagcactcatgtatatttgttcagtagtccaggctaattctcccagcctcattgtctgtctgagattgggaccaagtacttcacatcagtggtgaaaactgtgcagggatggcacctctgataaagcggcaaaggttctcaaacaggctctggagaagagattaccatgaccattcgtgacaaggcccttggaaggcgataccatgcatacgagctgccctggcatgtgggttcatcttaacatggcagaacacactcccagtgagaatagtctgcgagcagaatggtttcaggacttaagcttgggatcaatgacgagcatggtgaggtcaatggaacacggcaactggggtggcatatcacacgcgtcgttggacatctcagaggcgccagtttaaacgtgcacacgtgggctacgcgaagggatcactatgaattaaacccgcgcatgaatcttgctgaaggccgtaagatctaggtgt

SEQ ID NO: 604609 - DNA, 384 bp, Homo sapiens
  misc_feature (99)..(99): n is a, c, g, or t
  misc_feature (212)..(212): n is a, c, g, or t
  misc_feature (283)..(283): n is a, c, g, or t
  misc_feature (305)..(305): n is a, c, g, or t
  misc_feature (318)..(318): n is a, c, g, or t
  misc_feature (359)..(359): n is a, c, g, or t
agaaataaagttttgcctatagtaaaagatgaaataagccaggcatggtggcatgcacctatagtcccagctactcaggaggctgaggtaggaggattncttgagctcagaagtttgagaccagcctagccaacatagcaaaaccctgcatcaaaaaaaaaaatggaataggccgggttgcggtggctcacacctataatatcagcactttnggaggccaaggcaggtggatcacttgaggtcaggagctcaagaccaacctggccaacatggtgaaaccctngtctctaccaaaaatacagaanttagctgggtatngtgtcacatgcctgttaagtcccagctactccagtggcttnaggcagaattactttgaacccgggg

SEQ ID NO: 604610 - DNA, 217 bp, Homo sapiens
ggcccgactcatccccttcgggctgctatatatatatttatttgtaggtatttatatattgaaatataaaaacctagatttatggagtttcctctagatcatgttatattctatatcagacaaactattttcttttgacctctcctccttttcttccagtattccgcttcatttcattttctcccctttttctgttttcaacgaactccactaccag

SEQ ID NO: 604611 - DNA, 1211 bp, Homo sapiens
tggacaattctacaaacacttttattaccaaaaggagctatagtgcagcatgggaaaaagaggggctccctcctttccccctcaaaggcattcagcgtgcccctttcccaaggggcaggccagcagggaacaagaggaccccagggtttgcaagcaggcgtggaactcaaacaaaaggtgactccgggctccggggaagtcattgtgacctgtgccagaacattgtgagccttccttcattatttcatctccagaagccgcctgtggaacgtgggccgggtgtgttgaagccgaggagaattaccacagaggcgttgcttcgtgcctctcagaagaacaccggactattttgcggcccccgtggagaaccagttctcacggaagcgggggacaaaattagtcaacatttgtggcgggtctcatcgggagactcctagcgcgtgttctgtgcccctttggtctctcctataaaaaagcagaagtccccttgttggcaaattctctccattatagcccgtgagtgcgcttctcatgttcacaattcttctctttgtcgtccaccgcaccattctcaccattctcctccagaagcggttgtcccaagaaacgcgctgtggaaacaggggcgcccaggaaaatagcccgagccaggggttctcccggggccagaacagtttatatagggggtgggcatttccttttaccataggcccacaaggccttctgcggccttcattcttcccacgtataattggcgtggcgtcgtgaagtgctagctcgaggcccaaaaggcatttcctggccaccaaggggggcctggcttttcctccgggggcaacagtggctatatgttaaacggccttccatagagcctctcagttgtcccacgaaggtttcaacacttggggcagcggcggggcttgcaccggcttgagtcaggggggggccccaataggggcggaatgcgggagggcgaccaaccccggaaggacacatgggcctcggaacgcgggccggtccctgaaatttaagccgaaaggagggctaaaacccgtggaaacgcatgtgccaccaggtatccctgatttttccggccccaaagaactggacaagcgtttgaaagccctgacgaacgcaatatttgtgctcaccccagactagtcacccgggacatgatttgtgaaaaaaacccgcttcgcaaccaaaggtct

SEQ ID NO: 604612 - DNA, 408 bp, Homo sapiens
gatgagggagtcaccccgtctccctgctgaagccatcatctggttttacaatgccctccaagtgatttcaagcctggcacacattggtcagaccactgtgctaatagatagtagatgttatcaccataagcaatttggattcccttctgaaaatccaccagttggataagctcaaacccaaaattacacataaaagaatgaagggtttcaaaagaatcattactatcctcaaaaaagcatacaagagaaatgtaaccatgtagcccctcttaataacagtacatttgctgaacacatatgcaaaacagaggagataggatcacgacatataaattatgctccacttaatttacagccacatgggtcatttggtacactcatagcttctaatgccggtgcccattccag

SEQ ID NO: 604613 - DNA, 313 bp, Homo sapiens
acgcgtggtcatccagcagagaagccacgaaggaagcctgactcttggccgggccgcgaacggctcgtcgctgccccattgctgacacgccttgagggcatcctggacatcgccgcgcttgagctggatcctgtaggcggcttcataggcgtctcggcgagcaccgatgaggttgtccagactttggattccatcgcccagatgcttggcctctttcgcccacaagacctgggccaaggtgttctcagtcggcgcaatcagcgcccgctgcaccaacttgcgcgcctgcttgcgctgcccgccctccagttcc

SEQ ID NO: 604614 - DNA, 659 bp, Homo sapiens
  misc_feature (309)..(309): n is a, c, g, or t
  misc_feature (381)..(381): n is a, c, g, or t
  misc_feature (502)..(502): n is a, c, g, or t
  misc_feature (518)..(518): n is a, c, g, or t
  misc_feature (542)..(542): n is a, c, g, or t
attctctctccacctccagcattcccatgctccttttccattctcatgggaagtctttaagttggctttggcctttccctccctatttctttctctcctttgctttgaagcttcagagctaggaattcagatatcttgctacagagagtgaatcccaggtgtgtggggcttcagcctttgttagatgcatcctggacggagcacagacaagcagtttctgatgccaaaggcaataaggccaagtgtcagaaggaagtagaagtgggtaggaaggaaatggaatcattgagcatttcacgatagactctntcttctctcttttggtcatagaatggacagagaagaacatagtgggccacaggttcaagacatggtcacttntccaagagcattgtctcatatatttctgcttctctttcatagtatggatcagaaagtgaccctttcccaatggaccacttgagcaccttaatacttaaggtcataccttaatccctaagtncttagtacctaagccntgtgccatcttgaatgacatggantgaagtgaagcttgagggagtggccgagccataagccttggtcttaaggggccttaagcctggctgggggaccaggattcctcattaccccttgaaagggggcaggccacttccacc

SEQ ID NO: 604615 - DNA, 152 bp, Homo sapiens
ttttaaattcctttccttcagttttcctcatgaagatgtttcagatactgaatttgtttagacattgaatgactttgttaaaggcccaattaatcccattggttgtcttctgaagccagccttctttaaaaaaaaattacccattttaacca

SEQ ID NO: 604616 - DNA, 159 bp, Homo sapiens
  misc_feature (49)..(49): n is a, c, g, or t
agttagtgatattaggcggatcagacgaagaggggcgttggtattgggnatggaggggtttatattgataattgttgtgatgaaattgatgtgccctaagatagaggagacactgctaggtgtaaggcgaagatggttaggtctacggaggctccaggc

SEQ ID NO: 604617 - DNA, 93 bp, Homo sapiens
catctgtgcttgtaggagagatggccagggtggagccctcatgcaggttgaagtatatgtagccatcagcctgatattcttggtgcgaaggta

SEQ ID NO: 604618 - DNA, 925 bp, Homo sapiens
acaggaccagctggacgtggcgttgaggactatgagaactggttcccctcaccacccaaccgtacccacctatgtcatactgtctcctcgccaagttcatccttaattccaagtgaagcagcacagtgctgagaaacagttcatccatggtgccatgttagagaagttggaacactatctcttgaaaatcctatcttccttttaggcttgaatatgatgctgaacagtaagttcgttaaatctaggaacttaaagacaatcctgcgtttctcaagtactattctaacattgcgctttataagggatgatattgctaccacctcactcatatttttagctgcaatgattttcctggtatgtctgtcatttcgtggaaacaagacatatagtgtacaaatgggtgctgccaaaattccaggccattttgcagggactctgaagtgaccgtttagtagtaatagtctcatgtgcagtaactataatggtaccagcaatgtcaaagtaatacaatttaacattatccaaatgctatagggctgccctccccctataagtccaatagctgggtattccaactgtaatcagtaaaaactattactgtcctagagctacaagggttcaagtgcctgctttccagtaatggacgcatgcgtcactactaatttgataacaggtaagctccagtaggcactcgacttcctagatacacaggccataggggaccagcgagcttctacgcacggaccatcagggcgaccattacaggacaacggcttgactacgttcaagacctacatacaacacttggccaacctggatcgggcaataccgaaccaggcctcatctgaacctaacccgggcacagggactttcatcttgccccagtttagccaagcgcacgttcctaagctaacacatgatagcg

SEQ ID NO: 604619 - DNA, 679 bp, Homo sapiens
tagtattctgcaataaatataatataaaagtatgatgtgaatacatacttatttttaattaattacagtttcctttgtaattcttttggcccggggcttttacatcaaaacatgctttgacttttctgactggaataatgaatcaataaacaatgaattacctggccattctctccttcaactatcaaagaagaaggagagaatggcaggtaattcatgtttattgatagttgaattatctgctgggcaagtagcatctggctaagactaatgatgccaacacttagctaaataccaacacttcccaaccgcaaagccaaatttctggccaatggaagatgaatataattgatgtggacagcttctgggtggtgcctataagaggagggtaaagccccttcatttttaattgattattctattttattttgacgatggagtttcgctcttgtcgcccaggctggagtgcaatggcatgatctcggctcactgcaactccaactcccaggttcgcaatgattctcctgcctcagactcccaagcagctgggattacaggcatgtgccaccacacctggctaatttgtattaaagtagagatggggtttctccatgatggtcaggctggtattcgaactcgtgacctgaaggtaatccactgcctcggctccacagaggtt

SEQ ID NO: 604620 - DNA, 223 bp, Homo sapiens
ttacaggtcaggggcatggatgaggctggaggccatcggtctcaacggactatcacagggaccgaaaaccaaaccccccatgttctcacccatgctctaacttgaactttatacctttattggaaggatttttcaatttgatcagactgatataaaagacagccggcgggctttaaaactcgaaacacctggtttgaaaacctaaccctgggatttactaact

SEQ ID NO: 604621 - DNA, 218 bp, Homo sapiens
gcggccgcctactactactatgtgggcggccgcgtcgactggagtccgtttttccaaaaattaccggatttagcccagtgtggtggcccttgcttgtaactccagctacttgggaggctgaggtgggaggatcacttgaatgggggacgcggaggttgcagtgagctgagatcatgccaccgtactccacactgggtgacagagtgagacttcatctc

SEQ ID NO: 604622 - DNA, 504 bp, Homo sapiens
agacgccgggtatcaggttctccagagccaaagatggataggtagtgggcaggcaggcataatatagtgtggtagcaggcctctgtcatggacgtgagatttctgcgtgtgagcttccattaggatttgtccatccagggcaacccttcaaagaaagtcaccatccaggcaccttctgaatgcaccttcctgtccttcttccccgctcctccccctttgtctgggggctcacttttgcactgaacactcacatgtgtttcctccttcagtttcgacttgcagaggaatctgaagcaaaagtgaaggaaggaaggtatcctgggtgtcaatttcctgcttcatatccgagtgatccaacaaaggagcacaccttcatttgtatggagagtgatgctctgatcctccctctggtttctccgaaatagtattaccagcccagcccagaagtagaaactctgccagcatttccattagaaacctcatttttcagggtcttttaactga

SEQ ID NO: 604623 - DNA, 482 bp, Homo sapiens
aaatctttctagacacattgctgttgtgggcgcgcgggccccgagtatggtatgtgaatgttgcgtcatatgcgtgtcctccataggatgatccgtgcgtcatcgtacatagttgcttgtgattctcgggctaataaaaaacgcccggggggaacagcagaggcgtcttgcttgaacaatactcgcagtatgagaatgtttgctggaggctcaatcaggtggtactcctaatcaagcgaggatgctccaacgagaagtccgtccgaaatcatccaatatttttacggcccgcccggcccgtgggggggatgtgcatgacgccgccgaaacggcaacacaacacaaagagacataacataccacaagcagataacatacagcagacaacaaagagatcaagcgtgcaagatacagggagaagcaacacaacagctagcccgaacaacgagggaaaaggagagtaaccacaccagaaccgcaaa

SEQ ID NO: 604624 - DNA, 356 bp, Homo sapiens
atcctgacagctagcagtattgtcgtcgtttagaaggttcctcatatactcttaccctcagccaacccaccatgtttatcaattcaaattgtagaactttcttgacccaagacattctgtaggctgctgatcttactgaactttccatcaatggctaacgaagaaagcatgcatgattccaatgagttcttctgaggcactttgactgtgacagtagtcactttagtgtatgctttcagcccgtactcgcacaactgtgggccactcaccgacatctgtgtagcccacaaagggtaactgggctccatacacatcatagcagttgacccacacagtgcccgcctggagggcctggg

SEQ ID NO: 604625 - DNA, 475 bp, Homo sapiens
tactttgctatcgatttgacctccaatgttaccacctgtccagctgaaagaggaacccatccgaggctgtctctctttgatggaatttctacagggctcgtggtgctgaaagacttgggcattcaggtgtaccgcataattgcctgggaggtgtgtgatgactccattacggtgggcatgttgcggccccagtggcaagatcgtgtacgtcggggacatccgcagcgtcactcagaaacctatccatgagtggggcccattcgatctggtgattgaggggcagtccctgtagtgacctctccttcgtcaaccctgctcgcaatggtctctactagggcactggccgtcttttctaagagttctaccgcctcctgcatgatgcgcgacccaaggagggagatgatcgccccttcttctgactctttgagaatgtgatggccatgaacgttagttacaagagggacatctcacgatt

SEQ ID NO: 604626 - DNA, 152 bp, Homo sapiens
gaagtgtaaattaaaaatattgctaaaaaaagaaaaaatacatttagaaagaatgggttacctggtcccccattgttgcccagtttgtgcgcattgccagtggacttcattttgttaaattgattggggcgttcccccccttttttcctttt

SEQ ID NO: 604627 - DNA, 108 bp, Homo sapiens
ggacgtcaacttatcaaggaagatgggtgacactgacccaacctccacaggcgtgggtgtgcccggaggctgggcgagggtcgattatctctgtcgaaaggctcactc

SEQ ID NO: 604628 - DNA, 805 bp, Homo sapiens
ttcccttcatttctcaagggctggttgaactggttggaaacacatgtttttctccaggaatgtcctttttttctatatctcaggaaaatgtttgatttttcctcaatcgcagattgagtagtactaatagagcgcctatcaaagcagaagaaatttgcggtatttgccgtagtccaaattatgtactgtctggtgacgaaagtagagcgtagagaaaaagaaaatgatttgagacagtatgattgttactgtgaactatacaaatagctgagtctgatctccttccacgtgggttcaatttgcgtccaatctttcgccctcccagtaatagtattatatattaatcaagccgacaggattgtagtttacctgtcttcctggcagtctatctattatggtcagcgagtttatgtgttgaccttatggagaaagtgctaggatgtcagatagaatactgtaaaagcaatatgttcatttctcctctcaaagaagacgaagtgcgagacatcaaacacaagctcagtgggggagaccgtcacggcccgcccagaaaagttacttacaaacagacctttgagggggccggagcaacacataatgcattcgtaaacagggggcccgagttggagcatggaggggacccccgggcgggcagtaccgacggcggaggttacatgcacacatgaaaaaaggcccgggggggggccacacgccggtgtttcgaacaaaaacccccagacttgggggcgccacggagggccccaacggggactcactgcacacggggcccacgggcgtcgaatca

SEQ ID NO: 604629 - DNA, 218 bp, Homo sapiens
acatcattttcggtttggaaccagcatgcaagggggaaggagcggtgctctgctgccaagctgtcagttaacccttttccaggcaagtctcttaacctgggaacctcagtttcttctgcgcgatgggtccagggatgttgattatagcaactaaacaaacagaagcagaccaagaataaggaaggctcaagggtgagaatgtaccaaaggtttatgat

SEQ ID NO: 604630 - DNA, 266 bp, Homo sapiens
gagctttgggggcagcctgaacacctacaagcgatttgccatcaagctgccggatgatcagatcccaaagaccaattgcaatgtagctgtcatcaacgtgtgggcaaccccgaggctgggatgaacgcggccgtacgctcagctgtgcgcgtggtgcattgccgacggccacaggatgctcgccatctatgatggtttagagggcttcgccaagtgcccagatcacagaattcggctgaacagatgtcgggggcccggctgtctga

SEQ ID NO: 604631 - DNA, 832 bp, Homo sapiens
aagtcaagctatgttaaataagataggatcacattttataatgaagattaccagtgtagtaattctgatattgcaaatgattgaggaacaaacaaagaaactaatagagaaagtcagtctcagaggaaatcccatttaatgttagactgtttggcttttgaaattacttcttatagaagatcgcattaaaaaaaaaaaaacaacttggggcttctggcatagcaatttatccattcagaccttttcttttagaataagggaaacttaaaatctactttctaaagactggaacaaagtggctagctggcaaattatctgggaaatcattgggctcttttctaagcatggtgtggtaatcatggttttcttctggattcctggaatggaccatgggtagcattagtggtttcaagaaattggtccaggggaaaattggagctattttccatagtgggctagcaatgtgctacacatccttagatactcctctctcccataggataaatgttcacagcacacaaaagaaattttctcaatcctggatttggaaaatttcacaggtgtcattatccgtatatctaagcaataattatctgaatgttgggcataaaaaattataatgttctaaactggttcataacgttgaatgactttcagtccctggatttaatattgtggagtgataatcagactgatagtagcaaaatctggtcatacttactgaaatagatgggggatggcctataccgaaaacagtgggtaccatttaaatttttgattcaaaaatttttctaattactttgcagaaaaacttttaaagcctttccatatg

SEQ ID NO: 604632 - DNA, 1976 bp, Homo sapiens
tgtacaagagatcattgtcatcctgggtgttctttgtattcttcatactagaaatccataacacgccaaatgcccttagaaccatggacagcacccaggttttacaaatgtcttctccaggcttcagaaggaaggtggtggacattctttccatcatgacacaaaccaacaattacataccaggctttgttggtgagaaagcaaggtggcccacctggagatttatgccgaaacaaccactttacaacacaacccacggagtccttgacgttggcttggtttgtcaatcccaccacctcataccatttagaaacttatcagctatttctagataactgggtgttttagtttcctgtagataaaactgaaggctaaattgaatatatgactaagttatttactatgaggaatcttagtccaggaaaacctctcaaaatacacaaatgtctgagagatgtaatatatttaattaatcccttactccttttatttttattttttattttttcagagacaaggtcttgctttgacacccaggctggagtgcagtagtgcaatcagaggtcattacagcctccaactcctgggcttaagtgatcctcctgcctcatcctcccaagcagctggagctacaagtgtgcaccatcatgcctggcccctttattcctaaacgtttcttcatgaaggaagatacaaatttacatgagcccatgctcttcacatgggtaaggggaaaacagagagaactcacagggcacccacatattgtgctttatcatttgacctaggaacagtcttgaataggcagcttgggtttctactcccagaaaatactttgacatacattaatttattcacttaaaactcattatttcctgggtttccatgcagtgtctctgaaaaacattctcaaaatctcactaaaaatgggatccgttagatcaattcaagaatagataaaaccaaaacagaacaaaaataccagcagaaccaaaggtaactcaaagatgctgcaccagtgtagttagcacactcaattcagttcaattcaatttgtaaaaataaagttagaagggttcttaaataactttgaccttaaataacaacattcagtctttaatccagtttgagtgtttgtcgaggaatcctgccataaaaatgtttgactctctgtaattggtggttgggaagattagaaagagaaccaaaatgtgaggaattcaaccaaacatcaagataaatcaactcagggccaggagtatttgtgccatgcctgctcagagccgctatggacaagctcagtttgttagttcagctctttgaagcatgatatgtagacacacttgcatgttcacacacattgtttgctaaactgtgggaaggtaatcagaagagaagagccacgaggttgtcaatctagcatcagaaatttggtggcataggatttctctacaatgctgtccactaaaactttttgtaatgatgaagatatcctatagccaagctgaccaatacaatagacattagtcatatgtgactgttgagcacttgaatatgggtagtgaaattgaagaactgaatttttatttttagattttaattattttaaatttaagtagctgcagatggctaaaattgaatggtgaacttccaggacaaaggatgtttttgccttcaacaatatcggaaaagcaggggtgagtggaatgtcagattgcaatgcaattgcttgtgtttctgcggagttcatggaagaaactcattatactcatttgtaatgcttgatggtaaatttgattttctctttagaatgtagagattaaatcttggtttaaaactgcctctctgtgagcagtttctccatcagtgaaacgggtgtaatttcaactcgttgagagtgctcagttatgcaatatatgcaatgtttcttatctgtgtctgaaaacagttaataaaaggttgctgtgcttgacgct

SEQ ID NO: 604633 - DNA, 172 bp, Homo sapiens
gagtcaagagctttttacatctataaagcagagttcaatatagacaagtctctagacacagagttgaagatgtcttgactgtgaaaccctgtggcggtgggaggccgaatccaaattgtcctttgccacttgtaaaggctgaactctagtctgtgtcctcactacatgccat

SEQ ID NO: 604634 - DNA, 167 bp, Homo sapiens
atacttctggatgagaaggctcttctttgggggtttctccatcttcaaagtgcattcgtccgtcctcctcctcatgcctgtgcgttgctcttggccttggatttctggctgtgcatgtcgtgttcccgcggctccccgtctggccgcaaagactgagcactcgctgt

SEQ ID NO: 604635 - DNA, 377 bp, Homo sapiens
agaggatccccctcctacccacgagggagagtctgggccgcgcgggagccgcagggcgccctagccttcgcagaaacgatggcggaggaagaaggaccacctgtagagctgcgccaaagaaagaagccaaagtcttcagaaaataaggaatctgccaaagaagagaaaatcagtgacattccaattcctgaaagagctccaaaacatgtattatttcaacgctttgcaaagattttcattggctgtcttgcagcggttactagtggtatgatgtatgctctctacttatcagcataccatgaacggaaattctggttttccaacaggcaggagcttgaacgggaaatcacgtttcaggctgacagtgccatttatta

SEQ ID NO: 604636 - DNA, 380 bp, Homo sapiens
aagataggctgtgacgatgatttcggtttcagtgtccgacgtagtacatcgaaaaacttcagtgaccagagctcccgttggttgaactcggctgcgtggtctgaagctttaatgccagtttccttaggaaacatacatgtctgtattccctccttcatactacattctgaagaaggattactgaaaacaattgtgttttgcagtgtgttttcttctttattcagtaagtttttgggaagggttaaattcttgtgcaggttgacatttatgccacttgcatatctgaggctgatccagttctcacgcatggcatcagtgcaaatgtcctctctagcagcaggcagtgagctgcccaggggtgaagcctgtttttcctcagt

SEQ ID NO: 604637 - DNA, 370 bp, Homo sapiens
  misc_feature (53)..(53): n is a, c, g, or t
gggggtttggggacttacgcctttggaattgcttttcattcaaaaaaggaacncaaaggaagccccccaggaaggaagcacaaagctgggggctttggaaacgccctgtgtttttgggtacagcaagaccagcccaggagccccccagcacctgcctttcaggtacttggtggccatttcctgcttttcaaagtgcaaaaaagctttttatttccacccccacccggaacctccccttgcctaacattttccctttatgggaacatttttgacttttttacctcctttggggtcaggtgctccacattttttgccccagggtgtccccccctttcccagcctgtatacccagattactttggtggactga

SEQ ID NO: 604638 - DNA, 154 bp, Homo sapiens
gacagtggtggggctgggaagaaccaagcagtcattgtgattatcagaccgtctggttgcctcccccgcctccagtcattgtactaccccagccatggggtgcatccccttcccccatacccaccactgcctcttgccccaacactgcctcgtg

SEQ ID NO: 604639 - DNA, 159 bp, Homo sapiens
  misc_feature (35)..(35): n is a, c, g, or t
ggaaatccaacctcaaagaagctaagcacattgcncagaagaggcaggataggaaggtattaaggagaaggcctttgaagaataaggaatcaattgaagggggacttggaacccacagagggaaccaacttaactggcaaaatccccgttccccacaaa

SEQ ID NO: 604640 - DNA, 120 bp, Homo sapiens
tggcccagcattcactccgaaatgcccactgcatctccttcagcatccacagatgaagcacatggttccgcttagctagatctctgtggtggcacacactcgctggcacgctgacgctga

SEQ ID NO: 604641 - DNA, 967 bp, Homo sapiens
gcgttgtggcgttgcgtttccttcctctttcactccgcgctcacggtggcggccagagcgggggcgagggcggcgcgagaacgatccggcggcagttctcttcctcctgcgcactcgtgtgcccgctcggtcagtcagttcgggggccggcgcccggcttgtgctcagtatctcgcgcttgcggtgcccaggaccagtgggcgtaactagagtactgggctgagaacctcggcgctccggaggctggcgggcaccacgagagcgcaagcctcgtcagcaggtgtccgagagtgagggcatggcgaggtgaaccgagtccagaaagggtgtgccggaggcaggtgtgatggcgcctgcagaacatggtcgaacaacgctagaaggatccgtgatggccaacgacaaatgcacaggaagaacatcagccagcgcgaaagatcggccaagatctcgaggaaatggcccccgtaaagagaaggttgtctgctatgagaccctgagtgtattgggctctcctttggaatagtgtagtcggtggtctctgctagatttagccagattcattcaaaggtactcaggatggggccatgtgaagtgactagagctgtaagatgttatcattcctcctgtgaacttgaacttgaaactgcattcctgatgtatgatacactggtttgaaaatacataagtaaaagcaacctgactcgagaaatgactctcctaaatcagggttcagtgtgtcagatccgaaggtctcttcatgacgtcattcccaggttggcttaagtacataccacagtgctttgcaaaacaccacatgaactaacgcaataaaattgattgtcacccagacaacacaacggcaggtgctacagcgggggggaacagagttgaagggcgtggatgcgttggcccactttggaaggggaaaggagctctaaaggcgaaaaaacgaagactgcctaca

SEQ ID NO: 604642 - DNA, 316 bp, Homo sapiens
cccgtaattcccacgccacctctctgggaggcccgaggcgcggccgcgactcaccgaggtccacggagatgtcgaagacccactccctggccccaacaccgcggggaaaccccgctgcttctacttaaaataccccaacacaaatctagccgcggcgtattggcacggcgcctatagtccccactactcgggaggctcgagccacggagaatggcgtgaaacccgcagaggcacgagcttccacctgccctgagatcgggcccctgcaactcccaggcctgggccacccgagcgacgactgtctccaaacaaaaac

SEQ ID NO: 604643 - DNA, 307 bp, Homo sapiens
tctaactctgtctgtgctcctgagtgatccgggtccgggcaagtatgcaaacagggcagctttgcacaagacagacacgtaccatctggccactggacctgaattgtctgtgcacctagagggcacgccaaaactgtgtgttcaccgtgatcaggaaggatgttggcgctggaggtccactctaaattcctcaccatccttgaaaccatccagatggatgggcttccctagggagcccacagcagaaccctgaaagaccctactgtgcatgggcaagtggagaagcctcctcagcaagaccctggga

SEQ ID NO: 604644 - DNA, 1558 bp, Homo sapiens
  misc_feature (399)..(399): n is a, c, g, or t
ggcttgagcagagcccgggtattgtggtgacagatcactgcctgtctggtacaaactcgtgcgctgttcatatgaatcgtactatcttcctgggctgagtcggacggctagcacgtgtggctggaagatttcttggagtgactcctctatcgagaggagctgggcagaaactatgtgtcacactctcggtcgccaacctacgtggaactacaggtctgatttcgagtgtacctgttgcagggccgaagcgatgctacctgctagtgctagcgagactacgactactgagatgctctcaccatattatagtgcgtctccgtatggcctcatcagtcactgctcttaggcccagaatctcttgatggctacgagaccgtatcacgggtatgaatccatggnccttctagtgacccaccttccttcgaagggatggggatcgcgtgcaacaaccgtgctgtaactgagtttaacgcatagaatgggaagttcgcggggattgcattcgcgcgatctcctgggtagacacccaaatggtgacgccgcaaacgggctccaattgccctcgcaaccatttgccattgcattgttgggagcgcggaagcgcacttaagcaatggtcagttaggaaagcgccaaattggggcgtacgcctgcacgtttcggaactcgaccaattaactatttccagaattgcgacccagttggaacttaaaccataagtgctaggcactatcacgagaaggagaagggaacccctggggacaacgacggctcacggagaaaggttttggcggggtctggccttacgacccaagaggttttatacactctacagggagcggaagcctctaaatttttaaacacatgtccaaacacgtgtgagtcgaattcccagaaaacacatctctccacacttaggaacacgtgggagcacatttcgttacgagggtcctgcgttagtacggtacataaaggccttgcatggcaaactgggcgcaacacattcctgggaaacacaactcgccaacaggctctatggcagaacccacaaggcggaaccacccgaattgaaaatcggcgcaagcaacttccccacatcgtgaaacaacacattgcggcacagcggcactgcatctgcgacccagggagaacaccaagagaaaaccactctaaagtcggacaacggagaacaatgcgggagatgggaaatccccaacaagagtagacaccaccaaattggaccgtatcaaaccctggggagggagaatagaggcgcctagatagagcacttggggccacggcacaggactagcggcgtcagaagaacaacgaggatcacccaaaggagactaggaggagcggacacaacaagaaagagtccaggggcgcccacaccagaggcgaacacacaaacacaagagaacaccaaaagagacacacaacgccgtcaaacaactcacaaccaccacagagacagaggagagaaccaaaagacaaacagcccctcaatcacagaagaacatgagtagagagagagaacagagagccgagaaatata

SEQ ID NO: 604645 - DNA, 532 bp, Homo sapiens
tatcagctcggtacccattctgttcttcatgatgtcataggtcacagtaacccactggccatctggttcaactcactccgggaactcacgcgccagtataagcggtcctggtagaaatatgctatctcatcgagttactggaacacctagtagctgtgtcctagaaggcaccccgggcgaacatcctggtccacctcgctggcgctccggggatccaccatctgcgccttcacgtcgaacctccagaggcgccgcccgctgaacagcagcatcttccccctgccactccggagggccccggtcacctgggccacgtcggctcccaggcccagcttgtccagacgcctcgggcccagcaccgacgcgcctgtgtacacccacacctggcgcccagagaagaagaaaagcttcttggagagcggctcctcaaagaccgagtccagcttgcggggcagcgcgggccacttgtcggcgataaggaaggggccctgcggccggctccccctgccctcagagaatcgccagtacttcc

SEQ ID NO: 604646 - DNA, 797 bp, Homo sapiens
  misc_feature (582)..(582): n is a, c, g, or t
aggaggaggaggaaacccttccgagaaaacagcaacaagctgagctgctgtgacagaggggaacaagatggcggcgccgaaggggagcctctgggtgaggacccaactgggctcccgccgctgctgctgctgaccatggccttggccggaggttcggggaccgcttcggctgaagcatttgactcggtctgtgggtgatacggcgtcttgccaccgggcctgtcagttgacctaccccttgcaaacctaccctaaggaagaggagttgtaccgcatgtcagagaggttgcaggctgttttcaatttgtcagttggtggatgatggaattgacttaaatcgaactaaattggaatgtgaatctggcagtgtacagagaagcatattcccaatctgatgagcaatatgcttgccatcttggttgccagaatcagctgccattcgctgaactgagacagagaacaatttattgtccctgatgccaaaaatgcacctactctttcctctaactctggtgaggtcattcctggagtgacatgatggactccggcacagagcttcataacctctttcatggacttttnatcttcaagccgatgacggaaaaaatagttatattccagtctaaggcagaaatccagtacgcaccacatttggagcaggagcctacaaatttgagagaatcatctctaagcaaaatgtcctatctggaatgtgagaaattcacaagcgcacaggaaattttcttgaagatggagaaagtgatgggcgttgtgagatgcctctctctgaactctgg

SEQ ID NO: 604647 - DNA, 269 bp, Homo sapiens
  misc_feature (16)..(16): n is a, c, g, or t
cgattaagcaccgtgngtaaatatgtagagcggagtatagggctgtgactagtatgttgacgtcctgtacatgctaggagagtgatatttgatcagtgagaactgtggttactagcacagagagttctcccagctaggttcaatacgtcggggggtatacggcgatggttagctgaggcttgctcagaacgtcatcaaacaacgctattagatggtgagatagacgttctgaacgtccctcttcagagaggcattatgcatgcgtactg

SEQ ID NO: 604648 - DNA, 380 bp, Homo sapiens
  misc_feature (50)..(50): n is a, c, g, or t
  misc_feature (73)..(73): n is a, c, g, or t
  misc_feature (75)..(75): n is a, c, g, or t
  misc_feature (172)..(172): n is a, c, g, or t
  misc_feature (179)..(179): n is a, c, g, or t
  misc_feature (312)..(312): n is a, c, g, or t
  misc_feature (336)..(336): n is a, c, g, or t
ggcacgagcggcgctccagcctcgccatccccgcgccggcatcatgctcncccagaaagtggctgcaacggcncngcccactgtcagggttggggggacagagaaagtgatgtgcgccttctaaagcctcgcccagcgccgccgaagcagcttcacctctccaacttttttncacccancgactgcttgtcttgaccctgccctccacccttccccagagccactttcgggtgcgcgctcttgggtaaagggggggtcaccggctgtctgggatggcttccaattttaatgacatagttaaacaagggtacntgaaggatccgaagcagacccctnggggatttatcagcgatgctggtttaatattcaagaaagctttc

SEQ ID NO: 604649 - DNA, 528 bp, Homo sapiens
ccagctttttcagcagagcaaaatcaaagcgctgttattacaggcatgagccaccacgcccagcctttgtgggtatattttcgtgtgtgtgtgtgtgtgtgtgtgtgtgtgtgtgtgtatagtgtgtatatatactatatattctctttatatagtgtgtgtgtatatatatggctgtatatataaatggcttgacacaaattccactcaatgagctttacataccataggtgtaattggtgtggcctactaatttctctgtggggaggatcatcacgtataccaaaaggtattgagagtcatgttcttctcattattcaggggtgcaccgaaaatttttacagtgcttttagaatgcttttaaaatatttttggccataaaaaaaaaaaaggaccccccttttctttggaatatccctttttggtcccaggaccatctttttaggaaaacacaccatttcttttttttttttttttttttggggggggggtttcttttttgggccccctggtaaaattctggggcct

SEQ ID NO: 604650 - DNA, 643 bp, Homo sapiens
  misc_feature (576)..(576): n is a, c, g, or t
  misc_feature (578)..(578): n is a, c, g, or t
  misc_feature (580)..(580): n is a, c, g, or t
  misc_feature (583)..(583): n is a, c, g, or t
  misc_feature (594)..(594): n is a, c, g, or t
  misc_feature (608)..(608): n is a, c, g, or t
  misc_feature (610)..(610): n is a, c, g, or t
aaacaaatccctacaatttcacctcctcccctaaatttaaaccaaaaattaccccctttcaaactcctccatataaacaacaacaacaactttttttctcatctactttctcctcctaaagctcatgtttccaattctcaccatcaatacttatttttctaaatcatacagtcccaatttctcatattcttagccacatcccataacccattattccatttcctccttatcccaatccctttgtcaaccattatttttccctttccagatccatttatatttagctcctcccacctctcaatagcatttcaaactcctttttttatctctactcctcacacgcaagtatcacattatctccctctctaatttaattttcacttctcatttaactttatcctctttcattttaatatttcttaacctaatctatcaagactctattttctttaatccctttccccattttttagacctatctttccttaataccctttatccctctaccttttttatcaatcaccctctgcctatttaaacaatccttttttttcccaccgaaaaaaaaaatactcnangnggnccgttctacgnattcaatcaaaggngntccaggttatacactacaatacttatataatat

SEQ ID NO: 604651 - DNA, 298 bp, Homo sapiens
tttttcccggggttcgggattttggggggtcggcccgggcggctttttcccttgggggcccggatgggggggggggggtcaatccccgaggttgttgggggttggggcgggaaaaggggggggttttttttgggggggggtttcctttgggggggggggttttttttttttggccccgggggggggcaaaagtttttttggttggcccccggggatatggcccggcaattttggggcccgggcgggggggcccccaccccccccccccttttcccccttttttattaattttttttta

SEQ ID NO: 604652 - DNA, 484 bp, Homo sapiens
  misc_feature (150)..(150): n is a, c, g, or t
  misc_feature (178)..(178): n is a, c, g, or t
ctcgcaaaccactttctcttcacaggttacttgggttgaagtgttgaccaatcccagtgggcacttaggcagacatttgggggtcccaaaaaggcttggggggggtcccccctccccagtttggtggttttggaacccctggccttttcntggcccttgtagggttttccccccaaanccccaaacaagggggcttttcccccaagggttttttttggaatttaggccccccccggggggggccaaattgggttttgggttgggcaagcccccccggaaccccagggggggttccaaccccgtttcccccccccttttttaaggggggggggaagtccctggggggccttttttttcccccccaagggggaaggggggtacatttgggttgggggggccctccccccccccccttcccccaaaaggttttttttttttttttttttggggtttttttttttattttaacataaaccctttgcca

SEQ ID NO: 604653 - DNA, 196 bp, Homo sapiens
agcctgactgaccagccttagagcatcttatcccgaagttaggatcggcttgcgatatcctttactacattgttccacatgcagaggttgtcactttgagacctgttgcggatatggggtaacggcctggtgcgagaatttacaccctctcccccggattttcaagggccagcgagagctcaccggacgccgccgg

SEQ ID NO: 604654 - DNA, 281 bp, Homo sapiens
gatgttgcgccaacacagaaacattccaagcctgtgatacactctctcaccctaaaaccaataaaaactcttagtccataggagcaagcactcctaaccaaaaaaaaaaaaaattggtccagaagcccctctcaggtttattctccaaaataaactggtcttggagggtggagccacttttcaggtttcttttctctttctttacttcttacatttgggggctggaaaccgggggatggggtggtagggggataacggggtcaccggagctcggaattcgg

SEQ ID NO: 604655 - DNA, 729 bp, Homo sapiens
ataggctagtagaggcctggtgttaatcaggccgagggactgccgtacaatttggccaacaactgccaggtgcgcatgctggctgtctgagcctggtgggctgctacaacctgtccttcatccccgagggcaatgctgggcccagctgctgctcgagagctgccatgaagaacctgctgtgggcatggccttcttcggcctgacctgagttccagctgcaatgactgcagtacctgttctgagcggactgttcaacctcaatgttcatcctggcccttcatgcagtacaatagcacgcgggctgggcgtgctgtggagtgtggatgaatgacaccatcctgtgctgcattctgagtgtgatgctcaatctgacactggacagtgcagctgtactgactacgccaatggacctcttccagcatgcgctaccatgtacaatgctgtgcaatgtttggaggctgcaggggagcagctgccttgatgagccgctgagtgacgcgtcttgctagcacctgtggccaatgggaggcaacttgccatgcagcgtgatggattgccggacctgagcctgggccgcgttgcccaacctgatggacttacatgatgccacatcatttgagaagtggtagtggcgcgtggtggaccaacggagcagggctctatgggcggcagctgtggagggataacaccagtgacagacgacagggtcaatcgccaagattgtcaagg

SEQ ID NO: 604656 - DNA, 712 bp, Homo sapiens
gagttagtatgcatgaagtgcctggcgacacaataggtatcatgtggttataatctgttttaattatcattaagatagtttaacaactggccaggcgcggtggctcccgcctgtaatcccagcactttgggaggctgaggcaggcagatcacttgaggtcaggagttccagactaggctggccaacatggggaaaccccgtctctacccaaaatacaaaaattagttgtgcgtaatggcgcatgcctataatcccagctacttgggaggctgaggcaggaccatggcttgaacccaggaatcggcggttgcagtgagctgagattgcgccactgcactccagcctgggtgatagagtgagactccatctctaaacaaacaaacaaacaaaaaccacatagtctaacactgaaggggaatctaaagaagagggtgacagactgtgacaataacaagggcccacgatgtcgtcatgaaactgcaaacagttcgtaccaaattcaccacaacccatcaccacgacaggcataccttgctaatcatagcgacgttgcagatacgtgcacttttaacacgctgcacggtatgcagacgaccctgcactgcaacaagaactatacacaagctggtatccacagtgcatcgcctcacttcgcgtcacagcataactcgcgaactcacacaggaccaattctcgaataccacgagcgaca

SEQ ID NO: 604657 - DNA, 1542 bp, Homo sapiens
  misc_feature (642)..(642): n is a, c, g, or t
gatagcacgctctgtgctggcgtctgcttgcctgcctgtgatgtttcccagcaccatgtatggcctggtgatcttctttactgcctttgcctgtgcgggaggtgcttgtgttagccccgtcgatctatacgaaggccctcgtcttgcatgagcacgacgagattgttggtgcgtatatgatatactagtcgcgaacgtaaggttgcactgagcgtatctagtggcgcacgtcttagcttccgtcgtctcaagttggagacagtgtcgatcaatactgattgattggtgctctaggagtcactgggacagaactgttgtgtcgaaattcctcccaggttctcgaagctaggctacgtgacatcaacacggcgtcatgggctcgtggcggagcttgggtagtgaagacaactgatgtcgctgaatggtgcgatagtgtcatggaccacaacacagaatctgcgagccccctagttcggtcgatgatatgtagaaacggtgtgccagaaaaaatcgaataaccgaacgatcccctttttgcatgtcctcttgcttgtgccacttctactttctgtacacaagacaagttgggatcccccttgtcatgagagacgagctccatcagtggtgtcgcagcggaagctntcccattgctagagtttctctcattgggtgactttggaacgattaacaggtttcgccccggttgacccttggaaagtaactgaaaggcgatagaacccgaatatttttgccctctttgtcagagcgaatgccgttgtagacattgcggcttcgaaagtagacctggtccattggtcgagctcctattggtcacttgcagtacgggcgcattggatggaggacagctagagcccttttcgtttgaaacttgatgggagaagccaagccaagccttgcccgtgtagttccaaaggcagacgaattccccactcgcaggaagatgatggaaattcgtggccctttgggaagcgtcttggaggtttggtgtccatcctcccccgatgggcaacgtctttgctgttgaggaccctgggcgcacattgtgtaccagttacactgcacaaggtctattaatatggttgttgccatttctttggcccctggttatctagctaggggccttgtttcgcggtgcagttggtgggcaatcgtgggggacccgctgatttgctagcagtgttttggcctctcttgcacaaagtagccgtaatgcgcggtgaatcccaacatatgtgaatgttgtccccccgtcaatactcgcgatggttaaacgatttggctatcccccccgcggattttttttcgtgagcaatccgtggtttcaccctgtgcacacaagtgagagcacagttatacattccgcggcccttgtgatatgaaagatgtcgccgagaaaggatcgggggaaatcaagcaagcaagcgattttgtcgaacaaggcgatcatggagaaaacctcaaaatcagagtcttctgtcagagaagaaaacgcggacgtgatcctaaatataagacaacttc

SEQ ID NO: 604658 - DNA, 154 bp, Homo sapiens
gatgctcctgcagagacagacgatagcccttatcagtaaaccgtgtctgccggaaccatctctgcctggtactcaaggatattctttcggttaccattgtccacagaagccctaaagcaaaaagtgccgcttaatcactagtcgagctggattg

SEQ ID NO: 604659 - DNA, 889 bp, Homo sapiens
ataccattatactagccatttaacatctcacttctatgacatattattatatcgctcacacctcatatcctccctagctatgcctagaaggaatactactatcgctgtgcattataggctactctcataagccctcgaacacccactccctcgttagtccgaatattgtgcactgattgtccggatactagttctttctgtccgtactgcgtaacgccagtcgagttggtccgctaggcctctgctagtcgcaattctccacaccatcaatatgtgccgcgtagcactacgatactagtaagccctaaaccctacttccacatgctaaagacctaattcgtcctcaaccatacttcatcatttactaaccacctgactatgactttgccaataaggcgacatactgtgaatcaacaggttcacccacagtactatttattagcaatcatccccccctactattcctgtaagccatacatcaaacaaactaaacctattttacgtctgtttccacacatagctttgttgctcctcgcatcctcactcctatagagagcgcccactcttcacttaatatctaaacatacacttgaatctacctatcacacacatccaccacatgcactgtgcaaacgcacatacgccaactgtcactcctgtgcagatctagatttcgacgataaatcactgctagcctctattatattcctttttcttacagaattctaagttgctggtatcatcctaagtactaagcagatcgtcatctctatatcatccttttcgtcgaccccgtggtgcgccggcgttgggtattcttttccgatgaggtccgagtcgaagggctgcctgcagggactttcttctattcacggctggaggacccttc

SEQ ID NO: 604660 - DNA, 919 bp, Homo sapiens
acccctgccctggcctgcctgccctgcctgccctgccatgcccttctccaacagccacaaggcggctgaagctgcgcttccctgggcctgattggactgatgttccccctgacctgagctgcccacaacaaccacatgtgccaatgggtgcttgaccccctgagctgtactgctgtgagctgctgcgccaagagcactgccgagctggcttcactgctggacgactgtcatccagacagtgctgtggacaaccctgtgtgccaccctgtacatcatgacctgtggggctgctgttggctgggctgacagaggagtcctactgaagtgttcaaggatctcttcgaccccatcatctgaggaccggcacgggctggctacaagcccagcgatgagcacaagaccgacctctaaccccgacaacctgcagggcgggcgacgacctggaccccaatactgtgctgagctcgctgggtgcgcacgggtgcacgcagcatccgtggcttctgcctcccccgaactgagcctgcggggagcgccgagccaatcggagaatgctcggctggtggcacgccccttgtccatgcctgcgacgtggacccttgtcgtagccgatactactgcaggctcaaatgaatgcattgaaactggacagcgtgaacaaagcagcaagcttccattggaactgaacacagttatccctcctatcgacaagtgcccggttttgtcccatgcttcatgagcctgagaatgtcccggtatgttgtgcccaagcccctaggtacacggggcacaaagtacctaaagaaactccggtcgtgtggccacgcgggatgccagcggttgggtctcttccctgcaaggggggcacatttagtggtatacccgaatgacgcgtgatcacaaaatgacctagtgcata

SEQ ID NO: 604661 - DNA, 496 bp, Homo sapiens
  misc_feature (35)..(35): n is a, c, g, or t
  misc_feature (49)..(49): n is a, c, g, or t
  misc_feature (139)..(139): n is a, c, g, or t
  misc_feature (271)..(271): n is a, c, g, or t
  misc_feature (443)..(443): n is a, c, g, or t
aacagctatgacccatgaattacgccaaagctcgnaaaattaacccctnacctaaaaggaaacaaaaaactggaagctcccaccccggtggcggccgctcctaagaaactaagtggatccccccgggctgcagggaaantcgggcacgaagcaaagaacttggctcaactgcaaaccctcccaccctccccaggttcaaagcaattccttcctgcctcagcctcccgagtagctgggattacaggcatgcacccacccaggtctggctaantttgtatttttagtagagattggggtcacaccatgctggccaggctggttttgaactcctgacttcaggtgatccacctgccttggcctcccaaattgctaggattacaggtgtgagccactgtgttgggcctaagctttttgaatctctgggtttatagttttttttgaantcaaatttgagaaaaattctctccaacctgggcaacagagtaaaactgtctca

SEQ ID NO: 604662 - DNA, 461 bp, Homo sapiens
acccagcctatatgtgttatgggacctcactaactgaacaccacaggcagctccggccgatttcagaaagctcttccttacttggggccaagctgaccgacagggccctcgcaggtggccatgcaggtggccctgcgtagcagccctaggtcacccgtgtcatctgtgcacttctgtgcttaagttaccttgtgggcgccgataatatcagggaagcagccaaggaagcctttatattcatgattacattccatgaggaaatgaagatctttctttggctaaaacaagacacagggtggttattcctggcagagaaatccagaccatcaaggccaagaaaacagttgcccagaggacttgcatgagccaagcccctggggtactagttaccataccaagggctatgcaatcagcctagttttcctgcaagaaaacaggccccaagactactacattctcaa

SEQ ID NO: 604663 - DNA, 192 bp, Homo sapiens
gaactgacctatttcgatcctgacgtttggacaaggcccttcagccagaagacatgacaagagtacattcctccgtctaccagagcgtgcactttgtgatcctaaaataagcttcatctccgtggctgtgcgcctatgggtgcaaggggcaggattctgcagctggttttgcatttctcatccctgcaattt

SEQ ID NO: 604664 - DNA, 386 bp, Homo sapiens
ctctgaggatcttctatacaccccatacacccatctcagctcaccgtgctgggattacagtgcgtgagccactgcgcccagccccaatatgtcttaaaggcggtttgggattacagcacagtatccgccgaggacaactaaggtcttaacggggttttgggatcacgtgtcctgttgaggaaaaccaggtgtcaccatgcattagtcttccccgtattaaacaacaggcaggtgtgttcccagaacaattaaagatggtcttacaagaagtacaaatgtgccaacaccaggactttggggaccctatggatctggcccatgccacttgttacctctattacttaattccacaatgtcaatctgatactttgagagcgggtctacgt

SEQ ID NO: 604665 - DNA, 301 bp, Homo sapiens
  misc_feature (19)..(19): n is a, c, g, or t
gggggaggaaagggaaggnttgggaaagccccaaagcccagagccagcctcagggccaaaagattccagttttaggcctttttccttttaagtgccccccccccccatagcctgcatgtcccctcccagacgatggccaagaacagaaacccaagctggagccagttttttggtttgccagcatgttcaacgagggaaccccaaggggggcccccccaggtccccccccgttgggggctgtattcccggagggaagtggttgcccccttaacccccctttaattaccagtttccagcccca

SEQ ID NO: 604666 - DNA, 216 bp, Homo sapiens
tgccgagagaggacagtgatcccccaaaacccggagatggaggaggaggaggaagagcaggaaggacatggaggagccggggactcgcccgctgaagctgctcctgtcacgacaatgagtgagaagcagccgtgcgcacgcctccggggtgaccgcgccccatggggcggtgctattctgggcccgccatgaaataccgagctaccgttgcggccg

SEQ ID NO: 604667 - DNA, 605 bp, Homo sapiens
cccgggggtaaagcggccgtatttgtccgccgattgtgcgagactcacccccggttctttgtgtggcgcccgcgtcaaagtagctccacacggaatttcttggcgccgccccccatggcgcgcggacgggtttatagtggttagaaagttatataagacgggacgaatatatcgtggagagggacctatttgggatgcgatacgcagaataacaaaggtggggtggtgcccgcccctccccccctcatcagcagaaaccctcgtttgtgctccaccccccaagtagacatcagaagagtatttttaatattaggaccacctggacaccgatacagacattaaaatttattaaggtgagaagcttgatgagcatctatatgtataaagagcaatatatagagacaaacatatcacaccattttctacaacaaacatatttatacacactggcaaaatcacttattataacatgagataatataatcaccccgcgggcccttatcaacacgtgagaggctcacccacattctggtgacacacactatcaaaaatcaccaataattattattatttgtgccacccacccacatcaattaacaaaacaa

SEQ ID NO: 604668 - DNA, 327 bp, Homo sapiens
agctggagttacagatgtgagccacggtactcggccacggtcttcaatttctagtatttccttttggttttggttaataattaaagaataggcagtttcaagttaataatagttaggctcttaaaactggtaaattcagggtttagaattcaattagattttcccatagaatggggggcaagattcccagattagtccacataaagctgttaaatccaggtaatttatgtacctgatacaaggctgggcactgggaaagtggctcagtaaaggtaagtttctttcaatatagaacctcaccatgcggttaaaccatatttatatgag

SEQ ID NO: 604669 - DNA, 393 bp, Homo sapiens
  misc_feature (272)..(272): n is a, c, g, or t
cacgaggcggcgagtcgatcttcatcgccaccggcagccccatctcttcggcgtacaccatggcctcggtggcgctccgcgcgaccacggtttgcgcgatcggtatgcggaaggcggcgagcagcgctttcgattccatctcggtcagcacggtgcgtcgctcggacagcgcggtttcgatcaccagccgggccgattccaccgacggcggatcgaggtcctgcgccagcgaggccggcgcgtggcgcagcagctgctggttgcggtagtangaggagatgtggtggaacagctcgaccgccggctccggcgagcggaaggtcggaatgtgtgcggcctcgaacagcgagcgcgcggcgcgtacctggtcgcaacccatccagcaggtcatca

SEQ ID NO: 604670 - DNA, 176 bp, Homo sapiens
gcaggtccaggattgacagtgtctctgtgccactccagggaggaagagtatcctgagtaagcagggaagctgcatgtggatccacggggaagttgctctggcctcacatccagctcctccatgtgtacagctcccagatgggtgggtgttgtcggagaattgctcgcaagggcaag

SEQ ID NO: 604671 - DNA, 255 bp, Homo sapiens
  misc_feature (142)..(142): n is a, c, g, or t
  misc_feature (233)..(233): n is a, c, g, or t
  misc_feature (250)..(250): n is a, c, g, or t
tttctctttctagatttacaaccagtcaggttagactatcagcacatctgcagcatctgtgaaccttctcatctgatgacaaagaaggcctcagacgtaaaatgttgtaaacgcaaaggtggggcccacggtactgctccangagttcaagttctcagttaagctcactgttacaagtccgatgcacccatggcatgagctccatgagaggacgagacagacacgggtgttcnggggggtcccccactcnagcag

SEQ ID NO: 604672 - DNA, 734 bp, Homo sapiens
cagactttgttacttgtaaattttttctggtattacaagtgctctaattgtgaacttttaaataaaataattaaattagaaaaaaaaaaaaaaaaaaaaaaaaaaaaaaaaaaaaaaaaaaaaaaaaaaaaaaaaaaaaaaaaaaaaaaaaaaaaataaaaaaaacttgaagtacgatacgtgaaaatgacattgaacttcaggaaattttaaaaatgcggccaaattaggggcaaattgggcaatttcgcctaaaaggaagtggattaaaatataattgtgaatgatttaacaagtacggaactggaaaaaccttggagttaccaaattaaactttttagaaaaaaatcccctttttgaaaattgcagaatttggaaaaaggcccccaactgaactttataacaacaattggccagcctgaatgctaaagggaatttacaagcgtaaatattcggaaaaattgacggataaaatattgaaaaatcacctatttttaaaacaaatgtgcaaaaatcggaaaaatccctaaaaatcaaaaagatttccccaaaataggttttatgtttcacaaatttgaaaaaggacccattttaagaaacggtaactaaattcaaaagggaaaaaacccttaaaaagggtgggggcccaattcggaaaaatataccttaaaaaattttttggggccaaagtgcctaaagcctaaattggacccttaaggggaccccttatttaa

SEQ ID NO: 604673 - DNA, 135 bp, Homo sapiens
cactttgacacgtactgacacgaacgacttctgcttctgtttattcaccatcatttggtctgaaacagacagataagttccaagtaaaacggtagctgctaaaaagggaaaaccgtcttcagaaaccgtcgaatt

SEQ ID NO: 604674 - DNA, 105 bp, Homo sapiens
acaccatgttctggacccatagctctggcatctcagggttgtgatccagctccatatattgtttaccttcaaagataccattaaatgactttccgtatggatgca

SEQ ID NO: 604675 - DNA, 103 bp, Homo sapiens
gcggccgcctactactactactgctcgaattcaagcttctaacgatgtacggggacatgacctcaggaaataaacgtccttgactttataaaagccaaaaaaa

SEQ ID NO: 604676 - DNA, 1469 bp, Homo sapiens
cagactggagtgcacctgcatggcatttatctcggcacactgcaacctccatctcctgggcatcaagccatcactcccacttcagtctcccaagtggctgggactcacaggctacacagccaccacaccataggcctaattatattagtatcttattgtagagcacgaggttctcagccatgttagccccaggctggtcttcacactcctcgagttcacagtgatcccaccgtgcctacacccatccctaatagtgcatgcgcgcattaccaggccattgcagccccactgctcacccgcgcccccatcaatcaagctctttcccacatcacacccaacatcatcttccaacaaatatactcgacatcactccacatcagccacgtcacacatccaccgccctggccttctccaaaccttgtcatcatcaccacgagcccaccacccgggactgctactcacgtgcagacacaccccctcgcaacttcgactcccccacactccccctcgcacctactacacgcgcacgcaccccccacggcacctctccgcaacacgtcactccctacccccccctccagcctacacaccccctggatcactcacagcacgccacccaccccccatcaccctggcacaaccacgcgctaccacgacgcactcacgaacacctaccccataactcgcctcgacctacctcacaccccacacacgtccggcaatcaatctacctgactcatactcccaccactccaccccccccataccccacccaatacatgctcaccacacccacattaccaccaactccaccaaacccatccaccaacccccacaaccacacccacaccacccccctcacctcacacatccctcactaccctacccaccacacaccacacccacaacaaccccgacaccccccaacacacatacacacacacacaccccacccaacactccaccccacaaccttaccactcactctcccacactccaacccatccactatacctctacccaacaacaacaccacatcctcatacaaccaacaccctccactccactactcaccacacaactcaaccacctacactcataccctcccataccctaactccctacaccacccaactaaccctcctccgctcacccccaccagtccaccactcctccactccccacctactgccctaccacaaaacagggcgcatggcgtgcgcagtgttctaccctatgctcactcctccacccacaccgcgccccgcccatctacaccctcaaccaccagagcgtctccagtcttctcgcgctgccagccctcaccccctccagcccgccccccgcgcgcgtagcacactcaacccgccgcccccgacgccggcacaccgtcaccctccccggtgtcgccgggtcgcccacgccccgacggccgcacgctcgccgactggaggcgtcgcacccgccac

SEQ ID NO: 604677 - DNA, 887 bp, Homo sapiens
cggggatacccccgccggtgcaccccacaagtggtgttcctgccccggaccggccgccgcctccccaccgtgtggagaaccgttcccaaggcatcgcgcgaaagacaccgtggaaccaagtaggcccgagacggcttgtctaaaaccgccccgccggtaatgccacccccgggccataggcgccaaatcattcggggcgccaagacaacgagctctaataggagccaccccttccggccacaaagccaaggtggcgaggccccaccgtcattggctccacaggcccaccaaggatgtcccccgtctccctctacccccaccatggtgcttcgcggataacaatggcccgcaggaatattgcctgcaagaggcaaaaccggcagacgaggaaggccccacaagcacctgattggtcccccgcaagacaccttgaagtctaccaagcacccccgcgccccaaccgcgaaggcccaccaaccgcatgtggggacccacagagctgggtcccctgagagttacaaaccacaggaagaacagttgttacccatccgcaaggcacacccgcctcccctatatctccagaaagtgcaccacccccaacatcttgttatacgggtcttcctaatataagcgaacacttctccacaccctattcaggcatcacacatttttcgagtttaaccctcttctatatcccctaccaccctaagttattggcacgcaccacacatctttctccccaaaaaaattcaaaacaatacaacgtaaaatgagtagtaggtttcaaaaataccaccccctgccgtaattactccccagtgtgtttctccagaacaatgatgggcccaaaagaaaagccctcaaaaaatttcttcaaaaacataaca

SEQ ID NO: 604678 - DNA, 225 bp, Homo sapiens
gcttggcctcccaaagtactgggattgtagtcgtgagccactgtgtctggcctctcttttatttattttgtttttatttatttataaatgagacagtctcgcccaggctggagtgcagtggcgcagtaacggctcacttagaactcctgggtttaagtgattctccacctcagcctcccaagtagctgggaccacaggggtgcaccacatgtctggctaatttta

SEQ ID NO: 604679 - DNA, 103 bp, Homo sapiens
tcattgtggggttctgtatgacccttcatagtaaagtgctggggacgataagtgttttgcctgtaattttggttggttaaaaaatgtggtgatttagttgcta

SEQ ID NO: 604680 - DNA, 139 bp, Homo sapiens
aagcagttaatacagaccaacaaaatctgattttaaccagatactaagaaatatcctcaaaattactgtgtcatgtaggggccaaagaaagctacctagaaagatagaaaggaggacataacaataccagggtagtaca

SEQ ID NO: 604681 - DNA, 914 bp, Homo sapiens
ttacccatgtcatagtatgtatatctaggttgagacatatactgagatcattgaaatcttccttgttctcgaaatctcaagttgtggaatatatattgaaatcattcaatgtggaaactcttgagtaccatcttaataatgggcttagaagaccaagtaggcctctactgccggggagtgtgagtgttggtaaatcgaaagagattgatctatactataggagatcactcttgtaaagcgtagataatacttccattgagcattgaaataagactacgtaataaggtaagattatatgattgttccgctatttgtccatatgtcgtagtttagtgactcctttagctcaactttagtgcagatctagttgtgtcctgtcatggtgatcgtcgtctgtcgaagaattccatgaatatgccacgtcacgtaaatatctatgtggaacgctggctccttcagatgtcacgtttctgttcttcttgttctcacatagttaccctcctgtcttatttgcgaggccgtgttcgggtccacgggacgtcgtttgtttggcccgccatccttttgccatttgtgcgccttaggccctgcttattcgactagggccacaagggccttgtggtgccttcttttattcattttgtgagttggccatatcctagtcagggaattgcctctgtgtcaaagcaaaaatcggtacagtggggcttagaatgttcagggttaagaattatgtccctgccaaggggaacgtaagaggtgcgtgggaatgtattccgataaatcctaaattttcaaaccggggccatggtcaccggcggtggtaaataacgaggcggatgcccgcgaaaaatttagccgctccacacacctttacccccacatacaaaacacccacaaagatttactccctt

SEQ ID NO: 604682 - DNA, 383 bp, Homo sapiens
  misc_feature (20)..(20): n is a, c, g, or t
  misc_feature (113)..(113): n is a, c, g, or t
  misc_feature (116)..(116): n is a, c, g, or t
  misc_feature (370)..(370): n is a, c, g, or t
  misc_feature (375)..(375): n is a, c, g, or t
  misc_feature (379)..(380): n is a, c, g, or t
gtgggagggatcacttgaanccccaggagttcaaaacccagcttgggcaacatagtgagactccccatctctcccaaaaaaatttaaaaaccagcccaggtagactgggcgcnagntgtcacgcctgtaatcccagaactttgggaggccgaggcaggcagatcacgaggtcaagagttagagaccagcctgaccaacatggtgaaaccccgtctctactaaaaatacaaaacttagccaggcctgtggtgatgcgcacctgtagtctcagctactcaggaggctgaggcaggagaatcgcttgaacctgggaggcagaggttgcactgagctgagatcacgccactgcactccagcctgggcaacagangtgcnatcnnctc

SEQ ID NO: 604683 - DNA, 194 bp, Homo sapiens
  misc_feature (24)..(24): n is a, c, g, or t
  misc_feature (27)..(27): n is a, c, g, or t
ggaaaactagcgacgcatagtganttnataaaaaacaagtctggtatataactcaccactgggatccttctccagcaatggagtagttacttagatctaattgttagtgattcaatgcttaattttatgttttgtctttttagggctgaacctgcagcatatggaagttctcaggctaggagtggaattggagc

SEQ ID NO: 604684 - DNA, 316 bp, Homo sapiens
  misc_feature (21)..(21): n is a, c, g, or t
  misc_feature (28)..(28): n is a, c, g, or t
  misc_feature (47)..(47): n is a, c, g, or t
gccaatgtaaatgagatgccntcctganttcctttttccagattaantccacccattgaccatatataaagcctacctaatttctgtatgttgagtttgtatcccagcaacttaactgaattagtttacccagttcctagcagttttttggtggagtctttaggtttttctaagtgtaagttcatgtcatctgtgaacaaggctatgatttctttctttccaattttagtactctttatttttttcccttgcctaattgctcttccaggacttccaatattatgttaaataaaagtggtgaaaagtgaaaaaaaaa

SEQ ID NO: 604685 - DNA, 518 bp, Homo sapiens
  misc_feature (184)..(184): n is a, c, g, or t
  misc_feature (302)..(302): n is a, c, g, or t
  misc_feature (373)..(373): n is a, c, g, or t
  misc_feature (407)..(407): n is a, c, g, or t
  misc_feature (434)..(434): n is a, c, g, or t
  misc_feature (462)..(462): n is a, c, g, or t
  misc_feature (465)..(465): n is a, c, g, or t
  misc_feature (482)..(482): n is a, c, g, or t
  misc_feature (494)..(494): n is a, c, g, or t
gacaaggaattcttcgggcttcgtgactactacagcctcatcaaaatggtctttgctgcagcaaaggcttcaaatagaaagccttccccgcaagacattgcacaggctgtccttaggaacttcagtggcaaggatgacatccaagctttggacatctttctggccaatttgcccgaggccaagngctcagaggaagtcagccccatgcagctgatcaaacagaacatctttgggccttctcagaaggtgccgggtggagagcaggaagatgctgagtcccgctacttactcgtgctgaccanaactactggcctgcagatcctgcagcagacatcttcgagggggaccagcagccggagattatttttggttntggtttccccaaggaccaagagtacacccagctntgcagaaacatcaatcgtgtgaagatntgcatggaaacaggcaagatggtgttgnttntcaacctgcagaacctntacgagagcctntacgacgcactcaaccagtactac

SEQ ID NO: 604686 - DNA, 142 bp, Homo sapiens
aaggagctggaataaggcaggtgcagacaggcttcgccctcagaagcacaggccactgaggcaggagcacacaggcagcatcgaggcagggggtggcaaggctgcacatccagaggcctgtctcagtgcatgaaacggccat

SEQ ID NO: 604687 - DNA, 245 bp, Homo sapiens
tatacggttttagaccaatgccttatgcctaggagatgctctgttaggaatagaaaacgctggccaggcgcggtggcatcacgcctgcaattccaacaccctgggaggccgaggcgggcagatcacgaggtcaggaaatcgagatcatccttgccaacacggtgaaaccccgtctccactaaaaaaaaaaaaccctactccactaaaaatcttaagaacagaaaacacaaaaaaaaccaaacaaa

SEQ ID NO: 604688 - DNA, 1105 bp, Homo sapiens
ggtccaatacatgcctcctcctcgcactggccagtcgagtccatcttgagagagttatgctagattcatactgtctacttgaatcaactgctttattgataggtctcgttcttctcacttctgcatgcagttgagccaatgatactgacgagaaatgtcatctctcttctatcttgtggttagcttgtctggtaacggcacgataaacagtttactgtgtagtaagttcaggatagattcttatggatggcgtcgtgaagttatttgccatttgtcacaatcacactatagtatgcgtgggagccccgatcatggacatggcttattaatgtaatcaagtcttgcgttcacttgtgattgcagcacacagtagtaaggtgacacaacgcatgagagcgaccggagcatcttatcccatgtaattctgcctcatcgtaaccaggtgtggtgtccagatctccgcagaatccccaggtgcctgctatgatctgtcgggccagagtgaaacgagttaaggtgggcccatcgctaaacggcatgtggccttgaccaggttccgacccaaggggcgatactttatgcataaattgtgagtggaccatgagattgtggaggcgtcgttcccaggttactaaccagcaagattccatgaagctccgagaagagtaggtaacctataacaaagaggaactctgcgtgtgattcttgcgcagggggcacacagacccctacgatctctaacgaatttggacagacctcggagatgggcggaacggcactaaattcccattcctttcgcccgtgtcgtttcgatttggagaaccacattcctttgccgtacagtaaaagtggggagggcccgaacggccaaccttcacctctttgacacgcaattccaattagggttgcgcaacggaaatcaccttctttgtggatcccaacaccgtggctgtggtaggagaaaactttttccccccgtgagcggccctacagcgggaaagacattggacaccaagcggggcatcgcagtgcgctacgtgtacttggattgtggcacaacacgccaacaaaggaattcgtcggttcgcacttgggggaatcgccc

SEQ ID NO: 604689 - DNA, 1165 bp, Homo sapiens
  misc_feature (595)..(595): n is a, c, g, or t
agcggggggcttcccgaacctcttcagaccgcccggtagccgctcccggagcccggccgtataggctgcaatcgcatccgggagcctcggcaagactcgcgccccagagcctcgccgctcgtccattcgagggctccccaaggccgtcgccaattggtgaatgcgtgactgttcaacgtccgtgtcttggctcctatgaattgggaggctcaatggaagggaacagagccacaagaagactggatgagtgagagcggctcaattcattccgcacaccacagtatccgaccagtccgtagtgtggtgactggctagaggtggatctcctacgaattggatagtagagtaacccaagtatggacgcataaggaacgatgacctagtgtgattagggtgctatgttgctttatgagatctaaggcgatttattgctatgctatgttgtaatacttaggatggagcaattctcgtggctagacaatactagattatttgtgatacttacaacacgcacgacttgaaaccgtagatactctaaccttgcttggacaccttatccactggctaccccgttcacaatggattgcaattgttncatacttatacaaagtgatagcgccctgcatggcagaatttgacctccagggaatggcatacttcctagtacaggaaacaaattttgacacggaaagaaactaagtttaaaacccaccttcgtattgtacagggaaaggaaaaggaaacgctttggacacgttatatatttcaccttggtagaactgtgtgttcccccctgggaagattattggacccttaattagggctggacatcccttggcgcataaccaagtattgctgtgcccatagggaggggtctctaagagccaaaagggacaccaacgttataagcaatggccccgtttactgtataaggcaattacttggaaaccctccttggaggaaattacacagggattggcccataaagtggcgtggaactgtcaccgcttcccttgggaaaaacacacacttaaacccaaatgtggtttttatttgggcccaaaacacccaagtaaaacaactccattaactttgtgaaagggtttcaccgtctgagttttcaccaacgagtttctaaaagggtggctggagaagaaacaccgta

SEQ ID NO: 604690 - DNA, 1090 bp, Homo sapiens
attctagaggccgaggcggacgtgctgtttctttttttattttatttctcttgaaccagaaaaaagaattggttaacctaccatttcatgggtagtatggcccacgggtgaaccattttttggtggtgtacaggcgtcatataggccttggccttataatggatctctttacgggttcaaaaacacacaataaaacacaaattggtgtcgggctcactgggacagtgtcggtatattcaccaagatcatcaactacgcagattgtcagttggccacattgagaagtccttaatgagacaattgcccataactctacaagaacatttggtcgcatctcctattggcgggttatcacatatacagagtgttcaaaagaatcttgtgtcacacagagcgtcttctgtaaccgtggtgccatttacaactatactcccctttaaaaaatatgagagctctgggttggaccgtggtacacccgcttttgggaacagattatttgcactttagactgttacagatgtgggcctaaattccccaagcctcctacttcttcgaggggaaaactgtggccccaaacaaagggctatttccccaattgtgagggcggcaacctgtggggtgggcccgtctgttataaccagaggggtgttgtcaacaatgttttgtgtgcacccactccgctagttgtactaccccattgttgtggcgcataacatatatattccagtgggcaccgagcaacgacttatttgctcaactataaattccccccaattgatgtgatggagagcggccaagtagagatgtgtttgggcaacctatggaacgtatatattttaaccaagtctcccttttttaaacaaaaacccaccgtgtctctcccccgagtgtgggctcataatttattagaccccgttttaatcaccacaaatcaaatattaacgacgaagcggttgtttctacccacccggaaccttacttctactgggtcctccagagacctatcacaaaaacacatacaacaagagacaaactcacacgacataacaacaacataacagaccaacaaaccaaacactaaaacaaacac

SEQ ID NO: 604691 - DNA, 422 bp, Homo sapiens
  misc_feature (1)..(1): n is a, c, g, or t
  misc_feature (6)..(6): n is a, c, g, or t
  misc_feature (107)..(107): n is a, c, g, or t
  misc_feature (122)..(122): n is a, c, g, or t
  misc_feature (131)..(131): n is a, c, g, or t
  misc_feature (156)..(157): n is a, c, g, or t
  misc_feature (179)..(179): n is a, c, g, or t
  misc_feature (333)..(333): n is a, c, g, or t
ncgagncacgatccccttaccatcaaatcaattggccaccatggtactgaactacgagtacacgataggcggaatatcttcaattcctactattcccccattattcntagaaccaggcgacngcgactctngacgttgacaatcgagtagtatccnnttgagcccccttcgtataatanttacatcacaagagtcttgcattcatgagctgtccccacattaggcttaaaaacagatgcaattcccggacgtctaaaccaaaccaccaccgctacacgaccgggggtatactacggtcaatgctctgaaatctgtggagcaaaccacagtttnatgcccatcgtcctagaattaattcccctaaaaatctttgaaatagggcccgtatttaccctatagcaccccctctaccccctctagag

SEQ ID NO: 604692 - DNA, 253 bp, Homo sapiens
cggggatcgcatacggatgcgtgcgggcgatatgagtcaccagattaaggattccttttgtgcccacaaatgatctttctcactttgcacaacttgtatcttggcctcctcaggtgtaatacgatgtacagcatagcgacccttggtgtcatatatctcacgtgtattctctcccgtcttgtcaatgctgatgacatccatgaatccagcaggttaggttatatcagttcggaccttgccatcgattctaaag

SEQ ID NO: 604693 - DNA, 431 bp, Homo sapiens
acaaagatggtaaagcagtcattatatggctccatgtgccacacagagcaaacgtgaacatgatgagaaaaatgggagatattaaaaaatcttcatagtctccaatcttcaggcaagagcaatatgactaatgtgtttctgtagcctgttgaaacatctaggcagaatgtggctgtactgccctgttaacaacattctccatggagttgggagaggaacgaagaagcctgcagagaactgaatgtacacagggagctgctgagatgtggctggtctggggccaaacagctgagcaggatcagttcagaaatgagggaaaacccgggatgttcctttaaaaagcacatcattattggtggccttgtgcccctaattctggttcgcacacagaaaaagtgacaaattccatgattagctaaaaagaatcagag

SEQ ID NO: 604694 - DNA, 218 bp, Homo sapiens
actagcacgcgctaacaagaagcaatggtgcaatccagttaaaattgttgctgttagaaaatgctttcgacgagactactggacattatttcagaggaggggcaacagtgatggaggtatagtagttgaagactgtttgatttagctccaaaacttattataaaacaacaactcccatcaagatttctttaaagaaggctcatatattccaacgtatg

SEQ ID NO: 604695 - DNA, 612 bp, Homo sapiens
  misc_feature (2)..(2): n is a, c, g, or t
  misc_feature (4)..(4): n is a, c, g, or t
  misc_feature (15)..(15): n is a, c, g, or t
  misc_feature (604)..(604): n is a, c, g, or t
gncntgccggggccngtcagaagcaatatctggatggaatgaaggagaatgagacttcgggcaggaaagaaggcaagttaggatactattgggatggtccagataagagagagcaccgtctgaagggtctggcttataacaaagaggaaataatctttgagaccaaacagaaaagtgtagcctcaagaaatattctttgtcatcctagtggttgctttagaatttgtagtatacatctttaacttatcacagttcgcgttaaataatattatagcatttcatatatggtataagaaacttacagtaaaacactttcattttctcctttcccagcctttgcactactgctcctctggtttttagttgctcataggttgtaaactctacattacattgctattattttttactttaaacaatcaattttccttctaaacatagaaaaaggcatatttttccacatatacaccactttctgtgctcttcattcctttgtgtagattcatatatccatccaacattatttttggtttggatgaaggactattgaacatttcttacaatgaggttctgctggtgatgaattccttcgccttttgtatgngcatctga

SEQ ID NO: 604696 - DNA, 341 bp, Homo sapiens
gacccctcataatgagtgcccagtagctcatagatcctgagtcagagaagatcttggtatgttgaaagatctggagcctaatgagggcaaatgatgctgctgatgagatttgagtgacacatatctgggcttcaaaaaaaaaatcaacggtgaccgggtgcgtggtggccacgcctgtcatcctagcactttgggaggccgaagctggccaatcgtttgagctcaggagttcgagaccagcctgggaaacatagtgagacctcgtctctaaataaaaaaagaaataagaaaaagctccagggtccttttcttcccttgatgttggatagctaagatactac

SEQ ID NO: 604697 - DNA, 928 bp, Homo sapiens
  misc_feature (93)..(93): n is a, c, g, or t
  misc_feature (105)..(105): n is a, c, g, or t
  misc_feature (110)..(110): n is a, c, g, or t
  misc_feature (112)..(112): n is a, c, g, or t
  misc_feature (114)..(114): n is a, c, g, or t
  misc_feature (144)..(144): n is a, c, g, or t
  misc_feature (151)..(152): n is a, c, g, or t
  misc_feature (154)..(155): n is a, c, g, or t
  misc_feature (158)..(158): n is a, c, g, or t
  misc_feature (163)..(163): n is a, c, g, or t
  misc_feature (167)..(167): n is a, c, g, or t
  misc_feature (175)..(175): n is a, c, g, or t
  misc_feature (178)..(179): n is a, c, g, or t
  misc_feature (185)..(185): n is a, c, g, or t
  misc_feature (187)..(188): n is a, c, g, or t
  misc_feature (207)..(207): n is a, c, g, or t
  misc_feature (215)..(215): n is a, c, g, or t
  misc_feature (217)..(217): n is a, c, g, or t
  misc_feature (222)..(222): n is a, c, g, or t
  misc_feature (226)..(227): n is a, c, g, or t
  misc_feature (234)..(234): n is a, c, g, or t
  misc_feature (243)..(243): n is a, c, g, or t
  misc_feature (251)..(251): n is a, c, g, or t
  misc_feature (253)..(254): n is a, c, g, or t
  misc_feature (256)..(256): n is a, c, g, or t
  misc_feature (267)..(268): n is a, c, g, or t
  misc_feature (270)..(270): n is a, c, g, or t
  misc_feature (277)..(277): n is a, c, g, or t
  misc_feature (284)..(284): n is a, c, g, or t
  misc_feature (289)..(289): n is a, c, g, or t
  misc_feature (293)..(293): n is a, c, g, or t
  misc_feature (295)..(295): n is a, c, g, or t
  misc_feature (298)..(298): n is a, c, g, or t
  misc_feature (301)..(301): n is a, c, g, or t
  misc_feature (307)..(308): n is a, c, g, or t
  misc_feature (311)..(311): n is a, c, g, or t
  misc_feature (318)..(318): n is a, c, g, or t
  misc_feature (322)..(322): n is a, c, g, or t
  misc_feature (332)..(332): n is a, c, g, or t
  misc_feature (336)..(336): n is a, c, g, or t
  misc_feature (359)..(359): n is a, c, g, or t
  misc_feature (363)..(363): n is a, c, g, or t
  misc_feature (366)..(366): n is a, c, g, or t
  misc_feature (371)..(371): n is a, c, g, or t
  misc_feature (373)..(373): n is a, c, g, or t
  misc_feature (375)..(376): n is a, c, g, or t
  misc_feature (379)..(383): n is a, c, g, or t
  misc_feature (385)..(386): n is a, c, g, or t
  misc_feature (392)..(394): n is a, c, g, or t
  misc_feature (396)..(397): n is a, c, g, or t
  misc_feature (412)..(412): n is a, c, g, or t
  misc_feature (418)..(418): n is a, c, g, or t
  misc_feature (429)..(429): n is a, c, g, or t
  misc_feature (436)..(436): n is a, c, g, or t
  misc_feature (451)..(451): n is a, c, g, or t
  misc_feature (455)..(455): n is a, c, g, or t
  misc_feature (474)..(474): n is a, c, g, or t
  misc_feature (476)..(476): n is a, c, g, or t
  misc_feature (478)..(478): n is a, c, g, or t
  misc_feature (482)..(482): n is a, c, g, or t
  misc_feature (486)..(486): n is a, c, g, or t
  misc_feature (488)..(488): n is a, c, g, or t
  misc_feature (495)..(495): n is a, c, g, or t
  misc_feature (498)..(498): n is a, c, g, or t
  misc_feature (504)..(504): n is a, c, g, or t
  misc_feature (506)..(506): n is a, c, g, or t
  misc_feature (565)..(565): n is a, c, g, or t
  misc_feature (576)..(576): n is a, c, g, or t
  misc_feature (580)..(580): n is a, c, g, or t
  misc_feature (582)..(582): n is a, c, g, or t
  misc_feature (590)..(590): n is a, c, g, or t
  misc_feature (597)..(597): n is a, c, g, or t
  misc_feature (627)..(627): n is a, c, g, or t
  misc_feature (646)..(646): n is a, c, g, or t
  misc_feature (883)..(883): n is a, c, g, or t
gaaagtttttagatgaccaatattttgttccagaaacatacagccttatcagctaattcataaaagagctattttacaaaggtacatctgganaattagaacaanaaagncntntaggcatttcaaaatgtgatcagtaaaaanacatgannannaanaaagnattnaaaaaganagnnccaganannttaaaaaagcaatttcggnaaaagagnanatgantgannggagaanaaggaaaanaaaaagtncnngnaggaagaggcnnanaaaaaanaaccaanagtgngcananganagnaaccannttnggaaaanatcngcttagcagnaggnaccaggaaaagggggggaaggcnaccnacnaggangnannttnnnnncnnaccaannnannatcaaaaccctcaanaccagnggggaaggcanaaggaanaaggcaaaaggaacncttntcttgaggaaagaaaaatntngnagangacncngaaaagnggnggaaanancaggaaaaaaatgacttaaaaaacaaaaaatgaaaaaaaagggggaaaaactagccatnaggaagctgantgtnangccctgcnaaatttngtattttgaagagtcctatgcaacgcagtntctcagtgggtgccctctngtgacatatagaggaaggaaatactgaccaaagctctagtaattcaaaaccatatatcgacttcagagaagaaagcttccactttgaaatatggaagccccacgtattacaccaaatttactaacatcaaagaggaaaacaaagatgccagtaaaagacaattcacaggaagcataattactttctttagcttctaaaataatttttaaatgggcttctctattatccctcctaacncaaaatcatataaacaacaacaaccacaactttttaaaaggggat

SEQ ID NO: 604698 - DNA, 113 bp, Homo sapiens
gggtcgacacggccgtgtattactgtgcgaaagaattacaggggaagcagcagctggcgccgccgtactactttgactactggggccagggaaccctggtcaccgtctcctca

SEQ ID NO: 604699 - DNA, 125 bp, Homo sapiens
  misc_feature (20)..(20): n is a, c, g, or t
ctcttttagttaatgttacnatgctgtgttgaacctcatagagattaaattgtctgtatatgagttcttaatgcgtgattctgttctttatctctgatatgtctttttatatttggcccattata

SEQ ID NO: 604700 - DNA, 459 bp, Homo sapiens
gctctcagcgctgggaggtgcgacagataaagcgagacagaccaaggagtaaatgccttggggtctgctctttgcgaaggaagaggatggaagtactaacagcagacgggtctctccaagtctgggtcctacgcagggcgcaggtgggaggggaagggagaggtaagagtcttcgctcacctcttgctgctgcaaaggcccaagtgctgtctaacaaggccagcaggttctccaagctgtatctagcccagagcattcattagcagtactctaccacgcctgcttcaaaaatgatctaagtaactacagtaaagacagggcattaaagccttaaaaccagaagatggagggtcttcctttccacttgtgctcctctagccagagggctctaggggcgattctattcttcttttccaggcacaggcagtcggacacacgaagggccgatcgggggcgtgg

SEQ ID NO: 604701 - DNA, 162 bp, Homo sapiens
  misc_feature (10)..(10): n is a, c, g, or t
  misc_feature (50)..(50): n is a, c, g, or t
  misc_feature (84)..(84): n is a, c, g, or t
gtttttcatntaggaacaaagctcattgatttaaaacgtgggcagaaagncttttgcataaaaggtgatttgttgatatctatncttcccggatcagaagtttcaatagattaaaatttatcagctgttttcagatagatttagtgctctaaattttataaa

SEQ ID NO: 604702 - DNA, 861 bp, Homo sapiens
ggcattttcctgcataaccctttcaaataggagacaatttcctggccgggcacggtggctcactcctgaagtcccagcgctttgggaggccaaggccagtggatcacctgtggtcaggagtttgagaccagcctgaccaacatgatgaaaccccatctctactaaatacaaaaaattagccaggtgtggtggcgcatgcctgtaattccagcttcttgagagactgaggcaggagaatcgcttgagcccaggaggcagaggttgcagtgagctgagattgcaccattgcactccaacctgggcaacaaacagcaaagactccgtctcagaaaaaagaaaaaaaagaagacaatttcctcagataaagaaaatggaccgcttatacactaaatacaaattatggatcagctaaccctagttattgctctgtggacggaaataccatgtcaggtattatcaggtatatgctaacagataaaagctgcataacaaaaccaatcaagcaacaaatagtttacaagcaaacatgcatcttacatatgactgtacaggtaccatatttgcgggtgagttatgcggtgagcatggacagagttggaatccagcatcagcacaggatccaagatcagccacaaccagtcacatgggtctagccccaaatactgtgggaagagatgtacaaaccccttaatgaaaccaaaggaggaaacagcaggatggacatgaggattgaaacatattaataacaacacagaaagatcatagcacataaatggacgcaaaccaacgacaatcaagatacaaagtggaaacacagaagaaaaagacaaaaagaaccaagacgcaagaaagaaaaagccc

SEQ ID NO: 604703 - DNA, 190 bp, Homo sapiens
ggagagacctgccacttggctgtagagtgcttaactaatagatgtagccactcctggctgctgttaaaagtatttgaatagacatttgattgattgagttgattcactttatgagatggagttttgctgttgttgcccaggctggagtgcaatggtgccatctcgggtcactgcaacctctgcctaccgt

SEQ ID NO: 604704 - DNA, 383 bp, Homo sapiens
cccggaggtagtcccgtttcccggaaatccgaacccttgagggtcagcccccagactgcgttggaagaaaacgagactcagaaaaaagttccccagggccagcctttggaggcccctgcagaccagtcgaaaggtttcttgcctccctgaaggacctgtatactgtgtatgcgggcattccccctttactcccgggctgaatgttgagctatttttaaacagttgaactgggtaaatgttttttgatctttaaggtattatgtttgcctttttttagttatttttggggtgtcccaaagctcagtttcatggtttgccaaaagcagttatgtgaacttttatgttaggccctttctaaataaaaaattccctagctgcttata

SEQ ID NO: 604705 - DNA, 176 bp, Homo sapiens
gggggtttttttttcccccgggggatttttttgtttttaggggggggctttccccccccccaaggttttttttattggggaaaaaaatgggcccccttttttttaattttccgggtttaaagggggggttttttttttggggggtttccttccccaaaaaaaaaccctttttccca

SEQ ID NO: 604706 - DNA, 1208 bp, Homo sapiens
  misc_feature (852)..(852): n is a, c, g, or t
  misc_feature (931)..(931): n is a, c, g, or t
  misc_feature (1065)..(1065): n is a, c, g, or t
gatatgtgtaagccacgcaagttgccttattcgtggctgattatactgcctttggtcattcctctgcaactcaatggtattaatacgaacacacggtggtaggcactatgatgcgcaagcataaggcgggtggcctattgcagcactgtgattatacgtaccacgacagatatggactgcgattagtcttgatcttcggcaaagtaagtagaggctgctggaatccatgaaagcaaacgttgcaacgacacttccaacatttctctccagctgactttacggtgaacgtacgaataggttcgggtgagcaaggtcacctgtcctcgactagctcgccattgcgcattttttaggacagtatgcctagatgttatctgggttcccaagcgtaattgaagtctgtttcattaaactacggagtttcatttatgctccttttcgacatgtattgcacgccgatgtgattcccatgagagaaccctatgtcgatctcctaaatatagccattgtgtaaccggggcttcaggtgtcaagcttatgggcaagcgtaagtacttagggacgtctgcaagtttgacgggttaacttacaacaagtgaaactgcgggaagcaaacggcaaactgctttcaggaagttcttggaaacctttcaatgcccaaaggattgcttctaccatactacattattctccagagcatggccgtggggccaccctgtggaacacattaggcccatttgcgtgcttggagacattggttcctagaacggggactcaagagacgagggggtccaccccgttgagtattctagcagaagctctttaacagcaacggttacgcttctattcgtngccattcaacgttggtgtcgcacaggactcgaacctcctatggtttggaaagccattcacgcacggcaggctaaaaacntggattaagccttgatgaagaactgaagttatcccaaagttgcccaacgcagatttcgggagggtcacggcttaacaatggagccttctttacaacttcttaacgaaccaggctaagcgaaaacagccggacanagccacaggaactcctacgtgaaacatctctgggggttggcaagtcacggtctccttaaaggtgcccttattcacttcactttgcccacacgactctactttggacatggcaattctttccacggctgagggctggaatcccg

SEQ ID NO: 604707 - DNA, 272 bp, Homo sapiens
ccatacgccttcacttgccgaatgtttagagactgacctgcctaggcccgtcggtctgccctaggcgcgagtagttgtgaggccatcagcccaaaatcaccagcaaggcaaggcggtgaccaggttcagaaagccttgacctctgtgcttgtggaacagagggaccaggggatggaaagctagctttctgggtagcacagtgtcaggggagccatgcaggatggggctggaggaagaaaaggcagaaagagctgactgaagtttgagttggg

SEQ ID NO: 604708 - DNA, 196 bp, Homo sapiens
gccttgggggggggggggccccttttttaacccttccgggggtttttccccccccccgggttttttccgggggggggggggggggcttgggggggccctgggccctttttggtttttccctgggtttccccttccccccccccccccccccccggggggggggggggttccccaattaaggccctttttcctttga

SEQ ID NO: 604709 - DNA, 769 bp, Homo sapiens
caaatgttctcgttgcgcccaaattgtggtgtttcccatctcgcgggggccactccccgggcggtcgcccccctttgtggccgcctgcgcgtgcttttccgcaggggtacaccccttccggggagcccgggtggcacccggtgggcccccgaccgagccccgtgtctgcggcacgccatctggagttccgcgcccgtttcctcctgccggggccgcgccctgtcccttgccgccggactcttcccttcaggccgcgggcttgcccccgtgtgtgggaggccgctttttcccgcgcgttgtcaccgccgtgacttcccccggggcatccccccagagcgggcagcttcacctgctgttttcctgcacacttcatgccgagcgccccacgcgctccctacgtggggtctcagagtcctccgccccagagcgctctcaactccccccctggcccggccccccgggaagttctttaacgagtctccccccaccgatttttgtccccgggccccacaggatcgggtcacttctcgtcttcagacaccgcaacttcggggtttacaacaagccccatgacctccctgcggtgactaccagctcacagtgcgttccaccgcgcccccgcgggttctgggcccacagctgtagagcagccactcaatgtgcccaatacagcgcaatagaggagaatctttctcttcatccagacgctggtgtcctgttcattctgcgaaaaaacccctttgggggcgccaaaaaagcaaacaaaaca

SEQ ID NO: 604710 - DNA, 310 bp, Homo sapiens
  misc_feature (14)..(14): n is a, c, g, or t
  misc_feature (60)..(60): n is a, c, g, or t
  misc_feature (143)..(143): n is a, c, g, or t
attcggaacgaggnggtgattctcctgcctcggcctgacattccaggcaggcgccgccanctcctgactggtttttgtatttttggtggagacggggtttcaccgtgttgaccgggctggtctccagctcctggcctcgggtnatctgcccacctcggcctcccgaggtgctgggattgcagacggagtttcgctcactcaatgctcaatgttgcccaggctggagtgcagtggcgtgatctcagcttgctacaacctccacctcccagccgcctgccttggccttcccaaagtgctaagattacagcct

SEQ ID NO: 604711 - DNA, 103 bp, Homo sapiens
gcggccgcctactactactattgctcgaatttaagcttctaacgatgtacggggacatgatattacattctagcaaaagaaagtcatcatagctgataaaaaa

SEQ ID NO: 604712 - DNA, 195 bp, Homo sapiens
tatgtatagcatcattattatttggtacttgagtcaagacgacatttagattcttcagcttagaagcattagtacatcattgtctagtcaggcgaggaaagaaattcaaaaccctttcttttttcttctgtcagttccctttgcagtaaggatccatatttcgcgacgtggagggtacctgaggctcgagattcg

SEQ ID NO: 604713 - DNA, 117 bp, Homo sapiens
ctttcccccccttcggccataaggggccggaactgtttttttttggccctcccctccccgtttattttcccgggtttaaggatggggaaatgggcctttccaaaaaaaaccctttga

SEQ ID NO: 604714 - DNA, 418 bp, Homo sapiens
  misc_feature (92)..(92): n is a, c, g, or t
  misc_feature (265)..(265): n is a, c, g, or t
  misc_feature (358)..(358): n is a, c, g, or t
ggctgcggggaagtatccagaggcagcagcccaggtggtgcagtgggtgagctttgctggattccgactatacgtggcccccaaggccaagntaaccttgtggtggttccccaccttgggcatcatgcaccacaacaaacagggccactgagaactgcaaacggaggaagtgaggcgaattctggggggctggctgggattgctttaccttggaagacgaggacttttctggtgggcgaacgagtgacattggctgacatcacangttgtccttgcaacccctggttggtggggctctataagcaggttctagagccttctttccgccagggcctttcccgaataccaactcgctgtngttcctcacctgcattaaccagccccagttccgggctgtcttgggcgaagtgaaaccttg

SEQ ID NO: 604715 - DNA, 500 bp, Homo sapiens
  misc_feature (69)..(69): n is a, c, g, or t
  misc_feature (471)..(471): n is a, c, g, or t
  misc_feature (486)..(486): n is a, c, g, or t
  misc_feature (498)..(498): n is a, c, g, or t
gaacatgttgcaagccttcctccacctgacttgccaagtccatacaggctggggccttagatcaacaanttagaaagggtgcccacactcctgttctttagaagaaagggacggcaggagtctgatcatctgtccgatgcccacacagtggctgtgctgagtgacgtgttgttttgaggatgtccctaccccctggtcttgccgtcggtctccagtacccagcgaagcaagctgtgggctctgaggagctcacaccagggaggagctgccctggagtggagcaacagcatgtcctctcccctgtgtgactgcagtgctataataataataacagaaagctggcatttcttgagctcttactgtgtgccagagacaccgctctaagtgcttacacatatgtattcgttttctgtagttgctgtaacaaattatcacaaactttaaacattgaacttatggcataaagcaganaaaaaaaaaaatggnctcgttggcctnaa

SEQ ID NO: 604716 - DNA, 110 bp, Homo sapiens
gctgctctagaggatctcgagaggtgggacactgggttaaaacgagatccaagcagccagatcgcaggaggtgcgggggcgtcgtcccccttctgttctccccccgtggt

SEQ ID NO: 604717 - DNA, 101 bp, Homo sapiens
cttcaaccatttgtggtgcaacaagtggaccatctcagaccaccatacacttactacctacagctccaactaccgtgaatgtaacacatcgtccgagcgga

SEQ ID NO: 604718 - DNA, 359 bp, Homo sapiens
gcaaggatgacatgacggggcacagccttgcggacctctggcactcaagtgatcctcccacctcagcctcccaagtagctgatctacacacgttgtccaccacatgcagttaattattttttggtacatatggggctcccactatgtccccaggctgatcttgaactcttggcctcaagaaatcctcccactttggcctcccaaagttctggattagaggtgtggcccactgcacctggccaattctatttttaaagggtttaagaaattagaacaatacccatgccaccagcacagtttagggccttgcagagctttatcccagagggaatctattatctggaggtaacccgtgaggg

SEQ ID NO: 604719 - DNA, 221 bp, Homo sapiens
aggaacttacactcttctggaataaggactgaatcaaactgacctatgagccagcaggtaacaaactaaatagttacttgcctattctcacccagttcaatcagtctctgtacttgtaatccctattattgaaacaacgtgtcctggcttacactaattctagtaattatggtatgtagctaacattccatcagccaggtgcctatattctattgcttatt

SEQ ID NO: 604720 - DNA, 224 bp, Homo sapiens
acacatgtttgtgtgcaagaatgagtttgtgacagctttgcttggctgtgcgctctatgcgtaagtgagctagtgttgtccggcagctctcatctacccaactttgacactatgtagtttatgagtcttctgtctactctggaacatcatgacccaaggtttcataacaaccattcccatggttgcaaccacattctgtccgggttgctttcatcagcccatgc

SEQ ID NO: 604721 - DNA, 256 bp, Homo sapiens
  misc_feature (44)..(44): n is a, c, g, or t
  misc_feature (56)..(56): n is a, c, g, or t
  misc_feature (61)..(61): n is a, c, g, or t
  misc_feature (71)..(72): n is a, c, g, or t
  misc_feature (82)..(82): n is a, c, g, or t
  misc_feature (124)..(125): n is a, c, g, or t
  misc_feature (128)..(128): n is a, c, g, or t
  misc_feature (140)..(140): n is a, c, g, or t
  misc_feature (164)..(164): n is a, c, g, or t
  misc_feature (169)..(169): n is a, c, g, or t
  misc_feature (172)..(172): n is a, c, g, or t
  misc_feature (198)..(198): n is a, c, g, or t
  misc_feature (236)..(236): n is a, c, g, or t
  misc_feature (239)..(239): n is a, c, g, or t
ggcacgagctttcctttcgcttgcattccatctctattctcttntactgcatacantttcnctccattccnncccattccantcaattccattccattcaattccattcccatttgtttccatnnctnctccgattccanttctttatattccatgccattcgnttccnttnctattggattgcattacaattcgggntcattccattccagaccattacatttgactccattccnttncgggccctttcaatttg

SEQ ID NO: 604722 - DNA, 197 bp, Homo sapiens
tcattatgctacagtcgcaagctaatacatgtaaatgctatatcaatggttgctgggccaaggaacttacttggaatattgtttccaaatattattgatccacagttagttgaattcaaaggcatggaacccagggccagagggctaagccgtcactttgaactcaggtaggatcgagcgggtaggcatgaagactt

SEQ ID NO: 604723 - DNA, 127 bp, Homo sapiens
ctatgttgtgctggtctgtggctgctccgcaggtttatgcctgttgaactccagtaactgatccccatactcgaggccagcctggtgagcgatgctccccacggtcaccttgtgagacgtagatgct

SEQ ID NO: 604724 - DNA, 134 bp, Homo sapiens
gtaggatgatggtcctgggcccacccagccctaaaccttgcagccttaggaaaagaggtgtgtcacaggcttcctccctctctagacaggggctcagcactcaggcatggagctgcattccagctgagatggca

SEQ ID NO: 604725 - DNA, 312 bp, Homo sapiens
  misc_feature (42)..(42): n is a, c, g, or t
tgagaccgagcctagctctgcaccccaggatggagtgctttngcatgatcatagctcattgcagcctctaaggcctgggctcaagcaatcttctttcctcagcctcctgaggagctgggactaggcacatgccaccatgctcaactaatttttgaaatgtttgtagaaacagggtctcactatgttgcccaggttgttctagaactgttgggctcacatgatcctcctgtctccacctctcaaaaagtactgggatcacaggcttgagccgccactcccggctattcttgggctttttatgatttgtcagca

SEQ ID NO: 604726 - DNA, 181 bp, Homo sapiens
ggtcctatttaggactctagaaagaattcaccttgtgggctattcttgcaccaacctagtgctttgccacatttccttgatattctatgagacttgagagaggggacccttaggcttaactttcttagtcgggtttccagatgttcaatgtgtatagatgagagttgagagcaaagctcct

SEQ ID NO: 604727 - DNA, 1032 bp, Homo sapiens
  misc_feature (518)..(518): n is a, c, g, or t
gcgcgcgtgcgtgctctccggtcatgtagggacgaaggcgaacaacgtatgtatcagagcctaggctgtggagggtccgcgtgtactcagacgcgtggcaagtgacctatagggcgtgacggagtctgacgcgtcccgaatgccactgagagccaagtatgataccgagtcggaggacgactgtaagagaccctttatcgcacgcagtaccgtacttggagttactcttagaagcgcattgcattgcactagctgcgtgtgcacagcgcatactgaggcctcttggggacggcataagcgctgagatgctgtgtgacagcattgtattcgtgtcacaggccacgcgtatttccagtggcgcgcttgacctgttggaagcgcttcgcagcgttgaccatatagtcaggccgactaagacgctgtcgcgctcgtgatggactcatcgattgtttgtaccgacattgtttgcagattcgtaccgtgaccgtagatccataagaggatgtcagtcttgtggncctcttgagctgacacggggcacgtagaatctgttgtcatgagcgttcctacagtaaggtgcctcgtactctggcaccgaagaacgatgaggtacataaacgagctagaaacccccatggtctgggtgggccgcttgggtcggcgggggttgcagcggcccatggaaggtggcctggactggtgcgcgggcagtggcgtcctagctaatctggccgcagagggcatctcttgcgagagtgtgaagccgtgaggggactttggcggggaacgcttgtcattgatgtgcccgtggccccctatgcgtggctccccgcgtggttggacggagcaatgtctgcaggcgggggaaatttgccttgcttgggtgccccggcggttggttggtctgtgggcgcgttcccaactcccccccacccttggtcgagccgtggttgaacctgccgtgttttgggcggatgggggccgtgggaccggatgttatggggctttattggattgttccttgagggggtg

SEQ ID NO: 604728 - DNA, 175 bp, Homo sapiens
cctatggagacatatgtgcatcttatgagtgtatcagttgtgcgcatgctaatttggctcttcgtataagcctggaacttgtacgaccatgaagatttaatttttttttctaggacgagctatagcaagagctattgagagtatctagttgatcagtgcagtagttggacacctt

SEQ ID NO: 604729 - DNA, 311 bp, Homo sapiens
  misc_feature (33)..(33): n is a, c, g, or t
aatcattattagtattcacatggtttcacttgnctctgtactaatatagtctctccaaatggaggaagttagatagatggaataagttctagtagttgatagtacaatggggaaattatacttaacaataattcactgtatattccaaaatagctagaagagaattgtaatgattccaacacaaaaaagatgaatgttagtttggatgcatatcccaattaccccgatttgatcattacacattatatacacgtatcaaaatatcacatgtactacaaaaatgtgtataactgtaatatgtgaaaaaaaaa

SEQ ID NO: 604730 - DNA, 132 bp, Homo sapiens
agtcatctagaggatccgtctgagcaagcgggaaacttagctgatcctggtctgggctgtaataatttcttgagggtgccctcagcagcatcacagatgacacacgtctcccaatagtgcacttggtgctag

SEQ ID NO: 604731 - DNA, 84 bp, Homo sapiens
gcgggtcttcgacaaggagggcaatggcacggtcatgggtgcttagcttcgccacgtgctggccacgctgggtgagaggctgac

SEQ ID NO: 604732 - DNA, 613 bp, Homo sapiens
attcccctggttaagctaagggtttttgaagcacgcggtggggggttgggacaccaggggggcccagggtttttggtcccgggtccacagggattggggtttcccgcgtctttcccggggacgccttgtttgggggttctgtgggtttgggtgggaaaggggcccttcgcctatatgtcacctgctagttttcccaaggccctgcgggcctggtttgtgtgagggtttgcccaatggtgccccccctgggccggcttgggttgccaacatgccccggggtgttgggggggggtttcagccggccccccccccttgtttaataaaggccccttttgcccttttcaaaaaaaaagggagggggggctcctgggcctttggctttttggtaagggggggcatccccaagggtttgctgggggtggattgaattctggggggtgggggttggaaactgtttggggcccccttgggcccccccgtttttgtcccctttgggtggccgggggccagcaagcaaagcccgcgggccatgaggtgggttttaaaggggttttgggttttttgttttgccctaaagtttttgggttttaccaataaatttttgttggcccga

SEQ ID NO: 604733 - DNA, 418 bp, Homo sapiens
acacctgtgcggttgagatacatgtaaacatggatgaaccctgaaaacattatactaagtgagagaagccactgacaagagatcacacattgtgtaattcaattctcaagaaatttcagaataggccaatcctggccgggcgtggtggctcatgcctgtaatcccagcactttgggaggatgatgtggccagatcacctgagctcaggagttcaagaccagcctggccaacatggtgaaaccccgtctccactaaaaatgcaaaaattagccgggcatggtggcaggcacctgttgtaatcccagctactcgggaggctgaggcagcagaattgcttgaacccaggaggtggaggttgtggtgagctgagattgcgccactgaactccagcctgggcgacagaatgagactccatctc

SEQ ID NO: 604734 - DNA, 814 bp, Homo sapiens
gttcttcaacagttgcctaacttgagatcacaaatgcgtaatctctctaatatcctaaagcttggactgaactgggcagtccctgagcagaccgcacagagcttaaatgtcagtgctttccttccagaagagaaaaagaatggtcctacacctcccaatccatgggctagatacatatgccaaggagagccggatgaagaagtgtgagtgattttaaaatagtctagagatctgcactcatgggtcaatagcgttcttctggcatgtcttgctccctctgacaagtaagctataccattcctcgtcatacctaggtcgctgtattactccatttgccactaggacccgctcgtatcatagtaataaatatctggtctctcagcatgaacttacagtttgattagtgtggatactgagtaggataataggtgacacactcgttcgccaaaggctagtctattaagtgcaaatagagatagtccaagaaataaggagagggtagggacatcaccttgtgtggagagaccattgtctggaaagacaagtcagttccctgactgtatgacaatgccgtcagttttccttcgccccaaaatgtctaaagagataaattacctcctggtagaccattaatctactctttatgcatatctttggctgtagtctttttgtattgaagctcatctttaggagtgcctaacattagaacagggtaggcagaggcccggactatgcccaaatttgggaagacctgattgggaatagtcgaaagccttgatatgtgcaaagaaaagaaaccattttgatcaaactc

SEQ ID NO: 604735 - DNA, 458 bp, Homo sapiens
tctctccctctgtctctctctccctcagtctctgtctctctcagtctctctctctgtctgtcactctctctgtttctcagtctctctttgtctatcagtctctctcctctctctctctgtatttcactctctctctctctgtctctctctctttatctctcgctgtctctctctctgtctatcagtcactctgtctctctctctgtatttcactctctctctctgtctctctctctttgtctctctctctttctgtctctctatttctgtctctatctctctctttcgctctgtttctctctctctgtctcttaattcaattccattcaattcaaaaggccactctttctcatctttctctgtctgtttctttctttgactgtgaagtcaataggaggaagacgtttgtgtttcatttatttactgaactgtgaaaggtcgacgcgcccgcgaattta

SEQ ID NO: 604736 - DNA, 348 bp, Homo sapiens
ggcggcctttaaaccaaaaccaccccgcctttaaaaaccatttttggaaaaggtggttccaaaaaaataattttaaaaaaaccccgggctttggaggtggtgcaaagttttttaaaggaattttttaaaaagttaatttcggccggggggatccccttaaaaattaatgccccccccacccccttttgaacaaaaaaaaatttttaaaaggaaaaaaaattatgaattttttttttaaacaaaaaggatttctgaaatttgtttccccaaaaaaggccaaaaggttagctttcccccgcctttttttttttaaaaaaaaagtaaaaggttgggtttcctttaactgga

SEQ ID NO: 604737 - DNA, 397 bp, Homo sapiens
  misc_feature (2)..(2): n is a, c, g, or t
anttagaggattccattgtgtctcagtgggtcaggactcaaacatgaggaggcagcaagctgagtacagttctaggatacgcagccgtcccaagctggcaagtggtaacaccattgcccgtggagctgaaggacatatccgcagggccctacacctgcccagggttcactgggatgtttggacctgggcgatcgtgtgtgctaaaagaactttacaccctcttaattgagaactattgtgaagattgatgacaacatttccgatcctgatatccccggagttcatattgtgggctctccgggccaccggttgctccccccagtgcactgtggcgtacgagtgtctcaagtcggaaattggttggttcattagcgccatcccagcaaaacattccata

SEQ ID NO: 604738 - DNA, 178 bp, Homo sapiens
tatgcagtctatccctttagtggccatgattcctcgagctattgacagagccacatgcgctaagcacagtggaggatgcatgctacaaaccacaacacagaaagcacaaccccatatgcctgggcgccggccacccagatatttcaaacggcagaatgccagacgtaccaaggtccgg

SEQ ID NO: 604739 - DNA, 326 bp, Homo sapiens
ccgtcattgatttgtaagacgctttggatctcagaacaacctttctgttagtaacatatttgtggcaatacatgccatcctgggcctggtggataaccgaacaagcatggggagagaaaaggattgagagctttatagagtggtgtgaatgctgactcttcttatttaacaattctttaagacaataacattgactgcacaagagcacctgtactttttcaagccactggagggagatgtggaaaacatgaaatactgcaatcttcttatgcttctgaataattcatgaccaatcaatttattcggggtaccgaagctcgaaattc

SEQ ID NO: 604740 - DNA, 183 bp, Homo sapiens
tgtgacatatgatgcttcgcgttcagcgtatcgcaatgctatcgcatgcgtaccccacagacgcagacaccatgtgcttgcagagctcacgcgagtggttaatcctgcgatagacctgtgaaccatcgtgatgtctgatataatatgagcgtgtgatctatctaggctttatggccgtcaagt

SEQ ID NO: 604741 - DNA, 176 bp, Homo sapiens
ccgcacaaattctcccaccaactcaagcaactggcgcatgcacccaccacccacggcaatcgcagcaaagcagctcaccaatctagtcgcatcctgtcctgtgtacgggcctgggtgcagtgtatccgcgtgctatgtggtccaacattcaagcctgccaggcgcaccgctccatc

SEQ ID NO: 604742 - DNA, 1148 bp, Homo sapiens
cgttttttttttgcgttcgtttactcttgtgtggtgtctgggttgggccacattggctcggtgtggtggtttcgtgtctcgttgggtggtcgccggggtgcgttccgctgtggttgtctcccgtggggcgacccgtggtgtgggtactggcggggcttttttttgtagtcaacccggcgttgggcgttgtgcgtatcgtggttgtgcggctccccagtttgtgtattgtagacttgtcggtaggggggggaagatttggcccatgtctcccggtgtagaggggcccacggtcctggttataaggggtggacgccgtggcttgaccctggagttatgtgccagagctttaataggccttatgttgggatttgtggtaggcctgttaattgtgtgcggcgaccatggagttttgggcagcgccctttgggggttcactatgattggagctgttgtggtgatcccatcctagttttgcaaatgtggtttatgggagttttaagaaagtgtatgttgtccaggggcagccccgtggtctaacgtggaagtttctgcttcaaccttgtgacacgttgacgagctgtagagaaaaagaccaccactgggagtaataacgtgggtccacaatttggccacaatataagtactcgtctttggtgttgggacgttgttcactgaaggctgtgtttgaagtggacttatctaatgttgggaatacttgagtattccacttgaaaatggatttgttcagccactttagcacttaatgaggcacatttaaaatgccaccacgatattcactttcacggtgagcttaaccactgagatgagatataaagtcacatgctattggattgttttttgtttgagcacagtggctattctgtggccacctgagtttgactgttctgtagtgacacaagggcattaccactttcttcacctgtttcctaatttctgatcccactagttttacactttttcctgtttattttgattttgttcactgctttattttcttaaagtttctagcacactctgtgactcctccacacttccacactttttgcacctgcttacacttaacgtgcacattttattccttgtctgcacacacatgtggaaagctagaaataaatgtttaaacttta

SEQ ID NO: 604743 - DNA, 518 bp, Homo sapiens
  misc_feature (81)..(81): n is a, c, g, or t
  misc_feature (87)..(87): n is a, c, g, or t
  misc_feature (280)..(280): n is a, c, g, or t
  misc_feature (480)..(480): n is a, c, g, or t
  misc_feature (490)..(490): n is a, c, g, or t
  misc_feature (499)..(500): n is a, c, g, or t
agggaaaaatctgctaaaaatgtagtaaacgataacccagccattgtttcgggaggacatcgggatgtgtaacttcccccnaattantccctgtaggataacgttatccgtagcaccctaagattgggtcttttgagggcatttttcaagactttccgcattctggcaaactaactgacccccaccccagactcgtgaccccatgaccccaaccgcttccttctgtccccactccctccccccaagaggcggactcagctgttgaggagtgtagtcccanacccctgtgattgcatctccaaccaatcagcagcatccattccctagtgccctgcccatctctactaaaaatacaaaaaattagccgggcgtggtgcgagcgcctgtagtcccagctactcaggaggctgaggcaggagaatggcgggaatccggcaggcagagcttgcagtgagccgagattgcgccactgcactccancctgggcaanagaagcgannctctgtctcaaaaaacaa

SEQ ID NO: 604744 - DNA, 230 bp, Homo sapiens
  misc_feature (214)..(214): n is a, c, g, or t
tcgggttctgttggagtgcgttcggtgcgccgtgggtccgcgctgcttccacccaacttcctgttagtttctctcctgtcacaatggcatgatctcggctcactgcgacctctgcttcctgggttcaaggattctcctgcctcagcctcccaagtagctgggattacaggttacattagttatacactctggaggtgacttgacctgtcattgngaacaattattgctct

SEQ ID NO: 604745 - DNA, 284 bp, Homo sapiens
  misc_feature (55)..(55): n is a, c, g, or t
  misc_feature (58)..(59): n is a, c, g, or t
  misc_feature (137)..(137): n is a, c, g, or t
  misc_feature (141)..(141): n is a, c, g, or t
  misc_feature (148)..(148): n is a, c, g, or t
cttctcaccaccaccctctagcagctccctcactcggagaggcggccatcagccncgnnttccagagtctggcatgttccccgggcctccccgctgctgaccgcctgtcctactcaggccgccctggaagccgacangagngcctcgngcagcatggcgactcggcggtgctggtgctgccgccttccccgggccctcgttcctccaggcccagcatggactcggaagggggaagctcctcctggacgaggactcggaagtcttcaagatgctgcaggaaaatc

SEQ ID NO: 604746 - DNA, 287 bp, Homo sapiens
gatcatactttgaaagctctacattaggagaaaatgtaaaatttgtatcaagaattactttagaataactcagttggcacagtgtgtgtggcattaaaactagatttactaagaaagaaaattaagcattcacctcttgaaatctcaaaatgccaattaggttttcacctttaatcacatttctctatataactccctctccacagagcagtcagagagatctattaaaatatcaaccagatctcctgcctaaaaccctctaatagctttgtattacaattagaaaa

SEQ ID NO: 604747 - DNA, 108 bp, Homo sapiens
tggtacccgatctgagcagtattgtgctattgccatactagtctttgccgcctgcgagcacggtgggcctagccctactagtctcaatctccaacacatattgcctag

SEQ ID NO: 604748 - DNA, 1345 bp, Homo sapiens
tagatcgcgagcggccgtccttttttatttttttttctcagggtgtcccatttatttggtctgctcaaatttaaggaatcttctcctttaatttaacctcattcaacccttctcagtggcaagaatttggaaaaagtaaatttatactcaggttcataatttaaatagggaaggaaaaagttacagcctcagggcaccagtgaagttgaaacagagaatggagacaccttcaggccccacctcttcgtgcaacgaggaaagagtgatgtggggagggagcacaggtcagcgtgtgggaagagggctcagtgggtggacagtggggggtgggggtggtcttccccagccttccttcaaatttattgccataccatgtgacacacaagacaacatgtgcagggtgtgccttgtgcaagaaaccaaaggctcagggggtctcttcaacgttcaacaaaggggaaaggggccacggaaccaatcttctgtggccttccccaggtccgcacaccaaggggcagctggtgctacaacatcttttacaaggtctggtggaagaagacccctatccaagaggccccgggggcctctggtccagctgggctttggcgagccctgggagaaatgtaagctccccttacctatttcgctatatactggaagtcttgtttcccttctctccacaagtttccagcgaggagagggggaccacgagggtccccgaggggaaataccaccagggtccccagaggggaggaaaacccgagggggccccaaggacaaaggtggtattggcccccagcgacatgtggggggcgaaccgagaggaggggctcggggcggcaaaaacacatgggggctctccccccactcctcaccaagcggggaggaaggagggggcacttcggggggcacagagaagccccctacaaatgggccttgggacaccactgtggggggcagggggtggtcaactacatcactggaggagccccattcctcgccaaaagaaagcgggtgcaccccaaccaaagagggctgtgagcccccacccactatcctgggcggaaaaaggcgttgcccaatctaccccgcgtgtgaaaaggcgccccatggaggtcttccccaccaacaaaaaggtagcccgcagggagacacaccgagagagcattgggggaggcaccacccagcgaacatacccaggctgggaccgaacgagggcacccaagggagagaccaaccccgcaggagggagagaaaacacaaccccatcgggatgagccccacagatatctctcaaagagagggggccacacgaagcgccacaaaaaacggatgatcggatgga

SEQ ID NO: 604749 - DNA, 142 bp, Homo sapiens
ccccccgggggggggggttgggggcgcgcggggtttttttccaaaaagggggggggcccccctcccccccgggggggggggtttttttttttaaaaaccccccccctttttttttttcccgggggggggggtttttttttta

SEQ ID NO: 604750 - DNA, 464 bp, Homo sapiens
tttcattgttaacagaactagcttcactgatttagaaaaatagaggtgcataatgctctggccgctccttgaacccgtgtgtctgccaatgttttggaccgttccttgacccatgtgtgtgcccactgctaaagtccactgcccaggtgtttgtgatattggttgctggggaagagtcagaaaatctccccagcaaccacagccgggtcaatccggagttgctacacctgcaccagactctttccttgtacccctcccaaacccatttcttgagaaatcattttagaatagatattgtttagattgggaaatcccctactccttccttctcctttcccccctgagggcctataaaaactgggacccctttctcctcggggtcaactcctctacccctgcgtgggatatgagtcattcccagagctctggctttccccaataaagcctcgtgtggtttgcatcaa

SEQ ID NO: 604751 - DNA, 214 bp, Homo sapiens
cctggttaaggcctggtgaacaacttgggaccatttttgtagttgaggattgttgattctttcccaagcgacaacctctcaacacggcttttgtattgtagttgagttgcttcctcttcaaacttcatcaaatgtaagggcttcttgacaaagaaagtaagccttttaaacctggcaagaggaggagcagaccatttccccaggcaatattaag

SEQ ID NO: 604752 - DNA, 198 bp, Homo sapiens
  misc_feature (80)..(80): n is a, c, g, or t
  misc_feature (96)..(96): n is a, c, g, or t
  misc_feature (98)..(98): n is a, c, g, or t
  misc_feature (100)..(100): n is a, c, g, or t
  misc_feature (102)..(102): n is a, c, g, or t
  misc_feature (124)..(124): n is a, c, g, or t
  misc_feature (141)..(141): n is a, c, g, or t
  misc_feature (148)..(148): n is a, c, g, or t
  misc_feature (151)..(151): n is a, c, g, or t
  misc_feature (153)..(153): n is a, c, g, or t
  misc_feature (166)..(168): n is a, c, g, or t
  misc_feature (176)..(176): n is a, c, g, or t
  misc_feature (183)..(183): n is a, c, g, or t
  misc_feature (186)..(186): n is a, c, g, or t
  misc_feature (188)..(188): n is a, c, g, or t
  misc_feature (191)..(191): n is a, c, g, or t
ccattcttaaccaaggctgcctcttccaacagggcgggaatcagacctactcccctaggtcacaactctgggaaggatanaaagcccccacccttnantnanttctctggatttgttctcagtncctaaaaaaaaaaaaanctgtgcntantntgtgtaatagcgnnnagggaagnaggatcnaananaanaaaataa

SEQ ID NO: 604753 - DNA, 122 bp, Homo sapiens
catggtgtatgataacttatttatttaaccatctataaatctcagtgagacaaggtgggcactactattgcccaggcaggagtgcagtgacacaatcacacttccttgcagcctcgacctcc

SEQ ID NO: 604754 - DNA, 101 bp, Homo sapiens
aagacgcatatttcgctaagcaactaaacccaacaatattatcttttctctccaatatctaacatccaactggatgaatattattatcaggctagatttct

SEQ ID NO: 604755 - DNA, 161 bp, Homo sapiens
  misc_feature (84)..(84): n is a, c, g, or t
  misc_feature (153)..(153): n is a, c, g, or t
agactcctcttcgctgtgtgggagtaaaattacaccatagtagctaaagcagcaccattagaaggtcagctcacaccactactnaaaaatccaaatatactgaatctcacaccgattggaccatctatacctatagaagactatgttagttcntaacatga

SEQ ID NO: 604756 - DNA, 253 bp, Homo sapiens
attctggagacagagtcttactctttcacccatgctggtgtgcagtggcatgattttggctcacttcagcttggacctcccaggctcaggtgatcttcccaccttagcctcctgagtagctgggactacaggcacatgcaaccacacctggcttttttttttggtagagctggggtttcaccattgttgcccaggcccaagccagtcacaaattcctgggctgaagcaacctgcccaacttgggctcccaagg

SEQ ID NO: 604757 - DNA, 642 bp, Homo sapiens
agccagtggcattgcggggtagctatgttcggaatacataaccgctgaaagcatctaaggcgggaatactagcctcaagatgagatctcactggaaccttgagttccctgaacgggccgtcgaaaactacgacgtagataggttgggtgtgtaagcgctgtgaggcattgagctaaccaatactaattgcccgtgatggcttgaccatataacacccaagcaatttgagtcgaaaggccagattgcggtgtgtgaagacgcaatgaaccgaaagttcgacgctcacaaaacaccacgatctatcacatacccaatttgctgaagcgaggccagctggccacgactcagtacccgaatttcttgacgaccatagagcattggaaccacctgatcccatcccgaactcagcagtgaaacgatgcatcgccgatagtagtgtggggtttccccatgtgatagtaggtcatcgtcaagattaaattccgaaaccccaatggcgaaagcaagtaggggtagagtatagggcgctctaatagcacgccaacttccaaagcctgtatagcgttccattgataccttttgtgcagatatccgaataccagtcgaactagcgtgtgacaaggttcacaggtggtgcgccat

SEQ ID NO: 604758 - DNA, 1015 bp, Homo sapiens
gagcgcgggcgccagttgcctccttttaaagtttgacggggcggtgtgtggcggcggccggctaggcgcgggagaacactggtgccgctacgggagcctgcgccgccggcccatgtcattccagcttcaagtgacttcatgtgatgtcagctgaatgtaaaagacagtgatctcacgcggaggcgaagatgtttgccatcagtaatgtgacatgaagagacacgctgcatggctcgtgaacgcatctccttggtggtgggggaaagagttttcccccctgccttcttccggaatgctcgacttagacggagcagacggctgcgccctggccccagcgctggctctggctcagtctccgcgcgccatgtgcaagctcggcttccctggagaccatggtgcccccggcatgccctgcgcggccggagcgtcccccgagcacttccaagacactggccttttccatctgagcgcatcatggccaagacgtcggagcccgtgcgccctttgagccccggcctggagcgctagaggctggacggcagccagggcaagaaactgctcaaccttactgctcgccgatgaccctgtatgatacgcccctcccagcccctaggctacgaggtgccgtcaaaagacactgctcagttaactcggagctctggaaaaagcagacctaccgggactgggcaggctggcagaatcggagggcccagagtgcagcagggcaaaacacgctattgttgcagagctacccgagccagaatggaagagcgaagaccattagcaagggcagagacaagaagtaggcagggccatacacggcgccgcggaaccgagcaacccggccacagagcggtcagacactgggtgcaattaaacacgcgtcaaatgacatcgtactaacaacaacggccgtcgccgacggacttcacatagaaatcgttgggcagacgagatcacaagagccaaacgaaaataaacattgaaccataaacaatcaggacgtaccactgtt

SEQ ID NO: 604759 - DNA, 1135 bp, Homo sapiens
ggcgtgtgcgagcgggtgcgcgcgcaggggacggagtggtggggagatggaggagggaggccgggacaatggcgctcggtgcatgccccatgcatgtctccagactggcggtccccgtggaggcacggacggagaagccgagcgtgcaatggatgctgggcggagatgccgtgggacaaggacaaagaacaggagctgtctgcaagaggataaacagcttcaagatgaactggagatgcatcgtggaacgactaggggagaaggatacatccctgtatcagaccagcgctggaggaattgcgaagtgcagattcgttcttcgtacaacttccatgacttcagttgcccaagcctctcaaatttctgcgtccacactatggcaaactgaaggaaatctatgagaacatgggccctggggagaataagcgtttggctgctgacatcatctccgttttgggcatgaacatgagtggggagcgtgagtgactcaagtatcggctagtgggatcccaggaggaattggcatcatggggtcatgagtatggtcaggcatctggcaggagaagtggtaaaggagtggcaggagcttggatgaatgcagagacggtcaagcgagacagctcatgtacagtctgatgcaggaaatcgtcactataacactggacgcacaaatgcagaggatgaagggttgaggagcgaggaattatggcaaatggagcaggtggacatgggtaggagaaaggaactttgatgcagaaggatatgagaaaggaactgatgaagatataacaaaggagggaaattagatgagtgacgatgagagaaacaggactgagcgcagagtggaccggagggcagtcaagtcaaccgcgcacccgacagccacaggcaagggctatcagacacaaagacagagtgaagaagaagaagagaatacaacgcaggacagaaggaagaccaatgcaagaaagtgagacagatacaggcacgagggaccggagaccaccagaaagacacgaagcgaaagagggaaaaggaaaggacgaagaaggagagacagagagggacaaaagaagcaagcagcaaggaacaaccaaggaggacagcaagcgaggagcgcacaaaaacacaacaa

SEQ ID NO: 604760 - DNA, 497 bp, Homo sapiens
tcacacgcccttggctatgaggtgttgagaataccaaccactaatttctgtgagtttggcattataacacccaagcaatttgagtcgaaaggccagattgcggtgtgtgaagacgcaatgaaccgaaagttcgacgctcacaaaacaccacgatctatcacatacccaatttgctgaagcgaggccagctggccacgactcagtacccgaatttcttgacgaccatagagcattggaaccacctgatcccatcccgaactcagcagtgaaacgatgcatcgccgatagtagtgtggggtttccccatgtgatagtaggtcatcgtcaagattaaattccgaaaccccaatggcgaaagcaagtaggggtagagtatagggcgctctaatagcacgccaacttccaaagcctgtatagcgttccattgataccttttgtgcagatatccgaataccagtcgaactagcgtgtgacaaggttcacaggtggtgcgccat

SEQ ID NO: 604761 - DNA, 887 bp, Homo sapiens
agcgggttcggttgcatcggagcctgagcagaactagagcctgcgcctgggccggcatgcgcaggcgtacagagctgcccgggggtgctagtacactctccgatgcgccgggattctgtcgacgtatccgtcacggacaccttggtcacggacgcaggatgacccgcgttgagaccagcatcacagaaggagctgggatggcacgcggctcatggcaggacgcttgaggggctggccgcacagagaccacagtacccagctcgggacgcacgaatagccaccctccaaatcgctaccgcccatcccgccacggagcgccaacccggaatacgcacacccacccaccgtgccgcggacgccccgaaccgcactccacgaaccgtacacacgcgacaccacgcgacaaaccactgagcaacaacacacaccccaccgacaccacacgaactctccgcaacacgaggcgacacacaagcaccacctcaacacgagacgccaaacactggccacccacagacgccacaacgtagcaacgggacacacacacacagggagcgagcagaccctcgactcagtagcaaacccccacgccctggaaacacaagaccaacagagcagagcaaccaccccgcacgagaagacagcacacagcgccaagggcacacaccagaacggctagaagcccagcagcgaacaagacaaccgcgccagaagaccgcaaccccgcacgagccgacagcggaaaagaacggcagtaaacacaccagacaatggcacaccaagcgataggcacacacgacaagcagacgacccacggaacagaagagcgacacacacaacgagagacaaacgcccagcagcacacagcaaacccgagccgcacgaac

SEQ ID NO: 604762 - DNA, 251 bp, Homo sapiens
ctcaaatgcacctatgcaagttcatacatgagatgagacagctcagccccacctgctctgtgaacaggaaatgatgatcggagagaggagcaccggtcagcgttggaagagggtcattgtgcacatggggatgctgtggtctccccacctcctcatattatgcctacacgaacagagactcatgcgggtgcgtttgcagaagctatgtcagggttcttcaagtcacaaagggaagcgctcagtaaatgctc

SEQ ID NO: 604763 - DNA, 259 bp, Homo sapiens
acacggaggtatattgtggcagatcaaaagcaaactcattcctgcagagaggtcctcacctcctccaagagcctcagaaggccttcgtctgggatctgtttcccctgccctacattcatgcaggacaccaggggttgatggagcttctagaaaaccaccttgtgagggggtctaggctgtaccttgcccacgggatacctggagcaagatgtgaggccccaccagactataccactaggcccctacttgttgcctctgg

SEQ ID NO: 604764 - DNA, 1437 bp, Homo sapiens
  misc_feature (379)..(379): n is a, c, g, or t
ctcaaatgtgtgctggcttttctaacctttgcccaggaagatttatttaaatccctggagattccttggtaccattactgaatagccttagggagaagctctctggaatggagagaggtatgttggatcattgtgactgccgattgggtaccgtgaaaacagtgtaaggctctagataatagcgcatcacggtcaggcacggtggatcacgcctgtaatgcgccaggcagctattgggaggaacgagaacaggcgggatcacgaggccagtgagaatcatatgaagatccttggcctatacctagtggtgaaatgcctcgctctcttactatagataactatcaagaagagaatattcacgccaggctgtggactggcngaggttgccatgttagatcacgcgatgcaaactttgggagaagagcgtgcaggcaaggagcaatggtagtagaaccctgggaaggctggaatcatcatccatttgagccgcatgggtcagctagcaacatttgcactccccgaagacccgtggggctaggcgaggacgtcaaaagaaggtcacgaatcgtcaatacatatagagaataacaaacaagaacaaatacaaaacgcaaagatataacagtcccaaggagaagacaatggacaccataagggaaacaagtgacaatagagacaacaagcactaaaagacaaccttacatataacagtacgatcaataacgccaaaaaaagatcaggcgcaatcgaacgtgcgacgtggggttccttcgcgaatctcaaccagggtagaaccactcagaataggggtttctacccaattggaagaactcctaccaaccatcgccttactaaactgcaccttataaaggaacgcgcaacggcacgacacagtcgtacggacaatccacgcgcaacgacctctgccaccgcgcaacagcatctatctccgcaccaacaccaggggatcaagaccatcctaccagtaacactgacgaccatggcaattttgagcccaacgaagaaactgggaagtagaacaatggggacgacctacgctccccggcacagacacaaataaccacatcctaacaccggacacaccaccgggcaagcagaacgactcgaccgatcaccaacggccaaggcaacataacgccccaaaaagggcccaccacgcacgtacgaacaccacgttcaacaccacacataacacacgcggcaacagcaacacgcacgccccagcacgacacacagaaaaaaccaaaataaggacgcgagagcaaaagaaagaaacaaaggcaaacaaagcacacacgcactagcagacagacaaccaaaaagcagcggaaacacacacacaggagcacggagcgacgcgaaaagcaaacaggcacgagcgagcaaccacgacgcaccggagaccaatcgaccaaa

SEQ ID NO: 604765 - DNA, 125 bp, Homo sapiens
agctccatactttatcacagagatggaatggttaaagagtccttgcacaatagatatgtagctaagtattacatatggatggaaataccatatacatgcatgtatagagatggtgtatggggaag

SEQ ID NO: 604766 - DNA, 787 bp, Homo sapiens
taccattcatacgcatagagaggctaccgaggtgtcgtcctgtttcccgtggcaggccagcactgtatgacctgggcatgtggcttctgcagctccagaaaaagcagagaaccctgctaggccatggctcccaaggcaggtgaaaggcaaaactcacgacttactatcaggtgctgattgcatgcatcgtgcactagccccacaatcatcatcatcacagcagcatctccagaaccagaagctgtgcaccttcttggctcaaccatgcatgcacagtcgggccctctatgccatcccaggcttggactatgtcagacatgaagacatcctacccctacacctccactgatcaggttcccatccaacatgaactctttgacagatttcttctgtatgaccagacaacagcacctccttttggtggctcagggagacgctaagggcctggcaagagaagaatcacccctggactggagctctccgatgttcatcgggaaacaactgagaacatacgtgtcaatgtacatcccacttctacatgggcatgagggaagaccagaattaccacgtgtactggtggcgctactgtatccgaacggagaaccttgacagtgctgtggtacagctccggaagcaggcactggaggcacctccagactctctggcaccttggagacagtgcgagggacaagggggtagatggccaggacaaccaaggatatccaacgagccacctgcgatacagtctaaacacacagtacgcatgcagcttcagtggccactgttg

SEQ ID NO: 604767 - DNA, 162 bp, Homo sapiens
cggcacgaggcctgtctctacagaaaatatgaaaactagccaggcatggtggcatgtacctgtagttcctctcacctgagtccaggaggttgaggctgcagtaggctgagatcatgccactgcactcaagcctcaagcctgggtgaatgaaaccttgtctca

SEQ ID NO: 604768 - DNA, 408 bp, Homo sapiens
  misc_feature (64)..(64): n is a, c, g, or t
agtaaacagtttcctcgctcctgtttccctgggtcactgcctctgtattccagccactcagctntagctgagcagatccagagagagaggaggcccccagtgcctggaggaaggccaccattgtggaatgggacttgcttcttggggctgaggcccaatgtttgtaatcaccatctgtaaccacagcctgatcctgcagctctggccctgctcccccagcccggacaagcaaggaggagaaaaaccaggcccaactggggccgctatagcctcctgattgccattagcaagcaagcagcagacacctggaacctgaccactatgggaggtgaaattctggcctaccttctcaccaacaaacctgtcaaaaaaaaatgcggtaaataatcatcttaacttttaaaaaaa

SEQ ID NO: 604769 - DNA, 1550 bp, Homo sapiens
tgcggagaccgggggtcacgtggggctctatgtcctgtccatgctgattcctcgatgggcgatggaacgatcctgcgctggggccctgcttgatggcttacctaacatgttaaccaagcagaggtgacatggctgccagtcaggcaggcggcctgcatgtctgacccggcagctgtccccatccaggatgaaagctggcatcaggatgcacaatgccccgcgtccgatcagtcgactcctagcgcaccatgcctagtcttgacacgggaccagatgggctcacgaaatcacttctcagtatgctgtctcccgtaaatgaggctccgcatgcaaggccttggctcttcctcagtctgactgcaaagaccccccagagccgcttggcacaggcaattctcgagcatacctccttcccctgccagcggaccgtacgccccaaacccttctgccgcgctatgcacctgcgccaggcccttcaacaccagggtccccttggcagccggcgcacgggcttggcaccgcgcgcgcacaacacccttggatggccttcatctccctaactccttttcccacttaaccaacttgcacccgtggctgcggcgcccaccgaacgcaacggaggcccctttggcctcccatttctaacgacaccgcctttatctcccccactttggagtcaccactttgtcggcctctcccatcactttaaccacaacagcctaaccttccgttgttataacggaaaaggcaatttttggcacagcattttaaaccccccttcttcaccattccaaaagagaccctattgggattctaccccccatcctcgcgacaacacacaccccccttttggcattcccaaccaacctaccaccaccttttggctttctacccaacctttaacaacccctaaaccattcttggggcgcaatcatattaagggatcttccccatataacgaccgcattcccgttttccccgtttaaacacacgcgaccgctttgcgccaaacctttgggcaaaggccctatttacgaagccgcgcgtctacccgcaccttagggccgcacgcaggcaccataatagggacgccccctcacattatatcgctggggcaaacgaaaataaagacctcacacaaccatctgggactttactccgttcagaaacaactatagggccccccactcaagcgcgccaacaaaacaggccgggcgcaacagaacgcccccgaggatgaccaaacgattaggggagacgcgcatataagaggccccgcaccaggcgcccctccccaacaaccgccgcccatatcatctatagtggacccccggaccgtgcagcacgtacccaggcgtcattaacacttctgggcacttacggcaatttaggcggtacacccccaaaacgagcgcccgcagtctcccctatctatcaagcagatcgccacccccaagagattttcgacgaacgcgccccaagaaatggagcataccccgtttaaaaggtataataacaagccccattttatcaggcagagagcggcactc

SEQ ID NO: 604770 - DNA, 165 bp, Homo sapiens
cacaacaatgggacaggcgcgatgattcacgcgtataatcccagcactttggggggccgatgggggtggatcacttgaagtcaggagttagagaccacccttccacacattagaggaacccttatacataaaatctagacaaaaaaggaagaaaatgagcgcccg

SEQ ID NO: 604771 - DNA, 377 bp, Homo sapiens
ggtgctaccaaaaccaaaggaggaattttgcaatcaattaggcgggttgtattagaatgtgaatcagatcttgaagcttatcggtgctttgtgcaggtttttattcctcaaaaatgcatccaagctttggtgtgggaatcttgttacatgtgaggtgggttggtttatcttttcttagatcaattccgtttcttttgcaaggaagggggtttctgtgccctcggtgggatcaagggcttgatcctcacgtctgctcatgagacaaaaatggacattcggcagacagaccacaaccagcgcatgcgtccagctttgtttgaatattttagtttcgaagttctccacagacaaaagaacaaagaaaacgtttgcgtccg

SEQ ID NO: 604772 - DNA, 437 bp, Homo sapiens
tgcgtaattattactgatacttttcccttttgtacctgcgtgcattcaagcatagcatcatttatgaaaggatgtttttaaaagcagtctgaaaatgggacatctgtagagacattcatttccttcttctcctccgaatgtggaatgtaaggtctgagggaatggaaacgtaggaaaagaggcggaatgggaatggaatgggatggagatagtggatgggataggaagagagggctggggaatgggccgagaaggtggtgctgagtgtgctgtgagatagagcaagatcacaagaagtggctatttgtaattggctttaagataaggtgctgaagctgactgtaatgtcgctagtgcgtgccgatgtccattttgacaagaattaaaatttccagctagttcacattgatctcgtccgtgctgaggcatccactcca

SEQ ID NO: 604773 - DNA, 318 bp, Homo sapiens
  misc_feature (214)..(214): n is a, c, g, or t
  misc_feature (253)..(254): n is a, c, g, or t
  misc_feature (257)..(257): n is a, c, g, or t
cagacagcccagcgcacaccctgggcctggtagttaaagatcgacccctgacctaatcggttatgttatctatagattacagacattgtatagaaaagcactgtgaaaatccctgtcctgttttgttcttaattgccagggcatgcagcccccagtcacacacctgctgcttgctcaatcgatcacgaccctctcatgcgcacccccttagagntgtgagcccttaaaagggacaggaattgctcacttaagnngcntcgctcttgagacaggagtcttgctgatgcccccagccgaataaaccccttccttcttttt

SEQ ID NO: 604774 - DNA, 137 bp, Homo sapiens
tgctggacgtgcggacttacacttttttttacccttgtggtggactccatgtcaactaacactgtggggacgggacaggctgtgtgcgcttgtcttgggtgaactgtctctgtggctgtgtgactctggtgagccag

SEQ ID NO: 604775 - DNA, 120 bp, Homo sapiens
tgctgcacgggcactggcattctgcagcttacccttccacgactagaaccttaggctttggggagttttagatggactaggttctacttaaaggattgtattatatattattctttttga

SEQ ID NO: 604776 - DNA, 101 bp, Homo sapiens
cactgatctacggacctttaagttgtgcatggagaagggggctttttttaaacttgaagaaaccagcccattctgtgtgtgtttggaggaggggagcctgt

SEQ ID NO: 604777 - DNA, 127 bp, Homo sapiens
agactaaggagagaacacttaaacctgctatacagaaacataaggctaaccctccaaaagaggcttccttctacctctgtcgatgtgtgactactgtaaacaaaaacgtacgtatttcaaacatcag

SEQ ID NO: 604778 - DNA, 124 bp, Homo sapiens
ttcaagcagaccttttaacccttacagacactattgcctttggtggcagctgttgccttggggaaaggactatctatttgggagaccttcagtgcagcatgtggtccttgggccaggcatggcc

SEQ ID NO: 604779 - DNA, 245 bp, Homo sapiens
gacttcatttataataatacagagaatagctataagctcattgaaagtaaaaccaccaacccaggattctactgtttgaaaagaagtctcgttttaattttggagtttagaatgtgtatttgcaaagtaaccaattttaatctaaaaggttatatcctagttgtgtcaccaaatcataaaaaaccctaaaaaagatgtacctccctctgtaggtctgtattgttgacctaacctgaaaatgctta

SEQ ID NO: 604780 - DNA, 1320 bp, Homo sapiens
  misc_feature (125)..(125): n is a, c, g, or t
  misc_feature (535)..(535): n is a, c, g, or t
gacagacggtgtctgagtggcggctgagagagcgtgactgttcgtatagatgtgacggcgtatctgctgacgtatgcatacttagatgaagtggggtgactgtcggatgagatcgcgggagaganagtcctcgttcactgatctgtggtcggcaggtggcccagcacccgagaattaaagggtggccgatacgcacagaggtggcgcgccatgactctacgcattgcggctgcactttggggtcggcctgacggtgtataggcccgcgcgttggtatgcctgcgtatgatcaccaatgccgggcctatattagaacaccgacgggtcactccaatcatcggtgcgaggcaaggagtaacgggcatgacgtagagttgatacttctcggtaacgaatcacacaaatgaataggtaacaatactcacgtgagtaattctttccactgttgcatgcttctttgctacagggcttattttaatttaaagttaagggggactttaaactgaggttcgagtaggtttcaagggaggacccnctattctggaccttttactagtcgggcctaatgtcgaaagtcataccataattcggttccctgcgtgcacccttgggagtgttccatcatgacacaaatttacaagggatatattagtgcctactgtgtgactgtcactcgcggtgtttggctggttcatccgatacgccatattaaatgtgagatgattgctgacaattaaacaagtcgattagatagtttcacaagaatgcgattggcaattttgaagctggattacaaggcatatttagtcattgtggtttgggtagcgccatggttcgctggggatctttaaagaccttcgtgaaaagtaaccttggtgtcatatgctttgtggtctaaatcaccatgagggttaatcggtatcttggggtttgcaaagatatttcttgtgaacttaaggttgaaacagttcgcaacagttctccaagattaggtagtcgagttaattgcggagctttggctaaatatacccccacctattcaaatacgggaatttcatgaagtcaaaagcaagctcttcaggttcaaagggctcaccttgtgtatgtcacacctccttttttttgcacaatcgacagagcgtgcggattttgcacgttttggcccaacggacatgccaaaggccgagttgggaatcttgggcaagttattgtggggaacgcggcccttgttttctctggagttggacacctagtacaaaagcgcgcgggtctacaacgtgtgcgaagcaactccaggtagtggagcatttatacttgggc

SEQ ID NO: 604781 - DNA, 225 bp, Homo sapiens
ctgcgacgacagagagtagctgcgcctcggaaaaactacctcgtcagcaccttctctgccacagaccctgcctctactctgggccctttcctttctacctgggccttacgaaactgggctgcttctccctggatgctcaacgccagtaccatggagatgcccgagccctgcggctactatagcccaccctccactaacggtccaggacccaaactttgaccttca

SEQ ID NO: 604782 - DNA, 493 bp, Homo sapiens
  misc_feature (141)..(141): n is a, c, g, or t
  misc_feature (316)..(316): n is a, c, g, or t
  misc_feature (329)..(329): n is a, c, g, or t
ccttcccaggaaaacccagtgtgagaccgaaccattttgttgcagcccgcggggtccctcggttccttcaactaccggagtcccccctggggcagcccctactccgtgtcagtggtggagacccacttcgacccgtacgcntttttgttcaaccagggcaacaagggccctgggggggatttccgcatggccccccttttcagccgaacccagacccccaggggtgggttaaaggggaaattcccccccttttgcaaggcccaggggttcccaaaggatacccttgtttttttgcccccaaccgattagggcatgncgggccaataggnctccccaggggttaagttgggattccggccagcacggtggcccccccccctttggaggtttttgttttgttccttccccgggcccctgccccggctcccccccaaagcccccctgccccctcggggtttttcctgccccataaactccgggagccggtcggtta

SEQ ID NO: 604783 - DNA, 216 bp, Homo sapiens
tgagccggaccgaagatgctgcacttctcatccctgagagcaatgtttgcacaagatgtgatgaatatgtcacccagttggatgagggcgagttttagctggatagccattcgtaacaaagtgttcagttcatttctaagcttcgtcatggtttccaggctggtgacttgggcgtagcagtcgatggtggcgagtttggcaccggagagggcgtgg

SEQ ID NO: 604784 - DNA, 1215 bp, Homo sapiens
gcgagaatggagtgttgaggccgtctgtgtgtggcgcgggcgacggtggagtgcccaggactctgaccctgcccctgccttcacgcaatggcccccgtgcagcgccgtgccactacgaagctgccgttgggtttgaacaacatatacgtgccagtaagagctgaactgaaacttgtccgggaactgaacgacaaccgtgacgcacgtgcctaggacgggtctcttgcaatggggacacgtgacaaggttgtgcgccaggaggagtcaggtcaggtttgctgtgagcccgatccgaggaaagcctgtgcaaggagcccagcaaagggcaatctcatggtagctatgtgccccagggtgtccctcttagctagaggccccagaggcagaccagtcgaacacggaattggcgcagttggcttcgagaaagcgtacgaaaaatggcgtctccagagagttgaccgagagggggggccactcatgaagccggatcaggatagcacggcggacacgttacgagccgacgtatacagctcgacgtcgggtccaataggcgttccagacgcgaggacactagcaatgggtaccacagcagtccgttatgcgtcggcagaacgactcgtggcgccctggacgcaggttaaagaggacttccacttccgagcgtctcccatcagtcgagcttagaaagagtggcgacgatgaccgctcacgcgcagctagcacggcctcgaactcgcagaggaaggacggcctgcaaagatgtcaacagagtggacaccattcttcgacgacgtgggtgacagtggaagcaacggtcccaaggtattggagtgcaagaacgcagttgctgataacgcagataccggttacaagacagagtagacgcgccccaaggccgcatcccggggagctagtttcgctccaggagcagcgcgcaacgtatattgcggcgcgtcacttcggtagcttcacgcgaggcattgggccgctatcacactggagtagagccttaacgaagcggacactactccgcagctattccgtggaagagtacccgcgaccgaaagtatattccccaacagtgtaccccctcagcgagccgactatggtccatctacgcaagaaggagagtacggcagatcccgcccgggcagagaactacaagcagaacaacaagatcgacggtcgcttagggaaggccgcctgagcacaccg

SEQ ID NO: 604785 - DNA, 1082 bp, Homo sapiens
gtgggtcgacgacggacgattacttgattctccgtcgatcataatatatccaagcgcgtcgttttgtttgccactagaactcaaaccacaggtcctcggttgcggcttgtccagacccctcgtggtatggtgtacacagtgttgtgttaccccacctctgtggcacgttccgattcatgtgggtggttgtggtggccaacagaccacaaagactcaggcactttttcgtcggaatctgtctaaaacgagagcgcgccatatttatttaagggggagaagattgttctaagcgagcaccacctccattttcatactgggtatgatggcctccattcgccacgataccttagtttgcggaccacaaaaagagttggtatctgcactctgggtgggcccaaagtaataagggaggatctttttcaattagagacaccgagaagaggggggtaaaatacttgtgctttcgccccgcccacaacgacatgtgggggatcacaaagcggtgtgtgttgaaacatcggtcgctgtgtatacacagcgcgttatagtctcaagaaaacatatttacgcccacaggggtgttctaccacacgagaacatcctgcgggggtttccagacaaatcacgctccttgagagttgtaccccgcgacaacagtttgtggtgagagaccataggatcgtgaatccctcaagagggtaaacaatttgtggggtataaaacacctaagaatattttccccccaagagaatttcttggattcacctacagacaccctttgtggtttctttatgggtgttccattaaaagtgagaaagcgccaacatatgtgtcgtgtagtgcctaaggagaaacccttagacccaccaaagagttttgaaccattggagacaaataatgtggaccaaccccccatatttgtcggggattgaaaaagggggaaaaaagggatgagactttgcactttttttggtagagaattgtgaggagaaattccccggaattttcctaaccctttgaaaaaatccccccaacccattgatgggttttccttataaaaaaattggggtttcctctttgga

SEQ ID NO: 604786 - DNA, 117 bp, Homo sapiens
gtttccttgtggcttgagcgcttcccgtagcctcggggaaggagcaggatttagaggaccactagttggaacccaatcctcgttcttggagggaacaggaacctcttttcagagagg

SEQ ID NO: 604787 - DNA, 521 bp, Homo sapiens
cctcacctggcgtttgtatagctccttctagcccccttatctcattccagctgcatgacagccaagtgagacagggacccatccacatcccccttagagatcaaacaattgtgtctcgaagcagcaaacctccttctcagccatcacctgctgggcatgttctgggtgagcctggggaagatgatatgtgccccatcgtaaagtgaaagaactgcatctcagggctccacagagcacccagagtccagtgctgcagaggcaggatggcccaggcccctcaagcccattcttctcttggctcctgttccatctcggcagtgcttcctccagggaggatgtgggatttgatacgtgggaatgacagggtttggcaatcccatagcttctgaattccagggaggggaggagaaagatgcgggtgaaaacctgctttcagagggttttcccttggctgcctcctcaaccaaactcacccacaaattgcatgtcaagtttcccaacctccacctaggggagcaggc

SEQ ID NO: 604788 - DNA, 1121 bp, Homo sapiens
  misc_feature (1)..(1): n is a, c, g, or t
ntgtgagggagtggggaaaagtggtttgatctgatattgtgttacttactttgtggtgccatagtcgtgtgtttgtatgtgtagtctttttgttggtttctatttgttctactttgtatacgttatctatgcctttccctgcatttgttgtgtgtccaggttgtactgtttccatcgcgagattttttttttttggggtcacgcactgtttgggtttagcaccgtccttcagtttgtgttttttgttgttccacctttgtttccgtctctatgttctctctttgggtgctcgccccgcactttgttatcccgtcagatgcaccggtgtttgccacgagtggcccggtgcccccaccacatccgcactgtccatcccggattccccagggactccgggcaagggtccgaagttaaccagaggcacacagaggacagcccatggcaaccagcatcccccgaggagagagacattcagacagaggaaaagtctcctgccccctcattccttgcccagagtgaggaaaacttgccgccaccccccgagcactgatgcccgggaggtgggaggaagaagtgggaaatttcccttccccagtgaccccccagacgtctgagccttcaatgttgaaatttttctttatttaaattacttttatcttattaaatcaacttatcccaaatgatatagacgacagcacctggctctgtgaaaggtggcatctttttgggcaggcaggccactggggcactggaggagggttcacaaaatatgggttgctgttttttggcctccaagctgcatggaggccggcccacgggtttaagggtgtgcactgggcaaagggcaagggcggcacaggtgtcaaggccggcttggacaatgaaaccctgagccttgctgcattccttttgcttccacccaccacctagcttctttggacactcttggggtgggggtcaatctttggggaattaatggctgccacacccgggagatttgaagtgtaagggaagtgtgggagagcaagccctggcagatggggcacccgtgccctgcaggtgttgacaagatccgccatctgtaaagtccttggcaccactccacccaatgtcagtttcca

SEQ ID NO: 604789 - DNA, 336 bp, Homo sapiens
gcgtttgtgctgtgctctggtcagccaggccagtatgtaggagagctacaagaagattctgctgtgccagttgagaggattcctgtgctgagcccgggcaggcgaagattggcctgcccgagggacccagaggtgttgctgacgtggagactcaggtcagagtgagtccgtgtggcagagagggctgcaacaggccaagggagtaagcaggcaccttataagcccacgcaaaagagttttgatcttatctaaggacaagaagacaaaagttgggcttatcaaatgcatgcttcaaaaagtggcctctgtactctcccagcaaagaacaaaaacttg

SEQ ID NO: 604790 - DNA, 82 bp, Homo sapiens
gcggccgcctactactactactgctcgaattcaagcttctaacgatgtacggggacatgttcaataaaaagctgaactttag

SEQ ID NO: 604791 - DNA, 198 bp, Homo sapiens
  misc_feature (118)..(118): n is a, c, g, or t
gagtgcaatggctcacagctgtaattcatgcacttttgtggaggctaagacgagcagattgcttgaggtcaggagttcaacgaccagtctgggtaacatggcgaaaacccgtctctancaaacataaaaaaaaattgggcgggccgcaggttggggtccaatggcccccttgttaaatccccaaacactttgggtggc

SEQ ID NO: 604792 - DNA, 231 bp, Homo sapiens
gctcgtctctagagtatccccccagttcctgcttcttgagatacaatcactttagattttttaaaaggaatatagtttacgtgcaattccttgggaataacattttaggggcacacagaatacaacgagcctccgtgtttagactgaagggcttgaacaggaagatatcccactgaagagtgattaatagaatccataagaagagtctttttcaacgaagcatggaactgg

SEQ ID NO: 604793 - DNA, 1171 bp, Homo sapiens
aggcacaagtgcgcattggtgggaaaggaactgctcgcagaaagaagcaaggtggttcatcagaaccagacacagccagcatgcaccacaacaacacttcagttctccattcaaagcacagttaggggtcaaaccaatcatctctggtcattgcaagcaggtgaatcatgtttcacacacacccaaggcaacagtgatccacatttaacaaacccgtaaagattcaggcatcatctggcagcgaacacatttcaccattacaggccatgctgagacaaagcagctgacagaaatgctacccagcatcttaaacccacgcttggtgacggatacgtctgacctacgtttaaggagactggaacgaacgctctgacccaacacaaatctgtggatggaaaagcaccactatgctaactgggagacggactgactgactgactgacacgttaccagactctatgatggacgacacttagggactgacgagactatccaaagacagtgaaggacaaaactggaatgggagataaaactatactgaagcgaccttaaaaaaccctgagccgacacagattaccatgggagacgacgtgaaatatatggaacgtactagtgaccatggactatataataaagaaccacatataaaggggtaacaatgcgaaatacgtgactaagcaaaaagtactaagacactaccaacataccatcactataagacacacacggaccacacaaagccacacccacataggagaacaaaacgtgggcaacgacgaatccataaacgacacacagaacaaaaagggcaatactacccacacaaaaagacaaagagacaaaaaagggacaagacattacagatataaaaagacccgcacaggccacaggcccctgggaggacccattgcacaacgcagaaagtgcacaagacaaaaaagcgaaatctcacattaaagaaagaaataataaaaggacacaaaggaaaaaaagaacaaaagaacacagcaaacgaacacaacacagagacgaacagagcacacaaacaaacaacagaacccacgacaacgaaggaggcgcccacaacacagaacacacagaaaaaaaaccggaaagaacaagacaacaggaaaaaacaaaaggggacacccaaaaaacaagacaaccgaat

SEQ ID NO: 604794 - DNA, 388 bp, Homo sapiens
gcagtggggggggattcaaagggcttagtttgccccctgggaaaaaaaaagttcctgcgcatccaaacccccctgtgtggctgtcgtttacatttgggaggggtcccgtatgtttgtacgttgggggccccccgtttttggaaaatttaaaaacccagcctcctgttttccccccttaaacggccttgaaaaaagactcgtctctggttttgtattaaaccctaaccctttttttaagggccttcggggccccccttttttaaagctgggcccaaacaaaaagcctgggcccccctcccaatgtcctttttataggagggttttgttttttttccaaggcaaaatggggggtaaccgtttaatttaacttaaccatcccgggctccga

SEQ ID NO: 604795 - DNA, 219 bp, Homo sapiens
actagaaagacaaaaagttaccaggcatggtggtgggtacatgcgatcccaactacccgtgcggatgagtaacatgaatcgctgacaccttgtagacggatataacagtgacccgtgatcgacccactgcactgaagtctgcgtgacagaccgaaactccatcgaaaaaccaacactttgattctgcaaagaaccctggcgtgcgcttgagtccaggta

SEQ ID NO: 604796 - DNA, 185 bp, Homo sapiens
  misc_feature (33)..(33): n is a, c, g, or t
  misc_feature (38)..(39): n is a, c, g, or t
  misc_feature (45)..(45): n is a, c, g, or t
  misc_feature (52)..(52): n is a, c, g, or t
  misc_feature (64)..(64): n is a, c, g, or t
  misc_feature (78)..(78): n is a, c, g, or t
  misc_feature (80)..(80): n is a, c, g, or t
  misc_feature (146)..(146): n is a, c, g, or t
cctcctctgctcaaggcccacatgctacatcantcccnnctgctnttcagcncaggagctgcantctcccactgtttntnacacaagacttagtccaggaaaatcctctttaagtaacacggtaggaaccatcccagaaacagtcnacattcatgttctaacatgatcttctgacatccttaata

SEQ ID NO: 604797 - DNA, 279 bp, Homo sapiens
attggggttaggactgaagacctaattgactgtttccaagaaatccttctcggtagcattttttcgccgtgctcttggtggcaacatataccagcctctgtgcagactgctcctgatctgagcaccagtgctattcggacacagtcgtgctaccaggtacaaatctgatatctgtttgagcactcattgatcgagcgtgagtcgtgaaatatgtgggtccgaccctctaggatcgggcaagcgagaattcgattgttctatccaatctccgctggcctc

SEQ ID NO: 604798 - DNA, 426 bp, Homo sapiens
gtttataattggcttaaagggatggacttgtgattggctgcaggaagaaacttttttattttttaaattttgacccacagaacccctttatttttatttttgactcttattttttaaaaaatttgcgcctcgggatttggcttccctggaagctctccgagctttggggctttagttaggtcatttttttaaaaaaggaaagagggtcgaatgggctgcttaaactggaaagggactgtgattggctggttaatgggaaacggtttttttttttggcggcaggggttttgctgaaatcaacagcttccctattttggatgcagaaaacagggtttgggccattagtcgttatatttgccttgaaaaaaaagaaaccaagggggctttgcaatatttattacccaaagaacttgctgctgccttcca

SEQ ID NO: 604799 - DNA, 1051 bp, Homo sapiens
cggcgccactggccgtttgacccctgtgtcgactcgctccccaggtgacgagagagctggggccgggcgctgctccgcgctgacctgctgaagggacctcggtccatgtcccctgttgcgccgctgcccccgtctcgttcgtgcgcgggccagtcagggtgccagtgtctctgagctgtgtcgaggtcgcagacctagaggcgccctcgacgagtgcctgtgccctgtggtcgcttgggagcgactcgggcgctgtgtgccgggtggggattgcctcgtgcagcgtgaagtggccgttcctccgcggtgcctgacagcttcacgctggacccttggccatgcagcaatcagtcattgaggcttggtcgttgcagcctacatgctcgcattcgtgcgaaccaaagtacatttgagaccaacacttgaccagttgcacgaacaggggcagcgttgactagtaccgaaggcgtcaattcagacgagaagcggaagagacacctggggcacaagctggcaccgcttcgattccatcacgggttgtcccaaaagttcagacgccaagtacgccttgcgatttggccagcggaacctcttcagaatcttactgagcacgggaattcccatgtagaagatcttcacggtccaacagatcatgggaaaaacccgtgcagaggctatggaagtggccagattgggaaacgcacgcattggcgagggacattggcccaggcagcgactacattggcatatacaacccaaaaggggaaggccttagcaagactaacgacccaaacatttatcccatttccaagcgcattatagagggccaaaagcagttaggttagattagcaccagtaggagtagattgacaccgggaatgtgaacggaaattcgcgccacggttacgtaaagcccatacagaaaatgggggcgggcaaatagcggacacctttccaaggttacaagaaggggaggaaaaaggccgtccaaaagcccaaaatatatgcgaggaaccattggaggaatggcaagtaagtccattacaccgca

SEQ ID NO: 604800 - DNA, 257 bp, Homo sapiens
agtcaagtcagatcccgccgcatcagcctttaccctgacagctgcggtttgtttgtttctgagtctctgtttagagacgaagtcttgctctgtcacccaggctggagtgcaatggcacaatctcggctcactgcaaccttcgcctcctgagccaagcgattctactacctcaggctccacgagaaagctgggattacagtgtgccatcaccacacctggctgaattgagcatttttaacacagacagctttcaccat

SEQ ID NO: 604801 - DNA, 189 bp, Homo sapiens
gtcactgttgcacaataaagttttcacaagtataacactggtgatgtaagtcaacattgctgtagccaggtgtgaaggttgtatggcgtcgtgaccggatgtacatcatgtttgtagggttgggtgcctaatcttgaattgtagcttaaaagatacggatttttgtaactctgtgaaagttatgaggct

SEQ ID NO: 604802 - DNA, 375 bp, Homo sapiens
cgagtaacttagaattgatcagggtcaggttcgtgttagtgagaggtgacgtcctgctgcgccttcgtggtctagccaggaggtgtggtatcaggtggcagtgcaggccgaggtcgcccttgtccagtgtccatagaggtggccatcagctttgctcttagatccctgtgctgccgggttggaacgcattgcacaagcaccgccagccggtacagcgcatcctacgggcactttaagccaggttctaacacaacaacaacttgcactacgggttgccgttaacagctgtattacctactctcaggcggccagcacgtgctaagctacaatgtgagcccttaacgtccatatgagtgacgataatcttaactcagg

SEQ ID NO: 604803 - DNA, 378 bp, Homo sapiens
tgggtggatcacttgaggtcaggagttcgagaccagcctggccaacatggtgaaaccccatctcttccaaaactagcaaaaattagccgggtgtggtggcctgcacctgtagtcccaggtgttcaggaggctgatgtgagagaatcacttgaaccccagaggcggaggttgcagcccagccgaggatgtaccactgcactccagtgtgggtaacagagtgagaccccatctcaaaaaccaaaacaaacaggaaagaggtcaagaccaacctggccaacacagcgagaccctgtctctatttaaataaataaataaataaataaagtggaaacaacagtagatcatggcatattgttagaataaatattgatgctcaac

SEQ ID NO: 604804 - DNA, 162 bp, Homo sapiens
aggcgctatgttggcacgtcagcagactttgtggtggaggctatcggggacgacgttggcacgcctgggcttctcggtggaaaggggccatcgcaggcttaaagatcgaatgttgaacgacaaggtgcgaacggattcctgttgattgttgcgcctactggc

SEQ ID NO: 604805 - DNA, 549 bp, Homo sapiens
aaacaagtgaaattcaggtttcagtcttcaaccccagtttggaaaaaagaccggactaccattaatgggaagttctgcactgcccctttgcctgtcaatgacagaaaaaagatggtctgcttacctgaaccagtgaacttcaagccagtgtgactgtttcccttcacctgaagatagcctgtgtgtagtttaacctgggcaggacacatctccccgcattttttttttttttttagaaaaaggtgtgatagggatgtgtgtgtcagcttatttttttttggggtttgaaaggggaccccctctttctactaaggagaaaagcaaagctcttttttattttcctcataatcagctaccctggaggggagggagaactcattttacagaacttggtttcctttgccgattttatggacaaaccccttttagctttcccatgcaaacttaactgcccctgctttatctccttgggcatttggacttaggattcaataaaaacatggacagggtaaaccattttttaaaaataaaacttcatggaggatttga

SEQ ID NO: 604806 - DNA, 151 bp, Homo sapiens
gatcccacagtcaactgctgtcatggatacgcacattcattgctgagtagtacagtctctctgtcagtgatgttatgatgggaaaaagatgcttagtatgtcttatcgtatggagcttgagctatgtgttgggggtgggggtctaaaaaca

SEQ ID NO: 604807 - DNA, 391 bp, Homo sapiens
  misc_feature (200)..(200): n is a, c, g, or t
ctgcctcctgagacaagcaattcggctgcctcgggagatgttattacaggagcctgccatgagacccgactgatttttgtatttttagtagagaaggcattcaccatgttggtcagtctggtgttgttgaactcctgaccttaggtgatccacctgcctcagcctcccaaggtgctaggattacaggcatgaggcaccgngcccagtcagctgcttatcttttaaataaagtgaacttcaaaaacagatacttcatattctgggcatagcatcacacatacaaccatttccaatataataatattaaatgagtacttaacagacattctaataacgcatacaccttttattcacatttgcctgagagcaattacagagttattcttcattt

SEQ ID NO: 604808 - DNA, 1008 bp, Homo sapiens
  misc_feature (78)..(78): n is a, c, g, or t
  misc_feature (84)..(84): n is a, c, g, or t
  misc_feature (224)..(224): n is a, c, g, or t
  misc_feature (236)..(236): n is a, c, g, or t
  misc_feature (240)..(240): n is a, c, g, or t
acctctctttcctggttctcaagagtgctgctgataacgcggtccccggcacgcaccatctgtggcatcccggccggncgaggncattgcagattttggaagatggcaaagttcatgacacccgtgatcctaggactaagccctcaggctggggtccctgtgcggttcccgagcagtttcggggatatgccctaccagccgttcagcaaaggagatcggcttgngaaaggttgcangacntggacaggagccacataccaagataagaggtacacaaataagtactcctctcagtttggtggtggaagtcaatatgcttatttccatgaggaggatgaaagtagcttccagctggtggatacagcgcgcacacagaagacggcctaccagcggaatcgaatgagattttgcccagaggaacctccgcagagacaaagatcgtcggaacatgttgcagttcaacctgaggagtcctgcctaaggagtgccaacagaaggagagagaacgcgttcgactgcgaacacaaagttccagaaacgacttgggggttaggcacgagaatgggatcacgaaatcacagaaaccccgagactcttcagttgcagttcgtagtgagtgcggaagtgagagagggagtggatcttcctcagttcgatgacaaatgcgcacttgcaagtatcagagccacaggacattgagtgtgtgggccctagaatacgtacgacgaagcctttgaacgcatcacacgtggcgtggagcactgcgaagggtaaagcgcatttccgggtgtccccacagatgaccttgtatccgaagtgcaaaactcgggaatttgttggcatgctccacctggcacatgatgaataccgacacggttcgtgaatgtgccgagtggccatcctttgcaaaggaacgtttgctcgaaagacgggcccaaaagatccaacggcgggggggacaccacctctggtggaacccggagaaatattcgcgccgtctcgcccccc

SEQ ID NO: 604809 - DNA, 248 bp, Homo sapiens
  misc_feature (79)..(79): n is a, c, g, or t
ccctttaactgcaataggaagaaaaaaaaaaaggtttgtgtgaaaattggtgataactggcacttaagatcgaaaaganaatttctagtatacttgagtgccttaagagtgaccaaagcgtgcccaaaagctcttgaaagagctttaaagataggcagggtaagtgctttactacgaaatactagctgagtgtttatgtagagctcacaccttccgataataaaactgtgcctgtatataatctcata

SEQ ID NO: 604810 - DNA, 395 bp, Homo sapiens
  misc_feature (143)..(143): n is a, c, g, or t
ttagatcacgcccctcccctagtaaagctaaaactcaccggagattgtaaaaaactccagttgacacaaaatagagctacgaaaggtggcttgtaacatatcctgaacacacaagtagctaagtacccaagactggtgattangataccccatctatgcttgacgccctaaatcctcaacagattaaatcaagcaaaactgctcgccagaatcactacgagccacagcttacgactcaaaggacctggcggtgcttcatatccctctagaggagcctgttctgtaatcgataaaccccgatcaacctcaccacctcttgctcagcctatataccgccatcttcagcaaaccctgatgaaggctacaaagtaagcgcaagtacccacgtaaagacg

SEQ ID NO: 604811 - DNA, 974 bp, Homo sapiens
tcagggcaggctcgtggctgggctggggtgccgcgagcccaggcgtctgagacctactgaccggccgcgggcaaggcctgacaggcggtggggcggctcggcccctgggctggagtcgggcggcgggcgtgcggcggtgcggtccgtgcgctggtgaacggacgcctgggcgccccgaggcgccgtgggatgtggacgcggccaccccaggcaagagcagggcctccgcaccggccccttgctaggttgtccccggtcccctggaaggagctgcggaaccgcctggcaggggccgcaggggaggtccccatggagccctggtggagacctctgcaggggaggaggcccaattgcctattggatgggccccgctagctgtccatgcttggactgtgtttgcgcctgctgcatgctccttccatggaagatccggagaagagggggctccgaagttcctgaagggaaggatgcttgccacaagagcgccctaagtgatgcctgaaagctaaaaccgacgacggaaaagtgtcgacgctggtgttccaagggtgcgggagcatgcgtagagacgcggagcttggaaagaacctgatcgggccaggcctcgttttgaggaaggctccccaaagagtggatcagacgaatgccaaacattgaaaagcagagctgtgtatcagagacaacgccagctcgggaggggagaggtcggcggcaagaatcgacatgctcgagggcaaagattgacgagccgttgaacgacgctggtcatcaagtccaacacaggcctgctccaaaccgggagcttcaccccagttgtgagcccaccagggcggccggaagggcgagacctgcacaaagaagcaggagacgccctgcccgcggttgtcggtggggacactaacccaaaaaaaagggaaggggggcccacatgtgaaatacaagctggaggacccatgaaacgccacgaagggacg

SEQ ID NO: 604812 - DNA, 199 bp, Homo sapiens
gtgagagacagtcttgtcctgatgcccaggctgtagtacagtggcatgatcatggctcactgtggcttcaacctcttgggtccaagtgatcctcctgcctcaggctcctgagtagctgggactacatcgtgtgcaccaccacacctaggtattttatatttattttattttttgcctcacactctgccaagtctcaatg

SEQ ID NO: 604813 - DNA, 816 bp, Homo sapiens
  misc_feature (15)..(15): n is a, c, g, or t
  misc_feature (17)..(17): n is a, c, g, or t
  misc_feature (31)..(31): n is a, c, g, or t
  misc_feature (44)..(45): n is a, c, g, or t
  misc_feature (70)..(70): n is a, c, g, or t
  misc_feature (776)..(776): n is a, c, g, or t
cgagggtcacaatgnangtgggggtaacccntttatttcccttnnctttttctcttttagcctcgccttnattccagggggtggggtttccgtccggaatcgcccacaaggaatgggagtttggtccaattggggtttaaaggaattgggggaaaagaaaaaatttcaaaagcctctggggggggagaaggcgccttttggtttttttttttaagaaggggggcccttttttgaaggaattgggaaaaatttgggggggaggggacccgtattttttaaaaaaacttgtgtggttttttgggggacccccctaaaaaattttgggaaaaaaaaattttttttttcactctttttgtgggaaaaaaaaattttgtgggcggcggggggtcttttttttgaaaccactttctttaaaaaaagttttttttttttttttggaaaaaaaaaaacccccaagaaaaaaaaatttttttttttttttttccccccaaaagaaggacccccccccccctctcccccctcttttttgtgttggaaacaaaaacaaggggttgtgggtgggcccccctttttttttttttttaaaaaaaaaaaaaaattttttttttataaaaaaacttttttttttgtggggggtggggggaagatattctttttttttttttttccgccgccgccttcttttttttttttttaataagaaaaaaaattttttttttaataggaagagccgccccccgttttataaaaaacccccccggctcggcgccccaaanatataatttttttttgggggagagggggggtttttttttt

SEQ ID NO: 604814 - DNA, 256 bp, Homo sapiens
aacaaatattctctctcttccagggcaggaatgggcatgtgtgatcttcgtgtgaggtcctttgtgctatgcacgttgggaagcatgttagaatttccctcccttttaaggctgaataatattccattctatgtgtataccacattttgtttatccatttatccactgatgaacatgtgagtagtttccacctttcagctatcgtgcatcatgctactatgaatgctggtgtacaaatagaatggaatattattca

SEQ ID NO: 604815 - DNA, 1926 bp, Homo sapiens
tgggggagcagggaaaacttaattggaggtaatgaatatattctacttggaaactgggaagggataagtgggtcatagaattgggtgggcttatgggtaacctttaggttaacgcatcttctcttatttcatttatttattattatggggtgagaagacaacaaagattcaacttctggtcccccaaggcgtgggaggatgaaagggggcggagagatatctgtcggcgcactccaacgggagatctccattcagagcgcttcacccgagggatcacaaacgcgagaactatcctcgagataaccctaagagcctctccgcgagaaggacagcgcgtggggagattcaaacaggcggcatgtgagcgccaaaaacaagtcgcgcggcgggccctatacaaatgtggggtacaccacttatagagacacagacaagagagtgggggttataaccacggcgagtggtgagcccaagaagggcggtggaaacttctctcaaacacaacactcgcgatgaacccacgtcagagagggatgaaatcatcgtgagcccgacactacaaaagaacgccaatacccacaaaagaagggggtgagctaggggggagccaacctcacacacgagggggccagatgatggacatgccccacaacatgttggagaggaccacgacggaggaccaccaatttatataacacaatccaccagactagcgcgaggtaaacgaaacaaaataacatcgtgtcagaacaacgacaagggaggagggagaaacccacacagtacgaaccacagagagagaaaaacacagacacaacacaaagcgaacacacacacaaacaaccatgcatgacacaaaacacagaggaaacaaacagaacaagctacacagatcagcgcgagacacacaccacaaggaagcacagaccacacccaccgggagcgcacaaccaaacgacagggacacaacaaaaacacgacgaaagcagacacactacacacacacagagacgataaaagcagaaggaaaacatacccaacaacaaaagaatagacccaagacggataacacaaactaagacacaagcagactaacgatagcaagacaaacacacaaaagagaacagcacacaaacaacacaacaaatcaatataagaagacgcacaaaaacacacaacccactaaacaaagctagacaagagaagaggaaaaaccacagacagacagcgaagcgcaaataaggcacacaagagaagaatgagacaccaagacacaaacaccaccccaccaaacccacacagcaagacaaccacacacaccaaccaccacaagtagaaccaacccacaacacaaccagacagagggaaaacacaaacacacgacaagcacgaaaagaccagcaccagcaggcagcccagcaagagagaatcagacacaacaagaaccagaggaacataagcacaaaaagcaaatagcaaacaacagaaaacacgaaatgagacaaacgacaggaacggaaagaaagagaagaagagagacgaagaaagaagcagaaaagacgagggaggaaagaacaaacacaaagaagaaaggcaaagaaaccacacaaagaaccaaggagacagctacgaacgagagacgagaaagcgagcgaaccagcgacgaatcaaaaacacgcgaagatgcaagaaagacgaactcatacgacagacgacacagaacggacgacgtaaagaggtgagcaagatgaagaagcaaagagagcagagacgacaaggcagcaaccacgcagacacggacaaaaactacgaagcaggcgaacgaaacgaagaaccaaaagaaagggaaacaacgcaagaaacaagaacgaagtacaagacgaaacaccagtcggctcgacgatacggcggagcgcgagtgacggc

SEQ ID NO: 604816 - DNA, 149 bp, Homo sapiens
ggtacctactggttgcagcgggtaggctaggattgtgggggcatgaatgaagcgaacagattttcgttcattttggttctcagggtttgttataatttttttatttttcaggctcttggtgaggagggtcttggcccgctgcaaaccag

SEQ ID NO: 604817 - DNA, 952 bp, Homo sapiens
ttctggcgtttttgtcgtgcttggtgtccttctggggtcttccggttgcttggttgttgcctttggtggtgtcctatcatgtgtgtttgttcggtggtggccttctgtgtgtgagcggtttctttcctactgcgttgtgtcgggtccttcttgttcggtctgtcgctgttatgtgtggttctagtgtgtgtggttctcccctccgtggtcggatcgttgcgtgtgctggagccgtgagtggtgtttgctctgtcagtttatatccctgtcgtgatgagctagttaggaagctactaggtgctctacgcccttgcagggcaccttgtagtgtcctctgatctggtcctcccaacatgctgcggatgttctttgacgccactgtattgtacgtaggacgtggtgtagcgtaggatgctcttctacagctgggagagtacgcaaggaccctcgctgatcagtcagggcaagggtgtggcccattatatcctgtccacagccttcttcaagtggctccgtgaagcagaggatgagtctgaccacaactgagggctggtaggggccggggacctggagccccacatggacacacagatggcccggctattcacgcctggtattgcaggggggcggcagcagcgtcggtggcagtgggtgcctgtagtgtgatgtgtctgaactatataaagtggctgaagaggcaggatggcttggggtgctgcatgggccccctccaggatgccgccaggtgtccctctcctccacctggggcacagagatatattatatataaagtcgtgaaatttggtgtgtcattggggtggggaggggcaccaacgcactgccatggggtccttttttttattttctgaaaatcactcatcgggactgccacgtcctcgctgctgggggcatatgccccagcacatgtacactcaagctgtggccatgggca

SEQ ID NO: 604818 - DNA, 151 bp, Homo sapiens
tggtgtctacaggatctgtaggtggcgtgggtaggaagagtggtgtttggacagcaggtgttggtctcagtgaccaggtggacacccaggctgactcacggtttttggggacatagtggtggatcagtccaagtagtagtgtgacacgggt

SEQ ID NO: 604819 - DNA, 242 bp, Homo sapiens
gctgttctagagtaacacacgggtatgtacagctatgtgtgacatgcatctagtgaatgacagatacatgcaatgtggacagcatctaggaagtggagatacaggaagtggacagcatctaggaaggaaatacaggaatgtggacatgcatctagtgaagatgagatacagcgaagtggacatgcagtctaggaagtggagatacagcaatgtggacagcatctagtgaagacgagatacag

SEQ ID NO: 604820 - DNA, 1249 bp, Homo sapiens
gtacaacccaggccatgacccctacacatggggcgcctctcagtccctccataatgacctccgcgcgctagccatgtgatttcactctccactccataacgctcctcatactatgcctactaaccaacacactaatccatataccataatgaatggtgcgcgattgtaacactgagaaagcatataccaagggcccatgctagagcacgcatcgcgtggtcctacaagaaggacctttcgagtacgggcataagtccctactttatttacctcacgaagctttgtctgtgtcgttcgccaggagtattctgtctgagcctatttaccactgccagtcctagacacctctatcgcgcaccgaacttaaggacgtggcagcgtgagcactccgcaactaagggagatcgacccccgctaaatagtccccactagaaacgtcctcacgttccataggagcatcacttccgtatttagcttcggctactcaagtgcagtactcaactgtccacctgtaggctcaccaattaggttcttaattgaggatacagaccaaaccgagataaccagagaggaagtatcaaaggcacatggcattcaattcagctagaatataataatcgttggagctcttcgttatttgatactcacatcctatacgagagtcccgtcgagaagtatcacttccgaagggtcatccctcgttccaccacgagtatttccctggatcggtgcagaagttccgctcaccagtgccttccaaatcaatgtcatgagttccgcgtttaaggcccatccaataggcctcttcgcgagccaggggatcgtttccaaacaggtcgagtataattgtggcgaattcaaaacctttgtgcccgtaccgagcttaattcctttaggcgtttccaagtccccccggccaataacattacaatattttctcacacatttttaacgagattcccagagatcagttgcatcttttgtggggcttttcggaaaaagtacccgccccggcccttggattaccctttgggacaactatatatggttcagaaagtgttgggttctttgaaccctcatttctccttgagatatagttcctacccaattccttagttcgaagttggacggggttcctctacatacacgacagaatactacaataacacacgatgaaaacactaagcacaaccacctcaacgcatctacagacacaagaacaataagaacgagatagcacatatcacag

SEQ ID NO: 604821 - DNA, 199 bp, Homo sapiens
cttcggtagttacatcgcccatagacacaattctccagcagcttctgctcctggactcttgttacttcctggaggggattgacgtagctcctggcggcatgtgctttgggcccttgggaaagcctttgtgccacggttgggaaactttgaggccccttgagttctgctctcagcgagtatagagtctgtgacaaatcga

SEQ ID NO: 604822 - DNA, 241 bp, Homo sapiens
atctgtggagaggttcatagtaccgtgggctggaagcgggtggataaagagcctgggtgacttgtatggaagccctcgaagccaggcctgaggtcctacaaaatggagccctgagagtgtgcctggtcttaagctgactgtgaccacgttaaattaagtgatccataggaaggaaggtggtgtcgaagccgtgagttgcgcggagaaggagcgctcaacacagcctcagtggttcactacg

SEQ ID NO: 604823 - DNA, 937 bp, Homo sapiens
caaatcgacgaaaaaaaaaaaacatggggagagccgaactaaaagtctttagcaggggtaccagccctagaaattccagtacaccagaagcagccgggaaaccaaatcctcatcaaaagacagaaacgaaaaaaactcgagccagcctgagaagggaccctattttatgctggtaacccactggagactggcatcctcacagctggagaaagggattggacccaaccatactcaagtcaagaaaaaatcttcctcgtcagaactcattgggttactggtacctaggattaagccttactaatgttaaagttaacagaaaggcttaatttcatataccttctatatggtgtcttatccccttccggatcggtaacatagctcctgttgttattaatgtaactaagtctgagtcacctcagaccatggcctttagatgatggctcggtaaaaaacctgtgtggcaagtgtaaaacgaatcaagggcagtagccttgtaacacaagttattatatgcctcggaccctctaatttgaccaaagtaacccctaagcacatcattcgttgtgatcacctgcagccaagacgatggatttttggttcatgatagctggaacttgtggtaattgggacaacgtcgtttaaggtacgcagggtcaatgtggacttcctgaaaatgttgtgtcgatctaaacgtcgcatttatttaggtaaggattgccttgtagtgttacttaacagtgaacggcttatataaacacttcactgtgttatatttaaccggctaagggttaggattgtatggaaaagaaaacacgtggtggcactattgtgtaaagacagtccgagagagaagtgaggtacatatgcggttgtgaagagtacactacaagatacggtatggagaggaagaaatgaagtagaagtagtaaacgtgggc

SEQ ID NO: 604824 - DNA, 133 bp, Homo sapiens
cgccgccccggcggggcgggggtccgggccggggcgggcgcgctggggcagcggcagcggcagtaacagcagcgcggcaggtcctgcggcagcgcgaggcaggcccgtgacagcgccccacgcgcgcggtcat

SEQ ID NO: 604825 - DNA, 163 bp, Homo sapiens
aatttaactaaaaatatgactgctctcttttcaaagaactgcttttttcagtcccagttacgtcaaacaaaccagcccctaaatgttaactatttgctatttttgttcaaacttgggaaaatattattaaatatccttcccctaggaatgagaagaaaaacca

SEQ ID NO: 604826 - DNA, 754 bp, Homo sapiens
  misc_feature (192)..(192): n is a, c, g, or t
  misc_feature (465)..(465): n is a, c, g, or t
  misc_feature (540)..(540): n is a, c, g, or t
gcatgttgtgctttgtagggacaaatgtgcatttgtttgtggcaaaagcctacaattgacaaacttgtaaatttctttgtatataagacctaagcttgtaaccctggacttattcctttatgtagtttaccttggttttatgtaaaatattctatttcccttcttacataaaatgataaagacgtcgtgtgngtctcaagaaatgggcaacctttgaacaaatgtaaacccagtgaaaaagtggattttctttactttttgtctttgggttatggagttgattttgttctttttgaagttatattatttttaaaagtgcctcccacctaaggcgtaagccatgaccatttggggtaccaagagcctaattttgtaggacttaatctgttgaaaagtgcagttacttctggaaattaacctcaatattaggtcagcatgtgaaatgttggatttgacatgtcaggnagggttcatggactgattggtcccatttgccctcaagtcagttggttaatctcaagacctgttactaactgattntattaaatcagagtcttcaattcttgcatggttagatctaatttctgaaccaatgagcacactttaaccaggtttttacaggtaccttttttctttaaaccgattggggaaacttcatgggatttaaattaaaatctacggtataggttctgaccatgaacctgctaagtcggcagacttaatttttttatggctggcctgattctcctagttg

SEQ ID NO: 604827 - DNA, 523 bp, Homo sapiens
cagacatctggagcagcatgtggctatccccgtggctgctatgatgacatggattagctctacgtgggctgcaagcattttgggatcgaggctacctagaggggcatcgggccatggaaaacctcggattagcaagcaataaaaacatgacctcactcttcctcaaaggagcccctggtcttccctgtgtgactcagttctttccatctgtttgtcccgctgcaagcctctttctgcgctgactgtgacattggaacgtggccttcctgtcaccccctccgtgccacgcactgaaggccacccccacccacctgggaaactaagaactggatatttagcctcattcacttgtactgtaacaatgtatactaatttggttggtatttcactatttaatttttaagaagcctattttactagtgttatatatgaacaaagtactgcagaagttaaacctgtgttgtattatttctgagatgttttgctttaagagatactttttgctcagtttatatatgccaga

SEQ ID NO: 604828 - DNA, 247 bp, Homo sapiens
cgttctcacgactggtatcaattggtgactcatctattctaagtgaagtaatcttgaatggagaacaaaactgtatattctcactcaccagtgggagctaagctatgaggatgcccaggcgtcagaatgacacaacgggccgggcgcggtggctacacgcctgtgatcccagcacttcggaggccgaggcgggcagatcacgaggtccggaaattgagaccatcctggctaccacggtgctataacg

SEQ ID NO: 604829 - DNA, 415 bp, Homo sapiens
  misc_feature (8)..(8): n is a, c, g, or t
  misc_feature (56)..(56): n is a, c, g, or t
gataaaanggccctatgtggcccctttaaggtaagagatattaccccttcacagtnggtagctccttttttaaaaaatccctatccccatacaaccctgttaagtggaagaaaatatttgcaaaccatttatcccaacaagggactaatatctataatatacagagaactcaacaggaataaaacagataatcccattaaaaagtgggcaaagtttgtgaccagcctggccaacatagtgaaaccccatctttactaaaaatacaaaaattagccaggtgtggtggcacgtgcctgtagtcccaactacttgggaggctgaggtgggagaatcacttatacttgggaggtggaggttgcagtgagtggagaccatgccattgcactccagcctaggtgacagagtgagactccat

SEQ ID NO: 604830 - DNA, 100 bp, Homo sapiens
gcatgctgagtgccatatcacatccatgaagtaggaattggggctctgcagcacgcgtttcttctagtgttccctcttctcctcttctggagagggatga

SEQ ID NO: 604831 - DNA, 623 bp, Homo sapiens
cccctatggtatccccacccatctcttccaaatcctacccattcttataggtacataatacacgtactatcttctaaaaattccatgcgcttctcatcaagactgttttctctccttgcttattttataaagactcaggccatttcttattcaccttccttactcctcattacacactcaacaaacacttcgcaagaaaaactagactggatagtagctatatagtcagatatccctaacagtttactagtggtatttagaaacacaacagcaacatgtctccgtatgttattcagctaatagttgatctcccggtgggaacaaaagggcatgaacacacaggcctacactagacagtggcgatgactaagagttaaagagccaaagatttataatccagaagatagtgggtgcataccagttgtgcgatgggaagatcagttcattaaactccgttcgtgttataaactggctgaccccatgaccaagcaggaggctggcgatgctaagtagcaactgccacctctagggcatgcttggagactggagctgtgccagggaccttactcatctgtgaagcatagaaagggcatgcgtgcccttacaaggcccaatacataaac

SEQ ID NO: 604832 - DNA, 525 bp, Homo sapiens
ggccgggcgcggtggctcacgcctgtaatcccagctctcagggaggctaagaggcgggaggatagcttgagggaagttacgcttattttttttggtctttggtgttttttttccctttttctgggagaaggggggtctcgctatataggccaagggcaggtctcgaactccaaaaaaaaaaaaaaacaaaaaaaaaaaaaatatttgtggggggggctggggctagaaaaggttttcaaaacatttgtgtgggggggggggccccactggggagtagggaaattgggcacatacacggtgggtcccacagaggagataccccgggcaccaaggaaacgaggggtggtgtgggttcccccacgacaaaaaaaaaaaaccgcggcgggggggaaaccgcgcgaggcttctcctggaaaacaatccccaaagggggcagtcacgagagggccacaagggggctccaacaacagaggaggtgctccaagcagacgtcgtgattatcaaaaataagcccgccagagggga

SEQ ID NO: 604833 - DNA, 104 bp, Homo sapiens
aagcagttaatacagactcaaacaaatcaacagggatatattagtgggaaaacacaatataaaactaagatgccattggtttctttaattgggttaagaagcaa

SEQ ID NO: 604834 - DNA, 402 bp, Homo sapiens
tgaggtcagagacatgtgagattgcctacatcacacaatgagcttatagcagagatgggaacacaatccagggttcacaacctcaggccttgcaggtttctggttaagcatagaagctcccagagaaacatactccaggccactggatggatgctcaggcagggccccgggctcttcccccttgagcttgactctgagagcacaggccgagtctctgagttttccacagccagcatgggtaaccctgggaagcagccaggcacaagcaagctgacctctctcatttcactcagcagaggctgaggcggtgaggagcaggtttcaggttcccagggacggcagtggcccgaggaagtatctttaccagggatcagcagttttgagtgggtgtgcaaccaggca

SEQ ID NO: 604835 - DNA, 128 bp, Homo sapiens
ggtcctcccacgtggtgctatgggcttgaggttatggccaatatctagggcagagagtcatagtgggatctgtcccaactctggatctggtccacactacagaagtctcttacccatccccaatccag

SEQ ID NO: 604836 - DNA, 307 bp, Homo sapiens
tcgactctagaggaccccgacactgttcctgatgtgtcggcaatcccatcaacggtgttcctgaagtgtcgaaaaatggttcgatggcgttcaggtgcgggatgaattgaatcattatcgcgctcactttgtttgaagagcttcaaacacggctttgcacgctgcttcggcaatgtgacgcgtctgattgacacgacacatttggaacggtggggagcggcagaagtcgagccgcggatttagccgtatcagcggctcccggacgcagtggatctgggaacagtgtcgtcactcaccaaccaaggat

SEQ ID NO: 604837 - DNA, 178 bp, Homo sapiens
  misc_feature (3)..(3): n is a, c, g, or t
  misc_feature (24)..(24): n is a, c, g, or t
  misc_feature (51)..(51): n is a, c, g, or t
  misc_feature (53)..(53): n is a, c, g, or t
ggngctcccagcgtgcagcgaganacccgagtatcctaaaggcatccgggncntgctgctggggcctccggggcggtaaagggacccaggcacccagattggctgagtcttctgtgtctgccatttagctactggggacatgctgagggcatggtggcttctggctcagagctaggaa

SEQ ID NO: 604838 - DNA, 86 bp, Homo sapiens
gctaactaacttattcagctttgggccgatgggggtggggggggtctttcagtgaatatttttattaaactctaccgtggacaaga

SEQ ID NO: 604839 - DNA, 378 bp, Homo sapiens
tgaattagcaggccatcagactagagctgagtcttggggtactgccaaagctgaggctcgaattcccagagttcgagcagggggaactcaccgctctggacagactgcttttggaaacatgtgtcgagaaggccgaaggtttgcaccaaccaaaacctgacgccgtagccatcgtctagggaacacagccctcaggtgtaaaggccatcggattgaggaagtacctgagctttcttcgagaccggaatgaaacagatgaggctgcagattcgaccaggtaacatcgctgtggtcctttgagacttatggcctggaatgagagtaataggggatatgcctctaagcgcatgttagctcgcaaaggtcaaggggaaatcg

SEQ ID NO: 604840 - DNA, 348 bp, Homo sapiens
cccaatttcccccccatttgatagttattcatcagtgaggaaccccagaaaaacatccctttgtttgttaaaagactgtgaaaaaaaacgagataacaaagaaaatcaaaggcaaaatgagtgggtcagtgaaataagccccagtgagaagcatgtgacttttgaaaaccatcgcatagtttcccccaaaaaaagggattttgaaaaaaccctttcctgagcatgggggagggggctcaaaggatgagcaggaaagcttcaacccttccaggtcccccctgagtcatttttttccaagggaaatttttggaacgagttcatcaggggaaggggggcccttttttttta

SEQ ID NO: 604841 - DNA, 1286 bp, Homo sapiens
aaatgacaaatggcctccaaggattttgcaataggcatgatcttattatctcagatcatggtcggattcctggggaatttctttcttctctaccactatagtttcctttgtttcaccagaggtatgttacagtccacagatctgattctcaagcacctgaccatagccaactccttggttatactctctaaaggaatcccacaaacaatggctgcttttgggttgaaagattccctcagtgatattggatgcaaatttgtgttttatgttcacagagtgggcagggctgtgtgcgttggcaatgcctgcctcctgagtgtctttcaggtcatcaccatcagccccagtgaattcaggtgggcagagctgaagctacatgctcacaaatacatcaggtcttttatcctggtcctgtgctggattctgaacacgctggtaaatattactgttcttctacatgtgactggcaagtggaacagcataaatagcacaaagacaaatgattatggatattgttctggaggaagtaggagcagaattccacattcattacatattgtcttgttatcatcccttgatgttttgtgtttggggctcatgaccttggccagtggctccatggtttttatcctgcacaggcacaagcagcaggtccagcacattcatgggaccaacctctccgccagatcctcccctgagtccagagtcacccaaagcatcctggtcctggtgagcaccttgtgttactttactcgctctcctccatctttacatatgtctctttttcctaatcccagttggtggctgttgaacacctctgcactgatcactgcctgttttcccatggtcagcccctttgtgctcatgagccgccatcccaggatacccaggctgggctctgcctgctgtggaaggaatccacagtttcctaagctggtcagatagttctccgatttatgtggattgtcttctttttgtataatgaatggccgtttgttgatttcttcctgcaggttaagcaccgcaatgggcagtcaattgcagtgtatataagactcagaatccgtctttgcccttcaaggatttttcacgtatcataaacaacagttacagatgaaatgtttttgcaaagtgctttcataattttcattttgtttgtaatttcataattttcattttgttaatgttgcaatggagaagttaagaggcaaattattaattaaaaatgggcctctaataagttggaacaatgcaactttaaaccaattaataaaaaatgtcatgga

SEQ ID NO: 604842 - DNA, 536 bp, Homo sapiens
gtaatcatgtgctatatactgtgacctgatcctcatcgaaatacacgccttagtgctgaccagattcttacgcagtatgacagtattaatgtcattgacataaataaagttgtgaaatatgttcccggtctacagacagaagatggttcttatgctggagatatttggcggagaaattgacacaagattctctttttgtgcggtggcaactatggctttgtaggggaagcttgatgctactcaatgtggaaaaggcaatcgaattcgtattatcctgtatgaacttagacggtggatttggttgcagaccaagttctgaatcccatgctgggcagatctatagtagcacaggatttctggctattacaagtcagttgcatcacgtaaattctgatttacttggctggtggctttgtgaacgacaattaccctcaggcgggctcaatggaaggccggagaagttaccagatgtctgctactcatggtgggtcctggcttccctaaagatacttggcagacttcattggcttgatcga

SEQ ID NO: 604843 - DNA, 774 bp, Homo sapiens
tccaggcggccgggaaaaatggcggacatccaaactgaccgtgcctaccaaaagcagccgaccatctttcaaaacaaaaagagggccctgctgggaaaaactggcaaggaaaagctcccggggtactacaaaaacattcggtcgtgggcttcaatgaacacccaaggaggctatggagggcccctacttgtgacaagaaagtgccccttcacgtggtaagtgtgctccatccgagggcggactcctctcgtggcgtggtgaaccaagatgaagatgcagaggaccaatggtcactccgccgagactatctgcacatacattccgaagttacaaccgtttcgagaagcgccacaagaactttgtctggtacaacctgtccccctgttttcagggactgtccagatcggtgacatcgtccacagggggcagaagtgccggcctctgagccaagacagtgcgcttcaaggtggctcagggtcaccaaggtctgccggcaccaaaaagcagtcccagaaagttctgaggctgggatatcggcccgttcccccacaatgaaataaaagtttatttgctcattccccaaaaaaaaaaaaaaaaagtctccgaggactttaagagcggggggggcggaaaacacgaggctatagaattggccaacttggccaatcaggtggtttcctgaccccagttttcttgtcaaacagggggaaaattggcgggccccaaaaggaagcggataaatcggaaaccaggtactgtatacactcacgaaaa

SEQ ID NO: 604844 - DNA, 160 bp, Homo sapiens
  misc_feature (41)..(41): n is a, c, g, or t
atctcagcaggcatccccgcatcattcctcaggggttcgcntgctgcacatccattcaaggctccgcccgtcccaagctcatcccagcatcggcagggcagcatgtggccgcagggcagttcctccagcctgggtctcccatgggtcacgcagctcgcac

SEQ ID NO: 604845 - DNA, 383 bp, Homo sapiens
  misc_feature (8)..(8): n is a, c, g, or t
  misc_feature (72)..(72): n is a, c, g, or t
  misc_feature (378)..(378): n is a, c, g, or t
  misc_feature (380)..(380): n is a, c, g, or t
aggagaanagggtacaagccctgcttccttcccagattggtaattccaatcatggctggacaattagaatcnatcttggggagctttaaaagtcatgggcggcaggagagacagctcatgcctgtaattccagcactttgggaggccgaggcgggtggatcgcctgaggtcagtagtttgagaccagcctggccaacatggtgaaaccccgtctctactaaaaatacaaaaattagccgggcatggtgatgggtgcttgtaatcccagctactcaggaggctgaggcaggaaaatcgcttgaacctaggaggcggaggttgcagtgagcccagatcacagcacttcactccagcctgggcgaaagagcgaaactcccntntca

SEQ ID NO: 604846 - DNA, 236 bp, Homo sapiens
acactctgcgcggcgtgatgcatgaggaagatggaggagttggggtcgctggcgctcattttggtctgggcgccctgcagggctgggaacaaggtggagtgcatcagggctggtaaagcacttccttagctgggggcgaccacctttgtcattctaaagtaaggatcctggtcaatggcacatgggattatgaactggatatccgtcctgtctcggaagatctgcgggaatgagtt

SEQ ID NO: 604847 - DNA, 414 bp, Homo sapiens
ccccccagcggcggtgtactcaccaggtcgtacttctgatttttaaacaatatattttaataacccttaactgtttatggtattacctgcagatttcttgtacttcatattgcagttgctattcatctgaattgtgtttgttcatccgttaaatacttactaagctcctgctctctatgccaggaacacacaattaaattaatgttagaccatctctgcccttacagaactccttagcttcttggaggtagtaccatatcagtcaggagcagaaatcctagctgctttctttcgtatatatcataacatttaattgtattttatattatactattggttacaaatattttttatatatcaggatatacttcagacagcatttagatattgtcttgaaatgcaaattttaagtac

SEQ ID NO: 604848 - DNA, 197 bp, Homo sapiens
  misc_feature (137)..(137): n is a, c, g, or t
tctagcctgggcagtaagagctagactccatctcaaacaaaaacaacaacagtctcgaggaggccagaggagcatgtttgttccccccacctttggaaagaagaaaacattgtatcaagtggaaatatcttcactanatgcaacataaaactctggcgattttcatcacaccaggtcaggtgatcccaggctggagt

SEQ ID NO: 604849 - DNA, 211 bp, Homo sapiens
ggatcccctgttactaaatggctgttatccaggctccatgacatgtcttgccatagcaaagaataaatatacgtagccaattctaaaagtagccctctttctcctggatcttgctgaattagtggcttggggggtgggggagataaaaagaacttaaaatgggttaagtaagaaatgttaaaaagtccctgttttgtcctgaaattttagt

SEQ ID NO: 604850 - DNA, 1026 bp, Homo sapiens
gctccgctcccgtgagtaacttgtgctccgtgtgggctcctgctcgcctgcccgcaccgccgccctgccacccatgtgacctgctgcctgcctggcctcctgcctgctagcaaacccttcctgactggcccctctgcctgctgcaatgcctgtggacgcctcgtccccccgtcctgccccctgtcctgctgcaaatgttcacgttttgaagacgtggggcgcaaacgacgggcgcacacatgcgacactgcaacgacggacgcgatccaacctggcacgcctgacgtgaacccggaccccgcgcccacgcttgctacccgagaaaacttgctcctctgcgcaccaatctgccaactctcacacactgactcggcaaaccccgtctgaccggcgccttaaccaccgctcgaaacttactgtagaaacctatacgaccgtttccctcaacgcctttcaacttagacactcgtaaccgggccttgactccttccaagctcccccacccacttcttccctctcaaagcccttgccgtacaactgtttgacacaacacgctttgcaacctttcatgttcgaaaaacttagaacactcctttctgcgcacgctgttcttggcgaccacttcgtccacggcccttgcacaacctccttttcccaacacttccttcaaccaaccacttcctaacatactttaaactgcttggcacatctttacaacccttgcaacaggcattattcaatcgccagcccttttggcagacaaccccttttcttgccacccacaacactgttttaccggacacatgtggtcccttcgacaatcacacggcctcctttgtggaccccctttcagtctatcaacgacctttgcttggaacgagcgatcaacacccaaacacccccttcagaactcattggaatcttaacacctggagcggaacggacagttagctcttatcaacacggcctcccctttggcccgcccaaatgcttatacccactaacctttcggggacttgggcctaa

SEQ ID NO: 604851 - DNA, 388 bp, Homo sapiens
  misc_feature (269)..(269): n is a, c, g, or t
  misc_feature (285)..(285): n is a, c, g, or t
  misc_feature (353)..(353): n is a, c, g, or t
  misc_feature (383)..(383): n is a, c, g, or t
gatgggagtttcactcttgtctcccaggctgcagtgcaatggcgtgatctcggctccctgcaatctccacctcccaggttcaagccattctcctccatcagcctcccaagtagctgggattgcaggcatgcgccaccatgcctggctaaatttttttgtatttcagtagagacagggtttcgccatgttggtcaggctggtctcaaactcctgacctcaggtgatccacccgcctcagcttcccaaagtgctgggattacaggcgtganattcgtgcccggccgngtatcaggttcttactttgagcagattccatctatcaggttcactggtttatacatattaagtatctngtcataaaagttgggggaccagctagggtncaagt

SEQ ID NO: 604852 - DNA, 201 bp, Homo sapiens
aggcatgagcaccgcgcccggcccaagctgggttttattgttgaaatgaggcctctcactgttacccaggctggagtgcagtggcacaatcatagctcacagcagccttaaattcctgcgctcaagtgatcctctcgcctcagcctcgcaaatagctgggattacaagtgggaaccaccaagtctggcaatttttaaattt

SEQ ID NO: 604853 - DNA, 435 bp, Homo sapiens
tagaggatcccacgatgacacttcagcaggaagtcacagtagaatcacatgtcggacacagtctacgagacgcttcgcatatgttacctcgtttgatctttgtaatcaacccatgaggcaggtggggtgtggcgggtatgatagtctccttctatgttgctggcttagagaaggtcagtgacttgtttaaggtcacactgctggttcctggaagaactgggcctaacacaggcctgttggctctgttttcatccctctggaatcttaatccttagcacttcagagtggtggaattcaagactgggccacttagcaaactggtcccttaatttattagattgtattgacatgtgagctgcatgaccactgcttggacggggctgctcaggtagacaagttctgttttcatagcgagagaatgaacttcctgggagg

SEQ ID NO: 604854 - DNA, 366 bp, Homo sapiens
aaaaaaaaaaaaaaaaaaaaaaaggggtggggggtggggggtttattttttttttaaccccccctggggaaaggccgggcctaaaaaaagggttttttttcttttgttcccgggaacccggtttaaaaaaaaaagccccccccgttttttttttaggttttgtttaaaaaacccccttgggcccttggttgggaattgggcccagaattttttttttccctttttggggggaaaaccgccttttttttccccccgttttgaaaccaaaaaaattgccccctttgggaaaggggggttttttttttttaaccccggggtttttttaaaggcccgggcaaaaagggggcaatttttaatttttttcca

SEQ ID NO: 604855 - DNA, 1022 bp, Homo sapiens
tgggggtggggactggccccaaggggcaaacaggttaattggggcagcagcggggaaaatcagcggtgggactgggccacaggctccagctcgtccttcttctaaagggcataggagttcgaggagccctgggcagcatggatgagctcatcggccaggcactcagcaagggtctaaagggtcccggaaggcagcctcacgagcgccgtggtgcccagcagccagaagtggccgggtcaccacacggggcaggggggacacatccacgagccgtgggcggcactcaacagcccgcgggggcgccccaagggcggtggggagatcctccgcggggaaccacgtggggaaggaaggggggtctcaccgaggaccggcacaggagggatcactcgcccgtgggaagcccagggtgttagtagactctcaaaggggcttgctggagcgagtgcgcgccacagatccagtgagcctttctgggccgtgggtgcggcggccggtgccttcatcagtggagttataggggaggcgctcccacaagggggaccactggactcttcggcgggaacgcggttgggcgggaaataccggccctggcccctggtagaggccggtcacttggggatccgtgactccttacactgggacagggtaatccttgccaggggacactgggcattgcgacccggcacacttcaacccggggggcccccacttccccaaagacaagctggaaaagacgcggggggcccctcgccacccgggtaggaggcgggaagaccccccaatcgggcaaacccaggaaaacacagccagacacccgccccggcaacccgcgggaaaaaccccacgggaaaaccgcggcggagacccggagagggccctgggacaacaaccgaacagggggggacacccacactgcccgaccgcgggctcacctaaacaggcctacaatggggacagccccccacaaagaggctacaaccccgggacaaccaccatggaccgggacagacacgtttcca

SEQ ID NO: 604856 - DNA, 105 bp, Homo sapiens
atcgacaacatttctttcagaattgattgggaggcaatggcagaagtgagactagcgtaggctacacagcaagaccccatctttacaaaaacaaaaattaaaaaa

SEQ ID NO: 604857 - DNA, 102 bp, Homo sapiens
gtttaatttgttttccctaaaacttgaggagaagaagtctgctcctacctccaatacctggaatacttaagccagaaccgtcctccacctgcgaacctatga

SEQ ID NO: 604858 - DNA, 256 bp, Homo sapiens
ctgccgcgcggcggccgatattgccgggctctcccacccactctatggcggcgccgtgacctgttcagcaacgctccaatttttcgacccggctaatccgattaccatcgtccgggtcttctgcgtcctggcgcttgccgtacgtgctatcatttgtctgtagcactcagaagcctctctgcggaagatattccgcaagaagaagccgccgccgacgccagacagcgccaggccggcacccaggcttctcacgcct

SEQ ID NO: 604859 - DNA, 332 bp, Homo sapiens
  misc_feature (332)..(332): n is a, c, g, or t
ggcaactttaatgagcacacatatttcacaactcttgaatatttcttctgcttgctaaatactatattgtgaagattcaattactaggtcaaatacacaccttaataaatagatatgtattagagaagggatggaaaaatatttactcattaagaataccaacacatgaaagtgatttcagagtatggagtcttgagtcacaaaggaccctttccggaagcttccttttttgcgttaggttttgaatttgactgaaggaaggtggtgagcacttgagcccctaatggattcttcttagacttagatggttttccacattggcctactctttn

SEQ ID NO: 604860 - DNA, 327 bp, Homo sapiens
  misc_feature (17)..(17): n is a, c, g, or t
  misc_feature (28)..(28): n is a, c, g, or t
  misc_feature (49)..(49): n is a, c, g, or t
  misc_feature (114)..(114): n is a, c, g, or t
  misc_feature (117)..(117): n is a, c, g, or t
  misc_feature (180)..(180): n is a, c, g, or t
  misc_feature (285)..(285): n is a, c, g, or t
  misc_feature (311)..(311): n is a, c, g, or t
aggactgaggccctganaatgagctganattcagcatcccctggaggantcggggtctcagcagaaccccactgtccctccccttggtgctaaaggccttgtgtgcacgtgaanctncgtgtgcacgtccgttatttcagtgacttggtcccgtgggtctagcccttcccccctgtgganaaacccccattgtggctccctgcccaccctggcagatgactcactgtgggggggtggcctgtgggcagtgagcggatgttgactggcgttctgaccgccccttgnacccaaacctgtgatgaacatggtgnctgattctggggggca

SEQ ID NO: 604861 - DNA, 202 bp, Homo sapiens
tcatttacaagcatcagaagtaccagaaatagggacttcactccacgggcactcactgattcccagacgacgcatggacacaatagaggatcaccataggtttgctatggcttttctattattttcttccccccaagtggtggccctaattccaattattccaatagaataggcaaataatttccacttcaagggtccccca

SEQ ID NO: 604862 - DNA, 274 bp, Homo sapiens
ttctttgcaaacaaatccttaaatcagctcctggaacaagttttgtgttgttgtctgccatcattgacactgaggattcaggggctcatgccccaaatacccgacctgtgtcttgaccatgtagtatgatgcctccacccggagaggcccctgtgttctgcagctgcagcttaggccgctcctgggttctcctgcatcgtccctattgttgaacaaactcagcactctctggaaggaggcttcctctttgtggttcccctgtgggcactgtttg

SEQ ID NO: 604863 - DNA, 124 bp, Homo sapiens
cccgtcaagccacaaggactgtacgagttagatggactgtgccgcaggattgggacgggcaggcatgttagagactcactgatggagttatctgtaggtttggatgctcctacgcttgatgagc

SEQ ID NO: 604864 - DNA, 182 bp, Homo sapiens
agtggtgggcggatagcgagacccatcgctacaaaagattaaaagttagctgcgtgtagtagcatatgcctttcaacgtagctactcaggaggctgaggtgggaggatcccttgagccgaggagtacgagtctgcagctgagctatgatcgcaccactgcattccagaccccagtctcgaac

SEQ ID NO: 604865 - DNA, 558 bp, Homo sapiens
  misc_feature (235)..(235): n is a, c, g, or t
  misc_feature (374)..(374): n is a, c, g, or t
gtgtaccagtgagaggcttgtgaagggattgtttcggcgactccttatctaagaaatgaagataatttttatgaggtgcattttggtctgtgggagtggaagggaaaatgacggtttctttcctatactgtcctttgtttggaatggtgaaaatgttttgaatctgtttctggtgtgatcgttaggtccaagatttcacgtgacgttgtgtgccgggtgttgtggtcaacacacnggaatgctcctttattctctgtacggcctttgggtgcatcatttgagtggatgttcatttgcttgagacgattgtcagagggaatcttgtgtgccctttgctctctgtgcctgtcattgcgagggtttctttgagcgcngtctgctgaccgtcaggcacttgagattgactcggtgaacaatgccgccagcctttctgatgcgctcctgccctctctgactcctacacaggatcagaatcactcagatatcacttctgttggtggaggcgagagaagaatatttatccagtttctgcctttctgcccccattagctctttacc

SEQ ID NO: 604866 - DNA, 302 bp, Homo sapiens
tgcttagaagaggcatgacactatactgaccacagtttaattcaggatcaacagaaggctgggcacggtggctcacacctggaatccctgcactttgggagaccgaggcaggcagattacctgaggttgggagttcgagaccagcctgaccaacatggagaaacctcatctccactaaaaatacaaaattagccaggcgtggcagcgcatgtctgtaatcccagctactcaggaggctgaggcaggagaatcgcttgaacccaggaagtggaggttgcggtgagctgagatcacgccattgc

SEQ ID NO: 604867 - DNA, 105 bp, Homo sapiens
gcggccgcctactactactactactgctcgaattcaagcttctaacgatgtacggggacatgggcctttttttgggcacaataaagcgtttaaacctttcaaaaa

SEQ ID NO: 604868 - DNA, 454 bp, Homo sapiens
agtttccccgcgtcgggtactctgtgggctgcacacgtggctcgcaccttcttaattcccagtcacttttgcggaggcttgcgccaggagtgattgcttgagtctaggagttcaacgaccggtctgcgctacatggtgataccctgtctctactaaggatacaaaagttagccagtgtgtggtggtgcacgcctattgtcccagctactggggatgctgagatgggaggatccaccttagcccttgggggtcgaggctgtagccaagtcatgattgcaccactgcactccagctgggtgatcaagtgagaccttgtctaagacaatacagagaaaaaaaaacgggaaatcgtttaaggtcaaccttcgggcccacttttccgggtgtgacatatttatacccccaactaatatgaacaagggaattcccgttaacaatgaaataaatcctaaaa

SEQ ID NO: 604869 - DNA, 122 bp, Homo sapiens
gtcgactgtcaaaatgcctgaactgaagagcccctgattctcctctcatggctgctgcggctgctgttctttcttctctttcttctttcttcttcttctctttcttcttcttcttctctttc

SEQ ID NO: 604870 - DNA, 151 bp, Homo sapiens
tggaactcctgggcacaaaccatcctcccacctcagcctcccaaagtgttgagacgacaggcatgaggcacccagtacggcctcattcgaaattttctaagtccgcttatggaagcatgcacctgcagtcccaactacttgggaggctgag

SEQ ID NO: 604871 - DNA, 140 bp, Homo sapiens
tatagcttaagatggagaaggtgttgaggtcttccaataacccaccattattctcatgtgcctaccagcgaaagtgcattcagtccactcctggaggagaggagcggtgcaacatactatgggcaaagtggtgcaacgca

SEQ ID NO: 604872 - DNA, 310 bp, Homo sapiens
gagcttcctgcgacatgctgtcagacggagatgggggtacatcctcactccgcccgatctacatacccgagcggacaaggtgctctgcgggccgcactgagcccaggtccacgggatcttggccctatttcctcctgtggcccgtagtttgctgtgtagggcggtgatacccagctcctagcacctctaggccaaatactgggcagccaacatagcagcctatggtgaagaatacatctcggtctgcctttaacttcctcccaccagtcaccacggccaatggtataccttgccagacagatcagtgaca

SEQ ID NO: 604873 - DNA, 119 bp, Homo sapiens
ccaccgctccctggaaaagaggttcctctaaagatcaggtgttagtagtggcaatactctaaactatagataaaactttcttttcaccaattcactcttggaaaggcccggggggacac

SEQ ID NO: 604874 - DNA, 288 bp, Homo sapiens
agcactatgcctgtggagtatactctctctacgaagttatacctcagtgtcaaagagctgtcctcatggactacagttaatttacaaggggatgtagagggtactgtggcaaatttaaagtcgcaactagattctatcttggacaaccagctatcaccaggctcggtaggtttgtcgcctctacctataaatcttcccactatttagctacatagacgggtgtgctcttttagctttttcttaggtagctcgtctggtatcgggggtcttagctttggaccttatcga

SEQ ID NO: 604875 - DNA, 393 bp, Homo sapiens
  misc_feature (152)..(152): n is a, c, g, or t
ctgcaaaacaggccctcagcgtgggcacgaacgtgtggcagggcttcttccccagggcagggcctgtaagacacaacagaggctcctgtgcacggccctcaggagacgggaggaggccccatccagcacaggccccaggctcaggcgctccnacctgggagaaggcactatcggccaccacctccccgcttcctctttctcaatcagtaaggtgattatcacagaaaagcagcagaaaattttaaccccccaaaatcacgtttttccatatgaaaacctatttggtcaggcatggtgctcatgcctataatcccagcactttgggaggccaaggagggaggatcacctgaggtccagagtttgagaccagcctggtcaacatggtgaaacccc

SEQ ID NO: 604876 - DNA, 186 bp, Homo sapiens
  misc_feature (18)..(18): n is a, c, g, or t
  misc_feature (107)..(107): n is a, c, g, or t
  misc_feature (112)..(112): n is a, c, g, or t
  misc_feature (151)..(151): n is a, c, g, or t
  misc_feature (173)..(173): n is a, c, g, or t
cttaaccctttggaaggnttgactgtgtgacccgcagcaaataattcatgtcgaaagatgaaaacaactaagttcataaccccctgcccgccattgacctccctttnaaaancgagaccaagactccatcactggtttcgaatttacatcnaactgctaagattgatacattncaagtctgcaaat

SEQ ID NO: 604877 - DNA, 1010 bp, Homo sapiens
  misc_feature (194)..(194): n is a, c, g, or t
tccggcgcggccacgagaactgggcgacattagctggactgtggtggacctcagacaacgcccgtcgaagtgctattcccggcgccccgggactactgcaccaggcgcgaaacacgttgatcacacagtgtgcctacacagtgtcatcaaaggctgagactgtcgtgacttgcccagaaattggtctcatgtgnctcagtctacgatcaacgagaggctgagtacagcctctaagacgaattggccgagcgaggagaagcgtgacaaggcatgagccatggccatcgcgtcatcgccagagctcaaggtgtgcgcggcagggcgttgggctacgtaaggctggcctgtcagggaagtaccaatgcaacggcgtgccattgtgccctccatgcttggactgtccctttgatcacctgatgacttccctggagctgctgtgccctcccacacattgcggtgggcatccttatcggtggacctagtggcgccctttgcgcataactcgtgttgatcacgagacgaagtggaaggctggcaatgctgtcacagtgttcagtcctccaagcatgcattcctggttcatagtttagtcccatatgggaagcgtggggatgcccatcaacggctccagaggaccagtcgagttcttcagaactgtctaacgacgatcccaggttaatcgcgcctcactgtcttcgaagcatgcctgggacgaagaatgagagggaccaacctagaaaccatggactagtgtgatcttgggccgcgcccgagtgtcaagggaccgcctgtgtcactcgcagattcgggatcggtgcccgtcgatccgagtaatgtcgaggtcgcgtacggtgttggcgacggtgcatagggatggcgggagtcgttcgaataacaagaggtggtccgcctgggagggtcgaagctggcgttgtaatcctggcggggctgtacagggccggttggctcgccgggggactggtcgcccggacggggtcgcccacccttgg

SEQ ID NO: 604878 - DNA, 172 bp, Homo sapiens
gtacgattttctgggaacgaccacctgacctgaccgggaacgacctggactttctttctggaagacacctgactggacctggaacgacccgggactttctttctggaacgacacctgactggacctggaacgactctagacttttctctggacagaccctagactttacctg

SEQ ID NO: 604879 - DNA, 150 bp, Homo sapiens
  misc_feature (14)..(14): n is a, c, g, or t
  misc_feature (97)..(97): n is a, c, g, or t
  misc_feature (113)..(113): n is a, c, g, or t
  misc_feature (123)..(123): n is a, c, g, or t
ttactggtaccttngcaggctttacacctgcctgcatggtgacaattttctttagtattagctctttcaaaactctttaatttatcttgtttacaangtgtatgactattaancccctatggncaatgaaaattttagaaatttctaagt

SEQ ID NO: 604880 - DNA, 190 bp, Homo sapiens
acgacgtgtgggcacgactgacgcaacgtttgggggggccccgacgactggaccacgtaacggttacgttacgacggtacgacgggaccactgacgacacacgacgacaaaccttgtcgacactacgacgacggacactgacgctcacactgacacacacacggacgacaaacactggcaacggagacca

SEQ ID NO: 604881 - DNA, 769 bp, Homo sapiens
ccgctgggcactcggaggcgcgcacgtcgttccccgtccctcccgtcgcagccgtcctcgctctctcgcgctaccctcccgccggctcgggtcctccggtcagttctctcgttagtccaggctctggtcttcggtacccgtcggttcgtctccgagtttgcgatctcggacggcgtccccggcgcgacagaggcaggactcggacttctgttgcctgagcaaatggctgccatccggaagaaactggtgattgttaggtgatggagcgctgtggaaagacatgcttgctcatagtctacagacaaggaccagttcccacaggtgtatgtgcccacagatgtttgagaactatgtggcgagatatcgaggtggatggaaagcaggtagagttggctagacgggacacacctgggcaggaagattatgatacgcctgaggacacctctaccatagcacagataccgatgatatactcgcactgtgtctataccatcgacaagaacctgataagtgcacgaaaacaaatcgccagaaaaaagtgggacaccacacggaacgtcacagcaattacctgatcaccaggacgaagcaccatcgcatcaatggtaggggaacgtaaagaacggaatctaccgagaaatgactgcaaacacaaacaataggggatgagaaagaccaagcatgaaaccacagacgccggggagaaacatgaaaaggaaaaacaccatggcaaaacagaaatagaggcatacaaatcaagcaaatacca

SEQ ID NO: 604882 - DNA, 238 bp, Homo sapiens
gcagttctaccgtacaaccctaacataaccattcttaatttaactatttataatatctaactactaccgcattcctactacttcaacttaaacttccagcaccacgggccctactactatcttggcaccttgaaacaagctaacatgactaacacccttaattccatccacccttcctcttcctaggggggcctgcccccgttaaccggcttttttgccaaatgggccattatcgggg

SEQ ID NO: 604883 - DNA, 717 bp, Homo sapiens
gtgtgtataggggtatggtcccgtgtgtgtgtgtacagttcatcatccagctacacatgaggaccaaactgcttcagcctaaaatggaagatacacatttttttccttcaaaatgccagtgagaactgaagtagctcttttatagagataaactgtaactctttctgtttaccaggcttcggtggatatcatatttcttaggacacagatgtctagttgaccacttaacatttgtaactgatgatgcgttgacctttttttttttttttgccaaactagagaaattgtccatatactttggcgtgaaatgtgtttatatttatttgaaatgaaccaaatggtgaggaaacatccattatttgggctctattctaactgctctatatcttatttagaatgcctgacttggaaggaacaaacttgcactgttgctttggaagccgcctgcgcccaagagtcttttgactcgacaaggttattcatgcggccccaatttgggctaacttggccagtaggccctattgggaggcaaacaaaaattcactggcccttcgttttacaacggttggactgggaaaacgcaggcgttcccaaattaaaacgcctgaggcacaatccccttttgccaggtgtggtattaagagaaaggccccacaaatggccttccaacaataccccccccgatggggactgtgtttcaccatagggcaatatgca

SEQ ID NO: 604884 - DNA, 233 bp, Homo sapiens
tggccggttagtcgcgggatcgttgagtgttatctggaggagagacgtgaggctatcaccgtgattagtcagggagtggtctcaatcgtcactgagctcggtgatccgacacgggctggtctcccaaagtgctgggattacaggcatgagccagtgtgcccagccggtgtttggtcttggttggtttgtgagacagctgtttgactatggcgcgttaaggggccaggcagggc

SEQ ID NO: 604885 - DNA, 1778 bp, Homo sapiens
ggggatgccggaggctgcgtgtacctcttgtgcgctgacgctgccccgcgaaggaggcaggacgttggaggactcgcagacctgcctccactttgactcgccggaggacagcttgcatcccgtctcgcttgtgcccactactagcggcggatcccgtcagtgtcgctccccatttcgcggcagcgagtgctcgtcggtgatgtcagacgcatccactggtccttccccagcacatggcatcttgtgtcgcgcgcagaaacctacgtgagacgtgaacacctcctgatgatcgacacggtgcattacaatgcccacgtggcgcgtgtttattacttggagtactgccacgttggcaatcactaggagcgcatattgctacactcccaggcataataccggagtcatcatcctgccgagagggcattgttgcaagagagatatccctcattaatgtccagagcgaagcacattgccgacccaaatgctgggttaccgaggactctgtgcgacggcccgaatcgtgaggggatatagtttctaccagtgtggggcaattacctgataggtaaacacgcgcgcctcgggattcacgagaggccttgtcccccgctttactccattcgaagcttcacaggccccttgtgtccttccgcgcgtagacgaggaagccctgctgggccatgatacctcggtcggaagggggccgctttgcgcttaaccttttttggggcgcggggggaggaagcctcacccaggaactccccttggcatggggggggcggtgagggccctacctcggaatcccacaaacgcaaggaagcccatgggtttcgggctgccgtccttcggaggcacacgttgtcccgggggggcgtggctggcctctggggcgttctctcccccaagttagaggctgttcgcattcccggggttgtccatggcgtgtgggtggccttgcggtgggcttagagataggcttaattccaggtggttggcgtagataggggcgcttacccgttggggttggctttgatacctgccttgggggcccgggtgtctgtggccggtcggggggaagcttatttcccaaggcaatggcgaaagggacgttagattcggatcattgggaaggccatggggatgcaaagacgagataacacgcggccaattcgcaaggggccccatttccggcggggaccagaagaattgcataggtgccaaagacattggggtgggattcgagcaagggccacccacagaatacccaaaggggtggaagagctataccaggcaccgggtgacaggtatagccacggagggcacgtaggttgggcaccgtgtataacaacgaggccacccgggaccccgggaaggacccagcggaccaacggccaaacaaccggaggacccgaagagcaaagacagcgaggacaagaacggcacagaggaggcgtcccccggagagtactagggtgggaaacacccaaagcaagactatacgagtgctacagcaaggatacgagaagaaattgttgtgttcgccgacaactgccggaagagaggcacacacacaagggtgctcggcaagagaagctacatactagctcaagataaggagagaggtaggtcacaacagaaacgtagacgtcaagtgaccaacagacaggtttagataggatggaatagtagagataactgtctcagtctgtctgcctctcgtcgctctctgtttgtctgtgaccgttaagaacagtaaacagtgtaggcgagagacgggt

SEQ ID NO: 604886 - DNA, 149 bp, Homo sapiens
aacaattgagcacactgtaacggatatgacatgtgagcaacagcaccctggttggcatggagcaggagtatacctcatggggacagatgggcacccctttggttgagcttccaacggcttcccagggccccaggctccatattactgtg

SEQ ID NO: 604887 - DNA, 358 bp, Homo sapiens
  misc_feature (186)..(186): n is a, c, g, or t
ttaggtggggccggggttccaaacctggcccaaagattggaggccctcaaagaccaaattggcagttccttgcaaagtggccgcacccagcccccctgcagtgagggggcaagaagcccaggccaagtcctccctccccatttaaggccaagtgggaacccaggagaatgttttgtaccctcagantgggctccacatttttgggtttcagtttgcccatttgttgaatggagacagcagttgctactccccctgcagttgggttaggggcggggactgggggtgctatttaggggaacaaggggattcaggagaaaccaggcagcaggggattaaatacatgaataaaaaaaggctt

SEQ ID NO: 604888 - DNA, 623 bp, Homo sapiens
  misc_feature (166)..(166): n is a, c, g, or t
  misc_feature (172)..(172): n is a, c, g, or t
  misc_feature (183)..(183): n is a, c, g, or t
  misc_feature (221)..(221): n is a, c, g, or t
tcatttatgcttttggagccacgccaacagacccaagccaaagaggcccccggccctcttggaagatatttgagcccttacttggcccggcccagccccggccccccaagactttttggctttgttggccagagaagcccttaacggcagtgaggaggaccaaaantaaacncggggggaggnggagcctcctctcctcccccctttccctttccgttggnccggccaggcccgcccccgttttaggaaaccatggatttccgggaggaggggccttagttcgaaaccccgggcattttcatcagcatggattacgactcggggctgaccgaggcccccctgttggactttagtttcgagggccccctacccaaggaaacggcaacgggcgggcttccctttaaggaggaacggagccccccgaccctcgcccctgttggaaaaaattctattaaaactccccgccccggttgccgaggaccccagggaaccccaggcccaggggaacaccttacggggctccagggggaaagggggtgggacagggactcggggctgggggacggggcggggctttcccttcgggtgctttcccttaaaaaaaaataaaaaatttgaacttg

SEQ ID NO: 604889 - DNA, 107 bp, Homo sapiens
ccaggtggcctgcaccaactggaagcgcgtgatgatcgtgctgagcggaagcctgctgcacgggtgcgcctaccggaccgtggcatccggcgaaccgtgccaaccag

SEQ ID NO: 604890 - DNA, 325 bp, Homo sapiens
ctactactactactaaattctcggccgctcgacctggtctcgaactcctgaccttgtgatcggcccacctaagcctcccaaagtcctgagattacagatgtgcgtcaccacgcctggctaatttttgtatttttagtagagatggggtttcaccatgttggccaggctggtctcaaactcctgaccgcaggtgatccgcccacatcagcctcccaaagtgctgggattacaggcgtgacgacagcccccggccaaagcctgcttattatttaaaggtttgtttgtacttttcttctagctgtcttctgatgtcgacgcggccgcg

SEQ ID NO: 604891 - DNA, 271 bp, Homo sapiens
agaaagtcaaggacgctggcacagactgtatagacagtgattgtcctatttaaaatagaattttaagggaacaatcatcaattaattaactttccaaagggcctgataaaaccaaaggatctggggcatgctatcccattgtggcagattcatatgaggtgttttgcggtgtcagccttttctccagagcatttgtttgactgactccaaggcactcaggagagccacgtctggcagactttacactaaattgtcattgtgagggcctgtc

SEQ ID NO: 604892 - DNA, 374 bp, Homo sapiens
gaccagagggaagaagaaagagaggaagtaaagtttaattatgccttttttggttgaggtgatgatggaggtggagatttggggctgttaaattgttttaggtaatagctcttctagtcaggttaggtctaggaggagtaggcgcaggagaattgcttgaacccggtagttggaggttgcagtgagctgagatcgttccactgtactccagcctgggcgacagagtgagactctgtctcaaaaaaaaaaaaaaaaaaaaagagggtttccagttttgggttggtcaaaaaaaaaaaggaatttttagaaattcctttgtttttaacctggaattttgggggaaaagtggggcctttccattaggggggaaaaaa

SEQ ID NO: 604893 - DNA, 952 bp, Homo sapiens
  misc_feature (263)..(263): n is a, c, g, or t
  misc_feature (270)..(270): n is a, c, g, or t
  misc_feature (305)..(305): n is a, c, g, or t
  misc_feature (328)..(328): n is a, c, g, or t
  misc_feature (351)..(351): n is a, c, g, or t
  misc_feature (364)..(364): n is a, c, g, or t
  misc_feature (367)..(367): n is a, c, g, or t
  misc_feature (509)..(509): n is a, c, g, or t
  misc_feature (575)..(575): n is a, c, g, or t
  misc_feature (667)..(667): n is a, c, g, or t
  misc_feature (682)..(682): n is a, c, g, or t
  misc_feature (695)..(695): n is a, c, g, or t
  misc_feature (700)..(700): n is a, c, g, or t
  misc_feature (750)..(750): n is a, c, g, or t
  misc_feature (752)..(754): n is a, c, g, or t
  misc_feature (760)..(760): n is a, c, g, or t
  misc_feature (767)..(767): n is a, c, g, or t
  misc_feature (769)..(769): n is a, c, g, or t
  misc_feature (773)..(773): n is a, c, g, or t
  misc_feature (777)..(779): n is a, c, g, or t
  misc_feature (781)..(781): n is a, c, g, or t
  misc_feature (787)..(788): n is a, c, g, or t
  misc_feature (791)..(791): n is a, c, g, or t
  misc_feature (805)..(805): n is a, c, g, or t
  misc_feature (836)..(838): n is a, c, g, or t
  misc_feature (841)..(841): n is a, c, g, or t
  misc_feature (844)..(845): n is a, c, g, or t
  misc_feature (847)..(848): n is a, c, g, or t
  misc_feature (851)..(851): n is a, c, g, or t
  misc_feature (857)..(857): n is a, c, g, or t
  misc_feature (862)..(862): n is a, c, g, or t
  misc_feature (882)..(882): n is a, c, g, or t
  misc_feature (884)..(884): n is a, c, g, or t
  misc_feature (889)..(889): n is a, c, g, or t
  misc_feature (891)..(891): n is a, c, g, or t
  misc_feature (908)..(908): n is a, c, g, or t
ctagtgggccttccttcccaggcatggtggctcatgtgtgtaacctcggcactttgggagaccaaggcggacagatcgcttgagtccaggagttcgagaccagcctgagtcgcccctcagtctccactagagacaggactgaccagttgctcttccttccaagaaccttcgagatctgcggtctggggtctggttgaaagatggcggccctcactaccctgtttaagtacatagatgaaaatcaggatcgctacattaagaanctcgcanaatgggtggctatccagagtgtgtctgcgtggccngagaagagaggcgaaatcaggangatgatggaagttgctgctgcanatgttaagcagtnggngggctctgtggaactggtggatatcggaaaacaaaagctccctgatggctcggagatcccgctccctcctattctgctcggcaggctgggtccgacccacagaagaagaccgtgtgcatttacgggcacctggatgtgcagnctgcagccctggaggacggctgggacagcgagcccttcaccctggtggagcgagacggcaagctgnatgggagaggttcgactgatgataagggcccggtggccggctggataaacgccctggaagcgtatcagaaaacaggccaggagattcctganaacgtccgattctgnctcgaaggcatgnaggantcaggctctgagggcctagacgagctgatccttgcccggaaagacacatncnnnaagganggggacnanggcngcannncngacaannacnggcggggaaagaanagccctgcatcacctacggcctcaggggcannngcnacnntnncancgaggnggagngcacaacaaagacctccatncnggggngnacgggggcgcggggcangaggcatgactgatctcattttctgatggctcttttgttggcaa

SEQ ID NO: 604894 - DNA, 423 bp, Homo sapiens
cataatttgtaaaatgtatggcttatgcttcaatttaatgtataatgacaagtcttagggattgaaacataagccatacataatttgtaaaatgtacaagctctttaagatgctttctgggttggaacatggccaaagactgtgtgagaggcctccaggtttgccattacagctgtgagagaaacgtcctttcctcagcgtctcccagacagatgggaagggaagggtgtggggcacatgctgttcatcccattcaagaataccagcaggcgtgtgacgcacatctcgagatgagaagagagagcgtacatcttttcaaagtataaataattgttatcatccttcgtgctgctccctcttagacaatgtcatgtcaaaaataaaacaagatttttgtgtgttatttagaacaaatagaaaaag

SEQ ID NO: 604895 - DNA, 913 bp, Homo sapiens
gcaatcatacggccacgccggggttcgtgatgtacgctggggaaggatgcaaatggggcgccctaccgcagtgcggggaaaaacccggtcaaaaggaggagtgggtcaccccagcccctttggccgccagaccgcttcagtagcggcgaagttcataagctgccccacagtcctggggcgtgggaactacgacactcgaataaaagacggggcgacaacaccagagcacaggggggccgtgggcccagaccaactcgcatggtagtaacaacggacgaagacccgcccaggacatgtgggcctcgaaggcagtgtacagcgatctctctaagggcgccttatcaccgatggataaaggggctccctgccggagacccccggcgatcaagcccctccccgcgcgcaccactccctgggcggaacctcttgaacagagtctgagccctcaaggaattcttcgacaaggcaacacggggagacgagccgccaccggagcgggtgaactccccgccctggtagcaccgacagaccgcgagtactcccacaggaagccacgaatcaattttcccacacacgagagtgggggcaggtgggccggctcctgtaatcgaccggacaccccggggggccaaccccaggggggcaaccacaacgctgtaggcaagtggtttgcccaagacacaacacaggctccggaggtacgccgaacagcgtgagagtctacacaagcgagccctcttccaaacagcgggtggggacaacccacccgtggcccacgcggtggacgaaacggcgcgagggtcggggttggcggggacgcggaacaggcggttgactaagcaagcaaattcgcgagggcccccccccgagaccgtccaggcgatggggcaaaaaacggaagccccacaaaaca

SEQ ID NO: 604896 - DNA, 210 bp, Homo sapiens
  misc_feature (51)..(51): n is a, c, g, or t
ggcggcggcatcggcagcatcttccctgacggtcaccttagggcggctggngtccggtgcagccacagcatcctgagaccttcggggcccggagcagcctccctttggtctgcttctctaaggttcaattcacagagcacttcatatctaccaggatatgttcctaaaacatccctgagttcaccaccttggccagaagttgtttttgcc

SEQ ID NO: 604897 - DNA, 926 bp, Homo sapiens
  misc_feature (16)..(16): n is a, c, g, or t
  misc_feature (18)..(18): n is a, c, g, or t
  misc_feature (32)..(32): n is a, c, g, or t
  misc_feature (47)..(47): n is a, c, g, or t
  misc_feature (52)..(52): n is a, c, g, or t
  misc_feature (56)..(56): n is a, c, g, or t
  misc_feature (61)..(61): n is a, c, g, or t
  misc_feature (63)..(63): n is a, c, g, or t
  misc_feature (71)..(71): n is a, c, g, or t
  misc_feature (75)..(78): n is a, c, g, or t
  misc_feature (93)..(93): n is a, c, g, or t
  misc_feature (108)..(108): n is a, c, g, or t
  misc_feature (120)..(120): n is a, c, g, or t
  misc_feature (131)..(131): n is a, c, g, or t
  misc_feature (153)..(153): n is a, c, g, or t
  misc_feature (162)..(162): n is a, c, g, or t
  misc_feature (164)..(165): n is a, c, g, or t
  misc_feature (171)..(171): n is a, c, g, or t
  misc_feature (177)..(180): n is a, c, g, or t
  misc_feature (190)..(192): n is a, c, g, or t
  misc_feature (199)..(199): n is a, c, g, or t
  misc_feature (209)..(209): n is a, c, g, or t
  misc_feature (229)..(229): n is a, c, g, or t
  misc_feature (246)..(246): n is a, c, g, or t
  misc_feature (252)..(252): n is a, c, g, or t
  misc_feature (271)..(271): n is a, c, g, or t
  misc_feature (275)..(275): n is a, c, g, or t
  misc_feature (279)..(279): n is a, c, g, or t
  misc_feature (284)..(284): n is a, c, g, or t
  misc_feature (289)..(289): n is a, c, g, or t
  misc_feature (292)..(292): n is a, c, g, or t
  misc_feature (295)..(295): n is a, c, g, or t
  misc_feature (300)..(302): n is a, c, g, or t
  misc_feature (331)..(331): n is a, c, g, or t
  misc_feature (340)..(340): n is a, c, g, or t
  misc_feature (342)..(342): n is a, c, g, or t
  misc_feature (351)..(351): n is a, c, g, or t
  misc_feature (363)..(363): n is a, c, g, or t
  misc_feature (367)..(367): n is a, c, g, or t
  misc_feature (903)..(903): n is a, c, g, or t
ccagtccgcctgcgtnancaaaagctgcaganactgccctgcctggngggangcanggaancnaaccctanctannnnaagctctgtgctgcnttcaaccctcccaancaacctcctccnaacaagtggancgctccctggcctgcctggaanaagaaaagnannaaaagnaaggannnnaaggaaaagnnnaatggangaagccaaancaaaaaaaaaaaaaaaaatnaatggggctgggctgtnggggangggtggggtggcaaggaanaagnaaancaacncttcnaancanaagannntgctgctgcaaaaaaaaatggaaaaagcntaacggcantnggaccaaangaaccaacaacntgtnggcccagagcccagcctggggatcccccaagtgggtgcatggcaggccctgcgcactggccctgctgtacctttgactctgccccacactttattctctggtcctcattattgaagcattatctagagaaggaaggcagcgcaggggcttagtccagccaagagagggatcctcttccaacatttgggaataccctgggatcattcagtgacttccctcctggttcagatgggaaaactgagaccagagagcagaggagagcttgttcagagtcataacttgagttggggccaggaccctgccacaacatgccctgaggcatcaacggtctgccaagacaccccagtgtggtctggaagctggaaggagaccccaggattctggaccaagtgtatctacaggagatgctggtgccaggcctgcagatccaagagcagagctgggatggaggcagggcccaggagcttcgggaccagagtctccatgccagcagctgagaccctgcccaggctcaggacacagtcgtctgcaggagngttgctgatactcactgaggtga

SEQ ID NO: 604898 - DNA, 543 bp, Homo sapiens
agactctttaatctagataatatcagctttgcaacgcagcagagcagttgcgctgaacacccagtaaatgtaggtgtaggagacaattaacatccactgaatgtttctctgacatcagactattcttttaatgtcattgcttttatgaagagttgcaaatagactacataatatacgtgggcaaaaaggcaattaagtgaatctcttgaaacactaaatgtataataaacagcatattatcaacatttacatgattcacatcaaaatgatgacatcctaaaacgtattccttttaaaggatagatttataaataaaatattacatatcttttaatactctggtacaatacttcatatactgcaggaaaattaattgtaggtctagtcatcagcttaatcagggatccttttcccattagcttttattaataacagaatcacaattaggtcataaataaacaggcaaattattaattacatgatttgaggcttaggatgaaaacttgtcaaaatcagtttgatatacagcaacgttatacaaca

SEQ ID NO: 604899 - DNA, 452 bp, Homo sapiens
ccgcttagatcatgcgaggagtgccacgtataagaaggctgccgcgtgccacagaggtgctgtagatgctgggcccaggccctaggtttgctcgtcacagtgtggggaagcccattcctctgcaggctcccattgtcatctgtatcagtttgaaaagcatcttggccggtgtggtggctcactcctataatcccaacactttgggaagccgaggcgggaggatactttgagtccaggagttcgagaccaacctgggcaacatagggagccctcatctctataaaaaacttaaaaattagctgggtgtagtagtgaacgcctgtagtcccagctacttgggaggctgaggcaggaggatcacttgagccggggaggttgaggctacatgagccgagatcacaccaccgcactccagcctgagcaacagagtgaggccctatttaaaaaaaaaa

SEQ ID NO: 604900 - DNA, 1366 bp, Homo sapiens
ggccgattctgcacctccgtccggcgctgccctttgattcgtgatttccatcttgcattctccggctgcatcgcgggcacctggctcgtgcaagcaggcaggggggccgatctgctatggcagtcatttcatggtgccccactccagcaagagtgccgctcgtttgctaacatttccagtgaacaaccagcagcaacagcaagtgatacggcagggctcatgctagcctatgcacacaatcattccacctcaaccccacgcagacctcatgacgtggacacaggacgctgggcatggacttctcgcaggagagcatctgccaaacaagacacacgaggctggacgacgcacatgcaagcagcgaatgcaacgcaggggaattccgaggtccacatcaagcaccctcacatccacccaacgacagcacagggcaagcagcaagctccaagccaaggccaggccaattctcccagcacagacaagccggacgtacatcattactgccccatggagcagggcaacacagaccaggcatccattgcaagcagaacacaacagactcaaaagcgcttcagtccaaggacgctagaggcgagacatcaggtcacaccaaagacgcacgagagggacatgacggacaccaggggaccgacaggggcattcggcattcaccacgggaacactcgtggggacgggaccgaggacagagctgtgagtgaaccatggcgggcgcggcgcgacttcacattgacggctgacgagcaagacacgctcgtgaacacaacgaaacacgactacgggaggccgacactgagcggactgggacagggacagcacgtggtgcaggcacacgcttggcacggcacacacaatggcacccccgggaaaacaggcatcagaggatgaatgcgacaccagcacagaggcagcactggaggacagacagacagtgcaaatggtgaacggccgacagaacgccagccgaaccacgcgggcagaagggggcaacacgaacggaaagagtgaggacacccccacaatctgggcgacaaggggaagacgacaaaccccatagcacaagcagccaccagcagcgcccgcagcaagagctagggcacatatacagcacacaacgacaccgagaggaaaagaggcgagggcagaaagagaaaagcgagagaagaaccacaaggaccaagagcgacacaggacagcaggcaagagacaacgacaagaagacagagcgacgcagcagacaggggaggcagaaaaaacgcaccgcgcgccgaggaagaagcagcaaaagcgaggcgccgccgagccccggcaaggcgagcaacgtaaagcgacagcgccgagcgaacca

SEQ ID NO: 604901 - DNA, 196 bp, Homo sapiens
taagcacctgctgggacttctgcccggcgcactcttcctccagctgtctagctactccttcacgcctcatccttgtccccatcaccttctccatgcggggacaacagctccgtacggcttcctgtggatgtctgtccccagtgcctcccactgaagacacttcctaagtctgtgctgaatgaacaaatgacagaca

SEQ ID NO: 604902 - DNA, 635 bp, Homo sapiens
  misc_feature (624)..(624): n is a, c, g, or t
cgcgtcggcaagcgcttacctactactgccccgagcttagccctgcactacctactatcgccctacactaccctctactacctccgtacatcccgtacgaccaggacagtcccgtacatacaccgtaccctcgagccgcccctaggcgacccggagtcgcccgtgagtaaaccggaagaaatgagttagaattagaagatacatctgattattaggctgcgcgtacttagtattacatccgatttttaggctgagcgatcccggagttacctcctttactcatctagtctaggttatctgacgatgttatctgatttttcggctgagcactatcctgttatattattcgattatatctggttacctatctcattaagccatctgatttttcggctgagcactactatctattattactattactatctgattggatatctgactatgctcctatagctcatctaaacctgtatctaattagataagtcgagtataaggaagagaagaggagaagataaagcgcccggaagtggttcggattcttactggactatgaagtttactccggtttaccactacctcacgggttgggtgaccaggccaccggtttgctcatcactaccncaccctgcccg

SEQ ID NO: 604903 - DNA, 826 bp, Homo sapiens
aaagagagagggtgctccgagggggtgtgggaggtacagattaccctgtgtgcaccatccgcactttgtctacctatggtagcccaaggtaatgtcacggcacagagtcatttagatctataacggtctggagctgccataccttgagaaatgaactgctatggcaccgcgatctgtcaacctctccaacgtcttgaaagaacaatgtggggcgaaaatgtgagaacatgcactgctgcaccctgaacctgcagacggtagaacacatggcagcgtatgtctcaggctggagatgctgcactaatttgcctggacgggccacctgttgatctgggaaatgtgcctagatggcgagtcgccctgacagatggatcacagcatgagcttcgagagactgccagtgggaacagcagtccgctccagagaaccggacacccagcacccaccgagacacagaactgcgtttggtggaagatcccggagcgcaacagacaattcggcgatgcgttcagccacgaacaaacccaggaaccgcgcgagcaaagccccggtgctcgaagccggcaccgccagcgccgtcaaagagactcaatagccacagattggcgttggcgcacactggccacagtgaatgatgagacccagcaaacaagccactgatccgcgaaaggaaccttccggtggtaggttgtgacgtgcgcgagctgattgaaccctatgatttgtgaccccgtaattccaagataggactttctctccctgccccagccctagcgggtgcgtggagaggaaccagacttcgggtacacaggaaatctcacaggtg

SEQ ID NO: 604904 - DNA, 808 bp, Homo sapiens
gggggcgcgggccggggctgctgtgggagagttcggattgctgcggcggtgctgaacgttgactgtgggaaattcggaaacaacgctcacatcttcctgtgggaaaccttctagcaacaggatgatgtctgcagtggactgcagtagccaccttcctctatgcggaggtcttagtagtgtcgcttctctgcattcccttcatttctcctaaaagatggcagaagattggcaagtcccggctggtggagttgtctagttgtcctatggcaaatactttctttgtaggtctctcattgtcatccgttgtgcgtgttaggtcatcgatgccgtgcgcgaaattcggacagtatgatgatgtgacggaaaagggtgaagctccagaacaatcccggggccatggatgcagttctacatgaaggctcatccgtgcccagaggaatctctagcatagctggctttatactatgctgctgtccttcctggtttagacgcctggtgactctcatttacgcagcaggtccatgctgctggctccaatgaggcttaaaaagcaggcggaaaagtgctagtggagggcgagccaagagagaaaatggagggagaatgcagccagcgcaataaaggagcagaggggacgggaggcagctgggtgtcgagaacgctgagggagaaagggaggaaaagaaaggaactgaaggagactgcaaacacggaaagatgggcccacagagaacaagaaaacgcaacgtggcacgggagctctggacccaggaacacctgtaggaaacaaacgcggaaagccggaagc

SEQ ID NO: 604905 - DNA, 257 bp, Homo sapiens
  misc_feature (172)..(172): n is a, c, g, or t
  misc_feature (176)..(177): n is a, c, g, or t
  misc_feature (184)..(184): n is a, c, g, or t
atttatagaaaggacagcctgatgccaaaattccaccaaatgcaaaactcacttttgaagtggacttagtggatattgattgaaatagcagtgcttcagctcctaaggatattagcaacaatgataaaacttggccttgaaagaaatttacacaactagttgagaacttgtnactnnttgtacnggaagagtccactggcaaattcacggcagtaatcaaatatgtttttcttggtcccagcttatgagagataaat

SEQ ID NO: 604906 - DNA, 105 bp, Homo sapiens
acggtcaggacagccgcccctgagttgcagctcgcccctgagttagttgcagctcgccctgagttagttgcagctcgccctgagttagcagctcgcccctgagtt

SEQ ID NO: 604907 - DNA, 191 bp, Homo sapiens
catcggacaggccaccgtatttcgcgaaaaaaacgttccccccgctatcagctcggacctaccggaagtgcctccttattacgcacaaaaaaatgaatactcccccggctagttgggacccaccttggtgggaggctggcttgtgggcctactaagttgacggggacgaagggctttgtcaacttcgtcaa

SEQ ID NO: 604908 - DNA, 286 bp, Homo sapiens
actatatagcttggcagatgttagatggcaccaggaatgtgctcacccagctagctcgcaaggaggtagtcatcgactctcgaaccagggaagcggacctaccagtggagtggccttcccgaaggatgtgatgacgttggtgactgcacgaatggcaatctgtatctaagacagctatgatctgctctaattgctataagtgaactgtagataggacttcacaaatgaaggccattataaagtaaagggttctgatatgacttaacaaggtgaaagggcatgagtt

SEQ ID NO: 604909 - DNA, 153 bp, Homo sapiens
ggcggggacctcacttgactacctcaatggaagatcctcactgaggcgtggctacctcccttttgtcaccactgctggaacgtgaaattgtccgtgacattaaagagaagctgtgctatgtcgccctggattttgcagaatgagatggccaca

SEQ ID NO: 604910 - DNA, 277 bp, Homo sapiens
tgtatgtattaagagagcctgaaatcaactctgtgcctaatcctctgagccaatgatgactttatagccttatcaaactgcagtaaaacttgcagggcagagtcgagtgaactgctgagatttgatgagctcatctaggctctcctgaagactgtgtcccacaagtagtacttctgtatagctgatatgatatggcttaggaagcagaactcgtttttcttattcaagcttgcgttgatgtcctgtgctgaaggtttcctggcaacgggccagcggg

SEQ ID NO: 604911 - DNA, 90 bp, Homo sapiens
ggatttgctggtgcagtacaactaggcttaatagggacttaatagggacaagcatcaagcacgcagcaatgcagctcaaaacgcttagca

SEQ ID NO: 604912 - DNA, 369 bp, Homo sapiens
  misc_feature (40)..(40): n is a, c, g, or t
ccgtcgtcagcatcatcactgtgtatgaagttgtacctgntctaggcgtttctattccgagttctctcgaacgagccatgaacacgcttgtgtatctttttgtttactccgcagctcgaacgtgtatgttctagtgtgggcctgattcacgatgttacctgatgttatttactagctactgaggtcagacaatccaagaccatcattatactaaaacttagagttgtttatggaagttcatagacacttcgccgaattggttttacctcctacatgggaacatgttcaaggaacccaggacgggcttactggtctgactcaactcttcccattcatcaatccctattcaccagtggcacggagagggga

SEQ ID NO: 604913 - DNA, 192 bp, Homo sapiens
ctgccttaggctcctgagcagctggtaccacaggtgtggtccatgcccggctaattttattttcaatagaaatgaggtcttgttaagttgcctaagtgggtttcaaactcctaagctcaagcaatcctcctgcctaggcctcccaacgtgttgggattacaatgctttttataataagaaaaccattttatt

SEQ ID NO: 604914 - DNA, 101 bp, Homo sapiens
taccgggtgtacatcccatgccgctcccgtccgtcacgatgacacccaccgcccgtgagggcccgtcctaggaatggagtgtggggatggtcgcgtttgta

SEQ ID NO: 604915 - DNA, 521 bp, Homo sapiens
  misc_feature (136)..(136): n is a, c, g, or t
  misc_feature (219)..(219): n is a, c, g, or t
ccccgcgccccgcgttgggttccattcggcccatcgtgggttcccccggttttgtgttcacaaaaaggtgcgccccgccccggtttcaaccttgaggagctcagggtggccggcatttccaaaaaagtggcccggnccctcggcatttttttggatcccaggagggggaacaagtccccggagtcccttcaggccaacgttcaacgggttaaggaggcnccctccaaatttttcctttttcccaggaagccctcggccccccaaaaaggaaacagttttttttaaaaatttaaattggcccccccacttgccgggccggtttttcccctccggaacgttttttaaaaagaaaaagccccggttctcccttaggaaaagaaagaattttaaaacctttccttgtttccgtttggcccgtgccaacccccggttttttggcattcgggcaaaaaaaaccaaagaaacccccaaaccggatttttaaaaaaaaaaataaaaccctccttggggcttgggttcca

SEQ ID NO: 604916 - DNA, 1169 bp, Homo sapiens
taacaccggtgaaaccccatctcgtgcctcccgggttcaagctgtgtccaggtagatcttgaactcctgacctcgtgatctacccagctacggctcccaaaatgctgggataaccaggggtgagccaaccgttgcacaaaccatcacatgtgcatatcctatatcgcttacatcatccacccagcaccctagagaaaacatggccaacataacaccacaacacaacccaaactatccacccaactgacacttagccccaatggatacacagttcacctcacagcgtgcagacattccaggccaaagggtccaccaaaagcgttcaccaggcgcagcagtacactaccggttcctggtcaataacccccaatatattaacccccttccatgtaccttacaagcaacgaccattctatctctctctacgcagactcggacatttatatacgctgtacctcgttgcacaacaaaacaactctgtgctgatccaccctgtggccttcccaatcatatacaacaattgcggactgacgcgaacacacccgagggaacgtgcaaccacgcttatcggtgggtactatgcgactgtacggccttaggttacacaccaggctatatccctatggaatacgggcctaaggaaaaaactctttggtggcacccacgggtttaactggtgtctacctggacaagggtcatggacatgtcagcttctttaacgcactcagccccatattctttaaaaggctaggataaactgccagggtgccacgtctccgattataccacacatgcgctggctcacagggatgatagagaactggtggtccaccacttacatatttcggggcggtcatcctctgccacaaacgtgcaagccacagctacttggcagacattcaaccctatatttgagatcacaatttcaaacgccgtgtttcacaaacaggacaaacacacacacgacacacaccaagcaggcgcgcgacgcaccggcaccaccaacgacaataagctcacacaacccctccagacaacccgacgcacacaacgagaaagccgcgggccaacacgcccgccccaaaggaccaccgcgcaagacaagcggcgcggtcctcccaacaaacacacccggcgaacagcaggcgtgcacaacaccggcggacctg

SEQ ID NO: 604917 - DNA, 536 bp, Homo sapiens
cggagggaggggctgggggatgtcagggccacggagcgcaaagcgcaaaggcccgggcgccggccctgccgccgccgccagttcattttcatagagtcgcccgagcttaacgtcgccttgcacgtgttttctaagctccacaggtggctttggggtacacgggcgcagctcaccctccttcccgcccgctccccggccccgagctcgaggttaaacagggccgcggagtcggccgggaaggggtcccggcagcccggggtggggggcgcgcggcggggtcgagcggggtctggggggggcgcccacctgcggagaagtcgtcctcgcggtcggagctgtgccggctgccgtcgctgtctctctccggcgagctgtggccgggcgagtcccgctcgggcacccgcaggaacctgcggcgccgccacgggggcaggtgctcgcgcccgggggtctcctccgcggcgaggggcgagcccgggcggcccttggcctcggcctcccgctgctccaggtcgcgggtcccccgctgcggccgc

SEQ ID NO: 604918 - DNA, 385 bp, Homo sapiens
  misc_feature (75)..(75): n is a, c, g, or t
ggcctaagcctccccttgccctcttgctcccagactcctagaaagccaagaggccgggcgccgccttctaagaanaaaacgagtccgcagagggggctggtgagggccgtggcccttccctgaagtttgcacgtggccccaacacacagagcagcctgcggagaagtcgtcctcgcggtcggagctgtgccggctgccgtcgctgtctctctccggcgagctgtggccgggcgagtcccgctcgggcacccgcaggaacctgcggcgccgccacgggggcaggtgctcgcgcccgggggtctcctccgcggcgaggggcgagcccgggcggcccttggcctcggcctcccgctgctccaggtcgcgggtcccccgctgcggccgc

SEQ ID NO: 604919 - DNA, 473 bp, Homo sapiens
  misc_feature (182)..(182): n is a, c, g, or t
gcccagcccctgggaaaaaaccgggggtttaggggggtgccctaaccccccaaggggggggtgtgacccaaggggttttcccaagggggaatttttaaaattccccgggccccaaaggggggggggttggaaaacccccaaaaaaaaaagggccctttggtgggagggccacccgggggccncccagccctagggggggtttttttaaatcccaggaagggcccccctttttttaaggggcaccccttcaggggcccctgggggttttccccccctaccccaacctcctttgggaggggggggttgggggaaggggggggtttttcccccccccggggaagggggggggtaatggggaccccccccatttttttgggggccaacccccccaggggtaattaaaggggtttttaaaaattggcccccacccccccggggaattttaagaaaaaaaaaccggggcccatttttta

SEQ ID NO: 604920 - DNA, 236 bp, Homo sapiens
tattacaaagaaggacacacaaattttaaatgcattttctatcaaactgaattcaccatcttctgcccaaattcattccccttctttcaaccctggcctgaaaaatctatctgagccagaaaactggaagtcattctagattcctcccttctctcccctctcacctattgtcactggcctcctgcccccatcccctgggtgcctcacctccacccaccaggtcaggtgggctacgt

SEQ ID NO: 604921 - DNA, 383 bp, Homo sapiens
  misc_feature (298)..(298): n is a, c, g, or t
  misc_feature (314)..(314): n is a, c, g, or t
  misc_feature (323)..(323): n is a, c, g, or t
aatgctgaatgttccgttgtgtgtgtatactccattcacattttcaataagtttgttgagtttgggttgaaatcttatatacagaaccgtgttgtggcattcagggtgattgaaaagtaagtactactctagggcagtgacttcaggcttttgaagacattaccttatccataaaacatgcttgaccaaattctcaatatatgtatattgatgtctactactatcgatccagatgttaaacattgacaaaatttagtttcttctccttactttccttcttccccttctttcctctgcnttcacctccacctgcncccatctcncctttcttcttgtcccttctcctttccctctacttcttcccctgtcactttctgggtcct

SEQ ID NO: 604922 - DNA, 674 bp, Homo sapiens
tcctcggtgacaaacttaataaaatttggcatcagtacagggcatctcttatggcatactaaaatcccaggatccaggcggggggtaaaggggcaacggcaaattgggggtatctgggtcccccaaaagtactggccggctctacccctgactctgcaatgggctgccagggggatcactcctccatgggagccatcccgctccagggccaaagcgagagcatgggcagtgaatggcagacactcttcctgggtcatgcctccccggtaggtagcatcaacatagccataggattgtaggaagcccccgggagcctccaatgggcaaaggagactggcctataccatacataacccccacatagggcactggatgtacacctggccctcctttctgagagggtgccccagcctggcgatgagatagattccccgccatacagggttctccccgggtatcgggtaacactatctccttaaaagaggctgggctggctggtggtgggcaccaggggaggcccatccagtccaaggctgggggaaaccgagctgggtaggtggacagcatcagcaacggccggggtaatcagcagttgagcctgagcgacagcagaaaaggcggcgtgaatcaggtggtcagctggtcagcactcgatggcgatgtaggaccccagt

SEQ ID NO: 604923 - DNA, 876 bp, Homo sapiens
  misc_feature (369)..(369): n is a, c, g, or t
  misc_feature (373)..(373): n is a, c, g, or t
  misc_feature (391)..(391): n is a, c, g, or t
  misc_feature (399)..(399): n is a, c, g, or t
  misc_feature (403)..(403): n is a, c, g, or t
  misc_feature (417)..(417): n is a, c, g, or t
  misc_feature (420)..(420): n is a, c, g, or t
  misc_feature (422)..(422): n is a, c, g, or t
  misc_feature (428)..(428): n is a, c, g, or t
  misc_feature (475)..(475): n is a, c, g, or t
  misc_feature (486)..(486): n is a, c, g, or t
  misc_feature (707)..(707): n is a, c, g, or t
ctgggaaaggtgaacgagattgccaagcataaagcctctgtagaagatgcagatacacaaagcaaggtgcaccagctatacagcgctggagccccattgcctccaccctccctgagctggtgcagagacttgtcaccatcaagcagctgcacgagcaagccatgcagtttggtcagctcctgacacacttggataccacccagcagatgattgctaattccttgaaggacaataccaccctcttgacccaggtgcagacaaccatgcgtgaaaacctggccacagttgaggggaactttgccagcattgatgaacggatgaagaagctgggaaagtgagcacatttgggagctggagaacaggggttancccnacccctgtgaactctgtnaacagctnacanagggtttccccttnacnanaactcnagcatccccatcccatttgacactgggggcaagggttcttcttgcangtggggtttanacccctcccctgatgaatacagagtggtagctaggggttggttatcatcagaaggtggtctcccctcaggcctgggggataaggacgtgggcccagccacatgccaactcatgtccaatactgctttgcctggtgtggggaaggattgggtcttgtcccccaacacagcttctgtggctgactgtaatactgtacaactgtttctgaccattaaaagctgntgaactctggggggcctctgctgtgtttcctggggaggaagcagccctaggaaataaatattcatttgtcataacaggcaatttaagcccctttatactccaaaagagggatttaaattgtaacctgtttttaccaaagaactaaataaaaaatgagtacagagccaga

SEQ ID NO: 604924 - DNA, 101 bp, Homo sapiens
tctctgaggatgatgatcagagacctgaatgaaataaggaagatttcatctgggctaatgcatagaggaagagtattacagacaggggcaagcgggcgcta

SEQ ID NO: 604925 - DNA, 273 bp, Homo sapiens
tgatacatataagtcatccaggatatatgaagaggtactactagatataagaactttacgattcgaagacgaaagctactcaaatacagggaaattattactattactagctagtaagagaaatgaatgagcctacagatgataggatgtatcatagtggtgtatgcctcggggatagtccgacgtaacgtcggagacatccggcataggccgcaaaaagtgttgtgggcaacaacgttagattgacgccgcataaatatgatagtgcaaatg

SEQ ID NO: 604926 - DNA, 125 bp, Homo sapiens
gtataacggggttgttcattgaggacctccgcctgcatctatgtacgacccatctgtccggtccaaaaagaagaattgtactcttagggagttggggatcccaatgattggtgccgcacatacag

SEQ ID NO: 604927 - DNA, 1155 bp, Homo sapiens
ctaagtcctaaaatgacattttgctaacattcccattttttctaattttaggattctataagcgccaataattttgtgttcctggtgaccatcccgaccattagagttcttgacatgctaaaatgttctatgttatcttatttcggtattcggctctttcttttcataaatctgactaataccatcataccagtcaaaattaccaaaatctgttgtctttgctaaacacaacacttctattaaactatctgggataactttcaagactttatgacagcactcatccagaaccatgcttcctacagaaacagcctatcctgaatctgccatttgtctccaatgccactcttaaatatttgccaactcctattactaagtctcttcaaaggattaccagcagtcttaatttcactttctgtcaagccactttgtacttttcttcactaaaacatggaaatatattttgaacataagcaacaagacaaattttacagaacagtttgaaacaactataggacttccagtgattaggacatagaaaaatatttaaagaattcacacttttttcccttttatattctaggtatgacagaatggtttcatcattttataattttgtagacagaaatacacatactactcatacatacacttaaaaatgtatatgtatttctttgaaaagatgagcatcacttatgaggaagcaaaataatagaaaattttcccaacaaagaactacaaattcctttaaaagcaatattcttgaactgctgtgaagacatacaaccacaatgctacataactttaaaatcacagcagaccttagaaaccatctaatctagatggtccattttttcatgtgaagaaattgaggattcaagttgaaaatctttgaaattaaggaaatggcagtagtcagactgtaaacaaagtgcaagaaaaacacatgggctttgctgttaaaaacaaaacaggccaggtcaccacaacaaaactatgtgaccttcagcatgttactaagcttttttcggggttggggggtcaggggagcacttcaccttctttgtctttcataaaagtataagaactaggggccaggcgtggtggctcaggcctgtgatcctagcactttgggaagctgagcgggcagatcac

SEQ ID NO: 604928 - DNA, 1101 bp, Homo sapiens
ctaagtcctaaaatgacattttgctaacattcccattttttctaattttaggattctataagcgccaataattttgtgttcctggtgaccatcccgaccattagagttcttgacatgctaaaatgttctatgttatcttatttcggtattcggctctttcttttcataaatctgactaataccatcataccagtcaaaattaccaaaatctgttgtctttgctaaacacaacacttctattaaactatctgggataactttcaagactttatgacagcactcatccagaaccatgcttcctacagaaacagcctatcctgaatctgccatttgtctccaatgccactcttaaatatttgccaactcctattactaagtctcttcaaaggattaccagcagtcttaatttcactttctgtcaagccactttgtacttttcttcactaaaacatggaaatatattttgaacataagcaacaagacaaattttacagaacagtttgaaacaactataggacttccagtgattaggacatagaaaaatatttaaagaattcacacttttttcccttttatattctaggtatgacagaatggtttcatcattttataattttgtagacagaaatacacatactactcatacatacacttaaaaatgtatatgtatttctttgaaaagatgagcatcacttatgaggaagcaaaataatagaaaattttcccaacaaagaactacaaattcctttaaaagcaatattcttgaactgctgtgaagacatacaaccacaatgctacatttcatgtgaagaaattgaggattcaagttgaaaatctttgaaattaaggaaatggcagtagtcagactgtaaacaaagtgcaagaaaaacacatgggctttgctgttaaaaacaaaacaggccaggtcaccacaacaaaactatgtgaccttcagcatgttactaagcttttttcggggttggggggtcaggggagcacttcaccttctttgtctttcataaaagtataagaactaggggccaggcgtggtggctcaggcctgtgatcctagcactttgggaagctgagcgggcagatcac

SEQ ID NO: 604929 - DNA, 215 bp, Homo sapiens
ctcattccaagccattggctgctgttcctgaagagagagctggtcagctcaactgaaagccgtttcttgtaatcttgtggcttgtcctcagacacttcggcactattacagcagactgcatatgtcgccacaccgtcattcctagagtgaaccccctccgggaagatgtaaaaaaacctgtcccccccacaaaacaaaaaaaacaaacataaaaa

SEQ ID NO: 604930 - DNA, 1420 bp, Homo sapiens
tttttctttttagttgcaggcgtttcagtctgtttgttgtttttcttctttttctcttgttgcgtgtgctttgtttcgtgctgtgcagtgtcttcgtctggttgtattgtcctcttgtgtcttttttccattctctgtgttgtgtcctctgtctgttcgtcgtgtgtgttctcttgcttgtttgtgtctgtgcctctgtctgttgtgttcttcttctgtttttttagtctcgcgtttctccgcgttctttcgttgttcctcgttttgtctcttcctgcgttcctcgtttttcgttggcttcttttgtgctgttgtcttcttgtatcttgttgcggtttgcctgggtctgtttgttggggtcgttttctggttgtcttggtctctgtcctgtcgttgtgtcgtggtgtctgtttggtctggttcggtgtgctttctgtcgtgcgttgttgcgtgtttgtggctattgtgggcgtattcgcgtgtgtggtcgcttgtgggtcttccctgtgtcgtctgtgttttgtttgtctttcttgaggtgtcgtctcctggtgtgtctttcttttgggattgtctgtggaggttccttgtcctgtgctcgggtagatgtcgtaggtgtgtttttgtgcgtggtgatgtggtggtttttgggcgtgaccttcggtgtcgtcttgtttcatctcttcgtttgttttgtggtctgtcttttaatgacattccctgtgtgtctggtttgactctattgctgtctcgtgtcagctgcttgggtgtgtcttgtctccaagtgtccttgtcgatctgcccggaggatgactagcatggattgtttagtccatgaagtgattggaaccaagatcaatcgataggtttacatgtatggcccatctttacttagtgtgatgattccatgcatgggttcacatgttaccttgctatgtaatgttgtatgcgcctgtatacgatgatccttgatgatgaaggttggagctttacaatgcgcacctgtgaccaattatgatggacgtctagggctcaattatcatgaatgacatgagctctatgatgtcaggcctggctctcgcatatcggtagtcagtgggtggctcaagggccagcctccatgcgctgctctttctgtaggttatttattagtattggatgcacggcgaaggtctgggagtgtctttcccacctgcccttgcccatggtggggatggatcattctggtctgatgtcatgacgatctgtgcacactctctaaacagcttgtgatgcaagtgtgagtcctattgtgttatcttgaccttattttggaagtatttgaagtggcctaggaggaaacccagaaatgaatccaggggtatgtcatcacgttttttcatagtcaaggtcctcaccctgaacctccacaggatgctca

SEQ ID NO: 604931 - DNA, 518 bp, Homo sapiens
aaagagacagaaaaagatgtaaaaattgaaagagagagaaaacagttttgcttagaccaactctggtaagtaatttaagccccttaaaattgtactgactgcaaagcagttcataattatacatatctcttaaattataggcttcagaattcagtcattattctatcataggaacttgtgaattactttctccaagattttatatgacaccttgagcttgttgcgttgggagaatttcagtggaagagcagaaccaagtaatgccatcctcatctgagtccctaactgaatgctctacgtgattgcattttgttcatttattcgacacttctatgtgatgggtctagaacaatagacaagatctgtgctgttagagacttgccctttaaaggaaaatgaagaaatgattgcataattaactgtagagagtaactttgagagtggttaccaaagagagtctatgaatagatcctcatctgtaaatgaattattaggagaataaaaattccctcttccta

SEQ ID NO: 604932 - DNA, 468 bp, Homo sapiens
  misc_feature (4)..(4): n is a, c, g, or t
  misc_feature (49)..(49): n is a, c, g, or t
  misc_feature (60)..(60): n is a, c, g, or t
  misc_feature (459)..(460): n is a, c, g, or t
attncgaattttaattcgactcactttggggaaatttggccctcggggncccaagaattnggcccgcaaattttttttttttggagtagagattggaccaccatccttagcccaacacggtgaaaccctgtctctacttcaaaatacaaaaattagctgggcatgatgtctatcaagattcatgaaaaccagccaggcgcagtggctcgcacctgtaatcccagcactctgggaggctgaggcgggtggatcacaaggtcaagagatagacaccatcctagccaacacggtgaaaccctgtctctactcaaaatacaaaaattagctgggcatggtggcgtgcacccgtagtcccagctactagggaggctgaggcaggagaatcgcttgaactggggaggtggaggtcgcagtgagccaagatcacgttactgcattccagcgtggcaacagaagcgnntccgtctc

SEQ ID NO: 604933 - DNA, 729 bp, Homo sapiens
  misc_feature (37)..(37): n is a, c, g, or t
  misc_feature (106)..(106): n is a, c, g, or t
  misc_feature (118)..(118): n is a, c, g, or t
  misc_feature (175)..(175): n is a, c, g, or t
  misc_feature (180)..(180): n is a, c, g, or t
  misc_feature (192)..(192): n is a, c, g, or t
  misc_feature (198)..(198): n is a, c, g, or t
  misc_feature (203)..(203): n is a, c, g, or t
  misc_feature (214)..(214): n is a, c, g, or t
  misc_feature (219)..(219): n is a, c, g, or t
  misc_feature (223)..(223): n is a, c, g, or t
  misc_feature (228)..(228): n is a, c, g, or t
  misc_feature (246)..(246): n is a, c, g, or t
  misc_feature (269)..(269): n is a, c, g, or t
  misc_feature (280)..(280): n is a, c, g, or t
  misc_feature (304)..(305): n is a, c, g, or t
  misc_feature (315)..(316): n is a, c, g, or t
  misc_feature (326)..(326): n is a, c, g, or t
  misc_feature (337)..(337): n is a, c, g, or t
  misc_feature (341)..(341): n is a, c, g, or t
  misc_feature (353)..(353): n is a, c, g, or t
  misc_feature (355)..(355): n is a, c, g, or t
  misc_feature (357)..(358): n is a, c, g, or t
  misc_feature (361)..(362): n is a, c, g, or t
  misc_feature (380)..(380): n is a, c, g, or t
  misc_feature (388)..(388): n is a, c, g, or t
  misc_feature (417)..(417): n is a, c, g, or t
  misc_feature (424)..(424): n is a, c, g, or t
  misc_feature (462)..(462): n is a, c, g, or t
  misc_feature (516)..(516): n is a, c, g, or t
  misc_feature (556)..(556): n is a, c, g, or t
  misc_feature (576)..(576): n is a, c, g, or t
  misc_feature (712)..(712): n is a, c, g, or t
gcacccctgagggacacaatgtccctccctgccggcngtcccacctccctggttcccaacagcattgaaaccccccacttccctgaccagactggcattttttaanattttgcataanactatttcttccatagacttcaaacaatcaactagccaagtgaattatgggacatcnaaacnaagtttaatacnaacccnaatgngtgactgcggnttacnaagngcccngtatcacctgggggagcnttcagtagccatccactacaacngggcccaaaanataataacaataataataataatnnggggatgaanncccaacagcntgtggaatggntaanatcacgtaagancngnnatnnggggggggggggtccccnacagccgngcctgtcccagcagtgaaaatgcccgccncccagcngggctcagaaagggctggggccctccaggcagagggcngagcgcagggggctcttggaggacactcaccccatggtccatgggatgcttctngcttccttaaaaacagtagggcatccgcattgtataagtnggtggagaccctagtgtggntcttttgaaggatatgggaagggaggatgacgaactagagaagtgggaggggaccaaaatcactgaggtcccagaatatcatagatttgggtataggattggggtcactaagaattgagcaccaggaattccagcntcttcccattaaagaaa

SEQ ID NO: 604934 - DNA, 103 bp, Homo sapiens
atagattgagttaggtcagatctctttcactgtcataatttcctcacgcaaccaacgcatgcataatccttctaatagctatcctcttcaacaatatactctc

SEQ ID NO: 604935 - DNA, 243 bp, Homo sapiens
  misc_feature (123)..(123): n is a, c, g, or t
  misc_feature (180)..(180): n is a, c, g, or t
  misc_feature (240)..(240): n is a, c, g, or t
tagaggaccctgatactgtggtgtacccgtcatggaatcaagtgaattcatcacgctgcatggattccacttcattcactcgggatgcaattcacaacgctgcatcggatccagtgcattcantcatgcttcatggaatccactgcattcaatcgggatctattgggccaagctgcatgnaatccattgcagtcactctggatgcatttcacactgctgaatggactccagtgcattcantca

SEQ ID NO: 604936 - DNA, 424 bp, Homo sapiens
cgacagaatttgtaaaagacatcttgtttataagccgcaacggagtactcgtactgattgagaacatggcccgtgactgtagggagtacgcgcagactcgctacttcaggggcggatgctgacaatgcgcgctcctctttggcccacggtcctgctgcggaacctcatcatcttcctgcaaacgctcaaaaacatctttgagccacacgtgcgcgtaggagacgcagccaagatgaatatccccatatgtggcatcgtggacaccaagttgaaacccctgcctcatcaactaccctgtacccggaaatgacgaactctccgattgctgtgcacctctattgcaggctcttccagaaggacataacccggaccaaggagaagcgacagcagttgaggctctctatcgccatcaggcccagaatga

SEQ ID NO: 604937 - DNA, 285 bp, Homo sapiens
aagagctttattgtagagggcgagtgtgggggggtcatgccatgtaatcacagcaataggggaggcccaggagggcggatcacgaggtcaggagatagagaccatcctggctaacatggtgaaagcccatctctactaaaaatacaaaccttagctgggcgtggtggcacacacctgtaatcccagatactcaggaggctgaggcaggagcatcgcttgagcccgggaggtggaggttgcatgtgacccaagatcgtgccactgccctccagcctgggcaacacg

SEQ ID NO: 604938 - DNA, 147 bp, Homo sapiens
acccacgcgcggaccgggtgggaacaaggagacttgcacccgccacctgttcccgaggactttctctggcaccgacctgagtgtgcagcgtctgattgacggccaggaccggagcatttcatgtctgaggtccggtcgtgccgaggg

SEQ ID NO: 604939 - DNA, 240 bp, Homo sapiens
cgagctcggtaccctatttttgcattattaagacataaggaaaccaatttgatacaaagcatgagaggctattcatctggctgcctcagaaagcagatcatggtcgataggtgaagtgacttctgcctgcttactgtatcaaatgacttctgtaacacttgctatgccatcttatatttaaccttttaaaaaatgactgccagttaaactcagagctcatatatagaacattataactat

SEQ ID NO: 604940 - DNA, 743 bp, Homo sapiens
  misc_feature (34)..(34): n is a, c, g, or t
  misc_feature (82)..(82): n is a, c, g, or t
  misc_feature (97)..(97): n is a, c, g, or t
  misc_feature (102)..(105): n is a, c, g, or t
  misc_feature (126)..(126): n is a, c, g, or t
  misc_feature (130)..(130): n is a, c, g, or t
  misc_feature (175)..(175): n is a, c, g, or t
  misc_feature (235)..(235): n is a, c, g, or t
  misc_feature (238)..(238): n is a, c, g, or t
  misc_feature (268)..(268): n is a, c, g, or t
  misc_feature (275)..(275): n is a, c, g, or t
  misc_feature (278)..(278): n is a, c, g, or t
  misc_feature (292)..(292): n is a, c, g, or t
  misc_feature (295)..(295): n is a, c, g, or t
  misc_feature (391)..(391): n is a, c, g, or t
  misc_feature (396)..(396): n is a, c, g, or t
  misc_feature (404)..(404): n is a, c, g, or t
  misc_feature (425)..(425): n is a, c, g, or t
  misc_feature (495)..(495): n is a, c, g, or t
  misc_feature (565)..(565): n is a, c, g, or t
  misc_feature (589)..(589): n is a, c, g, or t
  misc_feature (636)..(636): n is a, c, g, or t
  misc_feature (639)..(639): n is a, c, g, or t
  misc_feature (729)..(729): n is a, c, g, or t
taattcttataagtttatacatactgcataatgnctttgaaaacagtataactcaaaataatagaaaacaaaattcattgantgacgtcctactganttccnnnnatttctgtgacaacacaaatntaanatttaataaaatattaccttttcttagcaaaaagtttcttaagtnagattatcctttcatgttttaaatgaagcttcttctaaagaagtccttttattcacagtngcnaatttctttttaacacatacaatgtatacnacatgcnggnatcaaacacctganggngcgggaatcttatgaatacagccagggcaacagtgtagagaatcatgaacaaaaacatcacagtgcacacagaaaacattttggcacacagcacanacatnaacatgtnggtctttcaattccccctganatccataacaaaatctttctccattatattcttctggggggatttcttgggaagcatccgaagggaacanatgatggtaaggccgtgccaagtggggagcggagaccaaagtgagagcacagattttacattcgacaggnagctcacagtactttgcccgaaantgtgggcagaaatagcctcctaatgtaagccctggctcagtattgcnatncaaatgcgccaagctgaaagagggttttgcatcctggtcagataaagaagcaatggtgttctgaggaaatcccatacgaataagttagcnttcagaacttgagc

SEQ ID NO: 604941 - DNA, 681 bp, Homo sapiens
  misc_feature (66)..(66): n is a, c, g, or t
  misc_feature (75)..(75): n is a, c, g, or t
ccccatgggagcggtaccgaatacaaacctgggtgaaaaggaaggtttgaaattaaataaccctgngcttgcttntccaagccttggaacctaaaaatttgttgggcacaccagtaggtgctcaaccaattaatttgctcctgctgtatttaccagggccaaaacaagctcttgcaatgcagtgggtcctcaaaaacctttatcctttcagtgctgtcatggccatagtgcctaccacagggcaggcatataatgttattcccttagctcacagcggtacccatggttcataaaaatgtgtgtggcccatagtaggtggtcacgacatatttgttttgttcattcctgtatctccagtgcctagcacttagtaaccccttagtgtttgttgaatgaatgaatgtcgggatgaagcattgttctgttcctgaacccccaatatctcccataacagaggtgcccacaatatggggagagcagtggggcagcgcaaaagcctgtgccagcctgtgtgtttggatgcctctttaggaacagcagcctcccagcctgcctgaatgcagggcctcctccctgcctgccaggaagcacatggctccaacgcgttatgccagcctggagtttttttttttaaaataaacctttttcctaattattttttttttttttcacattaaacag

SEQ ID NO: 604942 - DNA, 221 bp, Homo sapiens
ggggggggtccttcttttttcccccccggggggcgcgggggggggttttcccctcttcgcccccccccccccggcccggggggccgggggcccccctttggggccccttttttttttggaagagaaaaaaaagagttataatgggtaaaagatagggaaaaattcaagcgcctttattgtaacgcgatgcataattgtgagcaaataaaatcgaagaatag

SEQ ID NO: 604943 - DNA, 101 bp, Homo sapiens
  misc_feature (48)..(48): n is a, c, g, or t
ccgtcgatactcagatctatataagcatgaaagagtacaaaagatgtnggagtcagtaagcccatacctaaattaaccgtaaagcttcaaggacttttggt

SEQ ID NO: 604944 - DNA, 198 bp, Homo sapiens
cccccccaaaaaattttttggggggcccccggggggtttcccccctccccccgggaaggggccccaaaaaaacccaaatttggggggggctttggccccccccccaaaaaaaagggggttaaatttaccttgggagggggggggggggggggggtttttttttccccccccccccccccaaaaaaaatttttttttta

SEQ ID NO: 604945 - DNA, 303 bp, Homo sapiens
gtacgtggaaatgtgacgcttctggaaatacacaccgtccacctgactgctgctaggcactggtggtggtgtgtctatcatcattgtccgtgcaaatgtctcgtgacttgcggtcccggattgccgttatcgtgttgagttcctgtagtgcacttcctcattatccttgctttaccttaaatgagttacatgagtgtcgagttttatgatgccacttgatgtatctgaattcctgtagcacacactcataggtatgattttttaaattaaagaattcagaataaacattttttgatccacttg

SEQ ID NO: 604946 - DNA, 171 bp, Homo sapiens
acctctcagcagaatcgtcatgttttctgatgcaccgggctgcttcatgcccaagatgacttgcgaggggttctcaggagctgtggacttaagccatggcaaagcccgactgtctttctcagcgtactcctgccaagtcagtaggtgttagtatggttcgcataagttcac

SEQ ID NO: 604947 - DNA, 126 bp, Homo sapiens
ctgaagcacagttggagctgtacctttgtgcccttttagccatgactggatgaagctgggacacaggacaccaagtccctagagcttgcacactagcatgtagggccctggaacctgtgccacagg

SEQ ID NO: 604948 - DNA, 530 bp, Homo sapiens
gagcggggtgcatcggggcggggccggcgatggcggtggcccgggttgtagccgccgcgctgccgcgaccccgccgcgacacctcagaagcaggaaccgaagtcgtcgccgacgccgacactgcctgggtacttcggtcggggcccgcagccatggaggatttcatctgtgatctcgtgacgacaagcggctctgagagctccgaggggcagccacgaccgtggccggtcgctggagagacgacgcagagccctgtaagactgaaactccggcgcgcatgacccgacgtgacaccgagacaggagatatatagcatgtgtcaacatcatggctcggacgttgccaggtccgcacacacagcttcctgagacatcaacttgacatccatcatgcactaccacgtgagttacacatgtttgaatatctacactgcactccagcattaccaagcagataagactagggcatatacaagtgctagagacaaggaagcatggcacaccaagaaatactgatatctggtgacggac

SEQ ID NO: 604949 - DNA, 410 bp, Homo sapiens
gagagagagagagagagagagagagagagagagagagagagagagagagagagagagagagagagagagagctatagagaggtctctcctagcgcacgccttgccgtcgtcccgtacaaatgcttcggttacccacagtctttcgccagatgagaccggtgttcatggtactggctcctcatcttactcttccttatgccaccgatgtctttggtgcatatgccctagccttaatgcttcattgtgtctaccttttacccgctgctgtggccgttactttggggccatacggaataacagtgattattgcgcctatttgccgaagtcctccctgctcatacgatgctgctactgtcttatagtccattgactctttcgatcttcatcttcctttgagctctcttgttctc

SEQ ID NO: 604950 - DNA, 875 bp, Homo sapiens
gactgatatgatctactagcgtaaacaactgatactaattcattctaccattccaggcataacgtcatacctaactctaaatgtgctgtgccgacaactcacagaagcgaggtaataaacagcacgaggtatcgaagtatggaaatcgcttgaagactgagaaagaaatctatgacgagataggtcatatgagtaaggggagataaaagaatgttcaacgtatattagtggtgaataaattgattgttagtattgagctatctacgtttatactataaagtagtgggctagaaaagtgtgctgcatgcttttatggatgagatgtgactattgaacgtaggattatgagtcatgcaattatagatgggggagacccttagtgattccaatgaaaattgatgagttgttgggacatgtccaacggataatcccacattggaggggctaagaaataagcaccatgcaggtggtgccccaaaggatagacctgtggtggtggcagggacaggtggcactactaggatgtgacagatcttgaagtagactgtggagagatagaatggaagagttcggaagatgaccgagtgaggaaggatggtggagaaggtactttggtgtctagtactgtataagcgggtttgtcacatggcaggtggttgcaacgttccgaaagttgataaagtaaaatttgtgtgatagaggatgatgacggaagaattgagtggaagagggcggtgactgaaagacgactgatgaagaggattagaagattgaagaattgaaaaagagggacatcgaaacggatggaatactccaaaaaaatagtaaccttccaaaatatcacattgggtcttacggaaggaactctgaaaacg

SEQ ID NO: 604951 - DNA, 107 bp, Homo sapiens
ttaccgcgctgagggggaagcatggttatcgcggaggtcacgcgaccaaagacgggcaaggtgacggtccgcattccttacacaggccacagctgggagggtgtcat

SEQ ID NO: 604952 - DNA, 321 bp, Homo sapiens
  misc_feature (310)..(310): n is a, c, g, or t
tgatctcctagtaaataattgaagagtttgaggtagttccccagtggaaaggtttctagaatagagatttgtctgaaaatgttcagaagagctgttcagtattctactcagttgattttatggagggagtcataggactctcagtgttggagtaactagttgtgttgtagcctgtcatggctttgggagtgatttgttctttgctgggatgactagataaatcagtaaagacagaattcagggaaaaggggtgaggagatgggaatggggggagggagactccaggattttaaaggaatgcccctgtgcntaggcccaccg

SEQ ID NO: 604953 - DNA, 393 bp, Homo sapiens
tcaattgctatcatttattttgtactacagcgataggcttcaaactatttatacgataataccaatcctaatttcgattatttatcttgctccaacgtgtttcaattcattattgtttctgtaatacggaatgaattctcttgtcttgacaaaccaagcatggaaatttccccataagagacaagaagacgttcacatgattttccatcttcgatctcatagtctgtctctgtgagagaactttgagttcttaggaaaggcatctgttacctccaaaggagggccactcattacagttttgtgtaatattacagtaaggtctgccaagaaggaattcaaggaaattgggaatgacgacactgtgatcccaggccactctcttgagcagaggtt

SEQ ID NO: 604954 - DNA, 135 bp, Homo sapiens
gacactaccggatatattaagtataaacatctattatacttttgtaactctacagtccataggggaaaatgtaaaatgttactgtttgaggtgtggggcactttcatttccttgggtactacgctttggcagcgt

SEQ ID NO: 604955 - DNA, 312 bp, Homo sapiens
tcggcccggggttgatgttgggagacttttttccttgaaaagcaattgattttgcctttgttaaagggctttgctggctccccatgtactacccagtgtcccgcatgggggttaggctaaattttttgtaattgggcttaggtgatttgtaacccgggtatagggtttttaaaaagtaggccccctttttgccccctgtgtttttttttttatttagtttttgtataccccaaataatttttgaactttgtcttccccctgtaaaacttttgttcttttctccttatggtaataaaaagcttttttacccca

SEQ ID NO: 604956 - DNA, 158 bp, Homo sapiens
gttgggtccctgagtgcttcctcgtgagcattgggtgccagtggttgcccaggcttccgtgagtggcccaccttgggtgggaggctgcaccgctggcatgatcatgccctcggtgcccacacaggtctctgagcggcccctgatgttcctgttggaca

SEQ ID NO: 604957 - DNA, 192 bp, Homo sapiens
  misc_feature (9)..(9): n is a, c, g, or t
tccccaggntcttttcccctcaaagcactgcttaagctgcatcccataagtttgatatatagtatcattttcattatgtctcaaaatatttcctatttttttttttggggggaaatccccttttgcccccagggttgtggggtaaccggggcccctggaacctttggcctgggggttcaagccatttccctg

SEQ ID NO: 604958 - DNA, 409 bp, Homo sapiens
gttcacacgattgtaatgaagtagaggcgctggacgccctgtggggcaagatctcaaggacgcctgcatcatcggcagcgtcgctacccagcatatctacggcttgctgtttcgcgtgttgtggccgcgtgtgtgcctggccgcaccatttgtacgcaacgcaacgtggcgttccccgtaagacatgcagcgacgccagcgcgtgagcaccctgcaatttgcctggtgtggcccagcccggcgctgctcaatgcgcatgggcgacaacctcgacgtggcctgtcgttgtacacaggttgcacgtggtattttcctccgtatggcgacgttgcacggttgaatgcggccggcagccatatacgaccagtattacagcaaatggccgaccgacaatccatcaggcagctcg

SEQ ID NO: 604959 - DNA, 137 bp, Homo sapiens
ggagctcggccctcattagcggagctcagtaagcggtcagtaagcgggctagtaaggcggcgcggtcacgcctgctgggggtatgttgtgttgtgtgtgcatgtgtgtgctgtgtctttgtgtgtgtgtgctccgct

SEQ ID NO: 604960 - DNA, 332 bp, Homo sapiens
gagtataataaaagatgtcttaaacccaagaatcgctaactataaagaatatataggctgggcatagtagttcacgcctgtaatcccagcactctgagagaccgaggcgggcagatcatctgaggtcgggagttcgagaccagcctgaccaatatggagaaaccccgtctctactaaaaatacaaaattagccgggcatggtggcacttgccttaatcccagctactcaggaggctgagggaggagaatcgtttaaacctgggaggtggaggttgcggtggaccgagattgtgccattgccattccagcctgggcaacaaaaaggcaaactc

SEQ ID NO: 604961 - DNA, 404 bp, Homo sapiens
  misc_feature (3)..(3): n is a, c, g, or t
  misc_feature (7)..(7): n is a, c, g, or t
  misc_feature (25)..(25): n is a, c, g, or t
  misc_feature (76)..(76): n is a, c, g, or t
  misc_feature (192)..(192): n is a, c, g, or t
  misc_feature (214)..(214): n is a, c, g, or t
  misc_feature (315)..(315): n is a, c, g, or t
  misc_feature (334)..(334): n is a, c, g, or t
  misc_feature (353)..(353): n is a, c, g, or t
  misc_feature (379)..(379): n is a, c, g, or t
  misc_feature (389)..(389): n is a, c, g, or t
gtngttngcgggacaggcttcattnggacagccctaacccagctgctgaatgccagaggtaccgaagtgaccgttngtctcccgaaagcccgggcccggccggattcacgtgggatgagctcgctgcgtcggggctgccgagctgcgatgccgccgtcaacctgggccggagagaacatcctcaaccctctncgaagatgggaatgaaaccttncaaaaagagcctctaagtttagccctgcaaccagagttcctccagggaagggaacgctttcagggtcatgggagaagttcaagggggaaaatatccaaatnggcttttgtcttccaaatngggggagatccttaagggnccaggagtaagctttacttacccagncccagttttnactttcgggagttat

SEQ ID NO: 604962 - DNA, 486 bp, Homo sapiens
  misc_feature (110)..(110): n is a, c, g, or t
ggtcgtcgtgttgactctgggtggactgccattatcagaagcttgaaccgtgagcgtgtaacctgaaatcgtttctcggtcgagaagtttggtcactttgacttctcccntgacggggtcaattgtgaacgagcttccttggttgccatctataattgagtagtggatgtggctgttggaaggtccatcggcatcatcggccataaccgtgatgacagactgctcaagaacggcatcttcactgatgactgtcgtgtaggtgtcttggctgaacacaggggtattatcgttgatatctgttacattaacgttcacagtggcaacgtcgctcagtgaaggcgtgcctccatcagtggccatctactgttaggtaatactcatgagagctctcataatccagattctcaatgataaatacggccctgaatagaaatcaaaattacttccagcattctgcaatgccaccacattttcccaagctcgtca

SEQ ID NO: 604963 - DNA, 114 bp, Homo sapiens
gccacaaggtacagagtacctacgcgagagccttactgagagcggatgggagacgtcacccccgagggcacctatatcagcccctttaaggtacaggcatggggggccgttcgt

SEQ ID NO: 604964 - DNA, 940 bp, Homo sapiens
  misc_feature (1)..(1): n is a, c, g, or t
  misc_feature (3)..(3): n is a, c, g, or t
ncncgtacatgaaaaaagttgagaagagcgagaggagcgagacgcagtgtcacgtaggtaccaggccaccgtggcgggcccgccgtgtgacgcaacggagaagcacccctggcgtcggcacacatgccactggtgtacccgcacctctgggaagccccctgtcggccaaaaagtgtagcccgggtgaaaaacgggccgcagtatctaccaacgggggctaatccaaaatcggccccggggcgacggccagaatccaccacgttgggaagccagaggggcaaacctatggcaggggagacaccctctctcgggaacaatggtgaaagccactgcgtcggaaaatataacattaccaggcagggggccacaataaaatccagggtggccaacatctccaagcagggtgaggtcaaggaactcgcttgtaccatcgtgggtgggccagggcaccccaatgactgaaggtggtgtgcgccccgccgccccccgcccgcgggaccagagaggcggagcgtccccttgctccagaacagaatataaagacatgaaacagaccgaggaaatatgaaatactcagatgtatccgagaacaagtgcaagagtccctgtgcccggcagatacacgggtgcgttgtccgcagaacacacctcaacaagtgaatgtttggtatcttaaaagcgtttccatcgccttcccgcgtgggtatacaccaacagtcgggccacggaatttttggtggtctgtcagacaaaacataaaaaagggtgggggattcaaacatccagcgatatgcatgttatttaacttctctgcaataaaaaatgcaaaggagtcaggttgaggctttcggcgctagttctcttcttggaggcgtggaatttatttttctctatttttttggcacaattcaaaaaaaaatccccaaaaaaaacacataac

SEQ ID NO: 604965 - DNA, 592 bp, Homo sapiens
  misc_feature (110)..(110): n is a, c, g, or t
ggtcgtcgtgttgactctgggtggactgccattatcagaagcttgaaccgtgagcgtgtaacctgaaatcgtttctcggtcgagaagtttggtcactttgacttctcccntgacggggtcaattgtgaacgagcttccttggttgccatctataattgagtagtggatgtggctgttggaaggtccatcggcatcatcggccataaccgtgatgacagactgctcaagaacggcatcttcactgatgactgtcgtgtaggtgtcttggctgaacacaggggtattatcgttgatatctgttacattaacgttcacagtggcaacgtcgctcagtgaaggcgtgcctccatcagtggccatctactgttaggtaatactcatgagagctctcataatccagattctcaatgataaatacggcccctgttttagaatctatgctgaattttccatgttcatttccccctattattgagtaggtgatttctgcatttgcttcaatatcccgacctgctgcatacccctgaagaacttcagttcccaccagaatgtcctcaaacacggtggcaccatattcgcgtgtactcatata

SEQ ID NO: 604966 - DNA, 285 bp, Homo sapiens
cttaaaccccaaagggtttttaaaaaaagagacccccttttcccccgggggtcaatattaacaaggaatttccttaaattttgtttaagggttgaaaggggggccgcatttgcccattgcattaagttattatgaggcgaattgttgttaaaaattaaagcaaaaaaaaatgtaaattgggttaaacccctttccctttttgaagtgtttttttaagggtttttatccctaaaatgaaaaaaggccccctatttttttgatgtaaacacattaaattcaaagaga

SEQ ID NO: 604967 - DNA, 377 bp, Homo sapiens
tgaggctggagactgtggggcagatggggctggctgcctccctgcctcctgggtggcctggctggggtagctgagtcctcagctgggtagtcttggtggacatgctcgcgggaggagatgaccttgccatcctggacctcttccagaacggtactgcacctgatgggtggtcaccgtgttctttcttgtactgacgtcaggtgggcgtcctctccctccagcagtgctgtgtggtcggttgtgaatctcctgctccagcctgcgtcttcacatccctgcagtgatatcgtataccatggtacctgcagcatccatctctgcagcgaagctgttccagagtgctccatccacgcatgacaatcagcccatgaatctgt

SEQ ID NO: 604968 - DNA, 200 bp, Homo sapiens
aacctgctcccgatttctggggaagggtgaggcatcgaggcatcctggctgcacctggaggcttgtgtcatagctcattcccgcggtttttagacaaacacactggtggatgtgtgtgcatatgcaggctctgggaatgtgctgaaggtgcagcagctgctccacatttgtagcgaacactttggctccaaagagaagga

SEQ ID NO: 604969 - DNA, 228 bp, Homo sapiens
gaatctcctatctcacttggtagtggaagttgtaggatactgtcctctaggaaatgtgccatctagagtgtgcagctctccgccagctgatcacaccaagagacgaagatgatgaggcccaggcgccagagtcactgctgacacatgaaaccttcagggtctagcattgtgggacatccctagtgtgttccagcccctgaatgtttgtgctctagagagccctcaatg

SEQ ID NO: 604970 - DNA, 612 bp, Homo sapiens
ggtctcgatctcctgaccttgtgatccgcccgcctcggcctcccagaaggctgggattacaggcgtgagccaccgcgcctggcccacacccatctaatttcttttcttttctatatatatttttttttttttgaaacggagcctcgctctgtcgcccaggctggagtgcagtggccaatctcagctgggattacaggcttgtgccaaagcccggttagttggtatttagtagagatggggtttcaccatgttggccaggctggtctcgaactcctcaccttgtaatcctagcaccttggcctcccaaggtgctgggattacaggcatgagccaccgcgcccggccacacccatctaatttcttaatttttggtagagacctggtctccctatgttgtccacggtactctagaactcctgggttcaaacagtccttctgccttggcctcccaacgtgctgaaattacaggcttgagccaccatgactggctatctagtttttcatgggaaaacaaatatttctgaaattttaactttttgggctatggtgtaaggctgtaatttctggttaaataaatggcatatctattcctgggaaaacacaaaacaaaac

SEQ ID NO: 604971 - DNA, 136 bp, Homo sapiens
agtgaaactgggcatacggaggaatactgtggggcgtactggaggaaattgatggcatatggattgaaactgtgtaggcatatgtgaggaaactgctgtggtgtacaggagtcaatactgttgtaggctatactgt

SEQ ID NO: 604972 - DNA, 258 bp, Homo sapiens
tttccggggtttttttgccccccggggcccccttttcccttccccaggggggggggcccggggccttttttttttgggggccggttggggggggccgtggggtcccccccggggtttttatttccctggccccgggggggggttttgggggggggggccccccccccccccctttcccggggcccgggggtccttttttgggccccccccccccccccctggccccttaaaaaaaatggggggtttttttttttttta

SEQ ID NO: 604973 - DNA, 410 bp, Homo sapiens
  misc_feature (9)..(9): n is a, c, g, or t
  misc_feature (76)..(76): n is a, c, g, or t
  misc_feature (128)..(128): n is a, c, g, or t
  misc_feature (398)..(398): n is a, c, g, or t
  misc_feature (400)..(400): n is a, c, g, or t
aggggggangttcctaatctctgaaagggggaattgagggtaggaggtgggacttaaactctggaaagtggggctnagggcacctcaagccaaaactgagcacctaggctaaaaataggtccccaggnaagatgctagttcccaatgggaaacaccgacctgtgtcaaagtcaagttcacccatggctctggcagcaccccagaagttacccaccctcacccctggaaatgtctgcataaactgccccttcatttgcatataattaaaagtggatacaaataccactgcagaactgcctctgagctgctactgtgggcgcacagcctgtagggcagccctgctttgcaaggagagcgcctctgctgctgctgtgcacagccggccgcttcaataaacnantgctaacacc

SEQ ID NO: 604974 - DNA, 188 bp, Homo sapiens
acgtatcggagtcgtcacacagagaatgaaagacttgctccagtatttctccaaaggcagaaatcaagaagttctttgaaaccaatgagaacagagagacaatgtaccagaatctctgggacacagctaaagcagtgttaagagggaagtttatagcactaatatgcccacattcgaatctcccaccc

SEQ ID NO: 604975 - DNA, 176 bp, Homo sapiens
cccggcccccaaggggttgggttcccgtctttttgggttccccccccagatttacccccttttgccttaattttgggggggccccgggggggggggggggggaaaaaattttggggtttcccgggccgggttttttttttacccataaaaggttgtcttttattaatttggggtta

SEQ ID NO: 604976 - DNA, 216 bp, Homo sapiens
tcccggtcgctggaccgtatgtgacaccagaggaggaaaggcaacgctctggagccagctccctcaggccctccaggagtcactaaacaactcttcccctggggatttcgcggacgttgtcacgatggaccctgaagatgctacagaggaaatcagtggatttctatgagctaggagaatacgagtctggagactgagaggcgtcacttcggcctc

SEQ ID NO: 604977 - DNA, 120 bp, Homo sapiens
  misc_feature (116)..(117): n is a, c, g, or t
acaattaaacacaacctctgcccagtttcaaccctctctgtttccctaagaaacacggcgccttttgcttaccatgaaacactatccattaaataattataatctcggcgccttgnnttc

SEQ ID NO: 604978 - DNA, 223 bp, Homo sapiens
acaggaagcccctgctccgcccctatctgctgttcgcccttttatgtttcccaaagtgctgaaattaacgtcatgagccagggcgcttctgctgccagggttacttgaagaggagatattgcctctcgacagctgctccctatctggtgcagccatagacacatccagaaaactgaagtgctgagaaggaagtggcttgcttaggcacctgccccatgtctgc

SEQ ID NO: 604979 - DNA, 280 bp, Homo sapiens
atacgcctgccggattgatgatgcctaaccgggtaacgccggctgaatcttgacagaaactgatgtctataacggacagagtcaacggacaccgaggccgggacggacgggtgataatattgacttctagagggattgcagctcggactgcctatattagtcaccctaattccgctccagcagaatcctttaacaccgagttagactggctaacaggggttgctcaagcgagagtcttcgctctcaatcttaccaaggcgttttgttggctcccaacggc

SEQ ID NO: 604980 - DNA, 177 bp, Homo sapiens
atccccccggttagggggtgatcataaaacactctttacgccgttttctattgcacttggtttaatcgtgtgaccgcgggggctgacacgaaattgaccaaccttggggttagaatagctaagttaaactttcgtttattgctaaaggttaatcactgctgttacccggggaggggg

SEQ ID NO: 604981 - DNA, 224 bp, Homo sapiens
ggaccacgcttggtaggaagcattatcatctccagcgtctaaaggggctgggaagggttattagaacgcagaaagatgtgtaattatagatggctgggagagagggccattattgaatacaagtgtgaactactcacaggaacatgcttcggccacactaaatccagcaagagggaagtagcttttagggagatcctttctgatgtccctcccactgaccaaag

SEQ ID NO: 604982 - DNA, 242 bp, Homo sapiens
gagatccccactcagggcagcgcgataactggagattattttcgaatccagtatttcgcactccaggggatgctcatttctattgtattttcagccccactgctgttgtcaatgccatcatcattgtggttatgtgggtctggaagactttgaatgttatgactgacctgaagattgcactagagagaagataggaatataacaggagaaggctcgaagactgaggggcagctcgccgagtt

SEQ ID NO: 604983 - DNA, 112 bp, Homo sapiens
cgaccgagagagtcatggcctttggggtacaccctcgtagtgaaccagcagagcctgctggcccctcatctccagcctctgtcactgtcactgttggtgatgagggggctga

SEQ ID NO: 604984 - DNA, 1253 bp, Homo sapiens
gcccgactccaccactttccaccatcagctgccaaactggtccctctgtctccctggtggccttgtggttcatgtttgtgggagtcatgaccattcctagatttcctgacagcagtggaatacagtgggagagaggttgtccttccaccccagcaaatgcaataatgccctcacccctccatgagaggagccaccctcccatgtgtgagcctgttacctccgcatttgacacgatgtctgctgtgaaccccgcaagctccatccccaactcccatctctccttccaggcccatcccatggcccagagcaggagggagggagggacgatggcgtgtgcggtacaatgtatctcgcatcttgcttgtcttgaacataaacgcaatctatctgctgttcaacccacaacacaccaccatccaccacacactcccacagcgcacaaatatcaccaatagtcaccgcaaacaacagcagacagagacggacaaactgggagccgtgccaacaccgaggaacaacgggcacccacgcataatcggagacacaaagagaagacgaccaggacgggaactacagcaatatgaggacacacagacacacaaccacatcacccgacggcaaaacccgcgacagcacacgtgaagcacgggacaaagaaccccgaaaccaacccacccacaccgccgtcgacgccgccagagacggcggcagcgaacagaacgcgaccccatcgacaccaaaagaaaccacagaacggcgcgacaccccggcaggggcgaaggcgatggcacgcgtggagagaggtcggacgggggcgtgggcacgccgggggggacgggccgcggggacggcgagagagcgagacagacagacatgggggcgggcgcacggagaggaacggcacagaagcgcgagcgagggacggcggacagaggcgagggacgacgagcgggcagtggggcgagggatcacggacaagggcgtgaggcgggagaggcgaaggggggaggcgaaggcgcgagcgggaggggcagacggcgggacggggcagaggaggacagagaggcagagaaggggggaggacggagacggcaagcgacagggcgcacagcgaaggcgcacggaaggaggggaggcggagcggaggaggaacggacggggggggcagagcgaagacggacgacgcgcggggagggggcccgagagaacagccaagcacagcagggagccgaaggaggagaggcacggagaga

SEQ ID NO: 604985 - DNA, 1091 bp, Homo sapiens
agcgggtcttccacaacctccgcggtctggagctggcctcccgcacgacgccccaaccaccggccccgccgccatcaccacaccgtcacctccgccgcatgcactccattgagggccctcctccattcaccgacacccttagacaccatctacacattctaggcatttctgtcactggagaagaagctataatcggtttccattgtgggcccggtgcagcagcacatggcggacggtggcggcggcggcacgcggcggtgcagggcacacggacatcgaaccacgggaccaggcagggggcaggcggcacccaatcaaccacggaccatcgattgcacccactggcgacccatcagccatcaatcgccataatcatcagatggaggcagcgtcacagacgcacggggccattatattctgagcaagcctatccgaccgggcactgcacaggcatgaccaggtgagacacccaagcacagacgttgccaacacacgcatgacgccacgaacagcccgactacactgtagatgatagaacaccatcctggaacaaaagccagcgcacatggcacctccatcacaagcccaaccgaacacaccccacactgcaaccgacactggtctgcagcgccagacgcctggctggggcccaggaccaggggcacgcgtccaagcaaacgccttggcacgatagcgcaccacggcacctgtcacggatgaccctccacgccgcatgtggtggggcagatcacacacgaaccatcacaaacaccccaaccaactccgttgtccaagacgacacaccccacacacataccggaacaaaccaaacaaaaggacaaaacgcagccacattcggacacaccctttcacccagttgaggatggaggacccccgaccgacacacaccgcgacaagcgtccaagccgcatgggccgccccaccggccacgcggccccgccgtaccgcagagaccaggaccaccgaaacgtatgggcccaaagggcgaacacacaccgctcccaacagccatatcccacgaacaatccgacgcggcacccaaccaactcccccgtcaaacagcaacctta

SEQ ID NO: 604986 - DNA, 341 bp, Homo sapiens
gtttgggttacagaatggtatcaggagccaaagatcctgagttgcacgggtctactgcgtccaggccctcgaagagctgggaagcatttgtgcacagcccctcatgacagtcgcccttacacacggtttcagtttcctcgtggtgcgatggcacagtcgcataaagtactaagtggtaactttcatgtacatattaaaccatttcatgatggtcttgattgtctgtgctttcctgaggcaggcgtcctgtctgtgacactcaaactctccctcgctccatcgttacgggccagtccacgccatcctgactgccaggccctcagcatccatctccgtgatca

SEQ ID NO: 604987 - DNA, 981 bp, Homo sapiens
  misc_feature (1)..(1): n is a, c, g, or t
  misc_feature (139)..(139): n is a, c, g, or t
  misc_feature (185)..(185): n is a, c, g, or t
  misc_feature (206)..(206): n is a, c, g, or t
  misc_feature (210)..(210): n is a, c, g, or t
  misc_feature (248)..(248): n is a, c, g, or t
  misc_feature (290)..(290): n is a, c, g, or t
  misc_feature (342)..(342): n is a, c, g, or t
  misc_feature (465)..(465): n is a, c, g, or t
  misc_feature (578)..(578): n is a, c, g, or t
  misc_feature (601)..(601): n is a, c, g, or t
  misc_feature (612)..(612): n is a, c, g, or t
  misc_feature (631)..(633): n is a, c, g, or t
  misc_feature (635)..(635): n is a, c, g, or t
  misc_feature (659)..(659): n is a, c, g, or t
  misc_feature (675)..(675): n is a, c, g, or t
  misc_feature (678)..(678): n is a, c, g, or t
  misc_feature (694)..(694): n is a, c, g, or t
  misc_feature (703)..(703): n is a, c, g, or t
  misc_feature (707)..(707): n is a, c, g, or t
  misc_feature (734)..(734): n is a, c, g, or t
  misc_feature (816)..(816): n is a, c, g, or t
  misc_feature (864)..(864): n is a, c, g, or t
  misc_feature (885)..(885): n is a, c, g, or t
  misc_feature (904)..(904): n is a, c, g, or t
  misc_feature (942)..(942): n is a, c, g, or t
ngtctctccaggtcccagcgccctgccacccccaccccagcgccagggagaagagggcggatgcagaggagcgggcagaggctgggcagggcctgagtgggccaggctaggccaagagagagggcacgaggccctgggngccccagtgccagggcagaggccaggcctgcctggagaaggcagcncgggggcagcgctcaggggtnaggntgggtgccacgccgccgcagccctgcccaaaagagggnggggcctcaaaggggtagccccaagaactgtactctggaggnagaatcaaggggctgggagtgggcactggccccccggagccctctgcaaagnaggggacagtggcacctgtggaaatgcacaagggagggtgcagcgggtgtgagggagggctgccatcctgagggcagggctccggcgcaccagggacagaactaaagggggccagcgggggcngccgcggcgaatggctctggggggagaggaagaaggggtccaagaagtgggggccgccagccgcagcctcagcctcagcctcctcctggggtggtgcggaaggcaccaccagngggtggggccccaggaggcagcnccaggcctggncgggggctcactggggcannncncacagcaatattgccaatgaagancgggagggttaaagtngcntccggcgccttcaganagaactgtnagtngtagttgatgtggatgaggctgcagcncggcaggccgactggggcaaggcagggaccaggatctgctcgtgccaattcgcccgccgccaggctttgacgcccgcccccnccacctccgcaatggtccgtacgttgtggattcagcgcttggccttanaggacaatttctgcagcagantggccaccacagggctggngttcttgcctgaatggttctcaacgtcggcatgcagcngcagttcctgccccaccacaaagccgcggagatcagtgc

SEQ ID NO: 604988 - DNA, 270 bp, Homo sapiens
aggggccagtgggcataggagctggtagtttaagttagccccacatattttaaaagggtatcaccctatcaaaggggtctgggcccaatcatttctttatgggaattgggtcctataaaaatgggttctaccatagctgaacaaataataggtgggtgggctaaaggctcgggatcaaagagggatgaaaagatcgcctaggatggggttccggtccagtactgggttaagacattccataggggtggcgggggaccctcaaaagtcgac

SEQ ID NO: 604989 - DNA, 1782 bp, Homo sapiens
gattgggtatgttagcttgttggcctaggttgaggggctgggagagtgtttattatcaatgatcgctgtcactatgtgtatgaatcactgtgatttttttttcattccccgttttcctgaaaaaaagatttgtttttcctccacattctctaacgcactcaagggcatgtgcctaggagaacgtggtagcattctggtctttccgctttcagaactgctggtcatcttcgtcttttcttcatgtattgattattatatgattattattattattactattgttttttaaaactgtcaggatgaattgtcagacatatggccatgtgttttgtcctctgcttctcccctgtgggaagttgtctccatgctgtgaactggctgtggggtgtgcagctgacgtcagtccctctgagcagtttccccactgtgtcttgtcccatcatgcgctggatctgctcattctcctgctgtgaggggtatgcccacctccttacccccttgacagcatagggcatgctgtgtgctgggcctcaccaggcactgtctattgtgtgactcatggcatcctcgtttcatccccaccgtgcctagcaggccttcctttttcaccacctcggaacagcttgccttttcctccctcacaacaaggactgctgtgcctcagtcctttaactaacttgcactctgccactgtcccagtggtactatctctaaagtggccttgtgcaccattgtagtcttattcctctggatcaattattcccattcctccattcaagcgtaatattcttccattcatcagttcctggacacctgtttacccggagacatggatcggatatatcgcagcatgcaggggatctcaggacgaaaccgccgtggagaaggatacattccacaagtgaatattgtttcctggatcttctactggatattaccaaacgacgacacaacaaaaaagagagcacagcaacaggtggctacggaaaacatagaatgaagctagccacacatacgacacatatagagcatcaaaaaagaacacaaacaagaaacagaagaagaagcagacaagcactacaaaggagataaggagaaagagaaagagaagagcactagacaaatagaatgacaaagagagagaagagaaggagagagagaagagcgaagaaaacacgaggaccacacgcaaacaaggagaagcaacgaacaaagcaagcggaggaaaaaggaaaaaaagagaacaagaagaacgagaaagaagacaaacaacaaccaaagagaagagacaaagacaaaagagagaaaagcgaagcaaagaaaaagcgagaaagaagagagaagcaaggagagcaagaagagcggagaacagacagcgcaggagataacggaggaaggacaaaaccaggcagagcgcggtacgggagaagcagggagacagagacgcgacggagagagccgcgaggagaggaggagacgccagggaagagcaagcggagagaacgaaggaagacagaggggcagaggcgcagcccgcgggaggccggggcagaggcagggtggggacgagaacggagagtaaggagagtgcagaggcgcacgaacacgagagcgggcaagcaagagccgcgacgcgctgaagcgagcacagaagacaaccagcaagcaagcagacggagaggaccaggaggcgaggcacgagggcgagaggcgaacagagagagcagccccaacgagagcgccgagcacagcacagaacagcacaggcaccacgacgggcgg

SEQ ID NO: 604990 - DNA, 148 bp, Homo sapiens
caatcaagtactataccaattggtgctattgatgtttatcataattgaatctgtgtctccataaataacttcaagattcatctttatgtaccatctcatttcgtatgcatcaaagatctcccttccgtttgtacagtcacctgaggac

SEQ ID NO: 604991 - DNA, 117 bp, Homo sapiens
tcctgacaggtagtcatccctccagcagagattagtctacttcttccctgcgtgatgtgtcgtcgtctccttcacagggtgtgaattcctccggtaaccgcaggcactggtatcatc

SEQ ID NO: 604992 - DNA, 338 bp, Homo sapiens
gcaaaggggaagcaaggcaggccttacatgggagcagaagagagagagagagaggggaagagccacacttttaaaccatcacatctcatgataattcaatcacaatcacaaaaacagcatggggaaaacgcctctgttatccagtaacctcctatcagtcctgacactagagctgagttaaccacagccaccagaagttggggacagggactatgttggctaaataactcatttgtgctcttttgcgtttttttgatggtgttgtatataaaattattttttttgttcatggtttttgagaggaattttgaagagattaaaaacttcactatcatgat

SEQ ID NO: 604993 - DNA, 579 bp, Homo sapiens
  misc_feature (32)..(32): n is a, c, g, or t
  misc_feature (56)..(56): n is a, c, g, or t
  misc_feature (142)..(142): n is a, c, g, or t
  misc_feature (144)..(144): n is a, c, g, or t
  misc_feature (157)..(157): n is a, c, g, or t
  misc_feature (165)..(165): n is a, c, g, or t
  misc_feature (174)..(174): n is a, c, g, or t
  misc_feature (184)..(184): n is a, c, g, or t
  misc_feature (187)..(187): n is a, c, g, or t
  misc_feature (278)..(278): n is a, c, g, or t
  misc_feature (347)..(347): n is a, c, g, or t
  misc_feature (381)..(381): n is a, c, g, or t
  misc_feature (434)..(434): n is a, c, g, or t
  misc_feature (457)..(457): n is a, c, g, or t
  misc_feature (479)..(479): n is a, c, g, or t
  misc_feature (501)..(501): n is a, c, g, or t
  misc_feature (504)..(504): n is a, c, g, or t
gagcaaaatgacattaaaatcatattggctcntcctatccatgagcatggaacgtnctccattgttggtgtatctctgatttctttgagcagagttttatagttctcattatagagatcccccacctccctggttagctgtntncccaggtattttnttcttttngtggccatngtgaatgggngtncattcatgatttggctgttggcttgcctgtaggtgtataggaatgctggcaattttcgtacatcgattttgtatcctgggactgtgctgangttggttatctgcttaagaagcttttgcatagcccatactttttaccttactgcattcttatgaaaatnattcactgagtctcaagaacgtattcattctttntttccagttcacacttgtaacactctaggaagtcacaaattctcaaatgaatngttccaattggttgctcattatncatgggctctgttagaatgtanctgtgctcctccttagagggcnaanagtggattagtagtggctaatgataagaggagtttacttcctctagtgaaggaatttgattgtgtgtaaattaac

SEQ ID NO: 604994 - DNA, 675 bp, Homo sapiens
ttgagcggggatgtagaggcggctggcagcatgatggcggcactggcggcaagagcagacgcccgagcctgagctgatgaagagctggcaggatgccttatcccactgaagccgtggccccgctgtccagccctgcccatgccctgctgcccgatgccatgctgctgcctgccgtgctgatgtcctggtgctgcctgcacggctgatgcccttcctgcctcgctgatgcctgcggctcaggctcgcgggtgtgacttacgttggcttattttgtacgtatcttactcaagtatttgggcggccagccggggggcagggcgcgcgcagagtatgcgtgcgccaagggccttgggtctgcaagctgccttaccgcgacccccacatacgcgcagcggcccaccacggcgccaccacagaacaactcataccaatgatctgacctagacacatcccctcacgacccaccccggttccaccacacgcggacggcagaggacgggaggctcgcgccgcggccatcttgcaacgggcatgacgccgcgtagcgcgcgataacgccagcagcggggcggctgctctgcaccgtgcgcgcggcactgcgctcgctcagcgcaaagccgcgcaaccgctccgacggccgggggagcaggcgacgcgcctgccgactacgactcg

SEQ ID NO: 604995 - DNA, 327 bp, Homo sapiens
  misc_feature (35)..(35): n is a, c, g, or t
  misc_feature (85)..(85): n is a, c, g, or t
  misc_feature (195)..(195): n is a, c, g, or t
  misc_feature (210)..(210): n is a, c, g, or t
  misc_feature (275)..(275): n is a, c, g, or t
  misc_feature (294)..(294): n is a, c, g, or t
  misc_feature (306)..(306): n is a, c, g, or t
aaccatacactactcttttttgataataaaaaatntatttactgagccagttgtggtggctcacgcctataatcccagcaccttngaaggccaatgagagtggatcagttgaggccaggagtttgagaccagcctggccaacatggtgaaatgccgtctctactaagaatacaaaaatgagccgggcacggtggncacgcacctgtaatnccagggtactccgaaggatgagggcaggataattgtttgaactcaggaggttggaggttgcagtnagccaaaatcatgccactncactccagcctnggggtgacagagtgagtctct

SEQ ID NO: 604996 - DNA, 446 bp, Homo sapiens
tcgcctttgttgaggcagctctgtggtggtggacggcagaatacaatctcctgtaagtggactttctcagttctaaaggccaactgtgactgtatgttttcctggcacatagctcctaaaacccttggaatctccaatgtgttatgtctttttgtatgctaatgaatgactgatgggagatagatgaatggggggactcctggatggtctcaggatggaggctggtaccaggggaacctactccctgacctcaggagaggagatgggctgaaggttgatctgatcaccaatgaccaatgatttaatcaattgtgcatacataatgatgcttccataaacacccaaaacgactaggttctgagagtttctgggctggagagcaagaatgtattcaggtgatgggagggtggcacacttcaactccatgggaacagaagctcctacaa

SEQ ID NO: 604997 - DNA, 1997 bp, Homo sapiens
cagcggcagtcgagcatccgctgctgctgaggagcagcgagcgctcaacacgcagccaccactgcggctgacactcctggcactcggcgcacacacgctcgcaccactctaactcatacctcacttactctcccctccaccacgcaactctctgctacttccctccagcaagctactcccacgcgcctcccctctcctccactaagacactctcacccacacagtaccctgcctaccacgcgcctgcgcaaccacacctccccacacagcctctctctacaccttcacaccacgcacacgcgcctgcgcctgctctccacgcctctgccttggccatccagcacacctcacgcctcctgcacttacccgcgccacgcgcaacttctctgcgcacgcacctgaaccacggcctgcgcacttaacactacgcctcaacagctctgccccctgcgccccacggcccctctgcctcccacctccgcaccccgtaaccaactctgcacttacgccctcaccacactccctggaacgggcaaccattaacccgtaacccacctgcccaggcaacactcccaaccgcacgccctggcaccagccacgcaaccgacttccaagcaacctggccccttggcacttaacaaccacggcgggctctggcaccatcgcctggcttccgcctactcctaacttacccctttttcccaccctactcgggccctcctccccgctcttcccaacgtgtgtaaatccaaacgtggaggaaaacccgtttctcagtactacaccccaactattctgggccgcagtcttaaacttatgggaaacgccctatgttccctaccttggccaacaaccggccccggccttacatctggagccaggttggcaacaacgcaggccaaccggcctgggcaccaacccttaaacttgccaaactgtcccccgcccacacgcccctcctcaagctcaccggacccaccccaaaagacacggcacccacagtcaaacccaaaccccaaccccgttgcccaccccgagcgtcccccacagacgaaagcgcgggcaagaacgctgggccgccccgagaaacccccaaggggcccttcttctgacacccacccatcaacacaccgcatcgggcaaaattccagcaccgcggggaccacacaaccggccaagcacacagttccccccacagaaggacaaaaacacgcgtaccttcagcaccacgcaacgcttcctagccaccgcccagcttaagcgttaacgccggcaaccacctgtttgccccaccccccaaacgccaaacaccacccgtacgggaaccctgggcaacgtggccacaacccggcaacacaacaccaaccgcacactcaccttagcccgacgcccctccgcgcgcctcctcgccacgccccagccgcagggcacgcttgaccaacgacggagggcaaatctcccggcgctcgccgtcaaaacccccccttccccttcaaggcaccctcaaggacccgccgcgcctacacgccgggcctaaacgccccactccacctctacccccttcaaacccttccccaaccccctgccgcgcagcacggcctcctcaccaaaccctccgcgcgcccccccaccaccagccgcagccgcggagcgcctcatccgcagccgcaaccgagcagccgcaacatgcgtggcccccacgaggagccgccaacttctccccccctctgcggcggcgccgcagccaggctcgttgcggccatctgcggacccccctgtcgccaacacacccggcctcaccttgcggcagacctccagcaaaccactggcgcgccccgccgagagcaggaccccaactcttcgcgagccttcggcaaccctgccttccgccagcagcacccacgaaaatcgtcgcagcaccccataagacgagcggcagatcacgacgacacaccactaggcgtcatcgggcaaagccgccagaacgccgcaaaacc

SEQ ID NO: 604998 - DNA, 427 bp, Homo sapiens
  misc_feature (82)..(82): n is a, c, g, or t
  misc_feature (97)..(97): n is a, c, g, or t
  misc_feature (280)..(280): n is a, c, g, or t
  misc_feature (409)..(409): n is a, c, g, or t
acaaaggatggcttttactcagcaatcatgtgctgaacatctgctacattccactcttagcactagtgaaacaaacgcgtanaacaagagccccagncctcaaagctcacaatggaggtaactggtttccaggttaagtgcactaaactgtgtggaaggtgttatgatagtacctctacaggttctgatggaagcatcagtggatgggattgggctttcccattggggagaaggagggctataaaaaaaccttccctggaagggacggtggggctcattnctggatttcaccagaccagggtccaggcccctttcactttctttacttttgaactactccatctggaatccatagaaactcattaagcagctaaagtgaagtccgtagaccctggttccctacagtttncaaacaaaaccctggaat

SEQ ID NO: 604999 - DNA, 184 bp, Homo sapiens
gaggacattgcagagctcacgtgcctcacacgaagcctcggtgcttgtacaacctcaatggagcgttactactcagggctcatctacacctattcaggcctgttctgtgtggtcctcactgtgagggggcatctcgtgcctcttcttgcccttgtacttttccacaatctcttcagagtagata

SEQ ID NO: 605000 - DNA, 106 bp, Homo sapiens
tgggccgggatccccccggtttgtttttttaaaaaaggtgtccggccttcttttttggggtttttttttgggttaccggggattaaaacccttctaatttcctgga

SEQ ID NO: 605001 - DNA, 178 bp, Homo sapiens
  misc_feature (16)..(16): n is a, c, g, or t
  misc_feature (64)..(64): n is a, c, g, or t
  misc_feature (114)..(114): n is a, c, g, or t
  misc_feature (159)..(159): n is a, c, g, or t
  misc_feature (173)..(173): n is a, c, g, or t
gaattaccagggtttngcaagcgtaagtaggggatgaaagaaagctaaggtagagcttttattnggggtttcctcaggaaagggcaagggtaaactgtttagggattggctagntatgaatttccatgggactttggagcataggggatgggtctcccnttgtttgggtaccnggccc

SEQ ID NO: 605002 - DNA, 154 bp, Homo sapiens
gcagtggtcgcttctactccttggattactaaaggattccaagtaactctaattgggagagaagacgatctgcacttcgcatttcggcattacattaaatttaagggtccttaatatagaaggaatagtaggtaaacctattcaatccctaaca

SEQ ID NO: 605003 - DNA, 536 bp, Homo sapiens
agggggttctccaacgcctatgctgccccggcccagtttctgggtaaaaacaaatcgaagcccttccccggggaggggtgaaagacacttgtggggcccaccccaaacagtcccgggactgctttggacgcctttgaaagtggtgcgaccccttcttttgatgctttttgggaagctttcaatccccagccctcatccagagtttgcagccgagtagggactcctcccctgtcctctacgaaggaaaaaattgctattgtggtactcccctccgagggattccggggttttttgggggtttttccccccaaccatttcaacttttttttggattttcgttttggcaagccccccccgccctttttcccttgccagttccctggggccagttcccagctttcctgaatggattcccggccccatccctccccccccccctccctttcaatccgtttgaacccatttggccccttttttggcagaacagtcccggcccttgtaaagttttttagatcaaaaaagccaggggctttcca

SEQ ID NO: 605004 - DNA, 108 bp, Homo sapiens
cacgaggatgtcgccacaccctcggcaccagcactgctcatcctcacgatcctccacctacctgaggtgcccgactggccggcagccatcgccgccctcagggtgggc

SEQ ID NO: 605005 - DNA, 1094 bp, Homo sapiens
gccactgtctgagttccccatctgaggcgttcgttgcagctagcctgtccacttctagattcatctatcttgtgagaccctgggcttactggagtcaccatggcaactgaagagttcatgcatcccgatcctccccatagcactatatccattgttgcttggtgaacagaacagcgaaccgttgtcccgtgtggatggtcgggccaaagacctatgatccgggaggatgaatgacagggtccttgtttgcccgacatgcgcaatggtgaccgtccccgccatgatactagatggtggagatggcaagcctgtgtctctgggatggccaggggctgtaggtgcttggttatgagtggtcacagggacaaagttccggcattcgggcacagcatgacctcgatgatccggacatggcccatggaccccgttcacaccctcggtgtaccccaggtgtcaggtgctggaaacaggagcatcagaatcgccatgcatggctgagttactgagctcaactattgaccttccattctacaggcagcgtgcctctgagttcctgaggactcacgatgcgatgacagcaggtggttgccacagtgagcatcggcagtggatgttctacggaggagaccattgtggtacactttaccattcccactcgggacagggaccgtcggcaagcagtaaggtacgcaggggacatcccactgtgcaccgcagccgacaccgaatgccaactcgtagggtccacccaaagccacagaggcctcccatgcggcagagccattccacggcgaacccccacgtcgacagagggagggcagcccttcgcctataccccgggtgcaacaggccgggaaaagcgcaacgacacgaggcgatgaaccaacagagagaggaaacagacaaacatcggccgctcgggaactcctaccctaacacagtgactacagacacgaggcgcgaaacgcgaacccacccagcggctggtcaatgcaccacacgaaacgcggcagccagcatccatgtgccacctctaaggagtcggagaacagccccagcgaccaacacccgtatcacagcaaaagcaagcacag

SEQ ID NO: 605006 - DNA, 372 bp, Homo sapiens
accgagctaggtagccaaagctgcactcctggagcgccctcacagctggcgtggcttggttaatactgtagcattgatctgttggtagcctgcagccctagcccctttctcgttggttcttagagcaattgacaaccattgttgattgagatctttttgctggcatttggaggaaatgtgtttgctggcttattaatgtctatttttttcttcctctacaaggtgacagtttgaaaatcttatttattggccgggcgcagtggctcacgcctgtaatgccagcactttaggaggcaaaggtgggaggatcccttgagcccaaggagatcgataccagcctgggcaacacagatgggaaatcccatctctacc

SEQ ID NO: 605007 - DNA, 326 bp, Homo sapiens
  misc_feature (163)..(163): n is a, c, g, or t
  misc_feature (176)..(176): n is a, c, g, or t
  misc_feature (193)..(193): n is a, c, g, or t
  misc_feature (230)..(230): n is a, c, g, or t
  misc_feature (241)..(241): n is a, c, g, or t
  misc_feature (259)..(259): n is a, c, g, or t
  misc_feature (264)..(264): n is a, c, g, or t
  misc_feature (274)..(274): n is a, c, g, or t
ggggaactggggataattatatgtacacgttgttgcaagagatgggggtgcagtctggtaaaatacgccgaacgtcagcaacttgatcggatgattgcacgggcgacccgtgatttgacaagtggtcgtagtggtttaagtgccagatttatgcgtgattttngtctgatgatcanaatcggcctgacagccnagatgatggggtcaaaaggagatgtatgagtatcctngtgttcagcanatgtaaaccagcgtacanttttnaaaaaggcgnaacatgggacggttggacttgatttatttaccttttttatattggcatgcag

SEQ ID NO: 605008 - DNA, 368 bp, Homo sapiens
accggagtggcgacatttcaagaatgttggctgggtacagtggctcacccctgtaatcccagtactttgggagactgaggcaggcaggagtttgagaccagcctggccaacatggcgaaggccgtctctaccaaaaatacaaaattagcctggcatggtggtgcatgcctgtaatctcagctactggggaggctgaggcaagagaatcgcttgaacccaggaggcagaggttgaagtgagccgagatcgtgccattgcactccagcctgggcaacaagagcgaaactccgtctcaaaaacaaaaccaacaacaacaacaacaacaaaaaaatatgggtgaggtacaataaaactgtagaggaatttgg

SEQ ID NO: 605009 - DNA, 757 bp, Homo sapiens
cgtggtggctcacacctgtaatcccagcactttgggaggccgaggcgggcggatcatgaggtcaggaaattgagaccatcctggctaatatggtgaaaccccatctctactaaaaatacaaaaaattagccaggcatggtggcacgcacctgtagtcccagctacttgggaggctgaggcaggaaaattgcttgaacctgagaagcagaggttgcaatgagccgagatcgtgccattgcactccagcctaggtgacagagcgagactccatctcgggggaaaaaaaaaaaaaaggggtccgggccggcgcgggggctcatgccttgtaattcccagcatttgggaagcgcccaagggttggggcagatcacgagggtcagcttagagaccatcctggcgttaacacgggtgaaaccccggtctctactaaaattccaaaaaaatttacgccagggcgtgttggcgcggggcccctgtagtcccagtctactcaggaggctggaggtagatcaattgggttgtgaaccccggggaagcagagtggtcgccagtgacgcgggaagaactcaacggccaagtgtgttccctccaagccttaggcaacaggaagcgagaactggtgcttcttcaaaaataacaatgtgttgcgcctatccggttaaccactattttgggcttggttcaccaaatgtgctttttttcccctttggggcgaaacaaacttctttagggactaccttgggcttaaaggttccta

SEQ ID NO: 605010 - DNA, 142 bp, Homo sapiens
agaaatacaaaaggacacatcaaaggatgaatgctttacacgttttggaatgagtccaaaccctctttgataataatggggatagagccaggggcattttgaagggggtgacggtgttccatatcagaattgcagaagcaaa

SEQ ID NO: 605011 - DNA, 108 bp, Homo sapiens
ccgtgctgctgcggtcgctctcgacggctcccgcctgacgcgacttcggtctgttgtcgtcggccgactggtcctgtgccgggtccgacgctcgaccttcgtcctcct

SEQ ID NO: 605012 - DNA, 373 bp, Homo sapiens
atcattttatgagatgtattctctttccatctcaataataagcatgaaaattaacacacatttcttggtaggcatgtaagtgcctgcaggcattattatttaattcttttgtttgtttgtttgtttgttttgtttttttttgagacagagtcttgctttgtctcccaggctggagtgtggctagcgcgatctctgctcactgcaagctccgcctcccgggttcagggcattctcctgcctcagcctcccagctactcaggagactaaggcgagagaattgcttgaacccaggaggtggaagttgcagtaaaccaaggttgcgccactgcactccagcctgagtgacagagcgagactgcatctcacaaaaaaa

SEQ ID NO: 605013 - DNA, 251 bp, Homo sapiens
taagctctgtacattcggccgcgataccgtatcgatggcgcagtgcaggcggcgcatatgcatctaggctattaatattcggagtatacgtagcggctacgttacaaccggtactctagaactatagctagcatgcgcaaatttaaagcgctgatatcgatcgcgcgcagatctgtcatgatgatcattgcaattggatccatatatagggcccgggttataattacctcaggtcgacgtcccatgttcat

SEQ ID NO: 605014 - DNA, 218 bp, Homo sapiens
  misc_feature (27)..(27): n is a, c, g, or t
  misc_feature (33)..(33): n is a, c, g, or t
  misc_feature (56)..(56): n is a, c, g, or t
  misc_feature (92)..(92): n is a, c, g, or t
  misc_feature (201)..(202): n is a, c, g, or t
  misc_feature (210)..(210): n is a, c, g, or t
cccgggcggcaactgggcgtttcagtnagtccngctctcccgcaaaaaaaaccccncggcgggcgcctttcggtgtgtaaccctttttaacntagcctttcgggagcgccgggtccctcgcctggagcccgcgcctgttctccctcccttcctcctcttccaggaggcttcgccagtgaggtgcggctcagggcctcgagnnttcgagcncggccgat

SEQ ID NO: 605015 - DNA, 112 bp, Homo sapiens
tagagcatcccctagactgttgctgaagggagggccggacgtctgctgaagagagtgcgcctgcaggagcctcacacctgcacaccagggaccttcttgatcaggggtatct

SEQ ID NO: 605016 - DNA, 729 bp, Homo sapiens
  misc_feature (9)..(9): n is a, c, g, or t
  misc_feature (16)..(16): n is a, c, g, or t
  misc_feature (22)..(22): n is a, c, g, or t
gctatatcnaagaggnatattntgaggtggcatatttaggtctcctgcctagccaagatgttgctttggaggaaagaaaaaccagtttggtgaatggctagttcatctctgctcaaaaatggtactttgcctcaataaaaattagattgaaaagacacaagataaaaggactgtagcagtagtccatgctagaggtgatggtagcctaaaagtggtggaaagagagattagagaaataatataagaatgattacagagacagaattggcagacttgacgtatggatgggtgaggaagtatgatgggaaggagagagatgaccctgaggtttctggcttggatggatgatgcaatccaagagagatcagaaattacaagagtaggaacaaatttggggaaggagtagaaattggcgggagatgataaacgtggtttggggcatgttgagtttatactgttcatgggacaagtgaccatgtgagtgacaggctgggttcggagatatgaccagattagggagagggctgagtaggaagattaacatttaccaagccaaataaatatccttctttcattaaggaggaaaaggggacaaaagagatctcaaaagggagaagaaagggtactctccatagatattaagccatagactatctggagaattcgagtttctcctgtaagatttggggtacaggctgtttaattaccatgcaggacatgtggcgggaa

SEQ ID NO: 605017 - DNA, 1970 bp, Homo sapiens
  misc_feature (228)..(228): n is a, c, g, or t
  misc_feature (1482)..(1482): n is a, c, g, or t
cttacgtggtgtgtgttatccctctagctccgtgtgtgtgtcgctccagctcgttgtgttgttgttgtcccctctcgcttttgttcctgtttgggggtccctcagttgcgcttgtcgtcctcttccgctctcctcgtgaccacttgtttgtcggcctcttccgggggacagccatggcgcgcttttatatgactgttgtgtgttgtgtagccttcctggtttgtgtgngtccttccgccacctcgtgtggttacgccctaggtatagcaggtaattaggctctacaatttggtggtgtcccccagccatccccgttgcggtctttcccgttgagaagttgttgagttgtggcccccttctgaatttgggtggcacctcggtcgcgcgagtgtgtgcccggccaccacaatcctgtgggggccgcctcgatagtcgcccgccccgctacagtctcccgagagtgtcctccgttgtttgggccgcctccaatatgtattggccccctccggtgtgcctgtagttctttcgtttgctgctgtgggtggtgagagatacgccgctcgtgtccgccgatggggacccagacgctgtgttgtctgtggttgttcgcctctagtgtgtagtcttgtcgccccgatgtgggcgcgtgttgccgttgttgtggtgatggctcgccgtgcctcgccttgactcccctagaggattggtgcggtgtgtcatgcaaaatgagggtgggtaccctccctgtttcgccccccctttggggggtggtaaaatatacagccacgatgtgggcccttttgtgctgttgtcgcccctggtgttgttggtgtgcaacacccgttgcggggttttaaccacagttggggtggtgctcccccccgaggatgagattagttgctccacagtagccgcttgcgccgcccccattgtgtgcgcccgacgccctattctgtcataggagccaccattcaggacgcggttttacccccactccccgccacgatttttgtttgggggaaatatttggggtggcgccgcccccccacccctctgggccgtgttttcacaaacaagagttgtggtggcggctacgtcttcctctatctgtttgcgcacagcgcggctcgtcgcccaccactgctgttgtggggtggcgccaacttctggtgttgtgggaagagactacctcctctggtggcccccaccacagggtgtacacaccagaaaggagacgctctgtggtgtgggccactaggtctgtggagaagtccctacacacctctcacacacagccccactgtggtgcttcttgagagcgtcactctgagggtcgtgtccccctctctgggagcccacacacacagtggtgttgtgacgaccctcctgagtatgttgattagtgcgcgccacaatctcgtggggcgctctgtgtggtgtgtcacactctgggtggacacccttttgtgggatgatagagcngagagtttgtgagagagattagaggtgtgatagtttttgtctcacgagagaggccccgccttgtgaggaggtacacactagtgtcgtcgtcccactctgtgagatgatagagagatatatatagtgagaggagaggtctcgtgtcgtgtgtgaaatatgtctcgcgtctgtgataagagatgagatagagggtgttcagagtatagagatagagagagatagagatatatacctaaaagttataaacacgtctcaccaaaggtgcctgcgttttacactgggaagaccttatttcttggttttaacaccacttgaaaaattgtggtcttgatccacggtaaatttggtaatgtacgcacgtgtaatcgtcttccaataaaccaattactgacctatagcttttaaacactgaatagccttgttcaccagaccccaacatgtccctttctgttatgggttttgaattaagtattccctgtgcctttaaa

SEQ ID NO: 605018 - DNA, 620 bp, Homo sapiens
tttttttttttacaggttcagctctttattggctaacttaacaaaagcagtttagtcaaaaagaccaaagcccatgtcatcttcagactcctcggactcttccttctttgcctccactttcttctcctcagctggggcggcggcagtggatggagcagcaccaccagcaggcgcagtccagctgctggagctggcccaccagcccctacattgcagatgaggctcccaatgttgacattggccagagccttggcaaacaagccaggccagaaaggttcgacgctgacaccagctgctttaatgagggcattgatcttatcctccgtgaccgtcacctcgtcgtcgtgcaggatgagggcggagtagatgcaagcgagctcggagacggaagccatgctgtagactgccggcacggtgctagtcgccggatgaagtgagcatcattcatgctagaagctgtgttctagccatgcagttacatctctttctaaatgaggtcaggtttgcaaataataacaacaaaaaagctttgtttagtctttgttttgttttccaggacaaaaacaagcttccctaagcttgaatttatagttataaaatgaaaacaaaaccaaaaaaaa

SEQ ID NO: 605019 - DNA, 787 bp, Homo sapiens
cttcatggtactaaatgtcccttgagttatcaaatcaggccgggttgaaatcccaatagaacacgggttcttccctcaacccttccagtactttggctttaaagcactcgcaagtgtcttcacagtttccccccctatcctgaattgcttggtccccccctcctcagtaacttgttcaaccctttcggcgttattccccaagattattcttgtcccccctttctcatgcaacgccccgactggttatgtcctcgagttgaccgcctgtactcatacctctatccccagcacccgctatgaaaatgtgtacttatccgtgcatttacattatgcgtctacgtattttcaaaactttttcacgccacacgaatacggcaaaactcttttattctagaaaagctccccctgccccctttaacaaagataggacccccaaaaagggaacacgaacgtctatttcccccgtacccgatcaacctttgaacctccccctcattgctaattgagcgaccataattgggtacaataacattgattagtcggcctctcatctcttgtaagaatatgacacaccaagcttcttttcggaaggtctttgaaaaactattttttacaacacttgtctccctttcggcagcacagccactccctcccgcacccccatgaaatcttgcccaccattttccctcgattattcttttctttctatgattctatgtcatcatcttctagtaaacaattctcacaaaacacacataccagatcctattccgcgcccaacaagaca

SEQ ID NO: 605020 - DNA, 495 bp, Homo sapiens
tttttttttttacaggttcagctctttattggctaacttaacaaaagcagtttagtcaaaaagaccaaagcccatgtcatcttcagactcctcggactcttccttctttgcctccactttcttctcctcagctggggcggcggcagtggatggagcagcaccaccagcaggcgcagtccagctgctggagctggcccaccagcccctacattgcagatgaggctcccaatgttgacattggccagagccttggcaaacaagccaggccagaaaggttcgacgctgacaccagctgctttaatgagggcattgatcttatcctccgtgaccgtcacctcgtcgtcgtgcaggatgagggcggagtagatgcaagcgagctcggagacggaagccatgctgtagactgccggcacggtgctagtcgccggatgaagtgagggcctcaccccaacgcgggcttagcttcctgggaggaccgagcaccttggcttgtgc

SEQ ID NO: 605021 - DNA, 127 bp, Homo sapiens
tgctaggcagcaaaggcagagcaggttttgttcaggacgacctttgagcaagagtaattcgctaaaactgctggtccacatagtcggtgatgggcttccagcactcggtgttgttgacagcgtcccc

SEQ ID NO: 605022 - DNA, 176 bp, Homo sapiens
  misc_feature (168)..(168): n is a, c, g, or t
aaggccccgtgtcgttcttacggggtggatgtcagtcagtggttctcaacgggacggagggagagactgccccaggtgatcttggggaactgtctggagacacttctggttggcacatcttggtggggaggccgcggacatccagtggttttgacggccgggaatgcntgctgaac

SEQ ID NO: 605023 - DNA, 581 bp, Homo sapiens
  misc_feature (187)..(187): n is a, c, g, or t
cagatatcccaagctttaccgccactaaggagttttgtattatcaggtgtatgtatatgccaataattctgtaaaagaagaattttccttacttgagatatattgtttctgtagccaaagactggagtttagttaattctggaagctttttttacttagttgaaatctgacagctagtacacagtcnatggattggtaaaactgctgccaccttagtataaaccaaggcactacctccaaaccaatacaagtaagcagtcatcgtgttctgtatcatcacctactcgcggtaaaagcatggcagtttcaccttagaagtttcttgaagtaaaacaccttagttttattatatcttgtccatgaagtcaacattgtttttctattctctgtgatgaagtgggaagtacacgtaaagcagtttctttgcatactgatggttatcttgagttaaagcactcatgcaactgagtttcaagctgaactatccacattgttcatggaacaccgtttttaattgtaagagttactgataaactatggttattcatgcttggatatttggcagacatttacttgaaaat

SEQ ID NO: 605024 - DNA, 456 bp, Homo sapiens
ttgaatttgagacctattgtaagcatgatccctacctacaaccctatttttacatacccaattccagtaactctcaaatccagtattttactcaaactctgttggggcattttactaaccttgttccctttttggcctgtaagacactttagagattcctaacagagtttactgttgtttagaaatttgcaagggctttttttcagcaatgccaccagcagattataatcttgtcaacagttcattgtctcctcttagtaccaccagtcacctgcatcattcatgctagaagctgtgttctagccatgcagttacatctctttctaaatgaggtcaggtttgcaaataataacaacaaaaaagctttgtttagtctttgttttgttttccaggacaaaaacaagcttccctaagcttgaatttatagttataaaatgaaaacaaaaccaaaaaaaa

SEQ ID NO: 605025 - DNA, 399 bp, Homo sapiens
gctcacgggtccttccctgtcttccacgggcaggaaaagcgccacgtttctggcaggtgtggaagtgaaacctacccgatagaactattagatgtaaagcattgaactgtctactagtaagtacaactcagagagagctgtatttatgaaggataaaatgtttattattggggagtggggagagaagaagaaattattgttcatggctgcaagatatttagcaactatggtattcttattctgaagatttttgcacactcaggctatctgaggaatactggtaatcgatcctgtgaaaaatgttcagagatgcaggtctgtgatattaaaatcttggaacattatatagttcttcctgcactggattctttattttcttattcatttggtatataccca

SEQ ID NO: 605026 - DNA, 195 bp, Homo sapiens
gcacgaggttgctatagacacattctgtgatcctttccatctgcaaaaatggggctaatacccaccagaggctgcaacactcattatcattcccagtactaacaacaggttttgagcgcctactgtgtccaggcattgttcaggctctggagatttagtagggaactaaacagatctcttctgatctgtacccct

SEQ ID NO: 605027 - DNA, 236 bp, Homo sapiens
  misc_feature (85)..(85): n is a, c, g, or t
gcgtcgacaaagttgcaaaattggatcccccgagctgacaaggtgaaaatctgtcgttctgcccctgaacaaggcagttaacccnccgttcctaggctgtcattgaaaataagaatgtgttcttaactgacttgcttagttaaataaaggtgtaaaaaattgtacaaaaattgtttcgaaaacttgaaatcggccctaattaaatcggccattccgattaatcggtcgacctctac

SEQ ID NO: 605028 - DNA, 907 bp, Homo sapiens
  misc_feature (97)..(97): n is a, c, g, or t
  misc_feature (229)..(229): n is a, c, g, or t
  misc_feature (234)..(234): n is a, c, g, or t
  misc_feature (281)..(281): n is a, c, g, or t
gaggttgcgaagatggcgacggccttgagcgaggaggagctggacaatgaagactattactcgttgctgaacgtgcgcagggaggcctcttctgaangagctgaaagctgcctaccggaggctctgtatgctctaccatccagacaagcacagagacccagagctcaagtcacaggcggaacgactgtttaaccttgttcaccaggcttatgaagtgcttagtgacccncaaancagggccatctatgatatatatgggaagagaggactggaaatggaanggatgggaggttgtggaaaggaggacgaacccctgctgacaacttcgacgaggacgtctcgacgcggctgcacgagacgagagagacacgacgaggacgattcgcagcagcgaaccaatcccaaggcgaacgatcagcgttggacgtagactgccaccgacctttctgcatcgctactgatgaggacgtatgaaccgatgtgctccggcaggtagctttccgacacgactttgaacacttaataacaatgcaacataatcccagatccattgaggcacccttgacagcgacagacacagacatcctctctggaagcctctcaacccagaatggaacatggaggaggttccattaactccgcgctcagacgcagtaacttcgcgccaaagcggatggcgaagagctcggaatcaggagactggcacgacctacacggccgcctttgtatcggtactcaacgctgcttccgctaatctcacaccaacgatgccttcggcgacaaccacaccgcgctctgcagtcttcactaccgtggacatccgacccggcctgaccactgaccacacccggcacctacacaagaacaccgcgcagcaccgcaccggcgagcggtatccagcccccca

SEQ ID NO: 605029 - DNA, 884 bp, Homo sapiens
  misc_feature (97)..(97): n is a, c, g, or t
gaggttgcgaagatggcgacggccttgagcgaggaggagctggacaatgaagactattactcgttgctgaacgtgcgcagggaggcctcttctgaangagctgaaagctgcctaccggaggctctgtatgctctaccatccagacaagcacagagacccagagctcaagtcacaggcggaacgactgtttaaccttgttcaccaggcttatgaagtgctctatcagattccggggcgtcctgcactcaggtgactggtgcgtggactagtgaggccctccggataccaagagcagtcccagcaggatcgatacatgatggataaactgcgcaaggaaccagatttttaaaaaggccgctataaaaattcttttccgtgggagtctacaatatttggacaatggaaaaaacccagacatcagcatgtcttttattgttatattagttagtatatagaaggtggtaccattagtcaagttatgtgaagggactgtgcagacaccccagcgttttgagggtgctgggggtaggactgacggcatgccccatctgggaaccagatctgcagcctgggccatggctgttttcccaaggatcagtttcctggagggaagggctctggccctgactccgcctgtgtcccgagcacacgttgctgacctgtatgccgccgtctggtagttcttgcgctgggtctggcaggtgtctgtgggcaccctggccttcccacaggatcgtgggccccttctgcttcccgctggcctggggacacacctaaagccgggggctccgggaggggcctgtggggttccggagcccccttggcgttcggtgatcgggagaggggtaacacggtttgagacggggaatagttacccagtttcg

SEQ ID NO: 605030 - DNA, 133 bp, Homo sapiens
  misc_feature (69)..(69): n is a, c, g, or t
  misc_feature (74)..(74): n is a, c, g, or t
  misc_feature (107)..(107): n is a, c, g, or t
gatccgcaagaacaagtaccgcccgacctgcgcatggcagccatccggaggcccagcggcatcctgcgnagccnagaagcctgtgatggtgaagaggaagcggtccngcccaaccaagagctccttgaggccc

SEQ ID NO: 605031 - DNA, 446 bp, Homo sapiens
tcgtacagagggtggccgtcgtactgatcgtagagcgggtctggccggcgtgtactcaatgtagggcgaggacatgcgaacgggacatgggagcgtgctggcgactcaccacgctgtggctgcacgatggctggctgtggtagacttagtgcggggtcagccacggcccaggaggactcattttctgaacataaagtcgcctccgtaagtccgctggatcaaggtggtgttgcagctgttgcaccccagtggcaatgcccgtctggaggctccgcggcttggcgcccagatatgccatgttcacgttggtcttgtcggccgtcgatgatggggttcgggtctttgcaatgccctctcagctgccgcccggtcggccatggtcacgaagccgtatccgcgggacttgcccgtctggcggtcggtgatgaccacgggcaccccctgct

SEQ ID NO: 605032 - DNA, 681 bp, Homo sapiens
  misc_feature (29)..(29): n is a, c, g, or t
  misc_feature (134)..(134): n is a, c, g, or t
catttaatgtcaaggctttgactccagtnaacctaccatccatagcaagtgtcagagaatcgtctgcaaattgtcatctctctcctttgacctagcagtgtgcatgcagattgtgcacaataaggcctgtccangtacgcatgctataaaaggttacattcttttacagctttctgataattattattatttccagaaagatatttttgtttgccccatttaaaaaaggttaaattgagtcactgtcttcactttcatgagtaccttgtaggacactattaataatgataaatagctaggcttctctacattaccttaatttttctgttgttgttctcagtacatctaagagagtagcatataggccatgtgtatgtggtgataaatggaaaggcaggggtcttacttggttatttagaacttaagattttatacagtcattttcaactgtaattgaacacttcactttaactcccttcagaaactctaagctcatagtgtatcccaggtagtagaatttctgttcatctgtttataggcctccaccgcaagaaattggctcccaacctattcccattacatcatcacccggtaatgtcattacaccagaatgaaatttgcttccaggcttgtattgttgttttccttcatttctttcccctcatcatttcctttagaagc

SEQ ID NO: 605033 - DNA, 1142 bp, Homo sapiens
cacgatggagctgccctgcatttaacctgtgtgacagcaagactccgtctcaaaaaaaaaaaagaacgaaagaaaagaaaagaaggaaatgaacgctggggcacagtgtgctcagtcctgtaatacccagcaccttgtggaaggccaaggtgggaagatcccttgaggctaggagttagagacaagcctggccaccatacgacaagaccccatactctacaaaaataaaaattataaaaagggctggggcatttgagctgggtcccaagaagatagacaagtagaaaaggcatgtgagagggcataccaggtggagaggagctgtgtgcaaagggcctggagatggaaaaacatgctggccaccagcttctgacaagcagtataaaagtatagaaccggttatgcatgggaacagatggtgaatggtagggcaaatgtgtgtgatgcgacactgagcaacccgtatagtgataccttaaaaaatgaccagcattgaggaacctggtactactatcctgaagaggaccctagaagagccatggaaaggtttaaaagtaggagtgggtcatggataaggaaaaggagataaagagatgatcccccaaaatagcactggacaaaggtggaagcaaagcaggagtacctgaggacaggagataacatgatgagcgaggcatggagcattacacgaccatgagccaaacaaaagacagggcccaaatagaactaggccaaataaacaaaatcagggacaacgctgaaggacaccaagacgaacaagagaaagaaacccgagcagaccccaaacaacacaaagggaaatgggagcaaggacaccggaacagaacagcacaaaaagacaagtattgcaacaacgacaaaaagcaccaggcaaagactgaacagggagcccaaagaaagcagaccgcgcaacgggaacaaaaacgcaacgagccaaaccggcgggacaagagccacaccaaacgacaatgggcccagagacaaaacacaaaccacacagcaacaagaaaacaccccaaacaacgacagcaaggaaagagacacagaccaaaaacaccagaaaatgtaaagaaaaaaacaaaagagacagagaccacaaaagagaagaaacagaaaataat

SEQ ID NO: 605034 - DNA, 638 bp, Homo sapiens
tcctacccctatctggggacattcaaaaactgccgtgggtggtttgagaagagacaacccagtttgatctgcaatacaaggatccattcgtaatctctctctcacgtgatgttatccccccatctgccgtctgggttcatctcaccacagagagggcttttagtcctacccagccatcggctgcgtatgacagcgaggagtggcacttcccatttctcgtggtggttagtgctcgagttgaaacccttcttttcagcgtgagtctcctcgtggaggtctcgtgcgtgtgggagtctccgtgggtgtggcgtgagtggcaagtgcatgtgaggaggctcgtggtctccacccttcaagccgcccgttctttcgccctgttttcccagtgggcctctcgtgtcaccacaaaaatgtgaagaacacagaaagatgtgttaggaactttaaagaagaaagtgtttgggaaatttcaaccacccctctttggcaagtctccttttttcagagggcttgcagtgcctcgtggtgcctggtgttccccagtgcattgtgtgaaaagttagaacgctggtgaatggcgtgcgtgggacgcttggcaaaagcaatcagtggtgtttgaaaatggcagcacaagaacc

SEQ ID NO: 605035 - DNA, 753 bp, Homo sapiens
ctgtaatcccagctctcagggaggctaagaggcgggaggatagcttgagcccaggagttcgagacctgcctgggcaatatagcgagaccccgttctccagaacaaaggaacaaaaaaaaaaaacaaaaaacaccaaagcgccaaaaaacaacaaaacaaacaaaaaaaaaaaaaaaaggggggcggcgcccgcgccccgaaaaacactccaaaaacacacgggggggggcggggggcccacaatggagtactagagacaccgctgtgacacaagcgagtgggacccacaagaagaaacccctggggcgaagaaagaaaaaggcggcgggggatactcccacccaaataataaaaacccgccggggggggaccaacagggtgcgtcttggggaaaccacaccccaagagggggggcgcagacgggcccacaccaggagggacacaaaaacacgcagcggcacacacaggaggcgggcccgactaacacaaaaaataaagagccccccactggggagggaacaacaacacaagcacgcagcgcacgaaaaacggcacccccaaaacgcgagcgaggacaagaagacgaagggagcgaacgaacaccaagcagggcaacacgagggaacaggagccgccgaactagacaggcagcaccacctaccgaccgaccaggaagcacgagaaagcgacgcacaccgaaccggacaacaaagaaccgcgcagaacaaccgcacgccccagaacaccagcaac

SEQ ID NO: 605036 - DNA, 199 bp, Homo sapiens
tctgctctgacatttcctctagaaagaaaaagaacacatatagaatgaaaatacaaatcagatgtatgggtttccttccttccgtcaactatattctgttatatcactagcccatgttacttaaatacctgttcctgattattccattacaaaggagaacggtacataaacaagaaatattgcctttttggttgtgtgt

SEQ ID NO: 605037 - DNA, 1002 bp, Homo sapiens
gatcatccggttggataatggttctagatggcgtgcttgttggacaccccgatccgcatgagcgtacttttcggaagtaacagatagcacgtgcgccgactatgtagactggctatttgaccctgatcccacagaaagttctaccataggtcgttcagtaagcttcatcgtataacaactgctcgtacatctggtaaagcataccacaatgcagcaatagctcacattactccatttgttctttatggacgcatgtacctatgcatgttcgtttctgtgctctcagctatagataattgcatctagcctcagacgctgagactatttgatatgtagcagagagcgtctgggaaggtctttgcctatggtgtactgacataacaatgtccttggtgtctacctggatctgccgggattattcctgctctgtcctgtgcgtggtacttaccatgtctcccgagagctgtaggtattattgagcgctcagcccttccgtatgtccatgcgttacttgatcttacacacagttcgctgtacactctctaggaggtgctactgtatatcgagagtgctcacctgttgataccggctacctcatgggtactgcttagaaggtcccgatatacccatggagtacttctgttcagatcttcttagaactgctgtagaaaggggcagatctatcatacaaatctctcatgtaaaccacggggcagtcagaatatgtcacgtacgtaggcctagtctacaaagttgaggcagcaaagcaggttctcaggctgctgggatcccctagttgaggctggaaaggtcgcggagggaaatgtggcccattgggaaggtcgcggatcgccttgagcgggcaccggggtacccctgtggggggtacggtagggtgtagaacccttcttatgtagaagtgccaccattgaacttgtaagaacttagacacctcccgtgtaaaaaacgtctgcgtctgttatatggtggagatattttgga

SEQ ID NO: 605038 - DNA, 1861 bp, Homo sapiens
  misc_feature (458)..(458): n is a, c, g, or t
  misc_feature (542)..(542): n is a, c, g, or t
ctccagaaggtggctgaataacagtcaccacctggaaagcatctcttctacccacaacgtaagactcgacttggagctgtcgttttccattcgtcatgtcaccagtctgcatgccgctcccatgaggagtgtattacgggtgggaattgactaaactgagggaaccattgcaatctcgtcacctgtgatccacctgttgtagcaagcatgtgatgagctggcctgtccttgttgcccgctagatagcacgagaggccttcgagtaatggctccactctatcctcatacgagatcgtctaagaaggatgtcatgtatctggtataggactggtctacgcttcgtgtgaaatgcatgtcggcatagtgatggtgaatgacactagctcacagatgtagtgaccaacaagtgtaagcctgaaaggattccatgggactatagggaagattgtacctcctantttgtggtttgcctacctgctatacagacttactattcacattacagattcactcacaacaattttccatatacagcgtcgccnttggcatatacatagtgcttgacatacacagagacaatcccacagtgattccatacagttcgcgtattagtttggcaatctttaatccattggaatatccggatactcactaagaccctcctggagtatggaaacatggtttgtgaaaaaaagtgtggcttagtcgagggcacgcaacaaattacttaatttataggttaatacgcgattacaaaggcaaggggcctgaagcaccagttccagcatgtagcctagtgaaccttgtaacacgtaggtttaccctccggttggggaagtggtaagcgtcccgaattgggtgggcaatctataagccttaataacgtctctccgaatttgataaattgcacgtttgaagcgaaaatcgacaaggtttgggggaatagcctttggcgcgggtgcaaacttatgggagacccacgggaataatggaccggttgccattctttgggtatattgtagacacagcacatttgggatttgcccagagacacagcacattatcttttggtgaacgaataaacccaaggcccctaaagaccaaaaagtctcgtggtcggtccccccccaggaaaaattcccacagcgggtcaccttggatttcttcctttggctagggatgggtgacgggagcctttgtgggtttcccttgggaggcagggcccggttaattccggcatacatagagggttggtcgaagctccaggacacgtgaaaattacacatcggctagggacttaaaaattcgtcccttcccccagaggaggtagggaatgccccccacagaggtattatgtaaggcgcatgtagagattacagtatattacacccgcgagggaggaacaccccaaggagttatggctagccacgcggcgagaagaaaaggacgcccacacaacaggcacatacgaggaagaccctcaaaggaagaagacagcacgacacaaactaagaggcacacagaacataaccaccaaaagaggagggagtagaaagacccaccccacaacaaacgcgaggcaaacagcagaacacacacccaacggtaggattcagcaaagggagctcacaagagagacgcaaatagacaacaacgagaacgcagcgtacaacacaatacgacccaacaggaaatagacgcaaaagaaagagaaggacaaacacacatagtggacgatgtgtgagaaccaaagaaccaaaggcaaagagaagaaacacagagtagctagcgaacacacaataaccgaagaggatcaacaaccaacaaacgcagaacaacgacgaccacaggacatgacaag

SEQ ID NO: 605039 - DNA, 774 bp, Homo sapiens
  misc_feature (18)..(19): n is a, c, g, or t
  misc_feature (26)..(26): n is a, c, g, or t
tggcaggcttggtacccnncggttantgggatggcggctctgaagagttggctgtcagcgcagggtaagcttcattcttcaggtacctgctgggctccgagttatgagttatacagcccctgcaagtaaatccaagagcctgttcacagattcggcatgtcgtgccttatgaaatctgacttctacttccagtaaatcagagcctcataacccttagtagtgaagcattgatgaggagagcagggtctccggtaacagatagcacctctaccttgctctctcagaccacatatgcgtcgacttgaagctatgactgactatactaaggctgtttataccttaacttctcttctaccgaacaatatacaagtattagcttgggaaaatgaatacagaggaggaagatgaaggtgtggcagagtgatcataggaagcacagagctgagatgacttcaaaaaagcaagagtacttgacagctggaaaacagttggatgactgcagaggtacatcaagacgatggcagccagaaacgctaggatagtcaagactggacagatgtaatggcgatcgaacagattagacaagacggacgagaatgcacatgcacacatccgtcccaagtaaacatgtcggaacatagggaccctggaaagggtgcctgggagcaacgcagggaaaaactcagaaaaaggagcatacaagacgaaaattgcacagaaaccgatgtatagccaagaaaggggaaaaaacacaaaacctagaaagaagaacca

SEQ ID NO: 605040 - DNA, 119 bp, Homo sapiens
gtttcttcactagtattagtatcatttcaatattctaggatttcaaagattactaatacaataaagaagacaataacgcaataaagaagcgaaaatagcaataacagaaggaacataag

SEQ ID NO: 605041 - DNA, 261 bp, Homo sapiens
cgatatagaagagacgagatgggaacgttgcttaacagaaagcctagggaaactttagtgctagatacaaaattcacacagtggaatacggcacgtgactctggtgtgagactggtgaatgtgtcctcagccattcagcaccatgcggatgatgctccgccccatggtgcccgtcaccccgactggatatgcctcacaaacgcttcatagttgatacaaccattgctgtcctcatgccctgccaccagcatctcgtctctt

SEQ ID NO: 605042 - DNA, 311 bp, Homo sapiens
atatgctgtctcaaaatgcaaaggaattaaacaatgacttcaaacataatagtttcattggttaggtaagcacatgtggggcacatcctcccccggctccctctttttaatgccagccacggtacgggccttcatagaagaatgagatcctgtagagaatgagattaagaatgactaatgattcttaatcatttttccggccaaatacccctctagcaaccgggtaaaacctatacacaaacctcttcttataaaaatgtttagaaacacttaaaatgaaattcatagaggattataaagtaaacttatgt

SEQ ID NO: 605043 - DNA, 147 bp, Homo sapiens
tgatgctgcaggtactctagaggagccctagggtcttagggaggtgggtggggagccaggtgcagcagcaggcaggtaaaggtaaatgaaggctgagtgataggtggggtactcagtgacagagttctgaggcagccatcgctcttg

SEQ ID NO: 605044 - DNA, 656 bp, Homo sapiens
  misc_feature (595)..(595): n is a, c, g, or t
gggaccaggcgcactccatctccatacattagcacactaatccgcggcccgccctgtggactcatgcttgtgatcccagcactctgtgagagcccgggccctgtagcacacaccgtgccttccctatagcccaggatgtgaatctgaatctacaggcagactggaccaccttttccccatgcccccagaatgtgcacaagggcttccttggctacacatagaaggattagaatcctccctactctttccacactgtgagagactgactggtgtgaaggtccggtggttttgtgtggattttactaccagggtcggctatgataagggggagctttcattacattctggaagactgtcccacgcacacacgcacaggcgtgcttccttcccccaacatctgagctaactctctctctgcgttgctgaagctgtgctggcctaagaggattagagcctttgctaaacgggaccaggacaggcagggtcagagaacccgctgtggggagacccacagcccggatggccactatggggcggcagaagaagcgagacacggagagaggtgtggagtgctcaggagaggcactccgccggnttagcagcgatcaatgtgcacaaagtgacccctgaagggttatatctttttttacctgtgg

SEQ ID NO: 605045 - DNA, 288 bp, Homo sapiens
ggatgagtggtccctttttctgaccaccgtgactccaccccttgtttccgtgatctgactctgcccgacttgatctccacctctagtgcgctgcgatctgactctgctcgacgtgttctccatctctagtgtcgcgcgatctgactctgcccggcgtgtcctccatccgtagtgcctgttatctgactctgctcgacgtgagctccagcccttgtgcctgttatcatgactgcgctcacatgatcctcctaccccttagtgactgtctgatctgacctgtccttaggc

SEQ ID NO: 605046 - DNA, 521 bp, Homo sapiens
  misc_feature (5)..(5): n is a, c, g, or t
  misc_feature (34)..(34): n is a, c, g, or t
  misc_feature (66)..(67): n is a, c, g, or t
  misc_feature (72)..(72): n is a, c, g, or t
  misc_feature (90)..(91): n is a, c, g, or t
  misc_feature (107)..(107): n is a, c, g, or t
  misc_feature (119)..(119): n is a, c, g, or t
  misc_feature (140)..(140): n is a, c, g, or t
  misc_feature (144)..(144): n is a, c, g, or t
  misc_feature (153)..(153): n is a, c, g, or t
  misc_feature (174)..(174): n is a, c, g, or t
  misc_feature (192)..(192): n is a, c, g, or t
  misc_feature (197)..(197): n is a, c, g, or t
  misc_feature (223)..(223): n is a, c, g, or t
  misc_feature (229)..(229): n is a, c, g, or t
  misc_feature (250)..(250): n is a, c, g, or t
  misc_feature (256)..(256): n is a, c, g, or t
  misc_feature (261)..(261): n is a, c, g, or t
  misc_feature (265)..(265): n is a, c, g, or t
  misc_feature (270)..(270): n is a, c, g, or t
  misc_feature (277)..(277): n is a, c, g, or t
  misc_feature (295)..(295): n is a, c, g, or t
  misc_feature (299)..(299): n is a, c, g, or t
  misc_feature (303)..(303): n is a, c, g, or t
  misc_feature (327)..(327): n is a, c, g, or t
  misc_feature (332)..(332): n is a, c, g, or t
  misc_feature (343)..(343): n is a, c, g, or t
  misc_feature (357)..(357): n is a, c, g, or t
  misc_feature (364)..(364): n is a, c, g, or t
  misc_feature (366)..(366): n is a, c, g, or t
  misc_feature (368)..(368): n is a, c, g, or t
  misc_feature (382)..(382): n is a, c, g, or t
  misc_feature (402)..(402): n is a, c, g, or t
  misc_feature (420)..(420): n is a, c, g, or t
  misc_feature (422)..(422): n is a, c, g, or t
  misc_feature (428)..(428): n is a, c, g, or t
  misc_feature (435)..(435): n is a, c, g, or t
  misc_feature (449)..(449): n is a, c, g, or t
  misc_feature (521)..(521): n is a, c, g, or t
taggnagcagttaggctgagtttaatgatggggnactgggccagaccaaacacagacctctgcccnnccccntggcctttggcccatggnnccaagaggccagaagnggcccagagggngccatggttcccccccaaggnaggnagccatggncccttagactttgtgcaaaanactaaatgctaatttggnatcgngggccagccctgaaaagagaaggggnaatccnctgtgcagccagcccaggggncaaggnaaggnaggntacgnggccccnggccaagagaaaaggggnaggnaggnaagaagaaggaaaagacccccccnccccnagcatgggggncacaggcacagggnaagtttntntnaattcctctggggnagagggcagacatccaagcngtggggattacagatccncntctccnatgcccncgaaggcgaaattnccgtggacatcactggcactggcatctgtgctgggactgccaattccccgcaagctcacggcacttagcttn

SEQ ID NO: 605047 - DNA, 449 bp, Homo sapiens
tgtcgacctcactccatcacgtgctccccactgtgctcaccactaccagccgtaagaagaagcccaagaagacagaccttgtgagtcccctctgtcaacaagccaaaagcatgccactgtctcaggacacgtgggagacatgacacatgttaaggtacaggacaagaatgtccccagtcctgctccttttagggtaacccaaactgattcaaacctgaagaagctgcagaatatgaagaagggttactagcagctgcccatctagcatctaattcctggccccctggtagggcgtggccaagcgtcaggctacactgctacagatgggtaccttggttaggactgtggacatgctacccactagcaactctgtcttagcgggtggtatttgtagaccaggccagacctctataccatgcacagcatacctcactctatgacctctacct

SEQ ID NO: 605048 - DNA, 141 bp, Homo sapiens
tcctacaagatcagaaaaaagttacaagataatctagtatacatgcaaaatctatgtgctagaatactttgtataaaaggtattttgaataccattaaaactgctttattttttccagcaagtatccaaccaagagtgtcg

SEQ ID NO: 605049 - DNA, 181 bp, Homo sapiens
gattgttattcctgtgtctggaacaagcagcagctgcatttcagcacatggcagtcctcatcccatacatcagtcccagtggcagtgttcagcacagtgggtctgtggagtgcattcagcacatctgtgcaccacagggttcatttgcacatttggtcatggccaagcatgcacaattttc

SEQ ID NO: 605050 - DNA, 697 bp, Homo sapiens
aacgtgatatttggttcatgaaagagttgttttcatgtggttattgtaggcagtatatataattgtggaaggggtatgggaagagttgtgtatagttagttgtcatctctacacgctcgaccgttttcccatccaacatcatcactatcccactgttccaacactccgcctgccggctattatccgtctttccctcgaacacaaatccacctcacgcccacctagaactagacactctattacacaccgcctatagatatacctatatcgcacaaacccacactgctcatgcatatctccatccctctctccgtcgctatccctgcatacacactgcgtctgtcacctgcatccactaccttcgccgcatgctaacatcttccgcccctgccctgccaactcccctggcgaccactccgtcccccttcagactaaccgcactcttttgccacccccagccctcaccgtcctctaacaggcccctccttcataactgtctcccatgccctccatcccctcgctcccctcccccctacacttcccaaccctactccccccacccaacctaccccctccacccttcccccgcactccacctccaacctccacatcccgcctccctccctctccctccccaatcacgtccctcccttctactccccgctcctctccctctccccccccccccgcttccccc

SEQ ID NO: 605051 - DNA, 3077 bp, Homo sapiens
  misc_feature (252)..(252): n is a, c, g, or t
gtcatgggcagtgagtgcccctttaacagagtatgattcttccatgtgaacagtacttactatgcgaatgtctcagcagcaaaatgtcaagaatttggaaggtggtacaaacatttcaagaagacaaaagatatgatggttgaaatggatagtctttctgagctatcccagcaaggcgccaatcatgtcaattttggccagcaaccagttccagggaacacagccgagcagcctccatcccctgcgcagctnctcccatggcagccagccctctgtccggacacctcttccaaacctgcaccctgggctcgtatcaacacctatcagtcctcaattggtcaaccagcagctggtgatggctcagctgctgaaccagcagtatgcagtgaatagacttttagcccagcagtccttaaaccaacaatacttgaaccaccctccccctgtcagtagatctatgaataagcctttggagcaacaggtttcgaccaacacagaggtgtcttccgaaatctaccagtgggtacgcgatgaactgaaacgagcaggaatctcccaggcggtatttgcacgtgtggcttttaacagaactcagggcttgctttcagaaatcctccgaaaggaagaggaccccaagactgcatcccagtctttgctggtaaaccttcgggctatgcagaatttcttgcagttaccggaagctgaaagagaccgaatataccaggacgaaagggaaaggagcttgaatgctgcctcggccatgggtcctgcccccctcatcagcacaccacccagccgtcctccccaggtgaaaacagctactattgccactgaaaggaatgggaaaccagagaacaataccatgaacattaatgcttccatttatgatgagattcagcaggaaatgaagcgtgctaaagtgtctcaagcactgtttgcaaaggttgcagcaaccaaaagccagggatggttgtgcgagctgttacgctggaaagaagatccttctccagaaaacagaaccctgtgggagaacctctccatgatccgaaggttcctcagtcttcctcagccagaacgtgatgccatttatgaacaggagagcaacgcggtgcatcaccatggcgacaggccgccccacattatccatgttccagcagagcagattcagcaacagcagcagcaacagcaacagcagcagcagcagcagcaggcaccgccgcctccacagccacagcagcagccacagacaggccctcggctccccccacggcaacccacggtggcctctccagcagagtcagatgaggaaaaccgacagaagacccggccacgaacaaaaatttcagtggaagccttgggaatcctccagagtttcatacaagacgtgggcctgtaccctgacgaagaggccatccagactctgtctgcccagctcgaccttcccaagtacaccatcatcaagttctttcagaaccagcggtactatctcaagcaccacggcaaactgaaggacaattccggtttagaggtcgatgtggcagaatataaagaagaggagctgctgaaggatttggaagagagtgtccaagataaaaatactaacacccttttttcagtgaaactagaagaagagctgtcagtggaaggaaacacagacattaatactgatttgaaagactgagataaaagtatttgtttcgttcaacagtgccactggtatttactaacaaaatgaaaagtccaccttgtcttctctcagaaaacctttgttgttcattgtttggccaatgaatcttcaaaaacttgcacaaacagaaaagttggaaaaggataatacagactgcactaaatgttttcctctgttttacaaactgcttggcagccccaggtgaagcatcaaggattgtttggtattaaaatttgtgttcacgggatgcaccaaagtgtgtaccccgtaagcatgaaaccagtgttttttgttttttttttagttcttattccggagcctcaaacaagcattataccttctgtgattatgatttcctctcctataattatttctgtagcactccacactgatctttggaaacttgccccttatttaaaaaaaaaaaagaaaaaaaagagtttgttactctattgtatgttacaaaagaactatagactgtggaatgcagtttaaagatgacatatgccaacaaatgccttgtattatatggcactgccgtaattcaaatttgtttttattttggaaataaaagttcactgtacttttttttcattctcattgttacatgattttttaaaaaaaggaaaagaaaatgtgaaacacaatttagtcctcattatttatttgtagatcctgcagcatcatgttgtaattaattttttggaagtttccgttaaatgtaatattgcttctcttgttaccatactgattcttttctatttataaatgtattttgatgggcagtaaaacaaagtgtcttaaaagttttaaatagagaaaatgtgctttacacagttgcctataaaaagtgctctatgttatccaagcaattcatactataagcttcactcttattgttgtatgcaatttttactatcatgcaaataagcttaggtaaataaaactaatagatcaccttagaaaattatgcaattaatgtgaaaataattgatgtttgcaatgtgtcttcctttggtttacaatcaattttaaagctacatctgtataaaatttctgtataaaggtgtatttcttttttatgagtttatggctatgaaaacagctattttgttacagctggctgtttttataagtgtatcacaattttctttatgcagaaatgttctgactaggagtggttattgactgtaactacacaattaaaattgtttgtatcgtatgacatggtagggtttgtctgcttatgtgaagtaactaaaggagtcaaaggatggccctctcatttaggtgcatgttaataacttgttatttcactgattttaaaaagagcaattgacaagttacttgaaacactgtaaatttaaatcacaaacacatgctcattttt

SEQ ID NO: 605052 - DNA, 210 bp, Homo sapiens
actattgctaagtgaggacggcatcacagcaatctcagccatctgtcggtgacaactgttgaccactttggagcccagcgtggtaattagtagctagaatcaggtgtacggtgtcctttatgtcaacaaggacgctatcgatgatcttgaccaggtgtacaatagaaacgcgagcagactgctaatagccatcggctattctgatagggt

SEQ ID NO: 605053 - DNA, 3139 bp, Homo sapiens
  misc_feature (252)..(252): n is a, c, g, or t
gtcatgggcagtgagtgcccctttaacagagtatgattcttccatgtgaacagtacttactatgcgaatgtctcagcagcaaaatgtcaagaatttggaaggtggtacaaacatttcaagaagacaaaagatatgatggttgaaatggatagtctttctgagctatcccagcaaggcgccaatcatgtcaattttggccagcaaccagttccagggaacacagccgagcagcctccatcccctgcgcagctnctcccatggcagccagccctctgtccggacacctcttccaaacctgcaccctgggctcgtatcaacacctatcagtcctcaattggtcaaccagcagctggtgatggctcagctgctgaaccagcagtatgcagtgaatagacttttagcccagcagtccttaaaccaacaatacttgaaccaccctccccctgtcagtagatctatgaataagcctttggagcaacaggtttcgaccaacacagaggtgtcttccgaaatctaccagtgggtacgcgatgaactgaaacgagcaggaatctcccaggcggtatttgcacgtgtggcttttaacagaactcagggcttgctttcagaaatcctccgaaaggaagaggaccccaagactgcatcccagtctttgctggtaaaccttcgggctatgcagaatttcttgcagttaccggaagctgaaagagaccgaatataccaggacgaaagggaaaggagcttgaatgctgcctcggccatgggtcctgcccccctcatcagcacaccacccagccgtcctccccaggtgaaaacagctactattgccactgaaaggaatgggaaaccagagaacaataccatgaacattaatgcttccatttatgatgagattcagcaggaaatgaagcgtgctaaagtgtctcaagcactgtttgcaaaggttgcagcaaccaaaagccagggatggttgtgcgagctgttacgctggaaagaagatccttctccagaaaacagaaccctgtgggagaacctctccatgatccgaaggttcctcagtcttcctcagccagaacgtgatgccatttatgaacaggagagcaacgcggtgcatcaccatggcgacaggccgccccacattatccatgttccagcagagcagattcagcaacagcagcagcaacagcaacagcagcagcagcagcagcaggcaccgccgcctccacagccacagcagcagccacagacaggccctcggctccccccacggcaacccacggtggcctctccagcagagtcagatgaggaaaaccgacagaagacccggccacgaacaaaaatttcagtggaagccttgggaatcctccagagtttcatacaagacgtgggcctgtaccctgacgaagaggccatccagactctgtctgcccagctcgaccttcccaagtacaccatcatcaagttctttcagaaccagcggtactatctcaagcaccacggcaaactgaaggacaattccggtttagaggtcgatgtggcagaatataaagaagaggagctgctgaaggatttggaagagagtgtccaagataaaaatactaacacccttttttcagtgaaactagaagaagagctgtcagtggaaggaaacacagacattaatactgatttgaaagactgagataaaagtatttgtttcgttcaacagtgccactggtatttactaacaaaatgaaaagtccaccttgtcttctctcagaaaacctttgttgttcattgtttggccaatgaatcttcaaaaacttgcacaaacagaaaagttggaaaaggataatacagactgcactaaatgttttcctctgttttacaaactgcttggcagccccaggtgaagcatcaaggattgtttggtattaaaatttgtgttcacgggatgcaccaaagtgtgtaccccgtaagcatgaaaccagtgttttttgttttttttttagttcttattccggagcctcaaacaagcattataccttctgtgattatgatttcctctcctataattatttctgtagcactccacactgatctttggaaacttgccccttatttaaaaaaaaaaaagaaaaaaaagagtttgttactctattgtatgttacaaaagaactatagactgtggaatgcagtttaaagatgacatatgccaacaaatgccttgtattatatggcactgccgtaattcaaatttgtttttattttggaaataaaagttcactgtacttttttttcattctcattgttacatgattttttaaaaaaaggaaaagaaaatgtgaaacacaatttagtcctcattatttatttgtagatcctgcagcatcatgttgtaattaattttttggaagtttccgttaaatgtaatattgcttctcttgttaccatactgattcttttctatttataaatgtattttgatgggcagtaaaacaaagtgtcttaaaagttttaaatagagaaaatgtgctttacacagttgcctataaaaagtgctctatgttatccaagcaattcatactataagcttcactcttattgttgtatgcaatttttactatcatgcaaataagcttaggtaaataaaactaatagatcaccttagaaaattatgcaattaatgtgaaaataattgatgtttgcaatgtgtcttcctttggtttacaatcaattttaaagctacatctgtataaaatttctgtataaaggtgtatttcttttttatgagtttatggctatgaaaacagctattttgttacagctggctgtttttataagtgtatcacaattttctttatgcagaaatgttctgactaggagtggttattgactgtaactacacaattaaaattgtttgtatcgtatgaaaaaaaaatacacctttatacagaaattttatacagatgtagctttaaaattgattgtaaaccaaaggaagacacattgcaaacatcaattaatttcccattaattgcataattttctaaggtgatctattagttttatttacctaagcttatttgcatgatagtaaaaattgcatacaacagtaagagtgaagcttatagtatgaattgctgtcgacgcggccggc

SEQ ID NO: 605054 - DNA, 3023 bp, Homo sapiens
  misc_feature (252)..(252): n is a, c, g, or t
gtcatgggcagtgagtgcccctttaacagagtatgattcttccatgtgaacagtacttactatgcgaatgtctcagcagcaaaatgtcaagaatttggaaggtggtacaaacatttcaagaagacaaaagatatgatggttgaaatggatagtctttctgagctatcccagcaaggcgccaatcatgtcaattttggccagcaaccagttccagggaacacagccgagcagcctccatcccctgcgcagctnctcccatggcagccagccctctgtccggacacctcttccaaacctgcaccctgggctcgtatcaacacctatcagtcctcaattggtcaaccagcagctggtgatggctcagctgctgaaccagcagtatgcagtgaatagacttttagcccagcagtccttaaaccaacaatacttgaaccaccctccccctgtcagtagatctatgaataagcctttggagcaacaggtttcgaccaacacagaggtgtcttccgaaatctaccagtgggtacgcgatgaactgaaacgagcaggaatctcccaggcggtatttgcacgtgtggcttttaacagaactcagggcttgctttcagaaatcctccgaaaggaagaggaccccaagactgcatcccagtctttgctggtaaaccttcgggctatgcagaatttcttgcagttaccggaagctgaaagagaccgaatataccaggacgaaagggaaaggagcttgaatgctgcctcggccatgggtcctgcccccctcatcagcacaccacccagccgtcctccccaggtgaaaacagctactattgccactgaaaggaatgggaaaccagagaacaataccatgaacattaatgcttccatttatgatgagattcagcaggaaatgaagcgtgctaaagtgtctcaagcactgtttgcaaaggttgcagcaaccaaaagccagggatggttgtgcgagctgttacgctggaaagaagatccttctccagctcagccagaacgtgatgccatttatgaacaggagagcaacgcggtgcatcaccatggcgacaggccgccccacattatccatgttccagcagagcagattcagcaacagcagcagcaacagcaacagcagcagcagcagcagcaggcaccgccgcctccacagccacagcagcagccacagacaggccctcggctccccccacggcaacccacggtggcctctccagcagagtcagatgaggaaaaccgacagaagacccggccacgaacaaaaatttcagtggaagccttgggaatcctccagagtttcatacaagacgtgggcctgtaccctgacgaagaggccatccagactctgtctgcccagctcgaccttcccaagtacaccatcatcaagttctttcagaaccagcggtactatctcaagcaccacggcaaactgaaggacaattccggtttagaggtcgatgtggcagaatataaagaagaggagctgctgaaggatttggaagagagtgtccaagataaaaatactaacacccttttttcagtgaaactagaagaagagctgtcagtggaaggaaacacagacattaatactgatttgaaagactgagataaaagtatttgtttcgttcaacagtgccactggtatttactaacaaaatgaaaagtccaccttgtcttctctcagaaaacctttgttgttcattgtttggccaatgaatcttcaaaaacttgcacaaacagaaaagttggaaaaggataatacagactgcactaaatgttttcctctgttttacaaactgcttggcagccccaggtgaagcatcaaggattgtttggtattaaaatttgtgttcacgggatgcaccaaagtgtgtaccccgtaagcatgaaaccagtgttttttgttttttttttagttcttattccggagcctcaaacaagcattataccttctgtgattatgatttcctctcctataattatttctgtagcactccacactgatctttggaaacttgccccttatttaaaaaaaaaaaagaaaaaaaagagtttgttactctattgtatgttacaaaagaactatagactgtggaatgcagtttaaagatgacatatgccaacaaatgccttgtattatatggcactgccgtaattcaaatttgtttttattttggaaataaaagttcactgtacttttttttcattctcattgttacatgattttttaaaaaaaggaaaagaaaatgtgaaacacaatttagtcctcattatttatttgtagatcctgcagcatcatgttgtaattaattttttggaagtttccgttaaatgtaatattgcttctcttgttaccatactgattcttttctatttataaatgtattttgatgggcagtaaaacaaagtgtcttaaaagttttaaatagagaaaatgtgctttacacagttgcctataaaaagtgctctatgttatccaagcaattcatactataagcttcactcttattgttgtatgcaatttttactatcatgcaaataagcttaggtaaataaaactaatagatcaccttagaaaattatgcaattaatgtgaaaataattgatgtttgcaatgtgtcttcctttggtttacaatcaattttaaagctacatctgtataaaatttctgtataaaggtgtatttcttttttatgagtttatggctatgaaaacagctattttgttacagctggctgtttttataagtgtatcacaattttctttatgcagaaatgttctgactaggagtggttattgactgtaactacacaattaaaattgtttgtatcgtatgacatggtagggtttgtctgcttatgtgaagtaactaaaggagtcaaaggatggccctctcatttaggtgcatgttaataacttgttatttcactgattttaaaaagagcaattgacaagttacttgaaacactgtaaatttaaatcacaaacacatgctcattttt

SEQ ID NO: 605055 - DNA, 2387 bp, Homo sapiens
  misc_feature (252)..(252): n is a, c, g, or t
gtcatgggcagtgagtgcccctttaacagagtatgattcttccatgtgaacagtacttactatgcgaatgtctcagcagcaaaatgtcaagaatttggaaggtggtacaaacatttcaagaagacaaaagatatgatggttgaaatggatagtctttctgagctatcccagcaaggcgccaatcatgtcaattttggccagcaaccagttccagggaacacagccgagcagcctccatcccctgcgcagctnctcccatggcagccagccctctgtccggacacctcttccaaacctgcaccctgggctcgtatcaacacctatcagtcctcaattggtcaacctctccatgatccgaagtttcctcagtcttcctcagccagaacgtgatgccatttatgaacaggagagcaacgcggtgcatcaccatggcgacaggccgccccacattatccatgttccagcagagcagattcagcaacagcagcagcaacagcaacagcagcagcagcagcagcaggcaccgccgcctccacagccacagcagcagccacagacaggccctcggctccccccacggcaacccacggtggcctctccagcagagtcagatgaggaaaaccgacagaagacccggccacgaacaaaaatttcagtggaagccttgggaatcctccagagtttcatacaagacgtgggcctgtaccctgacgaagaggccatccagactctgtctgcccagctcgaccttcccaagtacaccatcatcaagttctttcagaaccagcggtactatctcaagcaccacggcaaactgaaggacaattccggtttagaggtcgatgtggcagaatataaagaagaggagctgctgaaggatttggaagagagtgtccaagataaaaatactaacacccttttttcagtgaaactagaagaagagctgtcagtggaaggaaacacagacattaatactgatttgaaagactgagataaaagtatttgtttcgttcaacagtgccactggtatttactaacaaaatgaaaagtccaccttgtcttctctcagaaaacctttgttgttcattgtttggccaatgaatcttcaaaaacttgcacaaacagaaaagttggaaaaggataatacagactgcactaaatgttttcctctgttttacaaactgcttggcagccccaggtgaagcatcaaggattgtttggtattaaaatttgtgttcacgggatgcaccaaagtgtgtaccccgtaagcatgaaaccagtgttttttgttttttttttagttcttattccggagcctcaaacaagcattataccttctgtgattatgatttcctctcctataattatttctgtagcactccacactgatctttggaaacttgccccttatttaaaaaaaaaaaagaaaaaaaagagtttgttactctattgtatgttacaaaagaactatagactgtggaatgcagtttaaagatgacatatgccaacaaatgccttgtattatatggcactgccgtaattcaaatttgtttttattttggaaataaaagttcactgtacttttttttcattctcattgttacatgattttttaaaaaaaggaaaagaaaatgtgaaacacaatttagtcctcattatttatttgtagatcctgcagcatcatgttgtaattaattttttggaagtttccgttaaatgtaatattgcttctcttgttaccatactgattcttttctatttataaatgtattttgatgggcagtaaaacaaagtgtcttaaaagttttaaatagagaaaatgtgctttacacagttgcctataaaaagtgctctatgttatccaagcaattcatactataagcttcactcttattgttgtatgcaatttttactatcatgcaaataagcttaggtaaataaaactaatagatcaccttagaaaattatgcaattaatgtgaaaataattgatgtttgcaatgtgtcttcctttggtttacaatcaattttaaagctacatctgtataaaatttctgtataaaggtgtatttcttttttatgagtttatggctatgaaaacagctattttgttacagctggctgtttttataagtgtatcacaattttctttatgcagaaatgttctgactaggagtggttattgactgtaactacacaattaaaattgtttgtatcgtatgacatggtagggtttgtctgcttatgtgaagtaactaaaggagtcaaaggatggccctctcatttaggtgcatgttaataacttgttatttcactgattttaaaaagagcaattgacaagttacttgaaacactgtaaatttaaatcacaaacacatgctcattttt

SEQ ID NO: 605056 - DNA, 2053 bp, Homo sapiens
  misc_feature (14)..(14): n is a, c, g, or t
  misc_feature (20)..(20): n is a, c, g, or t
  misc_feature (22)..(22): n is a, c, g, or t
  misc_feature (25)..(25): n is a, c, g, or t
  misc_feature (31)..(31): n is a, c, g, or t
tgaatcgtagaccncatgancncancctacnagccttgtacgacttgaccattagtacgccaaccttggcacgagagcaacgcggtgcatcaccatggcgacaggccgccccacattatccatgttccagcagagcagattcagcaacagcagcagcaacagcaacagcagcagcagcagcagcaggcaccgccgcctccacagccacagcagcagccacagacaggccctcggctccccccacggcaacccacggtggcctctccagcagagtcagatgaggaaaaccgacagaagacccggccacgaacaaaaatttcagtggaagccttgggaatcctccagagtttcatacaagacgtgggcctgtaccctgacgaagaggccatccagactctgtctgcccagctcgaccttcccaagtacaccatcatcaagttctttcagaaccagcggtactatctcaagcaccacggcaaactgaaggacaattccggtttagaggtcgatgtggcagaatataaagaagaggagctgctgaaggatttggaagagagtgtccaagataaaaatactaacacccttttttcagtgaaactagaagaagagctgtcagtggaaggaaacacagacattaatactgatttgaaagactgagataaaagtatttgtttcgttcaacagtgccactggtatttactaacaaaatgaaaagtccaccttgtcttctctcagaaaacctttgttgttcattgtttggccaatgaatcttcaaaaacttgcacaaacagaaaagttggaaaaggataatacagactgcactaaatgttttcctctgttttacaaactgcttggcagccccaggtgaagcatcaaggattgtttggtattaaaatttgtgttcacgggatgcaccaaagtgtgtaccccgtaagcatgaaaccagtgttttttgttttttttttagttcttattccggagcctcaaacaagcattataccttctgtgattatgatttcctctcctataattatttctgtagcactccacactgatctttggaaacttgccccttatttaaaaaaaaaaaagaaaaaaaagagtttgttactctattgtatgttacaaaagaactatagactgtggaatgcagtttaaagatgacatatgccaacaaatgccttgtattatatggcactgccgtaattcaaatttgtttttattttggaaataaaagttcactgtacttttttttcattctcattgttacatgattttttaaaaaaaggaaaagaaaatgtgaaacacaatttagtcctcattatttatttgtagatcctgcagcatcatgttgtaattaattttttggaagtttccgttaaatgtaatattgcttctcttgttaccatactgattcttttctatttataaatgtattttgatgggcagtaaaacaaagtgtcttaaaagttttaaatagagaaaatgtgctttacacagttgcctataaaaagtgctctatgttatccaagcaattcatactataagcttcactcttattgttgtatgcaatttttactatcatgcaaataagcttaggtaaataaaactaatagatcaccttagaaaattatgcaattaatgtgaaaataattgatgtttgcaatgtgtcttcctttggtttacaatcaattttaaagctacatctgtataaaatttctgtataaaggtgtatttcttttttatgagtttatggctatgaaaacagctattttgttacagctggctgtttttataagtgtatcacaattttctttatgcagaaatgttctgactaggagtggttattgactgtaactacacaattaaaattgtttgtatcgtatgacatggtagggtttgtctgcttatgtgaagtaactaaaggagtcaaaggatggccctctcatttaggtgcatgttaataacttgttatttcactgattttaaaaagagcaattgacaagttacttgaaacactgtaaatttaaatcacaaacacatgctcattttt

SEQ ID NO: 605057 - DNA, 206 bp, Homo sapiens
tttaattcccgtgcatttgccagggtggggtacccccccctattttccctgcttgccctccagtgttgccaggcctagtgggccagccagggttcagccttcagtaaagggttccccggtttccaccccccattgcagggtttcccctaaaattgtgccctcttggagggggggggcccaactgcctttcaataaaggggttgcca

SEQ ID NO: 605058 - DNA, 171 bp, Homo sapiens
tgtgggcggcgcttgctttctgggagtggcgtccttgtgagcatcctggccggctgcctcctgaaccggcgcagggttgcccgctgactgcgcaagtgcgtccgccaagatccacctcttatcttctctccgaccgtgaagtcagctgcaccctctgctctgggctcaggc

SEQ ID NO: 605059 - DNA, 1226 bp, Homo sapiens
  misc_feature (5)..(5): n is a, c, g, or t
actcnagagcatcccctgtaacggttggcagccccaggtgaagcatcaaggattgtttggtattaaaatttgtgttcacgggatgcaccaaagtgtgtaccccgtaagcatgaaaccagtgttttttgttttttttttagttcttattccggagcctcaaacaagcattataccttctgtgattatgatttcctctcctataattatttctgtagcactccacactgatctttggaaacttgccccttatttaaaaaaaaaaaagaaaaaaaagagtttgttactctattgtatgttacaaaagaactatagactgtggaatgcagtttaaagatgacatatgccaacaaatgccttgtattatatggcactgccgtaattcaaatttgtttttattttggaaataaaagttcactgtacttttttttcattctcattgttacatgattttttaaaaaaaggaaaagaaaatgtgaaacacaatttagtcctcattatttatttgtagatcctgcagcatcatgttgtaattaattttttggaagtttccgttaaatgtaatattgcttctcttgttaccatactgattcttttctatttataaatgtattttgatgggcagtaaaacaaagtgtcttaaaagttttaaatagagaaaatgtgctttacacagttgcctataaaaagtgctctatgttatccaagcaattcatactataagcttcactcttattgttgtatgcaatttttactatcatgcaaataagcttaggtaaataaaactaatagatcaccttagaaaattatgcaattaatgtgaaaataattgatgtttgcaatgtgtcttcctttggtttacaatcaattttaaagctacatctgtataaaatttctgtataaaggtgtatttcttttttatgagtttatggctatgaaaacagctattttgttacagctggctgtttttataagtgtatcacaattttctttatgcagaaatgttctgactaggagtggttattgactgtaactacacaattaaaattgtttgtatcgtatgacatggtagggtttgtctgcttatgtgaagtaactaaaggagtcaaaggatggccctctcatttaggtgcatgttaataacttgttatttcactgattttaaaaagagcaattgacaagttacttgaaacactgtaaatttaaatcacaaacacatgctcattttt

SEQ ID NO: 605060 - DNA, 881 bp, Homo sapiens
ctgatgaccgaggcccccctgaagcccaagggcaatcagagagaagatgactcagattatgtttgagactcttcgaacacgcccgcgggcatgtacgtggccatccaggcgcgtgctggtcccatctacgccgtctgggcgcaccgactggcattgtcatggactctggagacggggtcgacccacaacggctggcccaagtctacaagggcatatgcgcctccccccaacgccaatcctgcgttctggacctgtgtctggccgggtacctgagcgatctacctctatgaagatccttctactgagacgaggcttacagttatcatccaccacggcggagcgggaaatcgttgcgcgacattcaaaggagaagtctgtgctaccgttctgccctgggtacctgcgacgcagggatgatggccatcggccgcatcacttcctcttcgtcctgggtacgcaagagctacgagcttgaccgatgggcaggtcactcaccagttggcaatgagcgggctccggtgtccgggaggcgctgtaccaagctcttccttccgtgggtatggaaatcgttgcggcatccacagatgagcaccatgctaaatccatcatgaagtgtgactgtgtatctatccgcaatagaaccttgtacgccgaccacggtgcttgtcgggcggccaccaccatgtttccgggctttgcgaggggtatgcagaggagatcatccgcctggtggcccagcaccggtaaggatcgtgatcctcggacccccaggagcgccagtactccggtgtggctccgggggggtcccttgggggctcctgggccctttcatgccgagttggttagccagcgggttcaacagattgggccctcctttttgg

SEQ ID NO: 605061 - DNA, 1284 bp, Homo sapiens
gttcgcgttattatatgttcacgtgttgctcgccactacagcctcctgacaaggctgaatccggagcgaggccgccgacgatagtaatttgagtcgccgctcaccgtgccatcacactagatatggcactgctcagctatccacgaacgctccgaagtcgttgcgacgcgccatttgcgtgatgcaagcttaagggtgactgtactatacttgcccgggttatgcgtgcacttggaggcattcacgattcgtatcatcacatgcagatcacaagcaacgggatacctgcggcagcataagtactacatgacttgactcgttacatgaggcgcatctgcgaggcactgattccatagaacaaccattgagtaagactgtgttgtagccagtctttgccatacaatacggaccatttctgccctgggttaatcggatccgttggtgtacttggaaatccattccctgaatagtcccgggagcacggtgtgatcccgagctgtccaggggtggcacccagctggaacatacaccatgatactggccagatattgccttcttggggaacgggtttggggccatatttgttaaaggggacaggtaacaagacctttacaaagtggtttgcaatggggcattgcttaacccaatagataccctaaaaattccgtggggagaactttgcctgggcaaactagtttccggtccctgcgtaaaagcccgggttgtgggtcctcgatctttgttgccaccatggatgtgcccactgcaatgtgagccaccgggcccttctttcgcttatcatttcaattcatttccacaacgagtccaattaccaccattacttgcattgagttacctgaagggccacgggggtatgtgtagtactatgttaaggacataggagaaaactcggcgtaccaatgggtacaaaagctcctgttggtcttacattgtttccagggaagcggtttggagggttaccggtcagggcaattccgttccattgcataactttttgtagaagctgcgatcacccggttcgtgccgctcacaggcaggcccgattatgacctctgggaggaaaatggcccacgttaccccggtaacccacctgggcttctcggaaaccatggccaaccaagacacaacctccagcaacaagcgggattcagcacgcgaccgccgcaatgcgtacagctcaaaaacagcacagaaagccaccaacgagtggagcgccactacagacacatataagtcgtgcgcacactccccccaccaacacat

SEQ ID NO: 605062 - DNA, 3019 bp, Homo sapiens
  misc_feature (252)..(252): n is a, c, g, or t
gtcatgggcagtgagtgcccctttaacagagtatgattcttccatgtgaacagtacttactatgcgaatgtctcagcagcaaaatgtcaagaatttggaaggtggtacaaacatttcaagaagacaaaagatatgatggttgaaatggatagtctttctgagctatcccagcaaggcgccaatcatgtcaattttggccagcaaccagttccagggaacacagccgagcagcctccatcccctgcgcagctnctcccatggcagccagccctctgtccggacacctcttccaaacctgcaccctgggctcgtatcaacacctatcagtcctcaattggtcaaccagcagctggtgatggctcagctgctgaaccagcagtatgcagtgaatagacttttagcccagcagtccttaaaccaacaatacttgaaccaccctccccctgtcagtagatctatgaataagcctttggagcaacaggtttcgaccaacacagaggtgtcttccgaaatctaccagtgggtacgcgatgaactgaaacgagcaggaatctcccaggcggtatttgcacgtgtggcttttaacagaactcagggcttgctttcagaaatcctccgaaaggaagaggaccccaagactgcatcccagtctttgctggtaaaccttcgggctatgcagaatttcttgcagttaccggaagctgaaagagaccgaatataccaggacgaaagggaaaggagcttgaatgctgcctcggccatgggtcctgcccccctcatcagcacaccacccagccgtcctccccaggtgaaaacagctactattgccactgaaaggaatgggaaaccagagaacaataccatgaacattaatgcttccatttatgatgagattcagcaggaaatgaagcgtgctaaagtgtctcaagcactgtttgcaaaggttgcagcaaccaaaagccagggatggttgtgcgagctgttacgctggaaagaagatccttctccagaaaacagaaccctgtgggagaacctctccatgatccgaaggttcctcagtcttcctcagccagaacgtgatgccatttatgaacaggagagcaacgcggtgcatcaccatggcgacaggccgccccacattatccatgttccagcagagcagattcagcaacagcagcagcaacagcaacagcagcagcagcagcagcaggcaccgccgcctccacagccacagcagcagccacagacaggccctcggctccccccacggcaacccacggtggcctctccagcagagtcagatgaggaaaaccgacagaagacccggccacgaacaaaaatttcagtggaagccttgggaatcctccagagtttcatacaagacgtgggcctgtaccctgacgaagaggccatccagactctgtctgcccagctcgaccttcccaagtacaccatcatcaagttctttcagaaccagcggtactatctcaagcaccacggcaaactgaaggacaattccggtttagaggtcgatgtggcagaatataaagaagaggagctgctgaaggatttggaagagagtgtccaagataaaaatactaacacccttttttcagtgaaactagaagaagagctgtcagtggaaggaaacacagacattaatactgatttgaaagactgagataaaagtatttgtttcgttcaacagtgccactggtatttactaacaaaatgaaaagtccaccttgtcttctctcagaaaacctttgttgttcattgtttggccaatgaatcttcaaaaacttgcacaaacagaaaagttggaaaaggataatacagactgcactaaatgttttcctctgttttacaaactgcttggcagccccaggtgaagcatcaaggattgtttggtattaaaatttgtgttcattagttcttattccggagcctcaaacaagcattataccttctgtgattatgatttcctctcctataattatttctgtagcactccacactgatctttggaaacttgccccttatttaaaaaaaaaaaagaaaaaaaagagtttgttactctattgtatgttacaaaagaactatagactgtggaatgcagtttaaagatgacatatgccaacaaatgccttgtattatatggcactgccgtaattcaaatttgtttttattttggaaataaaagttcactgtacttttttttcattctcattgttacatgattttttaaaaaaaggaaaagaaaatgtgaaacacaatttagtcctcattatttatttgtagatcctgcagcatcatgttgtaattaattttttggaagtttccgttaaatgtaatattgcttctcttgttaccatactgattcttttctatttataaatgtattttgatgggcagtaaaacaaagtgtcttaaaagttttaaatagagaaaatgtgctttacacagttgcctataaaaagtgctctatgttatccaagcaattcatactataagcttcactcttattgttgtatgcaatttttactatcatgcaaataagcttaggtaaataaaactaatagatcaccttagaaaattatgcaattaatgtgaaaataattgatgtttgcaatgtgtcttcctttggtttacaatcaattttaaagctacatctgtataaaatttctgtataaaggtgtatttcttttttatgagtttatggctatgaaaacagctattttgttacagctggctgtttttataagtgtatcacaattttctttatgcagaaatgttctgactaggagtggttattgactgtaactacacaattaaaattgtttgtatcgtatgacatggtagggtttgtctgcttatgtgaagtaactaaaggagtcaaaggatggccctctcatttaggtgcatgttaataacttgttatttcactgattttaaaaagagcaattgacaagttacttgaaacactgtaaatttaaatcacaaacacatgctcattttt

SEQ ID NO: 605063 - DNA, 308 bp, Homo sapiens
aatgtgctgcacatgggactcgaaaggaaaactaggagcagcaataaatgcggaaatacattcttggatacattcacggccacagtgtaagcgccagtcccttcggatcttattgcaaaattagcggaagtataaaaggcattttactggagatgatatggctggttatacaaaaggacgatcctattaattctcgcggtcctactcatgtacccgtaagcagatctgtcacagtgtgctacgtacgcttagattggtcattataagtacgtacatacgatattggaggctccatgtggtgacgctaa

SEQ ID NO: 605064 - DNA, 342 bp, Homo sapiens
tgagatggagtctcgctctgtcatcccaggctggagtgcagtggcaccatttcggctcactgcaacctctgcctcctgggttcaagcgatgctcctgcctcagcctgctgtatagctaggactacagccatgtaccaccacgaccggctaattcttgtatttttaatagagatggggtttcaccatattggccaggctggtctcgatctcctgacctcaggtggtccaacggcctcggcctcccaaaatgctgagattgtaggtgtgagccaccgcttatggcagttaagattatttatgtcgacgcggccgctaatttggttttgttgtcgggccggtatt

SEQ ID NO: 605065 - DNA, 1247 bp, Homo sapiens
  misc_feature (252)..(252): n is a, c, g, or t
gtcatgggcagtgagtgcccctttaacagagtatgattcttccatgtgaacagtacttactatgcgaatgtctcagcagcaaaatgtcaagaatttggaaggtggtacaaacatttcaagaagacaaaagatatgatggttgaaatggatagtctttctgagctatcccagcaaggcgccaatcatgtcaattttggccagcaaccagttccagggaacacagccgagcagcctccatcccctgcgcagctnctcccatggcagccagccctctgtccggacacctcttccaaacctgcaccctgggctcgtatcaacacctatcagtcctcaattggtcaaccagcagctggtgatggctcagctgctgaaccagcagtatgcagtgaatagacttttagcccagcagtccttaaaccaacaatacttgaaccaccctccccctgtcagtagatctatgaataagcctttggagcaacaggtttcgaccaacacagaggtgtcttccgaaatctaccagtgggtacgcgatgaactgaaacgagcaggaatctcccaggcggtatttgcacgtgtggcttttaacagaactcaggtcagttgtgtttcataagtggttctgtgctgtctcctattttctctttctttagtcccatctataactaaagtttattcttttacttctgtactaacattttctctctctcttcatgtgatcatattacctattcctggtggagcctcaattttaccactccttttcctatgatatacttctgaatcaagggaacctatgtgcagattgatcccaattcagggcctttgaaagactaattaaatgtcaaacgtactttaaactggcattacttatgcttttatataatggaatcataagctatagtagatggttaagaaaagtttcatgactcagtcaaggctattggcaggattccaggcttctagcctattgtcttttccatttatgttgttactacccatatcaaacttaggtatataaatgttccctcttaaagttctactgcagcgttgtgtagagtagtagtagtcgtgctaacaccttggaagcaattaatccacttaatttctaagcagccatttttgaacaacactacttatatgacttattaccataaatatttgtaagctgtgtgcgctcccctcatgctattgtcttccacattcattgtctagaccaggcatcagcaaactttatctgttatcgacca

SEQ ID NO: 605066 - DNA, 115 bp, Homo sapiens
catataagccagctactggggaggcaaggcaggagactcaatcacgagagatctggcccattagtactttcttctattttatttatttatctctattttttttgagacagggtct

SEQ ID NO: 605067 - DNA, 1538 bp, Homo sapiens
tcgctcgcctgtactacacttatgccgtcgttccgtgtcgactgtctcatacactactactccgtcggctcttcctttctatactgttctcttgtattgctggtctgagtctctctgtgcttgtatatcgtaccctatagtctcttctcgctatgtccgccttcttattatttgtcaagtcgccccgatacctttctttactacttgactgtgttaaaccatcttcttcttggttgctctcctaccactttcatttcttgtcattttttcccttgtcgcctctttatcttgtcgtctatatgttctctgatcgtcctcttccgatacttttgttgctattcactatgttgttccttatatataatgaatatatatagttattaactgtattctatctgaattattgggattaaattgatattagcgccttatcagtctggacttattctctcctttcttctatttggtatatttcctttgttgtttttatattgttgtgtttcaattgtctgtgtgcatgtattatgtggtttgtaattcttgttgatattcgttgattgtcctgagtttctcaagtgtcatgatttgtctttttctcctttttattatggttttctcatcatgggttttattatatgtcattgctactgtctttttcagtcctactactagtctcgttcctttcttcctgttgtattttcccacttgattttccttactagtatacagcctttctctgtcttgttcttctcttctatgtgattttttcttcttttctttcttgtaaacttctcttattctattgcggcatttgcggtatgtctttctacctctatcatgtagccatcatgtaatggtttcttattgctttattccatggatcatgattttggatttatctggtatggtctctagtgcctattggtgcgatgttatttgtcttgtcatgtccaccgtatctaagctattattatctttttcctgtcttttcttttatgttatattttattttatagatagtctgtatatattacattttataatgtatcatatgtagtctgtgtagtatattagatattgttagttagtattatttgtgtcttctaatcctataatttgtcactgtagttggggtaggtgttaccctatactcccagtctttcgtagttattgtactgtattactagttcacacctgctacttctccagtaattgtccttgtctgtacctgagctaccttgttttagttatgttcttgtgtaggtctatgctccaccttcctctgggcagatccatcttggtctaagactaaacatacccaaccctctaatttctgggaagatatcacctccgtgattaatctaagctcctagatctcccagagataatcatgctgaggctacattgtgtgaaactacatttttatctagcttcttcctttgccctttcctgctgtcctcacttccttatgaatttttttctgtaagatgcttgagtaataaattgatttaaacaagatgcgcccagtcataagttta

SEQ ID NO: 605068 - DNA, 294 bp, Homo sapiens
gttctaagaaggtagctaggaagatcgattgttcgcaaagactgcgatttcactatgtccggggaaatgctatcattccgagggggtgtcaactctcccagtctgtccccttaacaatttccttcgacgttcaagataggtgtctcgatcctgggggttccgatgtggaaatctttctatctgtgtaactagggccggattgggccgacttgtcgattaaaatggtatcccgcgggcttcgttcacagctaacttttgggagctatcctgtgtacctgtgggattgagaatggg

SEQ ID NO: 605069 - DNA, 966 bp, Homo sapiens
gaggttattgtcgccagagcagagagtgttgagtgaagactacccctaaaagccaatactggtaaatagataagactcataatcagagattgtcgtggcattggacacgtcacgattcgaggcaagatccacacacatactggttcaatctgatctcataaatgcgcgtggaatccgacaagaaagaaccgatttgaaacagagttaagaggaaatgagaggctggctgagtcaatgcggaaagggctcctttccaagtcctgcacttggagacattgcgatcaacactgaacagctgagccgtgaacgtggatatcaccgagttggatatctctgttgtcggtcacactgtgagaccagcaacgtactatgtgacctagtccattgtgatgccccgaggacgacgaggattattttatcaacagaacattgatcgacagggtacatactacgagagctggactgtgctgtcctgattgttgctgctggctgtccgcgatgaatggtagaacgctggtatctcccctggacatgggcagacccgacagcatgcccttctggcattaagacacttgggtgtgcaataccaactcaatttcgtcggttgttgacactgaagagtggcattccactgcaggccaccccctaacagaggcagacagcagatcttgtacgtggcaggctttgatctagggatggctccacgagccctttaccattccccgccgattttcgggggtaactactcgccggatagcagtcgaggcgtttgcttgccccactgttctcgggctgggtaatggtgtacccacgtgctgcgagagcctggtgacttaacatgcctcgggtgtccgaccgctatggcccacggttccccggtaaggatggcaatgccggtgggaccctctctgcttgggcgctctggatgatcctaccgacgatcggtccatgggcggccttcccctc

SEQ ID NO: 605070 - DNA, 80 bp, Homo sapiens
ggatttgctggtgcagtacaactaggcttaatagggactcgaattcgagcctcgaattcgagcctcgaattcttctaacg

SEQ ID NO: 605071 - DNA, 526 bp, Homo sapiens
  misc_feature (3)..(3): n is a, c, g, or t
  misc_feature (30)..(30): n is a, c, g, or t
  misc_feature (42)..(42): n is a, c, g, or t
  misc_feature (66)..(66): n is a, c, g, or t
  misc_feature (187)..(187): n is a, c, g, or t
  misc_feature (419)..(419): n is a, c, g, or t
  misc_feature (421)..(421): n is a, c, g, or t
  misc_feature (423)..(423): n is a, c, g, or t
  misc_feature (505)..(505): n is a, c, g, or t
tcncccctcgttccccggattcccctcctnatctctccctcnccccgctctgtctctctctccccngtcactcctctcctcctcctcgttcccctattttttggtttcccttaccctcctacctgtttaaaccctgttgccttcccttcctggattaaatacatttaagagcccattccctttatanggtccacatttccctatgactttacctcaattaccttttaaaatccctttcctattcctgagactaatttttaagaattacaaagctcattcttctgaatctaatatcactaactcctagactttttccgttttctttggatacactttaagtaggaatttatcagaattttcattcaactcgttctttaatgcagatatttactagttataagaccttaaggctgggtgcnangngcacgcctgtaatcccagcactttgggaggctgaggcgggtggatcacaagctcaggagttcaagaccagcctggccaacantggtgaaaccctgtctctact

SEQ ID NO: 605072 - DNA, 364 bp, Homo sapiens
caacaggttgatgcagatagggggctgtactagcctagtacggaaaggaccaacgatgctctggctgccctcaggaattccaaatgaccgaagggagcaaagcttcagggcgtatgggtggtgtctccctcgtattaaggaggtggtcggatggttccgcagcttcatttcgtccagtcatatctagttatctagagttgttgtcaagatgctgcattaaatcaggcaggtctacaaaggcatcccaagcatcaaacatgtctgtgatgaagtaatcaatgaaagaggatttgggattgggggatgctgcaggtatttctgtcaaacactggcatcaccacaggtaagccctgctgcttctctt

SEQ ID NO: 605073 - DNA, 870 bp, Homo sapiens
  misc_feature (18)..(18): n is a, c, g, or t
  misc_feature (84)..(84): n is a, c, g, or t
  misc_feature (98)..(98): n is a, c, g, or t
  misc_feature (106)..(106): n is a, c, g, or t
  misc_feature (130)..(130): n is a, c, g, or t
  misc_feature (141)..(141): n is a, c, g, or t
  misc_feature (171)..(171): n is a, c, g, or t
  misc_feature (189)..(189): n is a, c, g, or t
  misc_feature (198)..(198): n is a, c, g, or t
  misc_feature (211)..(212): n is a, c, g, or t
  misc_feature (221)..(221): n is a, c, g, or t
  misc_feature (232)..(232): n is a, c, g, or t
  misc_feature (244)..(244): n is a, c, g, or t
  misc_feature (246)..(247): n is a, c, g, or t
  misc_feature (259)..(259): n is a, c, g, or t
  misc_feature (268)..(268): n is a, c, g, or t
  misc_feature (273)..(273): n is a, c, g, or t
  misc_feature (280)..(280): n is a, c, g, or t
  misc_feature (332)..(332): n is a, c, g, or t
  misc_feature (337)..(337): n is a, c, g, or t
  misc_feature (353)..(353): n is a, c, g, or t
  misc_feature (358)..(358): n is a, c, g, or t
  misc_feature (362)..(362): n is a, c, g, or t
  misc_feature (384)..(384): n is a, c, g, or t
  misc_feature (402)..(402): n is a, c, g, or t
  misc_feature (405)..(405): n is a, c, g, or t
  misc_feature (407)..(407): n is a, c, g, or t
  misc_feature (413)..(413): n is a, c, g, or t
  misc_feature (416)..(418): n is a, c, g, or t
  misc_feature (421)..(421): n is a, c, g, or t
  misc_feature (427)..(427): n is a, c, g, or t
  misc_feature (432)..(432): n is a, c, g, or t
  misc_feature (435)..(435): n is a, c, g, or t
  misc_feature (439)..(440): n is a, c, g, or t
  misc_feature (442)..(444): n is a, c, g, or t
  misc_feature (454)..(454): n is a, c, g, or t
  misc_feature (460)..(460): n is a, c, g, or t
  misc_feature (464)..(464): n is a, c, g, or t
  misc_feature (471)..(471): n is a, c, g, or t
  misc_feature (476)..(476): n is a, c, g, or t
  misc_feature (479)..(479): n is a, c, g, or t
  misc_feature (484)..(484): n is a, c, g, or t
  misc_feature (490)..(490): n is a, c, g, or t
  misc_feature (502)..(502): n is a, c, g, or t
  misc_feature (586)..(586): n is a, c, g, or t
  misc_feature (704)..(704): n is a, c, g, or t
  misc_feature (715)..(715): n is a, c, g, or t
  misc_feature (719)..(719): n is a, c, g, or t
  misc_feature (726)..(726): n is a, c, g, or t
  misc_feature (737)..(739): n is a, c, g, or t
  misc_feature (748)..(748): n is a, c, g, or t
  misc_feature (799)..(799): n is a, c, g, or t
  misc_feature (808)..(808): n is a, c, g, or t
  misc_feature (854)..(854): n is a, c, g, or t
atggttgttttatttgtntttagtatgatatgaggttagggattatgtgctatattcagtcttaaagagctgcacaagatgttnttgcacttttaatnttttttgntctattttgtttttttttttatangtttttttctnctaattttttgaatgtttgtatgttggggntgcgtgcttggttttgtngtggtattntaagttagtttcnnttgcagtgnttctgtttacntgtgtatgattncnngatttgtaaagnaatatttgngaaanaatgctnggtctctctagtctgaatctgtatctctcacctttggaatagtaatgtgaanaatgntcagggactatgttcnaaganattnatttaatgcagtgtaagttatngggctggcctttgatgancantntgttcnaannntgntttccngaaanccngcanngnnntcactccgantgaaanaacnatttctncaaantcncatcnaaaaanaaaacttacctnaccaatcatatggtatcggaatatttttcttttctaagcctagctctatgccacttattcctcctctcatgcagtgtttaacanattcttttcttcctttgaacttttaaaatatatcatctgtatctaacagtattcactatttgtgatttatccttcctctacatataagttcctttggttcatgatccatgaatgcttnatacttgcaantctnaggggangcacgatagtnnnttgcacatnaaaaggggtcaataaatatttgtagaatgagttatgaatgaatatacagtnctggaagantataattaaatacaaactcctcagacttctctcaacctttcctcanagggctcattttgtaa

SEQ ID NO: 605074 - DNA, 510 bp, Homo sapiens
gccgctagatcacgttgatcgatggtattccattccattgtttatttttccccctaaagactcccctaccggattaataagacagataggcccgggctacacttcctagaatagggtttattggtccccttccgggacttaaacactatctccctatatttgggtacttactaaaggcatctattccgggccccaatgatgccatcaggtactaggttatgaccctgatggcctccggattcctttaagtaaaacacaattcgaagcagtattgcccagtatctatcgatctgcaaatagctttctctgattacacaggacaaataaaacatgtcctccctgctgataaaatccttgatttcttatctcatactctggtaatcttgttcaccaaaatagttcactcccccataccttatgctttaacactgtttattgatggttctggtaaacatggaaaagcagcagtctggttagggatagctgtcgggggtaccccacgccttcgaa

SEQ ID NO: 605075 - DNA, 507 bp, Homo sapiens
ggtcgacgatctatatagcgatcataaagtgattttatgatcgttatatggggcattttggcgaggtgctggatcagcgctagagcgagcggcgaatacgttctgcttgattggccacgcgttcggcattcccggacagcccttcaaaagcataagggttcagcatctgtcggcttttcaggacttgaaggtcgatctcactgatacccgattcggcgcagacactcgaccaatagatggctatcgcctccaactgctgttcgatgatctccagtgcctgtgcttcttcgagtagaaacttttcccgtgcggcaaggcaaacggagagtcgactctggttattgttgcccagtatcagcatggcctgtgtggcctcggttcccgaacgcatctgtgggcagatatcgtaggccggcgtcagttgataagcttttccatcaaaaatgcagcatgatttacgccatgatcgtcggaatgctgcacaggatgtttaagacagtcgtagaa

SEQ ID NO: 605076 - DNA, 202 bp, Homo sapiens
aaaaaaaaaaaaaaaaaggttttccggttaatttcaatttttaaaatccattgagcccggttccagttgaacgcttattttccaagaaatttgggaggcttaggccggagaatggtttgaacccaggaggccgaggtttcaattaaccgaaattgggccactgtactccagcctgggcgacagggtgagactctacctcaaa

SEQ ID NO: 605077 - DNA, 749 bp, Homo sapiens
  misc_feature (4)..(4): n is a, c, g, or t
  misc_feature (65)..(65): n is a, c, g, or t
  misc_feature (68)..(68): n is a, c, g, or t
  misc_feature (110)..(110): n is a, c, g, or t
  misc_feature (114)..(114): n is a, c, g, or t
  misc_feature (118)..(118): n is a, c, g, or t
  misc_feature (129)..(129): n is a, c, g, or t
  misc_feature (166)..(166): n is a, c, g, or t
  misc_feature (175)..(175): n is a, c, g, or t
  misc_feature (180)..(180): n is a, c, g, or t
  misc_feature (196)..(196): n is a, c, g, or t
  misc_feature (198)..(198): n is a, c, g, or t
  misc_feature (214)..(214): n is a, c, g, or t
  misc_feature (216)..(217): n is a, c, g, or t
  misc_feature (241)..(242): n is a, c, g, or t
  misc_feature (252)..(253): n is a, c, g, or t
  misc_feature (280)..(280): n is a, c, g, or t
  misc_feature (300)..(300): n is a, c, g, or t
  misc_feature (304)..(306): n is a, c, g, or t
  misc_feature (312)..(312): n is a, c, g, or t
  misc_feature (331)..(331): n is a, c, g, or t
  misc_feature (351)..(351): n is a, c, g, or t
  misc_feature (360)..(360): n is a, c, g, or t
  misc_feature (421)..(421): n is a, c, g, or t
  misc_feature (428)..(428): n is a, c, g, or t
  misc_feature (437)..(437): n is a, c, g, or t
  misc_feature (509)..(509): n is a, c, g, or t
  misc_feature (513)..(513): n is a, c, g, or t
  misc_feature (541)..(541): n is a, c, g, or t
  misc_feature (545)..(545): n is a, c, g, or t
  misc_feature (554)..(554): n is a, c, g, or t
  misc_feature (558)..(558): n is a, c, g, or t
  misc_feature (573)..(573): n is a, c, g, or t
  misc_feature (723)..(723): n is a, c, g, or t
aatngtgaccatagcaggattcagcgtgcatatcattttattatcagaattatctgtagtatttncantttacactaactgaagagaattgtatggattatattatgtantatncttntccttcatttnttactaagcaatatgttcactatacatatatacatcnttattagancacanatattacatgatcatncngccattcaaaattaangnnccacagttttattacaatcaaatnncatccaaaanncaatgttgctatgaaaattcaaaagtnctcacacattcccatttatnaaannngtaggncacaatgaaatggaatttnattttgtacaaatggaaaanatttatcanaaatatatagaccaatatataacattgaagaacaagaagcagaaaggaaacaatgctcttncataaanatcaattcnctttgctgctgttggaataacaggtttcgcagggggaggcttcttgttgttcttagcctgagatttcccaantccnttgttaacttcaatgggttttccatagnagtnataattgcnatanttcaaaatctcttgngtaagcttccaacaatgctgaagtcattagatctcagatcagacttagaagtacaaacttttttgcatctggtctcaccaacctgcaaagtgctaatatgaacaggagtccctgttccattcacagtattctttttagccacatttccancttttccatctgcctgcccagcctaa

SEQ ID NO: 605078 - DNA, 630 bp, Homo sapiens
gctggatataagaaaaaatccactcattgatcattctatgatgaaagcagttatcataaaacgtcctccagaatggaaggagtgccaaatcgacgagtaccaggggatacgttctccatcagtgaatggaaccatccaaaactgctaagcagataaggagaactataattctaggaagtggtcgcaaattggaataagctactattagaattggatcggtttacaaagaaacacatgtaagtagtggttagaaaacaactcacctttggtgatatgaatattatgcggacccgcaccgtctttcccaccgtggtgtgtctggtttctttgccggggcgtactgcagtagacgtgcaaagaagaccacaggggttgcgcctattaatcaaatggacgtgatatagtgtaagtcagttgtcagcaatgcaggttttcctgtgatgtgtgacagtagagagtctcttcatcctctgaaggttgaaggaggttgatgattcttacagagagtgttcagtgggagtgcctgagagaatgagtatagaactaggaagcattaggggtaaaaatcgggtaggaggtgctgatagccatgatatgtgataaaggagtgataaggtttaaggaggataa

SEQ ID NO: 605079 - DNA, 132 bp, Homo sapiens
tgggttctgaggctaccctctgagccagaagcagtgcctcttgtatccagcagcgtcagaggtaccggtggctcatctgccatcatgctcagaacagtagggggattggaatgagggtctggctgctcgtga

SEQ ID NO: 605080 - DNA, 599 bp, Homo sapiens
  misc_feature (599)..(599): n is a, c, g, or t
gtgcctagtggctgctgtattgggcagggcagaaagttctaccgggcagcactgtgtctacaggctaacaatctaatgaagattaaagacagtctcacttcttttctgtcctatttgctacttccttgcagttcattcgttccttggtacatgtgtgcctcttgctttctaaaagacaccctgagcagtttccagctttattgaggtcaaatgtgcatgcaatggatgcatccattctcatgcacaagtcaatgagttttgactcttgaacaattgtgtgaacaccaccataatcaagacacaggacatttatattttagcaaaatattccctgtgtcctttcccactcattctgttaccggaaaggggtcccgatccagaccccaagagagggttctttggattctccgcacaaagggaaaggaaatttcagggggccagcggtccttggtaaaaaggtggaacaggcaaagtttacttaacgaaagtaaaagaataaaagaatggctactccatggctctagaagagcagcccgagggctgctgattggcccaatttcttattcgggtttactttactcattttggaactttcacan

SEQ ID NO: 605081 - DNA, 542 bp, Homo sapiens
  misc_feature (354)..(354): n is a, c, g, or t
  misc_feature (360)..(360): n is a, c, g, or t
  misc_feature (369)..(369): n is a, c, g, or t
  misc_feature (423)..(423): n is a, c, g, or t
  misc_feature (429)..(429): n is a, c, g, or t
aactgcatgagtgagttcatgggactcatccaaggtcactatgaggcaaagcaaggtgggttcctgccagggggagggagtctaccagcacaatgaccccccatggacctgatgctgactgctttgagaaggccagcaaggtcaagctggcacctgagaggattgccgatggcaccatggcatttatgtttgaatcatctttaagtctggcggtcacaaagtggggactcaaggcctccaggtgtttggatgagaactaccacaagtgctgggagccactcaagagccacttcactcccaactccaggaacccagcagaacctaattgagaatggaaccattgctaccaaaatnaaaatnaaattgtgnaaaatttctccaaatatccagccttttggtgataatggaagaaggggttggttnaaaagnaaaatcacttttcataagtcaagtaactcagaacttttatggaaacgcatttgcaaagttctatggctgtcaccttaattactcaataaacttgctggtgttttgtggaaaaa

SEQ ID NO: 605082 - DNA, 1416 bp, Homo sapiens
gcttgcatatgcctgtgtccgtttgtgttacagcgccctattttgtgttgccctcaccttataggggcccgtgtccccccgtgttgtatttcgcctgtggcaccctcttgtgtgttgtttcaggggcccctctcttagtacgctgtctcttaaccacggggccccttgggggtttatttttctggtaagagattggggccctcatacttttctctcgcggggggcacccttctgatgtctcggaaagacatttgcagaatataggaagggtccgtgtttcctcacacccccaacgggggggtttttaaggggtttaaccaccgtggcgatacactcaatgtccaactgtcttgctccctctggctccccaccacccacccggggccattttttgtcgctgcaaaacattccgcaactcccgctggggtcccccccttaagttctgtccgaattagttccgccccccggctgtctttgccaaggtggcgttcgccaaaaactttgttggggttttgtttacccggggtccccatagcggttgttggtaaattgaggcccctcaaaatctttgtggagatcccgctataagagcgccccagcaccctcttgtctccgccctatagcccaacggtccgcccgcgaagttgtttttttgtctcccacaccctctcttggagaagagagatacttgtttcccccactctctctctctctgagtaaacccccactaagagtgtgcctctccctctctgtgaagagtctcccatcccacacttttaactctctctccccctttcctcctcccacacagtgtgtaaagcccccacagagagccccacagtttgtcgcccccctatgagagcctctgcgctctcactgtgtgtctgttcgcctctggcacactttgggcccccctcggggtgtcctctggagacacagagttgattttaccccctcgaaaaaggcacacaagccccacaggagtttgagaccacacacagcccactctcacactccaccgcacagaattctcgtcacatcacagggtctctcgcacacaatatatctactattctatagaaaggaggccacaggagaggccacagagagaaacacatcttgtcacacaccacattctctctcacaacgcacaatgtgtccccgacatccacaccccctcataacacacaggtcttcacaccccgcaaccaagttctcaccacgctcacacaccctctctgggacacacgggatttggctcattctatggacctcgtggagccacgattctaacctcgacacctcgcttttggtgtcggcctttcgaacctgaaaaagggtttctaccatttttttaaaggattgttttaaaaagaagaaaaaacctgccagtgaggccctgtgtggcttgccaga

SEQ ID NO: 605083 - DNA, 108 bp, Homo sapiens
cgcgtatgcgacggcgcacgcacgcagcgcggtaggttacgtcgcctaggcacgcgccgtcgcctacgcactgcgatggatcttcttgcgttggtgctcgacagggct

SEQ ID NO: 605084 - DNA, 1690 bp, Homo sapiens
gtcaagggagagaagtcaagaaaaggtgctctattgtcggggcacgtagcagtgcactgggctgccgtaagtgaactcacgcattattgctgagcttccaatcagacgctgggatctcgtcgaatttggaggatcgaacggagaagcttggtgggggacaggagttagagacacctcgatccccagcagaactgggtaagcgggacaggcgagtatgctcaagtggtgcatggttcatcgcatcgaggaacgtgggtgtggagtgggagccctaggccatcatggatatgctagtgcactcagtagtaatgggagcagtatcatgagcaagcgaacctgtggctaagggagcttgggaggccacatggctgtgtaccgcttgcagtaactaggagataataccagagtgtaagataatccttagtgaagagtaatagaatgtattacatttaaagaaaagtaagaaacagaatcaatacagcaacactgagaacagacacactgtgagagggaccccctagtgggttagcgcgaaggagtgggcagcgagtgaactgagagagcgcacaggaaagaggaagtgcgcgcgcggaagtgtgtacacacaatacaagtgggtgctgacacgccacaggggtcccacagacggagatgggtgcttccaagtgggccgaattacacccgttgtgagagataagaggttcaagcgcgagcgaagggaaagcaccctggaaaacaagatgatgggaggaagcacgcacatgatcctcaatatattgcagggataattcaagcgggaacaatgtgagttgtgaacccaggggagagtctcataatgttaaaaaatgtgtgtgtgacaaacatttacttggtaaagggcacaaaggcgcgtattcaagcagtggcaattcgttcccgccaccctaaaacttatctccggaaaacaacccaattgacaattgtggtgcgcttcaaaaccaacttggggggtgagcgggcaaaaaaccccttttcattggactttgcgaaggaaggagaaaatggttcgtgcaacaacaacaagcagcatgcaagtaatgcagccacagcggtgtatgcacacaggactattcatgccgacagcggacacagccaagcgaatcaacattggcacacaaggaacgggagaaagaatatggcaacacgcctaacaaaatatgggtcaaccaccagatggagatggacggaaaaaaccgccacatggacaatggaatcggtacccaacagcgagacagagaaaatatccataagaatcaggagccaaacaagggagtacgcgacaagcacgcagcgtcgagagaagcaacagcacgccgagaagtaaagcgtggaaaaccagggtaggtagtgcaaccacaaaccgacataaagcaagcaagtcacaaggagcaagccgacgtcagcgagcccaagactgacaaggaagcaagccacgcagcgggacaaagaacaccgcatagtagacaggagaagagagggaaggaagaaaagagcgatacacagtagacagacggtgcgcaagcggagcagaagaccagacacgcagacgggagaaaaacgcgaaaactgaccagcgaggagcaacactttagattaagcagcaagagaaaacaacacctaccgagacaaaacagtcggaacacgacaacaa

SEQ ID NO: 605085 - DNA, 678 bp, Homo sapiens
  misc_feature (14)..(14): n is a, c, g, or t
  misc_feature (17)..(17): n is a, c, g, or t
  misc_feature (23)..(23): n is a, c, g, or t
  misc_feature (26)..(26): n is a, c, g, or t
  misc_feature (59)..(59): n is a, c, g, or t
  misc_feature (90)..(90): n is a, c, g, or t
  misc_feature (101)..(101): n is a, c, g, or t
  misc_feature (112)..(112): n is a, c, g, or t
  misc_feature (114)..(114): n is a, c, g, or t
  misc_feature (125)..(125): n is a, c, g, or t
  misc_feature (159)..(159): n is a, c, g, or t
  misc_feature (178)..(178): n is a, c, g, or t
  misc_feature (189)..(189): n is a, c, g, or t
  misc_feature (194)..(194): n is a, c, g, or t
  misc_feature (206)..(206): n is a, c, g, or t
  misc_feature (208)..(208): n is a, c, g, or t
  misc_feature (215)..(215): n is a, c, g, or t
  misc_feature (230)..(230): n is a, c, g, or t
  misc_feature (252)..(252): n is a, c, g, or t
  misc_feature (271)..(271): n is a, c, g, or t
  misc_feature (307)..(307): n is a, c, g, or t
  misc_feature (379)..(379): n is a, c, g, or t
  misc_feature (553)..(553): n is a, c, g, or t
attgattcctaatnaanagaagnggncccccttcccccatgccccaaaaggccacaggnctcctcggccacaaaaaggattaaatccccntcttctcccanacttaaagtcnantggtggaagtnccggtgtttgtgtggattttactacaaggtcggntaataagaagagcctttcntaacatcctgnaagtntgtccccggaananaggaaancggtcttcccttccncaaacatgtgatgtaattctcnctctgcttgctgaggctgncctggcctaaaaggattagagcatttgctaaacggncccaggacatggcagggtcagagaacccgctgtgggagacccagggccaggatggccactagggggcggcanaggaagcgacacgcggagaggggtgtggagtgcttaggagaggcactcgtcggcttagcagcaatcaatgtccacaaagtacccatgaagttttattcatttttaaatttacaatgtccagctaagttatgagaattcaaaagaattgaactaggttcctggaaacaaaataancagatcaactgaattctatgtgcaagacaaacttttttttaaaataagaaatttaaaataccatgtaaaatatcagtcaataataaaaatgaagtgcaagaagtaaatctacagaaagatgcaaa

SEQ ID NO: 605086 - DNA, 1423 bp, Homo sapiens
  misc_feature (147)..(147): n is a, c, g, or t
  misc_feature (288)..(288): n is a, c, g, or t
  misc_feature (293)..(293): n is a, c, g, or t
  misc_feature (319)..(319): n is a, c, g, or t
  misc_feature (429)..(429): n is a, c, g, or t
  misc_feature (519)..(519): n is a, c, g, or t
  misc_feature (541)..(541): n is a, c, g, or t
  misc_feature (867)..(867): n is a, c, g, or t
gaagcttcagtgaaacatatagttagtctatcaagcagaacattcccgcattcccgtgtcagctatgcttgggttctagtcgtgaccttggaaccacaagcgtcgacgctaatcgagttggccacgttaagacatggcatgtgccgntatgcgcgtataattgcatcgttgttccatgacaactcgcattcattccaactctcatgctacttgatgattcgctctccaagacatctctactgtaggttagatgacgcagtcattgacgatgacttcgcgtgactgctnctctnctcctgcacatagggttcccgtaccntttcgaacacgcttctccctctgctatgctcgatacctcttgacataactggcaacaggatgattccctgaagtgcacttaccacgttatgctggtacaatattcagctncgcaaagcactctacaatggtatactttgatcgacactagacaagtttattccccccagtactagacgagacagagggatagagtacatnccacactgggtcccctactcgntatgctatactctctcgcgatatagttttctcgaagaaattactaagggttaatttctctgagcgaacattctctgtcgactcgataggtggctaataccaacattagataagtcacgcgctacttttgttaatccccagcgcttggataccagcgtggatatcgtcaattttgcacttattcagaccgaaggcgaaggcgtgcactagtgtcaaacagactttcttcgaaatgggtttgaatccacctcaaacggcaattaattgggttctaatcaatttataccctttgtggattgcattttaatacccctcaggtgtgatccnttttggaataaaagaaccaaaagaacacaacgattattatcaacccaggcataacaacaggaacccagagaggtgggttttgttatacttagagccggggcttcctaaggtgggccttcctttgaaaaaaaatcccttggtttgtgaatgacaacaaaaaactcctacgcgagtttgttgcgaactcggccgccagagttccggtccccttaaggaagaattaaacagtgtccccgcgccgttgaggaacgaaaactctgttgtggacacacttaaaggggggcccaccggtctcattttgtagacccccgttaattaagccacggcggccgcagttcgttaataccccccccttcttaatgaaaggcccaggacggcgccaggggggagagacaccacacaaagggcgtcgttgtcgagacacaaatatgttctccgcgagagaggagcagtgtctctcagagagggggagacaaaacaggggggggatatgacaacacacaacgggggtgagttctgcccgcgcggaggccccacgaattactacattttcacg

SEQ ID NO: 605087 - DNA, 685 bp, Homo sapiens
  misc_feature (66)..(66): n is a, c, g, or t
  misc_feature (185)..(185): n is a, c, g, or t
  misc_feature (196)..(196): n is a, c, g, or t
  misc_feature (201)..(201): n is a, c, g, or t
  misc_feature (213)..(213): n is a, c, g, or t
  misc_feature (215)..(215): n is a, c, g, or t
  misc_feature (222)..(222): n is a, c, g, or t
  misc_feature (237)..(237): n is a, c, g, or t
  misc_feature (259)..(259): n is a, c, g, or t
  misc_feature (278)..(278): n is a, c, g, or t
  misc_feature (314)..(314): n is a, c, g, or t
  misc_feature (386)..(386): n is a, c, g, or t
  misc_feature (560)..(560): n is a, c, g, or t
atatttaacggaaaaggggcccacctttcccccggcccacaaaagggccccgggggctccctgccnaccaagaagggtttggattcctcctccttcttccaaacgttaaaagtggaaggggtgaaggtccgggtgtttttgtgggtttttacttgcggggtcgttaggataagaagagcctttcntaacatcctgnaagtntgtccccggaananaggaaancggtcttcccttccncaaacatgtgatgtaattctcnctctgcttgctgaggctgncctggcctaaaaggattagagcatttgctaaacggncccaggacatggcagggtcagagaacccgctgtgggagacccagggccaggatggccactagggggcggcanaggaagcgacacgcggagaggggtgtggagtgcttaggagaggcactcgtcggcttagcagcaatcaatgtccacaaagtacccatgaagttttattcatttttaaatttacaatgtccagctaagttatgagaattcaaaagaattgaactaggttcctggaaacaaaataancagatcaactgaattctatgtgcaagacaaacttttttttaaaataagaaatttaaaataccatgtaaaatatcagtcaataataaaaatgaagtgcaagaagtaaatctacagaaagatgcaaa

SEQ ID NO: 605088 - DNA, 629 bp, Homo sapiens
  misc_feature (141)..(141): n is a, c, g, or t
caaaaaagcgcgggtaaagcccctggattgaatcccacacggctccactggacgcaagtttgttaggctaaaggaaaagattgttcgccgttctggtaaaaagcggggagatggccctaaattttgagagtttgggaacgncccccttgtcgagagggttcctggcaagcccgtgggtgttgagagctttcaaaacaatccccctttgggtcgctttgctgttcgtaaaattaaacaaacagttgcggggggggtcatcaaaccaatggacaaaaaggctgctggagctggcaaggtcccaaggtttgcccaggaagctcagaagggtaaaggaatattatccctaaaacccgccccccccctttttaatcaggggggaagacgggtttcaaaactgtttgtttcaattggccatttaagtttagtaggaaaagacgggttaatgataacaatgcttggtaaacccttcaaaaggaaaggagaatgttttgtggacccctttggttttttttttgggggggggcagttttaaggtattagtttttaaaaacaggactttttaatggaaacaacttgaccaaaaatttgtcccagaattttggggccccctttaaaaagttgaatgggga

SEQ ID NO: 605089 - DNA, 457 bp, Homo sapiens
agaaaggttcatctctgttagttgaatacacacatcacaaacaagtctctgagaatgcttctgtctagtttttatgggaagatatttcctttttcatcataggcctcaaagcgctccaaatgtccacttccagatagtgcagaaagagtgtctcaaacctggtatataaaagggaacattctactctgtgacttgaatgaaaacatcacaaagcagtttctgagaatgcttccgtctagattttctatgaagatattcccgtttccaacgaaaccttcaaagctatccgaatatccacctgcagattctacaaaaagagtgtttccaaaatgccgtatcaaaacaaaggttcaactctgttagttgaggacacacatggcaaataagtttctgagaatgcttctgtctagtttttacttgaagatatttcctttctcgtcgacgcggccgcgaattt

SEQ ID NO: 605090 - DNA, 143 bp, Homo sapiens
gttactgatggagaccatgtgagcctttgctttcctctggccccagccccaatctgaacacagctcatacgcagaatcaggaccagcatgtgcagagctgtgcaccagcacaggcttagggcagttcagaacccacttgtttc

SEQ ID NO: 605091 - DNA, 180 bp, Homo sapiens
  misc_feature (13)..(13): n is a, c, g, or t
  misc_feature (43)..(43): n is a, c, g, or t
  misc_feature (68)..(68): n is a, c, g, or t
  misc_feature (71)..(73): n is a, c, g, or t
  misc_feature (76)..(76): n is a, c, g, or t
  misc_feature (84)..(84): n is a, c, g, or t
  misc_feature (86)..(86): n is a, c, g, or t
  misc_feature (100)..(100): n is a, c, g, or t
  misc_feature (102)..(106): n is a, c, g, or t
  misc_feature (109)..(111): n is a, c, g, or t
  misc_feature (116)..(116): n is a, c, g, or t
  misc_feature (122)..(122): n is a, c, g, or t
  misc_feature (125)..(126): n is a, c, g, or t
  misc_feature (132)..(132): n is a, c, g, or t
  misc_feature (134)..(135): n is a, c, g, or t
  misc_feature (139)..(139): n is a, c, g, or t
  misc_feature (141)..(142): n is a, c, g, or t
  misc_feature (146)..(147): n is a, c, g, or t
  misc_feature (157)..(157): n is a, c, g, or t
  misc_feature (163)..(164): n is a, c, g, or t
  misc_feature (167)..(167): n is a, c, g, or t
cctgattggactnggttatactcagacccttcgaccaggagtnaaattgactttatcagctttaatcnatnnnaanaacttcantncattatttcacaantnnnnnttnnnatttnaacttnaannttaatntnntttnannaaannatcatatttntccctnnaanttaatataaatta

SEQ ID NO: 605092 - DNA, 259 bp, Homo sapiens
atcacaggatcctggaattgtgtggtgttatgttctcatcttcctcacaagaaaaagccgtgatgatggtccaccagctgctctctctctctctctttatgaataaaaaatagttgtgtcttcatggtacattggagcagcgttccactccttgaagaagctctctgcaacaattctctcacgccgcatgatatggaaccggcggctacgctcaccactctcctcttcctgtacctttcaccgccataacaccacacaa

SEQ ID NO: 605093 - DNA, 363 bp, Homo sapiens
ttcatgtagagatcgagttcgatctgattgtcagcagcgtgtgcccagactgctatctacccgcagcgcacgatcacagtgagggctccaagcctccgtccccagtgctacctgcgacaccaggggagactgcaggccctgagaccaaaggtcacctgagcagcagcgcctgtagccagagacgggccttaggactgtgctaccgttagctagcagacgcactctattgctgtttgctctgcccgcttggaagacgacgtgtgtcgtctacttgatggtcaaactgccgcctcccacagagctgaggcctccccccatggctctgccagtgctcgcactgaacccacctcctacgcccagacc

SEQ ID NO: 605094 - DNA, 700 bp, Homo sapiens
taggcctgagctgttatgaaggagaagatggggacagagttcaccagagggctgacaggggaagacgaattctgttcctgtgagccgagcagccatggttgagagatggaagcaggcatgcaaagcaacgcctcactccaaagctgttccatgacgtggtacaggctggttccgagcatgctgtggccaccacccgaggggaccatgtgaaatgtgcttgagtgccaacaaattccatggtcacaggacatgtgcttgcattcaatagcatctggttaccttcttgcatcatgagacctcattggctgtctcccagaatgctgcatgttcttgtgaaatggttgtgcaaatgtgatagcatgcagcaaatgtgtgtgccaaatgtgaaaccagtcttgctggcagtttggttggttgcctggtgcgacacccagatggatgctgaatgcgcgaaccagcagccctgctctggtgtggaatgcacttctgtgttgtgtaccatcaaagtgcttaccttgtgtgctcttgccatatcatgcttggttgtccttgtacttgtctgtgcagacgcaagtggttgtagggcaggcctgtgcttgctggcgaattcatctgtgctggtgccctgccttccttgaccttccccaagcaggtgccgcatgctgctcctgagactggtggtcgtcttgggcctgcgagg

SEQ ID NO: 605095 - DNA, 505 bp, Homo sapiens
gctgaagaggtcgaggctgcagcaagctgtgatggcaccactgcactccagctaggtgacagagcaagaccctctctcaaaaacaaaaaacaacaacaaaaaagaaaagctgtactgagacagccccaacccaccagaaataactttcagagatacactgtaagaagcagctcgtgggttttatagatttgcaaagagtagagctagctcccagtatgcaggtgacattcagactgatgacttcttagattcaaagctaactaacagtctttctggtaaaatgaaatgggccaaaagataaggcaggacattcctcatggaactggagacatctgtaattcaatgcccaggcattacacatacgttaggacataacacctgtccctcaggtggcagtggacagaagcagctaattaaagcctaataactattgaccaataaaatagtaaaacaaaatacttagtaccttcttaagcatgttactcatctatcagaggcaagaaag

SEQ ID NO: 605096 - DNA, 102 bp, Homo sapiens
ggtggctccatcaagcccatgctggtcttggcctcaggtgacaaccagggcatccccatcatgtccagcatcaagctgaaagaggagcagcgataaccacca

SEQ ID NO: 605097 - DNA, 398 bp, Homo sapiens
ggcaaacggatcacgaggtcaggagatcaagaccatactggccaacatggtgaaaccccatctctactgaatacacaaaaattggctggacatggtggcgcatgtctgtaatcccagctactgtaatctcagctacttgggaggctgaggcaggagaattgcctcaaccgggaggcggaggttgcagtgagccaagatcgcaccactgcacttcagcctggcaacagagcgagactctgtctcagaaaaaaaaaacacaaaccagtttaagctgggtatggtggctcaccagcactttgggaggctgaggcaagtggatctcttgaggtccggagtttgagaccagcctgtgcaacatggtgccctgtctttactatacctaggcgccagaatccttg

SEQ ID NO: 605098 - DNA, 148 bp, Homo sapiens
ctctatatatagtatactatgaacaaaggtgggggaaggggaattgttactaaaaattcaacagtgaaatctatcttctgtaagtaggcttgataagaaacaccatctgcagcctggcgtggtggctcacacctatgtgacgttcctc

SEQ ID NO: 605099 - DNA, 385 bp, Homo sapiens
tatttccccctctattgatccccacctccaaatatctcatctaacaaccgactaatcaacacacacacaacaatgactaatcaaactaacggtcgagaaacataatgcactcatactctatatcagcaacacttttaaggacgaacctacacccgcttatcccctatactagttattactcgaagacgcatcagcctactcattcaaccaatagccctcggccgtacgcctaaccgctaacattactgcaggccacaatatctcatgcacctaattggaagcgccaccgctagcaatatcaaccattaaccttccctctacacttatcatcttcacaattctaattctactgactatcttaaaatccctctcgcctaacttccac

SEQ ID NO: 605100 - DNA, 533 bp, Homo sapiens
ggacgtcagtgcgagcgaccccgggccggctgcgtggagctggcgctgcctctcctgaagccgagggctaacttgagtgaagaggtctataggctttttcacttttggttatctgctcaggcgctccttggggtcgcgcatggtctcggacagggtttgcaaggacttcggagctaaccagtttggagccataaccctttcgtacttgccaaaaaactctgggcaagactcttgaattttgagccgcagtattctcgttcataaggtgagaataaaaacatcacctagggttgatgtgaagagagatgaaatcattgtgaaataggagagttattgctttcaaccaatgacattttctggaaacgtgctggagatatggctgcagcagtgacgcctgcaaacgacgttcctgtcatcatgatgctgacattttaattgggaagcagattgaaacgataactaaggaatttgacaggagcatttagtaggacctgtaaagaaattaaagcaggtccgaggtggagttttgtaaa

SEQ ID NO: 605101 - DNA, 120 bp, Homo sapiens
tgagggagtgttaccagcttacaccacctagtaccaccatgggccccgacgtggggcaggagcacgttgtctggaaagcgatccagatgatgggggttactccgtggacaaagatgctgt

SEQ ID NO: 605102 - DNA, 233 bp, Homo sapiens
cgactctacaggatctctccccgtacgccaacgtggtgaacctgtctctataaaacatacaaaaatttccagcctggcaaacatggcgaaaccccgtctctactaaaaatacaaaaaagttaggcgggtgccgtggctcatgcctaataatccccagtttctttgggcaggctgagtgtgggagatttgcttgaacctgggaggcggaggttgcagcgagccaagattgtgcc

SEQ ID NO: 605103 - DNA, 715 bp, Homo sapiens
gctaactggaagcttgccggtaaatggtgcatgatcgtagaggccgacgagtacatggaattgtccacttctattttgccacctcgacacaatgccgatgggtgcagtttggactgacacatcctaccactttatgtatcgtagcgatcagtgggtgaccgacgctgtgaggtactttgtcatacgacctccacgatctgtggataaagagcccgatcccttatatctgtgccaccatttgggacaccccgcaaggactcagtgcgggattcgcactgacttcaaggaaggactcgaacccttatctgaccccagcttgggcggacacctgtctttgccgcggtgacccttctctcatgaccctgcggagccttgaaccctccgagaatggaagggatggtacgcggagccagtgggggaccgcggtgtcggctgaggagccatccactcaggaatagcttctggataacgccctgcgggagctcggtcatacaggatggtactgaggaagtatgactgtgaatgagaccaaagagttaagagaggcaccagaaggaactgtcttgattagagatagctcgcattcagactacctactaacaatatctcgttataacatcagctggaccaactaatgtgccaatccaatacctacaccgcgagtggggtcatctgatcgactactatggtaacatgtgccaagatgccgacggtc

SEQ ID NO: 605104 - DNA, 186 bp, Homo sapiens
ctcatgcatgttcatcatgttagtgtcgtattttgagctggggttttggggctgcccttagagatagagaaacagaccctagcaatgtgctctattgcaatgggccacatacctagatttccagatgtcatttccccttttttattttaagttatgttaagattaataaaacaataaaagatcata

SEQ ID NO: 605105 - DNA, 116 bp, Homo sapiens
ttcccgattgtcttttccttaaggaaataaaatattatagttagggtagattgtgccataggaatagtatggagtgctagtgataagcatctcaggtctgcctaacctatgtgggc

SEQ ID NO: 605106 - DNA, 136 bp, Homo sapiens
gaattctctcactgctgcggacacggccgtatattattgtgcgagagatcgcgggggagtcatagacggcaactatcgcgaatattattatggcatggacgtctggggcccagggatcacggtcgccgtctcttca

SEQ ID NO: 605107 - DNA, 696 bp, Homo sapiens
cggcacgaagtatttccgatctagtcgcgcaaatttctcacatcgctcttcaagcggattgtcaggggcatttttcacttactcgggataccccacagtgacttattactctctaattatattatttatcaccatgctcaaaatacaatgccaagaaccatttttgcttaacatatttcatttatttataccttgtcacccagtttcactctaatcttttcttaagttatacaccttaccatcgcttattttcattaattaagaaaagaaccttattttttcccctaacgacactgaatactttattacaatatatcaattttttaatacaatcttcgccctctcttataaatattaataaaattcttgttacttattttttcccttttgccaaatatataacataagttttcttacatattagaatacaatcttaacttgacccttctgtacccatatatatacatccatctaggatgttctctctcagttccactcttttcttctaacttatattaactgtgtgaatacctgttcgacgggccgtacgtccactaacttaagtttatcccccaaaccctttccctttccgttatactcactataacactataatctgatatttgtcacatatttcaactactcacaatgttacttttaacatacttggatgactaactttaattgccacagatt

SEQ ID NO: 605108 - DNA, 388 bp, Homo sapiens
  misc_feature (158)..(158): n is a, c, g, or t
  misc_feature (336)..(336): n is a, c, g, or t
gcctaactcgtctggtcagtgtctgtgctactccatgtgatcagcgccacaacagtatttgatctagaaacggttgcatgtgcggtgtctgattctggctaagtatcgccacttgctccaagtgtggataaggtcgtcacacgctggtattttgattnagtaagatgggtcatatgtggcaggtggcttgattctgactagatgtctgctgctcgctccaagtgtgaatacagctggcacggccgcctgaatcgtataataagggctcaagaataatcatcgaaatgctctctctgagctctgatctcatatctgtcaactgctgcattcatactntcatgtcagatgcatagaattatgcagcaatacatgctgcgatgttagagtg

SEQ ID NO: 605109 - DNA, 136 bp, Homo sapiens
agaggataccgctcaccgtctccgactggcagcttctcgcgtggcccatggtcggccaggaccgccacccctatccccggtgaccacggcatatagcgtgggaaacggattactggagcggatggagcaactcatg

SEQ ID NO: 605110 - DNA, 1069 bp, Homo sapiens
ccgtgtaaatataacacgaccgcgtcggcttgtttgttgacttccccctccctatgagtgtccgcggcggcaacccacattcaccaacccccgttgttggtggtcccccctcccatatagtaggagcacaccgcgggggcgcgggtgatcaaagtccccgccggcccgcgtttatattcatagttgccgccgccgggcgggggggggagtccatcagtttgtctcacaccacgcctgctgtctctcggtgtggttagtacgttcgatgtggcccccgtctttgtgtggtggtggcacgctatgcatgtgacgaccagtgttttgtggtcccgactcaaaaagcgactttggggggtgggtgttgcgtgccgcgcggattttatcctccggcggggtgtgtttgtgtctactcccacgcggcatgcttttggtggggggcgcgcccacctctcatagaggtgtttattgactactacttctcgctgatgccacactcgatgttgtttgttctttggtccgcgccgctcgagtctcgacccaccccccccccctctcgcgttgaggtttgtgtatggttgttttgtattgttgtattaccgcagcgtgctagttttctctcgttctcccaccgctgtcggggtgtgggactagtgggccccacacacgtgcggggtcctccgtttagcgatccgccactcacctctcgcggggtggggaattgactccacctccccccccaccccgctctctctctctctcacataggcgggtgggtgtacaccactggtggcgccccccccccccggcgaatatttttatgtttttattataataaaggaggggtgttcttcactcttcttttcgccaccagccagcggtgttgttgtaatcactctctcgggggtagaacagggtgtgccccgccgcctctccccgctcccccgcacagtggcgggggttgggcggcgcgacgggagccacctccccccccccccctttttttttttttctagaaaaaatttttttttttttttttttttatagaaaaaccacacacaaagatgagata

SEQ ID NO: 605111 - DNA, 305 bp, Homo sapiens
cctgactgcatcttgctgaggggcatttccatgcccagaggaactagtgaggataggagtagtcaggacggaggtccgaacgtgacatcactctcgcctggctcccgcgtcccccacaccaatgtcagcttcagcgccttgagagcaagttcccttttatacgatgagtctccctggcaggcctttttcatcaggagccgcgacaggtgagggagagtgtctccggcagtgctggggatagtggcacccatgtagtgtgagcttactatccgggagcacagggcgacctgggcagcacaggtgaa

SEQ ID NO: 605112 - DNA, 160 bp, Homo sapiens
  misc_feature (34)..(34): n is a, c, g, or t
  misc_feature (153)..(153): n is a, c, g, or t
atatcacttgaatcacactatcagagcacagcgnatagtgacagagaaaacgctatgagtagtgagtgagtgcaggagcggcagcaggtccttggagtcactcagaggctgtggagatcacgcgggtaaagctgagctgattattgaatgaanactcact

SEQ ID NO: 605113 - DNA, 441 bp, Homo sapiens
actggggttattgagggagataagtgaaaggcaattttaatgtttatctttatactttgtaaaaagtattcattttaaatatgaaaattataaaataattcaataatatgtcttttttagaatatacccagatgttattagaagttttatattatggtataatttatatcattacataatttataacataatcagtccaaacacacatacttcctctatgaacttcataactatttagccacattcaagcccagagattactgaaatgctggaactgctattatgagacttttagtagggcactcccagaacactcctttaaaagtatctctgtacatcaaacccataatagttacctcagtttgtataaagttgcctgtagattcacatgagacaagagtgtaacatttggagcccagatcatttcttagcatggtccaa

SEQ ID NO: 605114 - DNA, 206 bp, Homo sapiens
cataaggcttcgatacgggataatcctatttattagctcagaagtttttttcttcgcaggattttactcgagccttttaacacgtccagcctagcccctaccccccaattaggagggcacaggcgccccaacaggcatcaccccgctaaatcccctagaagtcccgtacatacaagcacgcgtgattgcaggccggtacatgccag

SEQ ID NO: 605115 - DNA, 254 bp, Homo sapiens
agatggtcagcagacgtaagagtcagaagtaggaagagaacgctcggaaggctggttgggtcatgcgagatcattaaaaatggctgaccctaacaatatgtacaagaaatataaaatgtagataaagagatacaaacaaatgtcctttttagagtacttttaagaaaaaaagcagggccgtggaagtttgggttcttttttcctccccggttgcaaattctcatggtttgggttgggtggtggagatgtgcgag

SEQ ID NO: 605116 - DNA, 282 bp, Homo sapiens
acgatactgaactttgctagactacatgggccatcaatttaagaacaaagcttggaagaaagcctttaagtaggcacttaaaagaattgagaaaataaagtgtaagttatttccgttttatggtactctccaccctcattacagaactgcatattttaaagcattctcagtgctagagtaagtaggtgttacaaagatgctgctgctgaagaaaagatgaatggaactaagatgtcagcatactgcagcccagtgacagaaccagtctcaaagctcttgcag

SEQ ID NO: 605117 - DNA, 352 bp, Homo sapiens
  misc_feature (8)..(8): n is a, c, g, or t
ggctcagnagacccaccccaaaatgctcacactctggctactgctactgctgtgagtagttaactgtctttcatcgctgagccaggagtctcttgttttctaccagcatccatgaaattgtgacaggttaacttgttagccacaagcagggtaaaatctcacgttcttcacacatcttgacactggtctttatttttattttattttattttatttattttttgagacagagtctctctctgtcacccaggctggagtgcagtggtgcgatctcaactgactgcaacctccgcctcccaggttcaaccaattctcatgtctcaggctctccgagtagctgggactgcaggcc

SEQ ID NO: 605118 - DNA, 763 bp, Homo sapiens
  misc_feature (47)..(47): n is a, c, g, or t
gggagtgtcaaacttgacatcagcctgcgagcggagcatggtaactnctccagcaatcagagcgctccccctcacatcagtggcatgcttcatggagatatgctcctctcactgccctctgcaccagcaacatggattgtcagctctccatcctcctccttctcagctgctctgttctcgacagcttcggggaactgattccgcagccttccaatgaagtcaatctactggattcaaaaacaattcaaggggagctgggctggatctcttatccatcacatgggtgggaagagatcagtggtgtggatgaacattacacacccatcaggacttaccaggtgtgcaatgtcatggaccacagtcaaaacaattggctgagaacaaactgggtccccaggaactcagctcagaagatttatgtggagctcaagttcactctacgagactgcaatagcattccattggttttaggaacttgcaaggagacattcaacctgtactacatggagtctgatgatgatcatggggtgaaatttcgagagcatcagtttacaaagattgacaccattgcagctgatgaaagtttcactcaaatggatcttggggaccgtattctgaagctcaacactgagattagagaagtaggtcctgtcaacaagaagggattctatttggcatttcaagatgttggtgcttgtgttgccttggtgtctgtgagagtatacttcaaaaagtgccatttacagtgaagaatctggctatg

SEQ ID NO: 605119 - DNA, 768 bp, Homo sapiens
gggacagcgaagcaaggacgtgtcctgacgcctgtcctagagcctggagaggaccagaggcgacggctgtgatacacgggccaggcaaggcggtgttggagacatggtgtcgcgatgtctcgacgagaagagaggacagagaggatcacggagcgtgacgcgcatgcgttgccggctggccggagaggcagcgacgtgcggagcgtccggcaggacagtgccacagatagtcgctcggagagacgcggcgtcccatggagaaatgagacgcttggaccagctagtgcgtactcattgcaacgtttcgcgctgaaccaccgtgacgtctgccattgaaggcaaggatacagaacgacgaagtcaatcgagcagcttgtgttggttgcactttgctcgattagttacaaggccaatacaacgtctactctaggaatttcaagacaacgggcgtagtggcacaggcaaaggctgggtaattgtaccaatctcgaagttgcttgtgtcactataccggatcgaaagcatcgcgcgtggaatctcagagctcgtgtaagtgagacggaagatagtacagggccattatgttccgaggcttgggggctaccctggaccttgtaccgaatagggcgttacgggagtagatgtgccgcaaaccgaaacactttggggggaattcaatgcttaaacatctggacgattccaatggcatgcacttaactgtcctgaccagtatcatactaatagtagtaatgctgtgacacctaatag

SEQ ID NO: 605120 - DNA, 387 bp, Homo sapiens
actttcttcatatgtatacgagcataaagggaatcaatgcaaatggccgctctctgttataaaaagctgtgtataagccaccttccccttcaccaatcgaaatgaacaaagcatccaatcccgtggagagtaggcatccaggtcacgccagaggatgacgattgtttattcaccgtcatctacagtgaatttgccccacacaggaacacatagcagcaggatgtgggaatgaccatttccatgtgttgtcttgttgactgtgagaggaacaattaccagcaagtagtacggcatgtattaatgacagtcaagagcaggcggtaggcgatttgtcgtcttcggagatctcaagccttgcttactcaccaaatattgagtaacacttgc

SEQ ID NO: 605121 - DNA, 306 bp, Homo sapiens
cgtcgttaaggacatggaggaagaacagcttacttaatggggtgtgtgcctgacttcgagctgctcagtgacccttaggatgaacacttgtatgccaccctgatgcagctgttgagggagagcctggccaggcgcggttgggctctcgatgccctgcgcggcttggtgatcgctagccagttggtaagccaggtgggcaaagaactactgggcctggcctacagcgagccgtgctggctgcggggggcgctgctggacgtctgccgtggagcagggcaagagctgccaaagcggtggccaagttgg

SEQ ID NO: 605122 - DNA, 254 bp, Homo sapiens
tgtctttaatgtagggtgactcagtgctctgtcttagaacttgcatactataactgcctcctgttgacaacacttagttattggctatcacactgttaaggattatgtgagttcctttcttctcgcaaaccctttcacttattcatctagtgttgctccttacgctggatcatgtccagtgtactcgttctcttatcattatagggatgaaagcgtgtccacaagaatctatcaggcttcctgtgcccgtcctt

SEQ ID NO: 605123 - DNA, 742 bp, Homo sapiens
gtccgtcttttgatgggcaccggcccttctgaactgtgatgggacctgccttgctccactagtagctgggcagctcacaattcacaccttgtgtacctgccacatcccctcacttggttggaaaacatcccagaaggtcttgagtcccaccacccactgggtgtcagtccaaatgactgtataggaggcccttattttggtcacagagcaagctggccatgaacgaaggagagaagacgccacagatttccttccctctcctccaggagactctataagatagatcccccagtcctgctcagcccgtattcccatgcctccctctcattggaggagctgaccaaagcagccctaatcgggccataacacttgaccaattcagctgctggcagagggaggaaacaagtgttttcccaagtggcattgtcatctcgctttcaccctgactaaagacttgtcttaaagcagcagcccgagccgcgtcccagccccaggtgcgttagtggcggaggagagcgtggcacttcctccatggtcggcaaatggcgactctatactctccgcgccgcacccagggactggatggactagaaaggatgcctactttttcttagtatcagatgcagagactctatgtatctcccaaagagcactattttctgcagcggtgatgaacccctgtatatattccgtactgtcagagctaacaccaaaattgaagaatggtaatgttcgagctatc

SEQ ID NO: 605124 - DNA, 222 bp, Homo sapiens
gggacttcgatttcgaaatgaggagggtggtactatgtaggatttctagtacatagtctacaggttgtgatctatcactgtcatttttgagcctcgcgttgtgccatagtgtggccagttggtgacgcctgtgttctatttgacaagatcctaggtctagtcaacactttaatggcaccaacaagacagttcccatgagcactcagcccatctccttgcctg

SEQ ID NO: 605125 - DNA, 209 bp, Homo sapiens
  misc_feature (1)..(1): n is a, c, g, or t
  misc_feature (198)..(198): n is a, c, g, or t
natacgccttgcaggaactagtgcccatgatatcagccaagcagctctgtgttctagtgcccatcatcatcagctgagcagctctgagtgtctactgcccatcatcatcagccgagcagctctgagtgtcctaggtgcccatcatcgtcagccgaggcagctctgatgtgtcctagctgcccatcatcatcagccgangcagcacttag

SEQ ID NO: 605126 - DNA, 939 bp, Homo sapiens
gctcggcctcccacgatgctgggattaccagggcgtgacccaggcgcctggcttcgccctttgctgttggataccctggaattagtttgttgctatgcttattggatgaagtctggttgcttggaagttcactcaccggcttgccgatctgttgtatgcccttcccatgtccgttcttattagtcactatcttacagtgccgttttgagattaagattgttcccttcttccagaggatggtgctttaaacactgattttccatagctgaggagtctaatctggtgctgaatctcttttggctttaccctaataccagttgtcctcgattcagtcataaaccacttgggatacactgaaaaggctaggtttactaaaatgtgctcggagtgtggaggattcaaacgtgtgttgctcatggagaatttagaatcgcctgtctacttgtgtttcattattcttctaagacgtattttgaataattacctgcaagttgttggaataggtacttctcgaaattcttaagaggttaaatgtattatggtcttcatttgaggggtgcttatatcttttggtcgttgtagctcctatggttgcgtctccaaaattttagggggcaataatgttccggaagttttgaactttatagtgtttacataccagtctgtagcgtaatgagtccctgtgagataattcataatagttcagtgtggtttgtaccagcaaggaaccataaatgcacagtgaatccaactctaagttgatcgtgctttccaaaatattttacgttttcctttgttacttcttttacaaatctccttgctttttgtgagaaattccttgaggaagggttttaatatgggggccttcctgtcgtggctttccgtgttaacttaaaggtctatttgaattttcaaggggcgtaatatggttgagtaatg

SEQ ID NO: 605127 - DNA, 960 bp, Homo sapiens
  misc_feature (758)..(758): n is a, c, g, or t
agcgcagtggcatgatcttggctcattgcaacctctgtctcccgggttcaagcgattcttctgcctcagcctctgaagtagctgggattacaggcacgcgctaatttttgtatttttagtgcagacgggatttcaccatattggccaggctggtctcgaactcctgacctcgtgatccaccctccttggcctcccagggtgctgggattgcaggtgtgggccaccacgcccggtctctttttttttttttttttttctccccagttttgttgattgaccatttttaaaaaaggcttgtgtggctctctcctattctattacagacctccagagtctgggaacaatttggatgcgcttttactggaatctcttcctggaaatgttcacattatgggagtggggaatcagtttttggtgcctaatttttattcacgaagaaggcttcctcttctctactctccctttgtgtgcaaaccccattcttcgtggattagcttagaacaagggaacctttcagaaatgtggccttctttggttgcattgacccaccttgttttgccacctcataggcctctaatcggtcctcatattaagtggggggcgacataatttctcagaagttcttaccccttttcgtgaagttagtcacataattaatttcccatagtgccaattttctttataaaggctcctcgtgaagtgctttgccccttttttcaacactcttggggcgcctatacttttttatagcccctctntttagccatactagagggacgggggagcgggtggacattttccctatagatacttcctcacagataacacagttttgcggcattggtttagtttgaccgagcgaaccattggtggtgaattccccttattttgtcccccacttcttcctttacgctttctgcggcgatttggggtgaaccccctttgtttcccttaattctg

SEQ ID NO: 605128 - DNA, 469 bp, Homo sapiens
  misc_feature (32)..(32): n is a, c, g, or t
  misc_feature (45)..(45): n is a, c, g, or t
  misc_feature (69)..(69): n is a, c, g, or t
  misc_feature (179)..(179): n is a, c, g, or t
  misc_feature (199)..(199): n is a, c, g, or t
  misc_feature (301)..(301): n is a, c, g, or t
  misc_feature (334)..(334): n is a, c, g, or t
gaatggaatggaatttaatggaatggagtcgnaggaatggacagnaatgtagtgtactccaatggaatngaatggatcaaaatggatttgaacagattggtatgaagtcgaatggaatgcactggaatggaatggactcaatcagaacggactggagaggaatgtaaacaattggaatngaaacgaatggaatggaatnaaatggaatggaatgcaatggaattgaaaggaacggaatcaaatggaatcgaatggaatggaatggaatggaatggattggaatagaatggattcaaataanatagaatcgattgcaatggtatacaatggaagngaaatgaatggaatggaaagcaatggaagatattggaatcgaatggcatcgaatgaaatgtaatggaacggaatggaacggacccgaatggaatggaatggactcaaatgtaatggactcgaatagaatcgactg

SEQ ID NO: 605129 - DNA, 814 bp, Homo sapiens
cggaaggccttagaggtcagcatatgtgatgttaatggccctcagtagtccttgagtactgagtgatatcgccccggtaacaggtgttgctagaatgggctatgaaagcagaggagaatagctgccaaaggaagtatgtatcgcattaatcagggcgataactaagtattgctcggctgtcagaataatacttatttcacgtgtgaaagcaacatggatgtgattccgaacacagaagttagcatgacccgttttgatgtatacaaactaaatagcataacgagttactatggttagacatacagaagttctgtgatgcatgactatgatggttatccacttaagatcaataggtagaaggggatctgagaaattatgtaatagggagtgggaataaaagtacttaattcctgtggggaggttatatttgtaagttcaaatgcatggttgaaccttggttagttttattctgttaggacagaattgaaggaaagagtattatagccagagtgtagtaggctagggggatggtaagaactctgtaatagaatgtcgtgtggatgttacctttttcgagatccaagcatatgaaaagcctgtatattttttctaaagaacacatcttaagtaccacgctttacgagattataaccagttgactggtccctctggtaaggatatggttacaagtgctaggaaataactcactggatacctggtgaacatacttgtttggctagagaggggcataaaaaatgcaccaggggattttccgaaaggtgacacaggggttagaagcccgaccttagggggg

SEQ ID NO: 605130 - DNA, 837 bp, Homo sapiens
agagggagtcctcgcggacgtcagccacgatgccagactgactactatcttgacgttgcccctttctagaatcgtcccagtgcatctaaaatggtccctcagattttccataagacctcgtgagctgttcgtcccgagtcgtacgagctgtccccaagcgtgtcccgagaccaaaacgaatgaagacgttagccaagacccaatatatggaatgtagtggtggctggatggtgtccgcactccatttttgctgtcgtggcacttcatataaacgacctgatgccgacatgattgtggtctagagcagcgctctacgggttagtgcatcggagcagtgtccctaaggaagtagttgatcatatcatctgtggtacagtcacattcaggaagtgaaagcaagcaatgtggctagagaggcggcccttggagcgtggcttctctgacaagactcctgctcacactgttcaccatggcttgtcatctctggcaaccaagccatgagccacaggtgtggctggaaatgctcacaggccagtgtgatgtgatcgggaggtggcgccgagcaagaggtcgggatggtcccctattcggtcacttcccgggaaaccgaggaaaaatggactggctgatcctccaatcagggcacatcaagggccaggcgactggctagaacccgaaaatccgaccacatcatacattgaactccggggtcgccgacaccacacatgaccaggccacttgcaaccaggccgggccagcggatcgccgaccgcacacaccgcgcccacaccacaaggcacaagaggcctcagagggcacccgcacgcagaagccaac

SEQ ID NO: 605131 - DNA, 117 bp, Homo sapiens
agagttacttaaaaaaaaaaaaggaaagcaagcaacagtaactgggggtttgggggcagcagcatctgaattttatttggtggctgggggacgtggtttcagaaactttgcccaaac

SEQ ID NO: 605132 - DNA, 387 bp, Homo sapiens
  misc_feature (187)..(187): n is a, c, g, or t
  misc_feature (224)..(224): n is a, c, g, or t
  misc_feature (299)..(299): n is a, c, g, or t
  misc_feature (301)..(301): n is a, c, g, or t
  misc_feature (304)..(304): n is a, c, g, or t
  misc_feature (318)..(318): n is a, c, g, or t
  misc_feature (333)..(333): n is a, c, g, or t
  misc_feature (354)..(354): n is a, c, g, or t
  misc_feature (358)..(358): n is a, c, g, or t
cttcccctatcatagaagagcttatcacctttatgatcacgccctcataatcattttccttacctgctcctcgtcctgtatgcccttttcctaacactcacaacctaactaatactaacatctcagacgctcaggaaatagaaaccgtctgaactatcctgcccgccatcatcctagttcccctttnaattccgggcctcccatcctacgcatcctttacatanagactaggtaaacgacccctccttaccatcaagtaattggccacctggtactgaacctacgagtcaccgactacngnggnctaatctttaactnctacatcttccccantattctagaaccaaggcgaanctgngttccttgaccgttgactcgagtaggctt

SEQ ID NO: 605133 - DNA, 2191 bp, Homo sapiens
attttttaatccattctgtggcttgttccatgcctgagaacttttgacatcctgtgcccagacttaaactcaccccttcagtgtgtgggtttagggggagaagtgaaggttgacacattcatatcaacaacatagtctactttaccatccaacgatgtattttgatatcagccaagtatttctctctacaactgtgagcaatgctaatccactccagccttcttacactgtaatgataccttttctttgtcctctctggaagtttctagtagcatatctccaaataattattgaatttgaaagcctcagctggacaagtcttctctgtggttgaattgtgacaatgtctgtgttccttaaaaaaataaaaaataacataaaaccaagtaaggttagacaaaacagttgaaagtttaaaatcccttggcctcatctagttcagtggagacaaactttctaaatgggaggagggccatgtaatgagaggagaggagaggagagaagtatttgatgcactcatggcctcagggtcagggagacctggaggagcagtggagatggtggagagccagagaacaggtgccacctcccaagaggcagcctttactcacctctggctgattggcggggttggggatgtgggtacaggcatatcagacctttagatttttttttcaagaaaagccagaaatctggatcttttttttttcctttaagagatgtcatctcactatgttgcccaggctggtcttgatactcctgagctcaagcaatcctcctatctcggccccccaaagtgctgggattacaagtgtgagccaccgtgcccagcctggatttttttttttatgttaaatatctcgattttttttctagcattggctgacttcacatgtataaccaccacttgcagacaaagcgaaccaccacgtctccaggccaaattccagctgccagcatgcagcctctgatctgattctcttgtagaagccattctatgaaaagaagggaggctatctggaatgttattggatgccctctatctgccagttactttgcaggggtcagcttttactagtttgccttttttttttttcagatgaggaaactcatgcctacagagtggttaaatgtgaagtgacttgtcaaatcacacagctagtaagaggaccagtccaagcacctgcatctcaaaggcacagatgttttgtcctacaccttactacgtagggatttcgaatctgagtgtatactcaagattctgaatcataactcaaggttgacaccagtaacaaaaccgtctggttggatgagttcaccagatgggcctcttatgggaccatcccaaaatgacaacatacatactcactatgaaattcattggcaggaattttgtagggcatgtagggtaggaagatgggagggtgggggaaacctacaaacctagtattttgtggggtatcatcacagctctggactgcttcagttggcaaaaaaatggatgtattgccaaataactatcccacttaggtttagggtaattaattaaaggctagagtgttgccagcacctttgatatggggaaccggatgcattattagctcagatctttgggtgtggtgactcatgcctgtaatcccagcactttgggaggcagaggtgagcagatcacctgaggtcaggagttcgagaccagcctggacaacatagtgaaaccctgtctctactaaaaatacaaaaattagggccaggcgcagtggctcacgtctgtaatcccagcactttgggaggctgaggtgggtggatcacctgaggtcaggagtttgagaccagcctgaccaacatggagaaaccccgtttctactaaaaatacaaaaaagttagctgggcatggtggcacatgcctgtaatatcagctactcaggagactgaggcaggagaattgcttgaacccgggaggcagaggttgcagtgagccaagatcacgtcattgcatcccagcctgggcaacaagagtgaaactcagtctcattaaaaaaaaaatagccaggtgtggtggcaggcacctgtaatcccagctactcaggaggctgcggcaggagaatcgcttgaacccaggaggtggaggttgcagtgagctgagattgtgccactgcactccagcctgggtgacagagcaagactctgtgtc

SEQ ID NO: 605134 - DNA, 1525 bp, Homo sapiens
  misc_feature (185)..(185): n is a, c, g, or t
  misc_feature (198)..(199): n is a, c, g, or t
  misc_feature (207)..(207): n is a, c, g, or t
  misc_feature (234)..(234): n is a, c, g, or t
  misc_feature (762)..(762): n is a, c, g, or t
  misc_feature (849)..(849): n is a, c, g, or t
  misc_feature (876)..(876): n is a, c, g, or t
  misc_feature (909)..(909): n is a, c, g, or t
  misc_feature (942)..(944): n is a, c, g, or t
  misc_feature (947)..(947): n is a, c, g, or t
  misc_feature (950)..(950): n is a, c, g, or t
  misc_feature (952)..(952): n is a, c, g, or t
  misc_feature (955)..(955): n is a, c, g, or t
  misc_feature (958)..(958): n is a, c, g, or t
  misc_feature (963)..(963): n is a, c, g, or t
  misc_feature (966)..(966): n is a, c, g, or t
gggggctgtgacgctgatgctggggtcagaatgtcatacccaggctatcccccaacaggctacccacctttccctggatatcctcctgcaggtcaggagtcatcttttcccccttctggtcagtatccttatcctagtggctttcctccaatgggaggaggtgcctacccacaagtgccaagtantggctacccacgnnagctggangctaccctgcgcctggaggttatccangcccctggaggctatcctggtgccccgacatgcgcatggggcgagctcctagtccttattcgccggtgagtgtcactcctatgtgcacacaggactttaggaagtgcccactcagggtggcatgcacggactgtttctcgcgtgtactccacagcgcaccttcacagtcttaatggaagagtaggtccagtcacatggttccatctacctggtggctttcgctgtgatggactagatgtcgcttcatcagtaatcctgtgatggaccagatcgctatcttaccctagtcagcctgccacagtgactcaggtcactcaaggaactatccgaccagctgccaacttcgatgctataagagatgcagaaattcttcgtaaggcaatgaagggttttgggacagatgagcaggcaattgtggatgtggtggccaaccgttccaatgatcagaggcaaaaaattaaagcagcatttaagacctcctatggcaaggatttaatcaaagatctcaaatcagagttaagtggaaantatggaagaactgatcctggccctcttcatgcctcctacgtattacgatgcctggagcttacggaaagcaatgcagggagcaggaantcaggaacgtgtattgattgagatttngtgcacaagaacaaatcaggaatccgagaaatngtcagatgtatcagtcagaatttggacgagacnnnganatngncantangtcgnatnacatcaggacattcttgaacgtttacttgtgtccatgtgccagtggaaatctgtgatgagaaccagagtataaatccaccaaatggctcaggaagatgctcagcgtctctatcaagctgtgtgaggggagactatggaccgatgaatctttgcttagcatgatccttgccagaataagtctttcctcaggtgagaggtaccatggaggcttattctaggatggtaaatcgagacttgtttatgcagtgtgacccgtgagttttccggatttgtgcaaacgtggttgacgacatcttgcctgggtcctgaaccggctgcttcttagtggagaggcttatatagtatgaaaggtgtcgggcagatgatcccccctgtgcgagtgtggcacccaaaggatagcctggtcacgaacacatgtggctagtttttaaaccggcggcgttcgtgcgccctcgggacacacacactttggtgggggcagagagcgtagaaaaaacaaccctccccaacagggggaacaacacaaaaacgcgagataggagttgaattccacacacaa

SEQ ID NO: 605135 - DNA, 1550 bp, Homo sapiens
  misc_feature (185)..(185): n is a, c, g, or t
  misc_feature (198)..(199): n is a, c, g, or t
  misc_feature (207)..(207): n is a, c, g, or t
  misc_feature (234)..(234): n is a, c, g, or t
  misc_feature (267)..(268): n is a, c, g, or t
  misc_feature (288)..(289): n is a, c, g, or t
  misc_feature (300)..(301): n is a, c, g, or t
  misc_feature (305)..(305): n is a, c, g, or t
  misc_feature (311)..(312): n is a, c, g, or t
  misc_feature (787)..(787): n is a, c, g, or t
  misc_feature (874)..(874): n is a, c, g, or t
  misc_feature (901)..(901): n is a, c, g, or t
  misc_feature (934)..(934): n is a, c, g, or t
  misc_feature (967)..(969): n is a, c, g, or t
  misc_feature (972)..(972): n is a, c, g, or t
  misc_feature (975)..(975): n is a, c, g, or t
  misc_feature (977)..(977): n is a, c, g, or t
  misc_feature (980)..(980): n is a, c, g, or t
  misc_feature (983)..(983): n is a, c, g, or t
  misc_feature (988)..(988): n is a, c, g, or t
  misc_feature (991)..(991): n is a, c, g, or t
gggggctgtgacgctgatgctggggtcagaatgtcatacccaggctatcccccaacaggctacccacctttccctggatatcctcctgcaggtcaggagtcatcttttcccccttctggtcagtatccttatcctagtggctttcctccaatgggaggaggtgcctacccacaagtgccaagtantggctacccacgnnagctggangctaccctgcgcctggaggttatccangcccctggaggctatcctggtgccccacagcanngggagctccatcctatcccnnagttcctccanncaangatttnnagtcccaccaggtggagcaggcttgtcggtgggtatccacgaggcgacgccttcagcaggcttgatggaggtgggtccaagcgaacgaggttccagtacctggtggctgtcctggaggacaggatgcccttctcagtatccgggaggacgaacctacttaccctagtcagatcaagtacagattctgttgtcttcctatccctgttttctctcctgttcgttggcttaccctagtcagcctgccacagtgactcaggtcactcaaggaactatccgaccagctgccaacttcgatgctataagagatgcagaaattcttcgtaaggcaatgaagggttttgggacagatgagcaggcaattgtggatgtggtggccaaccgttccaatgatcagaggcaaaaaattaaagcagcatttaagacctcctatggcaaggatttaatcaaagatctcaaatcagagttaagtggaaantatggaagaactgatcctggccctcttcatgcctcctacgtattacgatgcctggagcttacggaaagcaatgcagggagcaggaantcaggaacgtgtattgattgagatttngtgcacaagaacaaatcaggaatccgagaaatngtcagatgtatcagtcagaatttggacgagacnnnganatngncantangtcgnatnacatcaggacattcttgaacgtttacttgtgtccatgtgccagtggaaatctgtgatgagaaccagagtataaatccaccaaatggctcaggaagatgctcagcgtctctatcaagctgtgtgaggggagactatggaccgatgaatctttgcttagcatgatccttgccagaataagtctttcctcaggtgagaggtaccatggaggcttattctaggatggtaaatcgagacttgtttatgcagtgtgacccgtgagttttccggatttgtgcaaacgtggttgacgacatcttgcctgggtcctgaaccggctgcttcttagtggagaggcttatatagtatgaaaggtgtcgggcagatgatcccccctgtgcgagtgtggcacccaaaggatagcctggtcacgaacacatgtggctagtttttaaaccggcggcgttcgtgcgccctcgggacacacacactttggtgggggcagagagcgtagaaaaaacaaccctccccaacagggggaacaacacaaaaacgcgagataggagttgaattccacacacaa

SEQ ID NO: 605136 - DNA, 1467 bp, Homo sapiens
  misc_feature (185)..(185): n is a, c, g, or t
  misc_feature (198)..(199): n is a, c, g, or t
  misc_feature (207)..(207): n is a, c, g, or t
  misc_feature (234)..(234): n is a, c, g, or t
  misc_feature (267)..(268): n is a, c, g, or t
  misc_feature (288)..(289): n is a, c, g, or t
  misc_feature (300)..(301): n is a, c, g, or t
  misc_feature (305)..(305): n is a, c, g, or t
  misc_feature (311)..(312): n is a, c, g, or t
  misc_feature (704)..(704): n is a, c, g, or t
  misc_feature (791)..(791): n is a, c, g, or t
  misc_feature (818)..(818): n is a, c, g, or t
  misc_feature (851)..(851): n is a, c, g, or t
  misc_feature (884)..(886): n is a, c, g, or t
  misc_feature (889)..(889): n is a, c, g, or t
  misc_feature (892)..(892): n is a, c, g, or t
  misc_feature (894)..(894): n is a, c, g, or t
  misc_feature (897)..(897): n is a, c, g, or t
  misc_feature (900)..(900): n is a, c, g, or t
  misc_feature (905)..(905): n is a, c, g, or t
  misc_feature (908)..(908): n is a, c, g, or t
gggggctgtgacgctgatgctggggtcagaatgtcatacccaggctatcccccaacaggctacccacctttccctggatatcctcctgcaggtcaggagtcatcttttcccccttctggtcagtatccttatcctagtggctttcctccaatgggaggaggtgcctacccacaagtgccaagtantggctacccacgnnagctggangctaccctgcgcctggaggttatccangcccctggaggctatcctggtgccccacagcanngggagctccatcctatcccnnagttcctccanncaangatttnnagtcccaccgaataaagcaagcttttctagatatccacagccaccttcacagtcttataaaagtaatccagcacaaattccactacctaatagactttcctaaaagacagataccttctcgatatcctagaaaacaacctacttaccctagtcagcctgccacagtgactcaggtcactcaaggaactatccgaccagctgccaacttcgatgctataagagatgcagaaattcttcgtaaggcaatgaagggttttgggacagatgagcaggcaattgtggatgtggtggccaaccgttccaatgatcagaggcaaaaaattaaagcagcatttaagacctcctatggcaaggatttaatcaaagatctcaaatcagagttaagtggaaantatggaagaactgatcctggccctcttcatgcctcctacgtattacgatgcctggagcttacggaaagcaatgcagggagcaggaantcaggaacgtgtattgattgagatttngtgcacaagaacaaatcaggaatccgagaaatngtcagatgtatcagtcagaatttggacgagacnnnganatngncantangtcgnatnacatcaggacattcttgaacgtttacttgtgtccatgtgccagtggaaatctgtgatgagaaccagagtataaatccaccaaatggctcaggaagatgctcagcgtctctatcaagctgtgtgaggggagactatggaccgatgaatctttgcttagcatgatccttgccagaataagtctttcctcaggtgagaggtaccatggaggcttattctaggatggtaaatcgagacttgtttatgcagtgtgacccgtgagttttccggatttgtgcaaacgtggttgacgacatcttgcctgggtcctgaaccggctgcttcttagtggagaggcttatatagtatgaaaggtgtcgggcagatgatcccccctgtgcgagtgtggcacccaaaggatagcctggtcacgaacacatgtggctagtttttaaaccggcggcgttcgtgcgccctcgggacacacacactttggtgggggcagagagcgtagaaaaaacaaccctccccaacagggggaacaacacaaaaacgcgagataggagttgaattccacacacaa

SEQ ID NO: 605137 - DNA, 111 bp, Homo sapiens
ggcgtatgatatcgtcgaccacgcgctcgcccacgcgtcgcccggctccggcccccagccccggcactcgctctcctcctctcacggaaaggtcgcggcctgtggccctgc

SEQ ID NO: 605138 - DNA, 902 bp, Homo sapiens
catgctggagtgcagtggctgggtcttggttcagtggatctatggttcactgttgcctcgatctcccaggcccagaggaatacccagcctcccaggtagctggtgaccgcgggtgtgctgccgcacgctgctctggctactgtttctcggtttctgtagagtacggggcctcccttatgttgccgcggagctggtcttggcgctcctggatctcacggtgatgctcccggagtatgggcctcccaaatgtgaggggattgtagggcgtgagccaagcacgactcaggccttgagccactagtcctaaacaactcagaatggagcagcatctccctccagccattgtttcaccttgtgaagaaccttaagtgggctgcatcacaactgcaaaggaggctggaaatgcgatttgaggccagttctttgaagatacacgtgcacatggatatggggcagatagtcgtctcgtaccccgtcacctttacctcatggctcaaaaagtgagcaggcaatgagggaatcactggacaattagaagctactcagctggtgtgtgcgcacacaaagcacacattgacctggcaggtcacgtttacttttgagcttgaggaactaggtatagaggcagcacctgacactctgatcccacaaagggtggagtagcaagtgccttaccaagcgggaagcaagggttgagtacaggggcttggcttcccccagagaaacgtccctccagaagaaaccttagtgtaagacaaagaacgtcagggatgctcacacggatggggcacggcggccaccaaggcaggcaggtggatcagacatgaccgggagggaatggaggacccgggtggcatctgaaggacctcatgacacaatccggatcggcctaggacacagga

SEQ ID NO: 605139 - DNA, 514 bp, Homo sapiens
tcgtgtttgcagtatgcacctttgtaagttacatatcagctctccaatatcactcttcgtcagtcacggtgtagagatcttacttcacaagaagtgagactcagagaggtgaagtgacctgtgcagggtcacgcttattacagtgccggagtgggaactaaaggaagttgcagtctgtgaacttcagggtctacccagtaggatatagggagcagaagagtcaggaatgtagtgagctgcaagtctcactagaaccagatgaccttctggggagagtgtaagcccagccttaaaagagaagctcttcatctccgtgaagtggcgaggtgtctgccctcttcaggccaatatcgagaattacctctataactgagcaaatcctcagaacccaggtcagaccttggattgttgctttgcacgtagttcaggtccgggctgtgtctctaactcgtgctgtgggaccctcagggagagtacccaaccccttcaacccagctgaatgagaggagttctg

SEQ ID NO: 605140 - DNA, 408 bp, Homo sapiens
gaagatgcgcgccggtccatgctcaggccctataggaattgcagcgccaaaaggcgtggttccgcacccgggggcattggctgacgcgcgtcagccagagctcgaagaaccgcggctccttcaagcaggcggcatagcctatagcgtggatgaccaccgaggcgcccagggtccagaacgacttggtgatcaggaacaactccatcgtcgccacggcgttcagcacgaaatagttgaaggtcacgcccgcagacatctgcgggcgcgccagggcgccaaagatcggatcacggtcgagttcgctcatcagagtgaggaccccgaggccgcggacttgatgccggcgacaatggccgcggcgccaaagacaatgaagctgccgatgatcacggtgatgccgcgacgcca

SEQ ID NO: 605141 - DNA, 200 bp, Homo sapiens
aaagcaaggaaaaaatggaatatctggtttttgctgaatgcttaatttattttttactgggcccctcccatttttatccaatcccaatagcatgaatgcttctctgtagtaatactaattttgggccttttgtctgcttttttaagacccgttgttccccctttgtagatattaggccaatatatttcgattggatccca

SEQ ID NO: 605142 - DNA, 313 bp, Homo sapiens
cacgaggaatattgcaccaagtattcttcttgccctgagcccatatgaccagttggatagacgtttagaggttctacaccctaaagacatgatgtgtctgtggcatttgcctgtctcaccaacttctccatgaacggtcacaagtctgtttggagtcaagcatctcctgtgtgggggacgacacgactacacaacctgtgtaagtgttttccctcacgaatgtccagcacttcgtatggtccacaatggacatcacacaagtgagaaagttggggccattgctccatgattgtctgtcacttacagctgtgaa

SEQ ID NO: 605143 - DNA, 213 bp, Homo sapiens
atactaaatatcgcaaccacctagcgacagaagtcgcccaacaacaatagacatccgagaacacttacataagcgatgcctgttagacacagcaaggggtataaaagagatccaaataatagaagtacagaagaacagaaaaaaaactcagcagatggagattaccattcccaatgcctgaacttcctcctgctattaagattgcggtgtttg

SEQ ID NO: 605144 - DNA, 410 bp, Homo sapiens
  misc_feature (46)..(46): n is a, c, g, or t
  misc_feature (149)..(149): n is a, c, g, or t
  misc_feature (207)..(207): n is a, c, g, or t
  misc_feature (265)..(265): n is a, c, g, or t
  misc_feature (303)..(303): n is a, c, g, or t
gacaaacaccaggcggcgtgacgaggtacgcagcgcctgggtcggngccgtgcacaggacgcatattcatgcacccgccagatcaacccgtcgcgcaccgtaatggcctcactggtacgaaacgacaccaggccctggccgccacgcanggtaatgcggtactggataaacgcggtatcgccatcggcgcggatgcgatcagtgtgntcaatcgcctcatccgcctcacggggcatgctggcctgcaggtactcgcgcaactcgncatagcccaccacacggttctggaaaaaatcgtggtanaggatctcggggtggtagtaagccatcaccccgtccagatcgcgatgtcgccagcacaggtgatggcgcagaaccaactcgccggtagcgtggggcgtccgtagcgg

SEQ ID NO: 605145 - DNA, 371 bp, Homo sapiens
ggtaatccattaccaagcatgatacactatcctctcgacccttccaagatactgacagtttcagtatattcctcttgattaacgtaatgctaaattatttgtagtgatctttaggtatattttatttcttgtcattaatattactgttcagaatttatcggggaatctgtcatccttcctgaatcttcagaatcacctggagtagggttcatttgtattcatggtcactgaccacgtggggtagaacctgcaagctcatggttccttcagtgctaagttaatattgttgacttggaggcctcttgatagagcagcagactccagaagccaatttgactttgtgatttctgaaaaaattacctgtcaactgt

SEQ ID NO: 605146 - DNA, 184 bp, Homo sapiens
atacaaatcgagctcggaccctagtttagaagtgtccatagcaagtgtgggggagcggcaatgaggtggctcttggtctgtgcagtattgagtctgaagctgaggggcatattaccatatgtcgctgacacgggtatccctatgctatgtgcttcctgtgctgattcttaattggtcttcactg

SEQ ID NO: 605147 - DNA, 511 bp, Homo sapiens
  misc_feature (33)..(33): n is a, c, g, or t
  misc_feature (43)..(43): n is a, c, g, or t
  misc_feature (58)..(58): n is a, c, g, or t
  misc_feature (70)..(70): n is a, c, g, or t
  misc_feature (187)..(187): n is a, c, g, or t
  misc_feature (243)..(243): n is a, c, g, or t
  misc_feature (264)..(264): n is a, c, g, or t
  misc_feature (270)..(270): n is a, c, g, or t
  misc_feature (274)..(274): n is a, c, g, or t
  misc_feature (287)..(287): n is a, c, g, or t
  misc_feature (292)..(292): n is a, c, g, or t
  misc_feature (295)..(295): n is a, c, g, or t
  misc_feature (300)..(300): n is a, c, g, or t
  misc_feature (309)..(310): n is a, c, g, or t
  misc_feature (324)..(324): n is a, c, g, or t
  misc_feature (340)..(340): n is a, c, g, or t
  misc_feature (347)..(347): n is a, c, g, or t
  misc_feature (367)..(368): n is a, c, g, or t
  misc_feature (375)..(375): n is a, c, g, or t
  misc_feature (380)..(380): n is a, c, g, or t
  misc_feature (387)..(387): n is a, c, g, or t
  misc_feature (391)..(391): n is a, c, g, or t
  misc_feature (399)..(399): n is a, c, g, or t
  misc_feature (407)..(407): n is a, c, g, or t
  misc_feature (409)..(409): n is a, c, g, or t
  misc_feature (417)..(418): n is a, c, g, or t
  misc_feature (421)..(421): n is a, c, g, or t
  misc_feature (436)..(436): n is a, c, g, or t
  misc_feature (440)..(440): n is a, c, g, or t
  misc_feature (448)..(448): n is a, c, g, or t
  misc_feature (464)..(464): n is a, c, g, or t
gagtgggattgggtgtcccggctgttcgcagtngccgcgagtncgcgccggacctggngtagtacctganccgctctggccgagccacgcgcggggccccggtctacaccgcgctggacccggctatgccgtgacggaattcccgaggccgtagcgccacgcgagacgcgcactggtggcctccgcngcgagtcctggggtctcgccagcctcagtcccgactgggcgtctggggggagccgncccagcgctgccagagcccanatgccnggcnggacagcatggcncatgnagncatgngggtcacanntggaggagagcgcnagatacaagaccagcngtgcacntctaaccccggggaacgccnncgtcaanaggtnagtagtntctncggcgtgncgtagtgngncacgtgtnngtntgtacgcgcgtctcnttcnacctaaantcacacaatacaccantagtcgcgtctgtgtcacgtccccaaatacacgtacactagcgcgca

SEQ ID NO: 605148 - DNA, 128 bp, Homo sapiens
aggggtggagagcaatttttggttttatttttgtttttgaagtggagcctggacctccagcccccagggggccttccctggccacacttttttgccccacccaggcatggccatcccagccctttgct

SEQ ID NO: 605149 - DNA, 313 bp, Homo sapiens
atgctacatgccagtgactataagtaccgcttggacttctgcagctcaaggtcaatcttgcccacgtaacccttggagcggaccaggtcttccatttcggctatgagcatcatagtaggccgctcgagcccctctatggcttccaaggcctctataagctcccgagccagggacaggtccttggtttccttctccctggcttctgcctcagctctgaccctctcatccgcgtattaggaagagatgtttttctcctcgactacaactgatcaaatttcctctgcttattttgcaggttggacacgagttgccg

SEQ ID NO: 605150 - DNA, 107 bp, Homo sapiens
gtacacattgtctatggaagatagcttctaaatgagtgggaagcaagtaaatgtaacactgtctgtacccaaccccgaagaatctcagcagcatatctttttttctt

SEQ ID NO: 605151 - DNA, 690 bp, Homo sapiens
  misc_feature (222)..(222): n is a, c, g, or t
  misc_feature (224)..(224): n is a, c, g, or t
  misc_feature (239)..(239): n is a, c, g, or t
  misc_feature (284)..(284): n is a, c, g, or t
  misc_feature (623)..(623): n is a, c, g, or t
  misc_feature (628)..(628): n is a, c, g, or t
  misc_feature (634)..(634): n is a, c, g, or t
  misc_feature (651)..(652): n is a, c, g, or t
  misc_feature (657)..(658): n is a, c, g, or t
  misc_feature (660)..(660): n is a, c, g, or t
  misc_feature (662)..(662): n is a, c, g, or t
gagatgagtttaaagaatgatatgtatgcaacgtttcatcaccaattagatggcaaggttcgagtcgatgtcacataccctgctggattcaccggatgtcatcagcatcgagtaagacagcgtgaacatttccgcctgtgtctaatgacaccaagggccgttcatcgctgtttaccgcatcagcagtggaagaggcaaagtacaagttgtagcatgtgaggnanttctgtgggagtgangggaatcctcactggtgactcatgatgctcgaaccatccgcgtanccgagatcctgtcatcaatggtgaactgatactgtgcagattgatttagggactggcaagataatcgaactttatcaaatttgatacaggcaatttgtgtatggtgataggtggagccaacctcggtcgtgttggtgtgatcaccaacagggaaagacatcctggttcttttgatgtggtgcatgtgaaggatgccaatggcaacagctttgccacgaggctttccaacatttttgtcattggcaatggcaataaaccttggatttccctgcccaggggaaagggcattcgacttactgttgctgaagagagagataagaggctggccaccaaacagancagtngggtanattgcagtacagcatannttttnntntntgcccaaataaacagtgaattttcgtta

SEQ ID NO: 605152 - DNA, 892 bp, Homo sapiens
gtttctcttggcaatgttaatttattgcaccggtggtattctatggcggatcaatcaacgcgaaccttttaattttcaccgtttcttttaatgcatatgtcaaacatgttactctgttggatatactggaagttccaaaagccattggtaccgtgggcgttcaacctcctctcgaggaatgaatgttttcctagtatggggcgtgcttcatacgctacattacgatcaatggtttcatgtacaatcccgagcgtttggtagggaatctgaaatctgaattgttcacggagttaactctacgtaacggttgttctctaggtttccactggtccaaatttcacttgttgttcgtcgtgtcaggcgatgtttgggtccgattgtctccaccccttaatgcgcggacgagcatgatcagcccgagtacaggccaaagagacgatgctagccgctccaagagcgtcctgcgaggggcaagacccggacatggtccatatgctcgagctgcatctgcgggccaccttcgccgaagcccaaggccccctcatgagcaggccaagaacgagtagagaccctcatgtctctcttccaggaaactgagcctagggagctcatctggcagcaatggcttattactcatattttaaataatcactttctttttccctcaagggagaatgttttaatttctgtttgtagtcagtagaattaaggtagttggactatcatctatagagtgcacagttccctgttgttgttaatattaaatatgttctcacttaattgctttgctgctagacttgcaaccttaatttttttcaccagtatagttccattaatgtttgcattttcgacctgtgtcaaaacgtgtgacagctctttactgtagaataaa

SEQ ID NO: 605153 - DNA, 581 bp, Homo sapiens
attctcctgcctcagcctccagagtagctgggattacaggcgcccaccaccacacccagcctggccaacatggtgaaaccccctctctactaaaaatacaaaacttaagccaggtgtggtggcgggcacctgtggtcccggttacttgggaggctgaggcaggagaatcgtttgagcccaggaggtggaggttgcagtgagctgagatcgtgccattgcactctagcctgggcaacaagagtaaaactccatcttaaaggtttgtttgtttgtttttaatccggaaacgaagaggcgttgggccgctattttctttttctttctttctttcttttttttttttctgagatggagtctagctctgctgcccaggctggagtgccaatgacacggtgttggctcactgcaacctccacctccgtgggttcgggcgattctcctgcctcagcctcccaggtgcctgtaatcccagctacctgggagtatgaggacacggagaattgcttgaaccctggcggagaggatgcagtgagccgagatggtgccactgtactcagactgggaagagtgaaaatctgctc

SEQ ID NO: 605154 - DNA, 330 bp, Homo sapiens
tgagtcgggattcagatcctcctatcggaatccagatccccactctcaggacctctcggggggggcaaaaaagtaaaggaaagagtcatgggaaacggtttaagtcacagtaggaacggtcccacgtccctgggtgtccggcttcttcttattaagtttacaagggtgacattcttttcctattttcccatgtctatcgggacacccgggtccaacccattagtttcgggctccatcaaagggaaaggggactcagaagtcgatgggggtccgtgaccctcatcggtggtagtgtctggaccagcaccttcatgtggtacaatagtgcag

SEQ ID NO: 605155 - DNA, 153 bp, Homo sapiens
actagcacttccagtggaggatggcgtactactgctaccctcatttaacctccggctgtggacactcagaacatccgcgtgttgttcaccgactgccgtcacatcattgcagcgcatgcaccttcgtcagtacgagctgctctaagaggggac

SEQ ID NO: 605156 - DNA, 236 bp, Homo sapiens
ggtagaaccaggctcaatcagtctggttgcgcgtcatcgctacagggaaatggggaatcctggaagagggatggtgcggtataacaaaacacacgagactcttttacattaagaaagtgggagaccaggaggcactcctttccacgaaacaaaggccctgggttttagcccacttttattaaggaagatgccttatgtagattagtgggctggagcaagcataggcaaagacaagg

SEQ ID NO: 605157 - DNA, 143 bp, Homo sapiens
  misc_feature (137)..(137): n is a, c, g, or t
cctaactagcattggcaaaggaaagtttacacttttttcctcattcagggaaaatgctttaaaaaatcctgcctttgtgcagcaaaggagttggaggcagctccccaggcatccctccccaaataaaggcttatgtnctggta

SEQ ID NO: 605158 - DNA, 115 bp, Homo sapiens
gctggagctcgcgcgaggctaaatcccctaagaaggtcccactcctaaaacaccatcccccgtattatcggcaataaggggtatcaataacctgagctaaccatagtctaataga

SEQ ID NO: 605159 - DNA, 200 bp, Homo sapiens
tctcaactgactctatgttcccatccatatacagaacttatattcctagtcattgcagcccatttgtcctggtcaagaactgtcgttggagaactggtacagtcatttgaaggacatatgacactctggccatttgagttactagagttcttgtgttggttatttctcgatcagtgtgtgtgggtattactttaactgca

SEQ ID NO: 605160 - DNA, 277 bp, Homo sapiens
gagagtatacccggtcgcggagggtaaatgagacggagtgtatacggagggctagtcgtactcagtatgctcgatcataacagcgacggacaatgctaacagtgtccagcgattaggtcgagctggagtgacatcaagttcttccagtctgacagcccagtggcccacccatgtcaagcactttccagtgggactcttcagttggcagcaaggccacctgaggccctgtctcccagccacatttccctccgtggcaatgtcaccagtcctcaaccgc

SEQ ID NO: 605161 - DNA, 847 bp, Homo sapiens
ggcagacgcggagggaaggagctacgagtagccgccgagaggccgggagccagagagaccgaccagccgagccgcgccgccgccgcgcccccatggcgtgcgccagggacactcatgaggaccattgatacttccactgagaatacagacgagtccaaccatgaccctcagttgtgagccaatagtttctcttcctgagcaagaatattaaaacactggaaggaagatgaagaggaccttttaaaaatgcgggcaaaaatgtccgattgggcctctgagaacgatctcccagaatgaaggacgcgaggcactggtgacgtcaagctcctgaagcacaaggagaagggggccatccgcctcctcatgcggaggggacaagaccctgaagatctgtgccaaccattaatcacgcgatgatggagctgaagccaacgcaggtagcgaccgtgcctggttctggaaacacccacgctgattcgccgacgagtgccccaagcaagagttgtggccatcggttcctgaatgctgagattgacagaatttcaaaccaagtttgagaatggcggaagagatcgaggagagagaaaagaaagcggatcggcaagaatgatctgcgaaaaggtgggcaaagtagaagctctttggtgaagaggaaccagcgatgtgggagaagcaaaacgtgcattattgtttcccctttcgtcttttaaaaatacccgcccttgggggtgatttcacttagcggggttaaacagaacacagggtgtttttgcaattcgcgcgcgaaggaacaccacgagaggtggtgttcggagagttacgtacagcagcaaaaaaggcgtgtggg

SEQ ID NO: 605162 - DNA, 594 bp, Homo sapiens
tcgggagtctgtaccctacaagcgccacgcgtcgaatagccccacatactttcagaagagctcagcagggccctgcctggtctcccgagcatcaggaggaacgagactgctcagactctgctgacaccaaagtattggaaacaaataaaaggtcttggggaattctgttaggctacctgggcacgccaggctgcaccatgtgtcccagcggcgcatgagtgactggcgtattaagcccgtcacatgacatacgctgaaggaaaggcaagagaggtgaaacatttatcgtactgaaaaaaaacgatctcagcgaagaacatagcgagtacggcagacttcaatcaacagcggctgaaactgaccactgagaaaagggtgagggcactgacagttctcccccataatccggccaggaaaggaactgggattggcaaaatcccctttaaccctggacggaacaactaaaagcagacattaataaaatcaaaacaaccaagtaactaaagacctcaagaggtaatacccgggcaaaagggactttcctaaaaaaaggactggacgcctgggggtactttaaaagccaagggaaaaact

SEQ ID NO: 605163 - DNA, 222 bp, Homo sapiens
ttgctgaggtactctagatgatcccggtccgctcggacgaggaagtgaagaacatcatgtcttcaagatcggcgatcgcaactgcaggcgaatgtcttactattgctctggcagtagtgatgctcccaagttcacctgcagccccaagtgcaagcaagcaaaaagcatttcccatgaaggagctttgccccttcagaatgggttggttcagcaccgggaaat

SEQ ID NO: 605164 - DNA, 147 bp, Homo sapiens
caccaagaatctgtacaagtcatggattatctattatctctatttcactcctagagaggaattgctatatgactcagaatgacacattagggcaccacgtgtgtagaaagcccccactgtaagatgagtgactcgtggaaatgtcca

SEQ ID NO: 605165 - DNA, 834 bp, Homo sapiens
  misc_feature (161)..(161): n is a, c, g, or t
  misc_feature (226)..(226): n is a, c, g, or t
  misc_feature (293)..(293): n is a, c, g, or t
  misc_feature (381)..(381): n is a, c, g, or t
  misc_feature (393)..(393): n is a, c, g, or t
  misc_feature (396)..(396): n is a, c, g, or t
  misc_feature (456)..(456): n is a, c, g, or t
  misc_feature (471)..(471): n is a, c, g, or t
  misc_feature (474)..(474): n is a, c, g, or t
  misc_feature (477)..(477): n is a, c, g, or t
  misc_feature (482)..(482): n is a, c, g, or t
  misc_feature (504)..(504): n is a, c, g, or t
  misc_feature (516)..(516): n is a, c, g, or t
  misc_feature (524)..(525): n is a, c, g, or t
  misc_feature (535)..(535): n is a, c, g, or t
  misc_feature (549)..(549): n is a, c, g, or t
  misc_feature (555)..(556): n is a, c, g, or t
taaagaaaagttattaccatgtatttggtgaggcaggtttacaacactacaagtcttgagttaagaaggaaagaggaaaaaagaaaaaacaccaatacccagatttaaaaaaaaaaaaaggatcatagtcttaggagttcatttaaaccataggaactttncatttatctcatggttagctggtaccagtcagtgattaagtagaactacaagtggtataggcttnatggtttatggctgggtttatgaccttaataaaggtgtaattatgttttaccagcagggtggttttnaactggtgactatggtataaaaacaaatctggatatccagaagcacatgaagttggcaactttccaccctgcccatttttggtaaaantgcagtcatctnggnccttttaaaacacaatttttaaactcaaccaagctgtgataagtgggaagggtactggtnaatactgggggtatngtnttnggatnacagcagataatgctttctttnccagtcgtcttngagaatannggaaaaaaantcttcagatgcaanggtttnngtgtagcatctggtctatacaggttgtggtaaatatgggaagaaggtttgggccaatttgggacttaaaagtgggaattgaaacttgtgtttacaaaaaatgggtatttacatccgtggtcagaggggtccaattttgtgggaggcaattaaaggcgaaaatattgtactcattgacaaaacaaaagaaaacaaaagggggggggtaaattcaccagggggcagcaagggcacacagtttggaaaaggccaatggggaaaaaaagggggggaaaggtg

SEQ ID NO: 605166 - DNA, 625 bp, Homo sapiens
aaattaaaagattaaataaaaaatattaaataaaacatggcaaaaaaaaaaaaaagggaaaaaaaaaaaaaagacatgaaggccccctaaggccattgcccttttcgccctatggtgtgccgttttcggccctcgtgtcgccgttttacaactgggtgcctgggaaagccccggcgtttcccgggctttgtcgtcttgccgccttccccttttcgccggctggcgtaatcgccccgcggccttcccctttccgcccttctgcacaggccgcacgcgcttgtgggctttggggatctttgcgcgctttgatattttgctgggactcggtttggtttctttgtttattcgggtcattttttcgcccctgggccgtcgccttcttcccttataattcaggcgtctgccccgtgtcagggttgcgcgtttttcactcggggccgtgttcccgtttttgggcccggggctccaggcgcaagccggtatccggctatggggccatggccactttggccctttcccgttttcgggttccggcccgtagccccttaagcgttcctcggccccttacgggttccccgtttcggggttaccgggtacctcgccatcttgcagaagggagggctgc

SEQ ID NO: 605167 - DNA, 834 bp, Homo sapiens
  misc_feature (10)..(10): n is a, c, g, or t
  misc_feature (161)..(161): n is a, c, g, or t
  misc_feature (226)..(226): n is a, c, g, or t
  misc_feature (293)..(293): n is a, c, g, or t
  misc_feature (381)..(381): n is a, c, g, or t
  misc_feature (393)..(393): n is a, c, g, or t
  misc_feature (396)..(396): n is a, c, g, or t
  misc_feature (456)..(456): n is a, c, g, or t
  misc_feature (471)..(471): n is a, c, g, or t
  misc_feature (474)..(474): n is a, c, g, or t
  misc_feature (477)..(477): n is a, c, g, or t
  misc_feature (482)..(482): n is a, c, g, or t
  misc_feature (504)..(504): n is a, c, g, or t
  misc_feature (516)..(516): n is a, c, g, or t
  misc_feature (524)..(525): n is a, c, g, or t
  misc_feature (535)..(535): n is a, c, g, or t
  misc_feature (549)..(549): n is a, c, g, or t
  misc_feature (555)..(556): n is a, c, g, or t
cgactctacncggatcccgaaaatgaatagaggcaggtttacaacactacaagtcttgagttaagaaggaaagaggaaaaaagaaaaaacaccaatacccagatttaaaaaaaaaaaaaggatcatagtcttaggagttcatttaaaccataggaactttncatttatctcatggttagctggtaccagtcagtgattaagtagaactacaagtggtataggcttnatggtttatggctgggtttatgaccttaataaaggtgtaattatgttttaccagcagggtggttttnaactggtgactatggtataaaaacaaatctggatatccagaagcacatgaagttggcaactttccaccctgcccatttttggtaaaantgcagtcatctnggnccttttaaaacacaatttttaaactcaaccaagctgtgataagtgggaagggtactggtnaatactgggggtatngtnttnggatnacagcagataatgctttctttnccagtcgtcttngagaatannggaaaaaaantcttcagatgcaanggtttnngtgtagcatctggtctatacaggttgtggtaaatatgggaagaaggtttgggccaatttgggacttaaaagtgggaattgaaacttgtgtttacaaaaaatgggtatttacatccgtggtcagaggggtccaattttgtgggaggcaattaaaggcgaaaatattgtactcattgacaaaacaaaagaaaacaaaagggggggggtaaattcaccagggggcagcaagggcacacagtttggaaaaggccaatggggaaaaaaagggggggaaaggtg

SEQ ID NO: 605168 - DNA, 363 bp, Homo sapiens
aaatacccgaattgaacgaacagcccacggacttacatcctcatatactattctgactagcaaactcaaactacgaacgcaccacaatcgcatcataatcctctctcaagagacttcaaactctactacccactaatagtcttattcgatgacttctagacaaacctcgtctaacctcgaccttaccccaccactattcaacctactggagagaactctactgtgctagtaaccacgtttctcctagatcaaactatcactactccatactctacatggactcaactatactatgtcacatgcccgtatactcctctctacaatatttaccacaaccacacatgggtgctctactcacccacc

SEQ ID NO: 605169 - DNA, 696 bp, Homo sapiens
  misc_feature (1)..(1): n is a, c, g, or t
ngggaaaaagccttgggtgattggggcctcggaaaccccgatgcattaaaggtgttttctaatgagccgtggtatacaaccagattttgcgaattccctcacgaatcaaatcgtaggtggagcggttatcaccctgtccgtctgacgcggccacagaataatcgagcaagctttatcatgtataagcgttccttgagtaagtccatgacatgggccgtgatttcccatattctgtaggcgaccctagtactcgaggagtttctgtcgatcataagtatacaacatcatcgctgggcgtcatgtagaaggaaaggcgtctgtcccagctttgattcagtacagtctgaccagagacactcgttccaggctggtggctcatcaagtgccatgttgcagcccatgcttgacaaccaggttggttctaagaacgtgccgtatgtccagcatgggacgctgtcagtgaacagaaccatgcgcatggtgaagaacgtcttcgtttatgcggatcacagagatgtgtacacaaggcacgcgcgccggatttgcatagtgacccaacagggcatcaggaagaaaactgtttccttaagccaggccagatctgggcgatttaagctcctgtaggtcaggacatgcccaatttggtgctttggccaggtccctgtatggtgttgcttaggaaaagaaacgctttat

SEQ ID NO: 605170 - DNA, 359 bp, Homo sapiens
acccgggggggacacaaagagaaccatcaggaagccagagtagggtatggttgtcacgcagggcagccagagagagcaggaaggcccgcatggatagctccgagtgtccccagcttctgataagcaggcgcacctagactccactctcgtaggaggcccgccgcagcccatcgtcaatggcaggccagaacctgtgagggtgggacaactcccagagtgggcaggtacttcatgacagcgacgtagatgaaactccgggcattgtccaccaccttgaatacacacttcaagtctggaatgcggccactaggacacaaagcccagagcccactcaccacatacaacacaacaaaactacc

SEQ ID NO: 605171 - DNA, 347 bp, Homo sapiens
  misc_feature (247)..(247): n is a, c, g, or t
  misc_feature (300)..(300): n is a, c, g, or t
aaaagtttgcgcttttttgcatgttaacctcatgcattgactcttaccttcagggacatttctaaataatgatgggttaacgtggcaaaagccatttattgattgattgatttaatcaacgaatatttttaagcattgattttgtgttaaatcacaattcaaatttcatttggagatacaagccattattaaggcataacttaaaaatgccattttcaatttgccctgtaggtgaatcacatcagcntttttgtggttttccatttgaataaaacttacaagttgatgtatacttggagncccatatacattttgaaagggttgtttggaacctccttggtggaaag

SEQ ID NO: 605172 - DNA, 942 bp, Homo sapiens
  misc_feature (190)..(190): n is a, c, g, or t
  misc_feature (206)..(206): n is a, c, g, or t
  misc_feature (211)..(211): n is a, c, g, or t
  misc_feature (214)..(214): n is a, c, g, or t
  misc_feature (223)..(223): n is a, c, g, or t
  misc_feature (235)..(235): n is a, c, g, or t
  misc_feature (240)..(240): n is a, c, g, or t
  misc_feature (242)..(242): n is a, c, g, or t
  misc_feature (269)..(269): n is a, c, g, or t
  misc_feature (281)..(281): n is a, c, g, or t
  misc_feature (283)..(283): n is a, c, g, or t
  misc_feature (298)..(298): n is a, c, g, or t
gcaaatatcatgcacaaatgagcagggccgcgggggagtgggcgcaggcgctgctgccactgaggtgtgtgcatgatgttggatgctagactagttgcatctgacgggagaagttgtgtgtaccagcgcatgcctggaaagacttaagtaatgcaaaaggttgtcctttttttttttttttttttttaantctacggacaattggntctantancccaaaaanttgagggaaaangcagntngcctcaccgcccagacttggattggtncagatgttctcnanggcctcaggatacantaaaaccacaaaatttttcttaacagttcaaatggtttataataagttaactagtgggcggggcatcagaagctacccagacccgctggtctctctcagtgtttcaccctcccatttctgccccaattctgaataccgtgtgggcggggagaacttggctgaagcagcatccccagttagcctctaaaaagccgggtagggcagttctctcccactccacggggcgacgggtcttgggaaagcaggcaggaagacgctcaggtcgggcctggaagcttctctcactgaagccggtggcagcagttctggataacctccggtggactcctggctctgggtaggtccagggccctagtagcaggagagatggatcctgaatccggtggaaagctggaaaaggcttgggaaagttggtcctcactgttcgaggcctccggctggatctgcagcagtttccaggggggggtcggtttatccccagagagtcgcggtctttccggttggcccttaacaaggcaggggaaggggtcagtccttgccatcggtgtggttctcccagggtgaccgaagggggtccttgcaaagcgcctcgttggtttgccactggaggcggttgggtcgtggtccccggtgggggggcttta

SEQ ID NO: 605173 - DNA, 359 bp, Homo sapiens
tggatcaggccggagtttgagaacagcctggccaagatggtgaaaccccgtctctactaaaaatacagaagttggctgggtgtggtggcgcacgcctgtaattccagctctgtaggtggctgagacatgagaatcgcttggacctgggaggcggaggttgcagtgagccgaggtcgctccactgcactgcaccctgggcaacacggtgagattctgtctcaaaaaataaaaaaagaaacatcctaagtcgaatcatggtaagttgggggctgcctttcccatttcccatgctgatcacattctctcgcctctttcttctggctacaacacacttcttcattccaaacccttccccctga

SEQ ID NO: 605174 - DNA, 460 bp, Homo sapiens
  misc_feature (418)..(418): n is a, c, g, or t
gtatctgcggtgtgtcggggacactgaaaaacaagcaaaagtataactacaatctggacttttttcttttttaaataaagttttttttttccatttttcttctcatacggtgaatggtcctggactccttttctggacattcagttttcagaatttccatctttcttcgggaactaaggtgcggttctctggacggccggcggggccagcatcggatggccagccagaaaggtcacacggcccaggatggccgggtacttcaaggtctggaacatgttgagcggagtccagtagacttacatgagtcccagcatagcagcatgtcccaggtgaaatataatcgtgctaggagcaaaagtgaagttggagacatgtggaccaatccggatccacagagcgaaagagcagaagcaacggngaagagatcagggccgtgaatgtatgggagggatcctctaga

SEQ ID NO: 605175 - DNA, 408 bp, Homo sapiens
taataatgtttcagtgaacaacagaccacatatattactgtgatcccatataatataatactgtatttttgctgtacattttctgtgtttagatacacaaatacttaccattgtgttacatttgcccacagtatttagtgcagtaatattctgtacaggtttgcagcctagatgcaataggctaccccatatagcctgagtgtgcagtagcctatatcatctagatttgtgtaagtgcactccatgatgtttgcacaaagtcgcctattgatgtatttctcagtacacctccccataagctaattgacgcatgattggagatatatatatatatatatatatatacacacacacatataaatatatatacatatgtaaaatagatgctataaatattttatacacatt

SEQ ID NO: 605176 - DNA, 247 bp, Homo sapiens
  misc_feature (139)..(139): n is a, c, g, or t
  misc_feature (148)..(148): n is a, c, g, or t
  misc_feature (162)..(162): n is a, c, g, or t
  misc_feature (196)..(196): n is a, c, g, or t
cgattcatggtgcacggggcagtactgcgtgcagtcacgccgagctatcgatgtcgctgtataactgctgttaccgactgtctggtagtaaaaattagcgagtaggattcaaaccgatgtcgccttgtgcttttgcatncctttgaancagctaaaatcaancccgggtaattctgctgcagccaccgacaacgcncggttggagcgaaagcggtcgtacaagccacccttgacgacgggcacctgc

SEQ ID NO: 605177 - DNA, 230 bp, Homo sapiens
ctcccggtttaccccattctcctgcctcagcccccggagcagctgggacccactggtgcccgccaccatgcccagctaatttttttgtatttctggtagagacggggtttcaccgtgttagccaggatggtctcgatctcctgacctcgtgatccgcccgcctcggccttccaatgtgctgggattacagggccatctttttgcttttttttccccatttgctgttttaa

SEQ ID NO: 605178 - DNA, 792 bp, Homo sapiens
gcttcaggcgagcgccggcgacgatctgtctcgtcgatgcgcacgcctgttctgatgtcccgcagataatgcatgggttacccgcattctatcgccagatgatagcggtgtacatgatactggctcgcatcatctcacccgggactcatgtcgtagatgtcaccgaatgcttggtgaatgagtgcccagacgctcgctatagtgcttgcttcaaggtgtatgtagcacccgctttgacgccggactgcgtggtggcactgtcacaattgggggcctaagagggcagaacaggtcgatggtcgagcacgaagttggggaagatccgcgagagagactagacaagatacgtatgggggtgacgctggttgccctagtcagatctgaacctttagctgattccctgtatcgtgggaaaccacttagggtgactagaaggcgttgagttcagtctatggtttggtgtgtaaagcccagaattgagaggaaacgctctggcgtaatgggtacttaggcagctgcttaggatgctacatagaggtacgagtctgaaagacgtaaggcaggggttccaatagagatgaggtgaaaggtgggatagagcgaggtaggggacatgcagtgaggagggtgtgagtgataactgggtgtgaaaatagatgggtgctcagttgggactgtatgaagcggtgaaagatctgtgaagctccctgggaaagattcgggggggtgagataggattactgggaaagaaggaggacaagaactttgggatgtatccagactcgtggtgga

SEQ ID NO: 605179 - DNA, 330 bp, Homo sapiens
ttagatatctgtaacgaggacgggcggctgggcgccaggcttcgtgtcgtcatggccaacaagcacgccgtctgctggaatcgaggccacccaggtctaccagctggacttcggggggcgggtgacccaggagtccgccctgaacttcccgattgagttagaggggcggcaggctagacctcagaccaggtcgcgctgctgagcccgggagggcgagggttccagtgcttcggccttcaaggagcatttctcaaaaggcccaattggaaatgtggaagacaacgaacacctcttaggtcgagctcatggggtcatggttgccagtgtgcc

SEQ ID NO: 605180 - DNA, 123 bp, Homo sapiens
aggccttctctcacttgacacatagtttctcttttctttaaactagttctcatgtatactaaattttgctcgtctccctacttgtcttctattatctttatctttgtcctctcactttttcct

SEQ ID NO: 605181 - DNA, 390 bp, Homo sapiens
  misc_feature (204)..(204): n is a, c, g, or t
  misc_feature (218)..(219): n is a, c, g, or t
  misc_feature (236)..(236): n is a, c, g, or t
  misc_feature (242)..(242): n is a, c, g, or t
  misc_feature (254)..(254): n is a, c, g, or t
  misc_feature (286)..(288): n is a, c, g, or t
  misc_feature (298)..(298): n is a, c, g, or t
tacattccacaagcattgccttcttattttacttcttttagctgtttaactttgtaagatgcaaagaggttggatcaagtttaaatgactgtgctgcccctttcacatcaaagaactactgacaacgaaggccgcgcctgcctttcccatctgtctatctatctggctggcagggaaggaaagaacttgcatgttggtgaaagnaaaaatggggtggnnaaaaaggggtggggacncacaanttaacgtaaaanaaaaccaagcgggcccaatttgccggcaaacnnnaaaacatttnaaacaaatgccattttttttttgttcaaatgattttaattattggaatgcacaatttttttaatatgcaaataaaaagtttaaaaacttaaa

SEQ ID NO: 605182 - DNA, 722 bp, Homo sapiens
ggaaactcagagaccaagtccattgagagactgaggggaaagagaggagagaacagaaaatagagagtgggaacagtaaagagaaaggaagacaaacctccagagaaagcccccggagacgtctctctgcagagaggctggcagcacccggctcagctgcgaagcgccgtgggaagcggagtgcccctaatcatgcggctgtctgcatgcttgtgtccgggggagtcctgctggtggctctcctgcccatgtgccgcatgcatgggcgctcctgagccgtgggcctggtcccgggagctcggcaggcgccgaagcacctcaggccttgattcttgcagcctgcgtcgtagtccgagcagccccagctagccgcaggctcggcaggtgctgcttccgcgatgggagaggagtacttcctctggcctggtggagaccgtctacaagagcccggcgtcccctttcgcccgcctcctcgctcctcgccggaggcagcggcagccgcccttcgccggaacaggcgacgccaactttttccgcgtgtgctgcagcagctgctgcttgcctcggagctcgctcgaacagcccgcggtctcgcggagcgggggctaggaatgccctcgggggcaccaggaggcaccggagagagaaagggggtccgagggagctccatctcctggatctcacttccactcctccgggaaagtctgtggaaatggcaggcg

SEQ ID NO: 605183 - DNA, 146 bp, Homo sapiens
  misc_feature (7)..(7): n is a, c, g, or t
  misc_feature (66)..(66): n is a, c, g, or t
  misc_feature (96)..(96): n is a, c, g, or t
ggctcgnaattcaagcttctaaccgatgtacgggggacatgggccgacgaatgcccaagaatccangaactttgtctatcactcctccccaacaancctaagatgtgaaaacagaataaacttcacccagaaaacagaaaaaaaaa

SEQ ID NO: 605184 - DNA, 156 bp, Homo sapiens
ggaacgagaccgtgctgtcaacgactaccccagtcctgctacctcccttgcctttcgatggctgaaggcagctgccctattgggttgccgggcttgaggggccttcttggaggcctcaaggtgctgtccattgggaaagaatgggttggggatcct

SEQ ID NO: 605185 - DNA, 389 bp, Homo sapiens
gtgctatgctacttattcataggcagacaagcgtaatgctttcccaagttcaggcgttgccagagactgccgctgtatctctcatcctgtgcttcatttttggattcttgtccttaccttcaacatggtgtggagaattacaggaatttcaagttgtctccctagaccatacccctttgtgctcttctactcaaaattcaatggtgtagagatgtgtgtggatgcccgtactttcggtaactgatgctcggtacatcagaacgggatcatgtacaccagaatgcagaggtaagatctctgtagcaacttccctttgactggaaccatcaaatgacaagcttactgcagaagcagtgtgacacacttcactcagcttaaggtctgtcgat

SEQ ID NO: 605186 - DNA, 126 bp, Homo sapiens
tgcacacaattctaccgagtccgatccctcatcaaactattgaggcgtccactgccctattactatccagtcctcaatcctagcaagtaattcccatccgtccatatatccaacacaacaagagca

SEQ ID NO: 605187 - DNA, 327 bp, Homo sapiens
ctgatatgtgacctagttgtagcccatacccaagcaaccccggtactatagagtctcacaggccatgaatgtacctttataaggataccgactagtcattggctcgcagggatcggcctagtagcccaggtagcaagaatcttctatcttggtgtcatcagtcaccagttgccaaccaccggatccttcctcttctatgggatagctcagccttcgtgactctcggttgtaaaatgggctctggttcctgctgcacagggacacattcacctcggtcagccatggttaagatggagtcctcaggcatgaccgcgtgatgggcagcct

SEQ ID NO: 605188 - DNA, 262 bp, Homo sapiens
ataatttattaccatatattgttatagtttattttagtatgtgttaatctcttactctgcctaatttataaattaactttaccaatggatatacatatatatggaaaaaacacactatacggggtttgatactctccctggttttacacatccatgggagtcttggattcccccccataaaataaggatgagctaatgtatactccacaataattgtaagccggggctctcaaaaaaaatttggggacttagtggtcctaag

SEQ ID NO: 605189 - DNA, 712 bp, Homo sapiens
atggctgcagtgaccaaagacttagatcacaacacccaagttccttcaaatacctagaaagccttctcaagaagaaagtctcaaagctagggcctaaaataggggtacaaacaagtcaaaactgtgaagactacaataaactcttcaatggccagacactgacaaacaaccacaagcatcaagaccctccaagaaaacatgccctcaccaaacaaactaaataaagtccaagtgaccaatcatagagagatagagataatgtgatctttcagacagataattcaaaatagctgtttgaggaaactcaacaaaatttaagataacacagagaaacaattcagaattctatcacataaactgaacaaagaggttgaaataaaaagaagcaagcagaaattctggagttgaaaaatgtgatgatatattgaagaatgtatcagccttactgggaatttatcaagcaaaaagaattagtaagcttgaagacaaagctatgcacagaaggagacaaacaggacaacataaggaaagaatgagcaacacctgaagatatagattgtgcctcaaaggcaaatttaagaattatgggtcttgaataccccaagacatttaaaaatgaactcccaatgatcaggagatacagtcagaacataaaggcggaggagaaagaaccaatttattaacccgcaccaggtccagttgttcagcagat

SEQ ID NO: 605190 - DNA, 201 bp, Homo sapiens
aatataatcgtacaaatcacgcacgtcatttttttaaagtcccaatctaaagccttaaagaaaaaaaaaaggacttgaaggaaccaaaaacattcttggatttgggtttgacgttgtccagtccaacctcctcctacccaggggaatactttttctcgattatatttgataacaaacacaaatcactgtgagcagcgtggg

SEQ ID NO: 605191 - DNA, 247 bp, Homo sapiens
atacgaggctagggtataattgtctgcgtcgcctaggaggtctgtgtgctgaatagttgttactgtcattacaggagagaaggacgagacgtaagccgagcgcgtctttctattcgcgtatcaggttggacggtgcttttatcagtcatggcacgtgattcctagggcgttgtttgatcccgttacgcgcaagaataggacgtggagtgctgctagtgtgccttgctattaccttaagtggccaata

SEQ ID NO: 605192 - DNA, 153 bp, Homo sapiens
agagctagtgtggcaatagtatagctgagatgcattactaagttgggtgttcgaaactggatggcaaagtttattgacagagcttagctcatttgattaccatgaatgggccaaagattggtgacgtgcctttctttgaacaactttttaatc

SEQ ID NO: 605193 - DNA, 677 bp, Homo sapiens
tctcatttaactttttaaatgggtctcaaaattctgtgacaaattttgggtcaagttgttccattaaaaagatggatcgccgtctggtaaaaagctggaaatggccctaaatttgaaatcgggtctgcctgtgatgccctggaaagcccatggtatgtggagagccttctcagacaatccaccttggggtcgcttgtgctgttccgtgatatgacgacagacagttagacggggggtgtcactcaaagcgtctggacacagaaggctgctgaagctggcaaggtacaccaagtcgtgccccagaaaagctcccgaaaggcctacatgaatattatccctaatacctgcacaccccacgtctaaactccagtgcgtgaaacaacacggcaccacaaagcgggcggtctacaaatgggccccaatcaacagttcaagctactagacagactgtgtacatgcatcaccaacagcacgtcgctaaagcccctcaagcaggaaaaggacagaatgttatcgggggcacccctacggtcacacaaatagagcgtgatgccaggtctaagatcatccagatccaaacaacagcacgtctataggggaacacaaattgcaccaaaattggcacacaactcagaagacccataacaagttaactgaaaaacaagcaaaagaagcac

SEQ ID NO: 605194 - DNA, 160 bp, Homo sapiens
  misc_feature (105)..(105): n is a, c, g, or t
gaggatccctcccttccaccagcctgggcaacacatgcagacctgtctctaaaaaaaaaaattaattaactgggtatgtgtggcagcatgcctagtagtcccagnctactcagagaggctggtggacagggagtgggtacctgagctctgaattctgtaa

SEQ ID NO: 605195 - DNA, 163 bp, Homo sapiens
ccctgaagatcggcgactttggaatgctcagtatgtgttcctcgtgcgtgtgcaccgagttatccataccaaaatctgccgatcttcacgtgcacacgccgagcacccaccctgcacacgccgaggctccagactgagcaggccataatcgccgatcttcacg

SEQ ID NO: 605196 - DNA, 122 bp, Homo sapiens
cacagactgtatctaatgtattcagaatccacttttttaacttcattgtagtacaatatcttgcatttgtaacatctcttcacgagcaattcttttttcataagtccccataaatatttcag

SEQ ID NO: 605197 - DNA, 360 bp, Homo sapiens
atatatccatagacacagtcgtgactatcgaagcaaacttgcccaaagatactgacacatataccactcggagctaggagaagtatgagcaggtcaggagagtgagtgcttgggtgggtgaagggaagtgctcttgcaggagaatcccatggtcaaagggctcctcctcaacaggccactgacccccactacaggcatgtaatgagttcacgagccatgtcatgaacctgctgagtggagcagagccgaaccagtgcccgtggaccccaaagagatggaatgcatggtgcgcatcatccatcgacagttcaccgacatccagatacagctgaaagcaaaccacctgcgaggctgtaatga

SEQ ID NO: 605198 - DNA, 415 bp, Homo sapiens
  misc_feature (35)..(35): n is a, c, g, or t
  misc_feature (215)..(215): n is a, c, g, or t
tccgagttagttacagcgcaggtgccgggtgttanttaagtaggtcgccacaggtgtctacaggtcaggatgctgggctgtgaattaatgtagatctacacaggggtttacacgccaggacacccggtgtgaattaaataggtctacatagtgagtctacactgtcagtgatgccagtgtgcgaacttaagtagtgtctccacatggggtctacnacatcagtgacaccctggtgtgaaattaaagtaggtctccacagtgagtctaccatgtcatgattaccctggtgtgaattaatgtcggtctccgcagggggtctacacatcatggacacatggtgtgacattaaagtagagtctccaacagagagtctacgcaatcaaggacacctggtgccctgaaagctgtaaaactg

SEQ ID NO: 605199 - DNA, 1269 bp, Homo sapiens
tttaatgttcatgtagtgttaatctgcccatagaattggatatcctattttttatatctcctatatcttatgggttactccgattatattctgcttccataatagctgttcctgaattcaaagacgagctgagttcgtgatctagcacatttagattcgcacagttgatcactgtctgtagagatattacgttagaccagccattcaatgttttctgcgtactctgtgctcattgtgtgcggctgcctttatttcccgtaattccttaaactcttttttcgtgttactctaagccaaatgcatattcctataaacgttcatgtgtttgctgtttcctgccctggcgctattcattttcttaaaacgatatttctctctactttgttaatactctagattgttaaacctaggcgtgtgttgcacgcatctgtttcataatttccctcacgttacatacagggaagtgctgtgaggtctactagttaactaggagtatcactttaacgtcaaggagtctagaggtctgcagtgaagccgagtatgtgcactctactgcacatcctagcttggcgtgtatataaatatgaattactagtatgtcgtgaatacgtggttcaacaatgcagacttcctcagacttcgataatcgagagctcagactgtggtactagggctccaggaatctgtgtggtacaaacctgcatggtgtttatgcacacagagatctgagaaccattgttctgaatgctgcttccatgtcgacaaagctgccgtgactaatttttgcaaagagatagcaaacaatcgcgtgtctcttttatgttcagcttataactgaaatctgtttgtagacttattaggactttgaattatttctttattaaccctctgagtttttgtatgtattattattaaagaataaatgcaatacaggaattattaaactatgtaaactacaaattgttgtataacttttgatgaccttgcagtgaaattcttcaggtagctctgagtaatagattgctctttgcccaactgtagaatacgcactttcgcccaccattagtatatctacaagaaactaacttgttggagtatttagttgtacagtctattcgttcactctgttactctaatacagaaattataaagccttccagagggtttggaccacatctctattggaagaatagttagcaacatattaaagagatacttgatgccaaaatgactgttatacaacgacttaacttcgtacgttttgaaaaa

SEQ ID NO: 605200 - DNA, 102 bp, Homo sapiens
ctgagtggttgtgtcggtcgcgtttcgacaaccggtagcgctttgcagcatggctgaccaactgattacggagcagattgcagatttacaggaggtttttta

SEQ ID NO: 605201 - DNA, 351 bp, Homo sapiens
ttattagacgctggagtgcaatggcatgatcttggctcactgcaacctctgcctcccaggttcaggcaattctcctgcctcagcctcccaagtagctgggattacaggcatgcaccaccatgcctggctaattttattttattttattttatttttttgagacagagtttcgctcttgttgcctagactggagtgcaatggcgcagtctcggctcactgcaacctctgcctccagggttcaagtgattcttctgcctcaccctcccaaatagctgggattacaggcgtaaaccaccctacctggccccccttccttgtatcattccgtccagttgctctaactccagcgtg

SEQ ID NO: 605202 - DNA, 314 bp, Homo sapiens
ctgggaaagcatccatgatcaagcaactgtgtatactagtgatatgaacatggtgtacaaatatctcttctagactctgctttcatttgtatggggcatatacccagcaagtggaattgccgggtcatggcaattagatttataattttctgaggaaccaccatactgttttccacagtggctgtaccattttacatttcctccaacagcgtgcaagacttctgatttctccacgtcctcaccaacccttgttattttctggtagtttattgttggttagccgtactgatggatgtgaggtgaccattattcac

SEQ ID NO: 605203 - DNA, 386 bp, Homo sapiens
ttatatccccttggattataagatgccataataattattaaaaataagacaaacagaaaaccagcattgataaccacagtgacaactttggtccccaactgcatgaaccctgcctacttttcctcttgcctttgtcagaaactctcatacttctgatgtcagaagataatatgaggaacgaagatacaaatttgtgtgcctttgatagtattagacacatcttataatctgatttagtttaatccttatggccacctgtcaaaatgggtagaattattcccattttaccaataaagaaattaaggctacacaatgtgcttaaagtcatataattagtgagagtgaaccagacttcaatcaggtgtgtctcaaatttagatgatgcc

SEQ ID NO: 605204 - DNA, 103 bp, Homo sapiens
tatcccaaacgcagagaggaaccgccgtagcagagaggacgcagagaggttcgcgttaccaaggaacgtcatactcctgtcttgctgatcctctctgcgtttg

SEQ ID NO: 605205 - DNA, 347 bp, Homo sapiens
ccaggtgtagactaacattgtaacttactactccggcaaaaaagaaccattggatacataggtatggttctgagcgtatgatatcaagttggcttcctagggtttagcggtgtgagcacaccatatatttagcagtaggagatagacgtagacacacgagcatatttcacctccgtctaccataatcatcggcgtatccccaccggtcgtctaagtatttagctgactcgccacactccacggtaagccatatgaaatgatctgctgcagtgctcgtgagccctaggattcatctttctttgtcaccgtaggtctacctggaggtctacctgggttaggtcagctgg

SEQ ID NO: 605206 - DNA, 1155 bp, Homo sapiens
  misc_feature (903)..(903): n is a, c, g, or t
cgccatttgagagtaggcgtgagaacgttgctctgtgatgctgatgcgttctaaaggaaggcgtccgttggccgttcgatacccgtcttgagtgagggtttcaaagccagaggagataaaggaaatttgttccccttgcaaagatgaatacattcatgatttgccctggtttctggttaatcgaagtattagatacgtttgttccttactttaattcttattattataattagcctccagttaccatccatgttgctgcaaatgacgaggatttcattgcttcttatatggactaagactaatagttccagctctgtatataaagccacttatgttctcttgttatctaagatgagcagtctggtgtcatgtcagccctaggctggatgtgccatgtgggcggcgactgttcacgctcatcgtgtaaggcgtcctggtctcaccagggtctcacacggtgatgttctggcggtggtacgtcagctcatcccgtggagctcgcgtaattagtgaccagggagtgctcggacacgcagtagccatgggcataaatttcttgctacgttattagctataagagtggccgtttcatcgcatttgttgtgggcccacgtgccgtggtcttgtgagaactttcactgtggaccgatcacggcttgcaatctttgcgctcaggctcatacggacactctcgcctagaaaagcagcgttttgaaggccaaatttgtgagccccaagcacagggttcatgtcccttaaatttaacgcggctgtgggacagtggcagcgtcccccgtgtaaagtatggcgcccctgtgtgttaccagtcgcaaagattccgcaagcactttcgggaaaactcttaaaggtcgccgtatttgacacgttcccaatacaaagggncgtttccaagaggcccgcagttggaaacggaatctgaggtaggggtccccgcctaaaaaagtgatgtctgcactccttttgaagaaagacaaggcagcaatttttaattaagagagccaaaattggggggctaattaaatggacagggtatttacctgggggaaaacggaaattccgaggggacttttggcatggaaggttattcgggggaagaaagaggattcccattgccacggttatagaaatgaccgg

SEQ ID NO: 605207 - DNA, 413 bp, Homo sapiens
ttagttatgctgtgcatatttaattgatgtactatgtttgatttgttgctgatactttaaatttgaagtttttctgagaaatggagcagcaatgcagcatcaacttgttaaattacatgttaagccttgaaaaaaaaaggagatcacatcagtaatcccagcacattgggaggccgaggcaggcagatcacgaggtcaagagatcaaaaccatcctgtccaacatgttgaaaccccgtctctactaaaaatacaaaaattagctgggcattgtggcacgtgcctgtagtcccagctacttgggaggctgaggcaagagaatcacttgaacccagaagacagaggttgcagtgagcagagatcgcgccactgcactccagcctggtgagagagcgagactcagtctcaaaaaaa

SEQ ID NO: 605208 - DNA, 316 bp, Homo sapiens
accatggggctgccagggtggggacagactgtgggggaggctgtggggtagaacctgctgccggggtggggacaggctgtggggccatggggctgctggggtggggacaggccatggtgggaggccgtggggccaggacttactgctggggtggggacaggagttcttgtccaaccgggggcacctccagggcaggctcatttctttccactggctaaattaattaaaaaaaaattcctctgaaacgaatactgagtcactttaaacatttctcagatgtaaatggaaatctaataaaatctgtgaaaggtatttt

SEQ ID NO: 605209 - DNA, 566 bp, Homo sapiens
attcctctttccccacgaatgtgtcttccccccttttggggggccccacaataaaaggggctcccctgcgccacatctcccactgtgacaaatgagccccctctcttaacactcccacgccctctccagcgcggggtactcacacccccttggcacgctcgtggggtcccacccattgtggagacaccccccaggacactgagccccctcccccctctgggggccctccccctctctctttccctcgggcgctctttatagagcacctctttttttttcccccgccgctgctccctccccctgtcggcccccccggcggcgcctgctcttcgtggcggcgcctactagaagagcggagagagctcctctccccccgccagcggctccccccacatcgtctgggtgctccccacacgcgatggcgacactttcgcctctatatccccctttccactctgatgtccgcaccctctaattctcttatatatatttacatagcccgcgccgctcctagagcgcctccgcctgttttctcctctctcccccacaaataatataacaaaaca

SEQ ID NO: 605210 - DNA, 661 bp, Homo sapiens
cctgaagttgccaaatacttccagtcaagctgatccttgacaaagcaaacaaaaacataaagtggggaaaggacacccttttcaaaaaatggtgctgggataattggctagccacatgtaggagaatgaaactggatccttatctctcatcttatacaaaaatcaactcaagatggattaagggcctaaacctaaaacctgaaactataaaaattctaaaagaaacattggaaaaacccttctagacaatggcttaggcaaggatttcatgaccaagaacccgaaagcaaatgtaataaaaacaaaggtaaatagctgggacctaattaaactaaagagcttttgcatggcaaaaggaacagtcagcagagtaaacagacaacccacagaatgggagaaaatcttcacaatctatacatctgacaaaggactaatatccagaatctacaacaaactcaaacaaatcagtaagaaaaaaacaaataatctaatcaaaaagtgagctaaggacatgaatagacaattctcaaaagaagatatacaaatagccaacaaacttatgaaaaaatgttcaacatcactaatgatcagggcaatgcaaattgaaaccataatgcgataccaccttactcctgtcagaatgggccttatccaagaatcc

SEQ ID NO: 605211 - DNA, 320 bp, Homo sapiens
  misc_feature (39)..(39): n is a, c, g, or t
  misc_feature (52)..(52): n is a, c, g, or t
  misc_feature (207)..(207): n is a, c, g, or t
  misc_feature (255)..(255): n is a, c, g, or t
ctcaggacatgagggcagtgggcctggaccccagcccgnatcaggcccttcncagatggagctgcaggcggtgaggctgggcaaccatcgcactgtgtggggccagaatccccgtcaggcccttctcctggcagtgcggggaggtccccacaggtaacacccatgtagctgccatgctcaggacacgtgtgcccgggcaggccagancccacacggtgggcagcggggactctgggtgatgggtagcccccattnaattcacggcagcttctcttacagttaaaagacacggaaaactggagcgccggcaccatcatttt

SEQ ID NO: 605212 - DNA, 195 bp, Homo sapiens
atctccccttcctccacagctccagttagatgaatctgatgtcagtctctcttggtagccaatacgtgtctgtctcccagccccgtaggatttcagcccatccttacctcataattgccttatgaagggtctgcagcgtggttggttcatgttcactcacagacctggttgccagttgcaagtcatagtgtaaaa

SEQ ID NO: 605213 - DNA, 207 bp, Homo sapiens
ttttttttttggtgactacaataatgtgtatttcaaaactgctataaagactattttgtaatgttttcaccacaaaaattatatgaggttataaacattacttgatttaacgattttagaagataaacatatatcaaatattacctgtagacagatatatacactatatttcataaatacattttaaaattttctttcatgacttga

SEQ ID NO: 605214 - DNA, 241 bp, Homo sapiens
atcgaatttaaacaaaagatacactctgcatgtctgcaggggcatacactacctgttagtggttagcataaaacctgtatacatttcatataagacataaactctagtgagcaactaacacatctgtccctattgtaatatcaacaggctctgcattgggagcagagcaggggcatatccacatccccagtgcctccagcggtcttcccaatttcacagcaatatcatttttactagttcc

SEQ ID NO: 605215 - DNA, 1044 bp, Homo sapiens
gaggtctagtgagggaaaaatgacattgattgctttgagagcatgtgatgaagggtcaggtccaggtttgggggagtcaaggaaaggctactctgtggagaagagaggatgtcagctgaagttaactagagtggaaattaaaggctgagcagaggagattctcaggtaatagcaatagcatgagcaatggcccaagtgggagaattgagtgcgtcaaggtgccagtagagaaagcccgtcagggcgcaagctagagcattgacttgactagtacacaaaaagagccttgtaggacatcagtcctaagagtatctcattggggagccaatgaagaaactggcagagcaaggggacgtaactgggattggacattttgatggcaagataaggatgcactactccgagagagtttgagactggtggtagaagtagggtgaggatcacatggtgtgaacacgctttggtaaaaaagaggagtagatggttggtaagctgggagctcggtaaagattgatatctttctattatcaagacttgtaaggatctgatcttccttaatataggaaggaagggagtcgtttccaggctctggtgagcatgccatgagaatcaacttggtgactctatgaaggataagccgtactaggaggtgtgaacagctggtcagaaggggcttttgaaatgtggtcattatcagggttatcagaaggagtgttattgtgagactactggcaaattttctagagcccacgtttagatgcttaagctacatttgatcattttctctggcgtgaatattgctggtcatgtgtgtcatgtgaggggtattggaggggcttgtggaatgattgctggagctatggatgaactttggggaactgggacagggcagtattaagatgaaagccaagggtatggtatggcagttggtcattctggaaataaagtggggatgtcatgtgaagttaattggcggcattgtgaaactgtatgaagagatgaaatggggatggaaaggtattgaacagaaggatctatataagt

SEQ ID NO: 605216 - DNA, 132 bp, Homo sapiens
accatttgcatcagcaattccacccaggtgcaaccccatggtgcagccccagatgcttttgcattcttgcacaggttcattcagttacttgcactccacatttcgggggcatccttctcagcagtacgcacc

SEQ ID NO: 605217 - DNA, 182 bp, Homo sapiens
ctcggccacgagtgcagtcagatcgtaactcctaaggcagcacgcatcggctgagtcagcattcattagatcgatagtggtggcgatacatctgacagatgtctattgatcgcgccgtcgcagtacagtccctggaggttgccctgccttagtcagcgatagcgctggtccggccccagcac

SEQ ID NO: 605218 - DNA, 789 bp, Homo sapiens
cctgtagtcccgagtgctgggattacaggcatgtgccaccatgcccagctaattttgtatttttagtgaaaccctgtctctactaaaaatacagaaattagctgggcatggtggcgtgagcctgtagtcctagctactcgggaggctgaggcaggagaatagcctgaacctgggaatcggaggttgcagggccaagatcgccccactgcactccagcctggcaatagaccgagactccgtctccaaaaaaaaaaaaattccaattttaatttctttaacttttttcacgtaaggtccacgtggtcatactaaacacgtgggtttcgggacaaaatactctctggagtccgggggtatttccagccaaaattttaacacctggtaagaatcaattcaccgtggtggggaacaaaactcttgggtctggaacccattttcataattgggttcccacgcatggaaggtactctagggttttagaccacgaggtctagattaatactcctattttacatttaaaacctttttattaataagtccttacattaaacgcgattttgggaactcttcttccacaattgtttcgtgggataaagtggtgaggggggcaaagaggggtttaaatccatggactcttgattgacccatcacggttataccggtctttacacttacaatgttgggaacgcagaattggatagttaatctatataaaaatactcacaggtgctcagaatataaaaccgtgggaaccaatacagttgtgtgggtggaagggcaaacgggtgc

SEQ ID NO: 605219 - DNA, 382 bp, Homo sapiens
ttgggtggcgttctagaggatcccgggttcctttgtcttagcaaagaacaattgaaattgaaattttaaaaaacataacatggccgggcacggtgctcatgcctgtaatcccagcaccttgggaggccaaggcgggcagatcatgaggttaggagattgagaccatcctggctaacacggtgaaaccccatctctactaaaaatgcaaaaattagctaggcgtggtggcgggcgcctgtagtcccagctattcgggaggctgaggctggagaatcgcttgaactcgggaggcggaggttacagtgagctgagattgcgccgttgcactccgttctgcgcaacaagcgtgaaactccatcgcaaaaaaaaacaaaaatcaaat

SEQ ID NO: 605220 - DNA, 122 bp, Homo sapiens
cttaccaggaactgttggccagttggttcaagccagagacattcagaaagtttttagctctatatttgcatggtgctgcgctgaggcggagaaccccttctgaatcctgaaaccccttcttg

SEQ ID NO: 605221 - DNA, 194 bp, Homo sapiens
gtccaatttctacagcaccatgcacacatgcacgtatgtgggtacacatacacactatacacacacatcccagaccatcccttcatttcacctagcaggatggtagctacagaaagcctctgtctttcgttatcctagcaaaagcaccactagctaccatcctagtgcattcgagaagagtgtctcccagaccc

SEQ ID NO: 605222 - DNA, 81 bp, Homo sapiens
gagagagatgaagggtcttactactgtgcctgtgacgaaccgcaaggggataccagctcctgggacacccgacagatgttt

SEQ ID NO: 605223 - DNA, 899 bp, Homo sapiens
gctgttagactctccagtggccaaagcccccagaggaacaaagacagaagtcttgttctttcagataggacattttaggggccagagatcactgtccagtagccaagggcaaagcctgacttctctttgggtaaagttaattttttaccacacaatagttaagtggtaatgaacaagagatatttaccaaaattttaatcttcttggaacaccttatatatgatgttatgtgagaagaatcaggattaaaaatatatatgtagtatgatcttaacatatacagtgtaatatgcaaacagcattatgtatctatgacattatttcatccatagaacacaagactgaaagaaaatacgccaaaatattaattcattatctccaggtaatggcaattatgtatacttcccaaattttcaacaagtcaacatacattatcatttaaaagcaacagttttaaaattctaactatgataattggtctactctttttggaaatgacgggccagagagtaacttaaaatatgtataaaagtgtatgggagatatgtagcaacacaccaactctcgcaacagcaaccacaacggcatcaccaccacgttgcgcgactcgactccgtagcattatccaggaactccacttacaggatatccacgcattccctgcacactgcgtacactgccatcataaataagagccagcaggggggcaaaaataaaacatcgcggcaggggacacaacgacagacagacaccccgggaaatgggacgggcagagcaaaaatggggactgaaagccattagataacacgacagggggggaaccatgttcagcgtataccagagtctaacaacaacaagccaagagagaccaaccgacagtcgcagaagagcaaccagga

SEQ ID NO: 605224 - DNA, 500 bp, Homo sapiens
ggaggacccacaataggcagactcagtttctccacaccccactccctgtggctctgagatccccaacggtgctacaagacacactcaggcattattcaagactcacagctattttatgaattttccaagaaagtgctttgcatttctgtaaatagcaagagatttccaagtgtgattgtgggttttatcattgtaagcaatttgtgatagaccaaagtcagctactgtaaatgacttgctagaaaaaaggaaggaggtagcctcaacagacttgttataaaacatttaaaacttggtctcaggtgcgtgctatggaaaatatactcgtatgttgctgtgaaatcataaagtagcacctagtacagtgcctcaaatgtttaatacacgtcccgtaaatatgtgttgaataaaaaatgaatcaatgtcattaaggggacttgctcaaacctcagatatcctctctgcctgcagtttctcaaattaaatgaacttttcacttt

SEQ ID NO: 605225 - DNA, 775 bp, Homo sapiens
  misc_feature (15)..(15): n is a, c, g, or t
  misc_feature (44)..(44): n is a, c, g, or t
  misc_feature (66)..(66): n is a, c, g, or t
  misc_feature (95)..(95): n is a, c, g, or t
tgtaacatccggganccaagttcctattgaggattaagcaaccnagagaaagaccccctaaacttngatcttttgccccatcaaagaagcacccnaagcaggatgcctccctgaatcctaaagccaattagcagtcagccaggacagctgctagagggggtctaagggggagtggagaggatgttccaggcagagggaacagcagacaggaaggctcagaggtgagtgtgagcaggcagtctcagggaccccagacagttggtgaggctgcagtgctcaggggaggtgtgccaacaggtaagctggcagggccgggtccctgggggctggcttgtcctttctgccattgtctgagagagtgggtggctggtatctggtggcccagatgaagataatggagatgcaattgtgttcttctttctgctcagtgcctctcagttaaggacatttgcaaaaattaataacagcatatgcttttatgtcctccacttaaatttcctttggattaaagaaagtaacggagggaaaggaagaaaagcaggaaggagcgagagagggaggggagaaagagacaaaagaaggaaaataatttggggaaaaaaaatttgtccttttctgggctaagatagccccagcctttgcattttctcacccattgagtcaccagcctcctgccctctttcaggactgtacatcttggcctcttacctactgtgtccgggtcagcctccctcacagcctgatggcccctgcgctcgtgccgaattcggcacga

SEQ ID NO: 605226 - DNA, 382 bp, Homo sapiens
  misc_feature (10)..(10): n is a, c, g, or t
  misc_feature (44)..(44): n is a, c, g, or t
  misc_feature (129)..(129): n is a, c, g, or t
  misc_feature (316)..(316): n is a, c, g, or t
  misc_feature (374)..(374): n is a, c, g, or t
taagcttcanaccccccggatatgttttattactgttagataancttcaaagagaaaccgtgaaaatccttatttccttcaagatcttttaagaacaaaaaaggccttatctcagcccgagtgcagtgntcacgcttgtaatcccagcactttggtaggccaaggcaggtggatcacgaggtcagggaattcaagcccagcctagccaagacggtgaaaccccgtctctactaaaaataccaaaattagccaggcatggtggcaggagcctgtgatcctagctactcgggaggctgaggcaggagaatcagttganccagggtggcagaggttgcagtgagctgagatggagccactgcactccagtctgggcnacagagtg

SEQ ID NO: 605227 - DNA, 198 bp, Homo sapiens
cctgaagccccaggtactcaaaaggctgaggcaggaggatcgcttaagcccgggagtttaaggatacagtgaggtatgattgcaccacttcgctccaggctgggtgattctctaaaaaaaagatgaaagaaaacgatggcaggatgtgaggcgctgctaggggactgtgaaggtccctcaaccctttctacatgcctt

SEQ ID NO: 605228 - DNA, 824 bp, Homo sapiens
ctttgggaggccaaggaggacggattacctgaggttagtagcttgagaccagcctgaccaacatggagaaaccccatctctattaaaactacaaaaaaattagctgtgcgttgtggcacatgcctgtaatcccagctagtcaggaggctgaggcaggagaaccgcttgaacccctgaggcagaggttgcggttgagccgagatcgcgccattgcactccagcctgggcaacaagagttaaactccatttcaaaaaaacaaaaacaaaaacaaaaaaaaaaaacaacacgaagaactactctgtagtgagagctagaatcctcatgttgtctatttacaattttgggccaagtacagtggctcatgcctgtaatcccagcactttgggaggctgaggccagaggatcacttgaacgccaggagttcagttacagcttgggcagcaaacgtgagaccttgtctctacaacaaaaatttctctttacacttagccacggtgtggtggtatgcccctgtagtcccagttactcaggaacgcgaagcaggagacatcggcttgaaccacaggcagtagagggtgctatgacctaatgattgtgccactgcactccagacttgggcaccagggcaaggcccttgtcttcaatacacataaccgttacacatgccttcagtatgcttgatactatttggaaagaagatacttcggtgttaaagaccacatggtctgtcagctcccccttgagtatatttaccatttaagccttcacttgacgcccttcgtcttcaagggtctaaatatggccggcgacgacctaccgcctg

SEQ ID NO: 605229 - DNA, 414 bp, Homo sapiens
gtcaaacggtatagaacgtgaaggagatagagacacaaaaaacccttcaaaaaattaatgaatccaggaacgggttttttgaaaagatcaacaaaatcgagagagggctagcaagactaatgaagaaaagagagaagtatctaataggcgcaataaaaaatgataaaggggatatcaccaccgatcccacagaaatacaaactaccatcagagaatactacaaacacctctacgcaaataaactagaaaatctagaagaaaaggataaattcttcgacacatacaccctcccaagactaaaccaggaagaagttgaatctctgaatagatcaataatgtgttctgaaatggaggcagtaagaactagcctaccaagcaagctggaatttgacttgaggtaaagaggagatagta

SEQ ID NO: 605230 - DNA, 149 bp, Homo sapiens
atatgtcgtctgcgattgagttgtatgagctcttcctaaatccgtgaatattagaaccttgcctaatatatggttggcacatatttactccttatctgtacattgccttatcattttgttgattgtattcgttctgtgtagaaatagaa

SEQ ID NO: 605231 - DNA, 896 bp, Homo sapiens
taatgtggcgaataccagggtgaacgccccgtggtgcgccagcctcagacccccggggattaaaagaggaaggtgttgtgcacacagggcctaaggataaccgcccgccgtggcaaaaccgctctgcccgtgtagcgaagggcagcgactggtgcggagtaggacggccgggacgaaggggttgccgaatccccctggcccacaccaagaaatcagaacagggggttggtgccacaattaatttcccaaccgcccccggaaaaaggcgtggggtagtcacaccccaggcgtccacgaagactggacgacgtggtagcaccaaggtgtgcgacgaggaccgccctccatccgcggttgtaggaacccccgcggccagccacctcccccgggccccgcaacagaagatccccgcgggaaaacattcaaaagggacaattgaccccccccggcccaaacaagccgcccccggttcgagggaggaacaaataaacagagcacccgcagcgataatcttgtggcccccagccggcacgcaacaatgtggcgtctcccccctgcaaagggcgggcccccacaaaatccttattcctcgattacttggcacccctttcccatcagcacctctggttctcgaaaccctttgagtatcttggacaaccttccgcgatagaataataacattattcataaaaacaggatgtcttgctccttaaaacgtctacacccctgtaggacgacttccccatccccccccgtatcagttagtcaacagcatcgaatatgaattgcaaaattgttcacgcttgctccacgaaaccaccctgattctctaggagaatcccattcaccaaaaaaggggacccaccagaaaaaaaaattggaggacaaacaaaaca

SEQ ID NO: 605232 - DNA, 706 bp, Homo sapiens
  misc_feature (68)..(68): n is a, c, g, or t
acagatcgcaggctgattgagcaagcaacaagcatgcagtgagggcaagcaaggaggagctccagaanagcttaaacatcctgactgccttccagaagaagggggccgagaaagaggagctgtaaaaaggctgtctgtgattttccagggtttggtgggggtagggaggggagagttaacctgctggctgtgagtcccttgtggaatataagggggttgtttttgggggggtgctatcccacgattctgagccctgagtatgcctggccattgatgctatcatgaccctgcttgggatgtctctacctggtctggggatagctggagcacttactcaggtggctggtgctttgacacctcagagggactgtgtgctatagagtggagagaggcgtgttctgtccaggtctttgacaggtgtaattctcattcaattaaagtttcaccgttttcgctacgtggcgcccgccttccccttggttccacgtttgggccccccccctcttgcttaaataagttgcgtttcctcataaactttttcttccgccttgtcttgtttattttttcatttcggctggtttttcttccgccccccttttggggtccttttcgcctttctcccccctgggccctccccttcccctcgccgtggctcgtggttcgtccacccggtcgggtggttcattcccttgggtaaacaaaatat

SEQ ID NO: 605233 - DNA, 460 bp, Homo sapiens
ccatagtgagaatgtgaaagtttggaaggaaagaaacgggtgatagaaagagagacagtgttgggcgggaagggtttacttgaaaatttaaacactaaggcgggttgcgcttgtacaagcccagtatgtgacatgggcgagaataaggagcctaatgggcaacccacagagagggacacgtgcggtacggccccaagtaaaggcgcgccagaaggggtagtaacgggaaggaatgggcccgataaaaagaaatacagaaagggggaagcgacgcgctggcgaagttgtaatggggggggaggtcaggtatatgcataaggaaaacacgggggtaagtaaactagataacgacgcagcggcgaccgaggcaaaaatacggtaaagatggaaagtgggtaagtgaaaagccgagaatacggcgggaaggtaaagaagttaggaaaatggcatagggcaaaga

SEQ ID NO: 605234 - DNA, 387 bp, Homo sapiens
ctaaaaattgcaggggattgctatgataaggagaatgtctccccaaaaatgtccatgccctaatccctagaacctgtgaatacattatattacatggcaaaaggggcttttcagatgtgtttgaggctgtgagccttaaaatagagagattagcctagattatctggggtcgggatggggtggcaatctaatcacatgagcccttaaaaccagagaaacttctctggctgggggcagaagagatgtgatgtgacaaaaacggaagtcagagacttgaagcatgaaaacggctctatgcaccatcaccagaacgaagatgaaggaggcaacatgatgaggaacagcctcaaggagatgagaaaggttagattgcagcccggggggaag

SEQ ID NO: 605235 - DNA, 122 bp, Homo sapiens
aagcaggtagatcgcttgacgccatgtctggcaacatggcaaaaccccatttctacccaaaatacaaaaaatttagccgtgcatggtggtgagtgtctgtgatcccagcgacagggaggctg

SEQ ID NO: 605236 - DNA, 218 bp, Homo sapiens
ggtaactgcactgactgcagatattacaaaaggtgatctaaaagcagcaatctgagcttccatcttaggaaactagaaaaagaagagcaaattaaatccaaagtaagcagaaaataaaaaatcgtaaagattatagagcagaaatcaatgaaatcaaaaacaggaaatcaatagaggaaacaggccaggcgtggtggctcacgcctgtaatcccagca

SEQ ID NO: 605237 - DNA, 224 bp, Homo sapiens
agagaggattaaaatattccaggagggggtccgtaggtaacgtgcaaccgtttggccatggccaataaggaactggggcatcttaaaaggtcggggtttgagggttgaggttgaagccctggaaccaatccccaatggttcctgaggcatagttgacctgggggttttaacttggttttaaaacttacaactggaaggggaccgattccattaaaggttttttt

SEQ ID NO: 605238 - DNA, 416 bp, Homo sapiens
agagagggaaatgctttcctggtcttagtgtgaattgaatgtttccattctgcccctgcctccctaatacagcacctagcccactaagcagagtggatacctactcctggcttgtctggcctggaaactccttgaggacaggagcctgtctttgccctttattctcagttcctcccacaatgcctcctacacaatggatgcccagaagctgtttgtgactaagccaatgagaacatgcaaaaagagctttacacgttgtaaaatgctacacaggaaaaaaataccactttttataaaggagttgcatttgcacttccctgacttctggatcccctcaagttaactttaagagaatgacattctatttcataggtggggaaaccgaggcacagagatgtcaaactggaagtctggcc

SEQ ID NO: 605239 - DNA, 1548 bp, Homo sapiens
  misc_feature (680)..(680): n is a, c, g, or t
tagaaaaaaacacagagctttattattctcaacaccaagggcaggggtcttcataggacagaggagtgagttctgtcaacagaacagggcggcccctaattgtggcgcggcgaatgaagcgggttccgccaggaaccacgaatgactgagttccccggcgcaggaaactatctgtggagaatgtaggcggtcttgggtggactgggtctgtggacttcttccttgggcccttgggccactctcgtgggggttcccctcagtctccaaattcttccttctcagcgtgttcctccagacaccagtgtgtgtgcaggtgccatattcgaaaggcctttcagcgcggccccagggaggttccctataatgggtgtggcggcacagttgtggagtggacgcccacttggcggctattgtggtctcttggagactgtgcacgtggtgtgtggagcccacgaggagacagtgtggccacccggggtgtcttaaacactctcctctcccttcctctctctcgagctatcgggggcgagctctcccctctggggagaggctccacctctttacaaccctctgtgggggggcctggtagagaaagagagagcgcctccacgtgaatggggtccacccaataaccgcccggggaaagggagaagacaaaagaatgggggggggggaaaacncttataaacataaaggcgtggccatcggggggagaagcccgggggggcccaagaaacccggggctcttgtgaggggggggccccgggaaaagggcaaattaacaacttccacaggaacggggggtggcaaaagggccccggagaaaaagtttctccccacgggggggggaccccaacttaaatccatgtgggggcgcgtaggcaatgtttagaacgggaggggcagccggtggcgaccgggggggggggcgggaaactcccaaagaaaaaaaaaccccaccggggtgtgtcccataacaattcgggaccaaaatatcgagagtgttgacccgtggtacacaacgtcttgagaaccccgataattttcaggagaacggggaaatattaacgggagagtagaccagccaacaaagcggcaccaacgcgtggacgttagattaacccccagggggcgacagaacaaaaccgggaaatggcctgtgggtcgccccattacacagaggctccggggtgtccccccacagaggcattaggtcatagctgtgagaaagatgatagccctccccggtgttgggtccacacaacagatgcaaggccacagccgcccttttataaagtgggagaaagtgtggtttacaccgcacacccgcgaggaaaaaaccgtatgaagggcgggggacagaccaaaccagcgcgggcgggtgggacgcccaccaacaaggggaaggggagaggggatcgaccagcggccacatgaggagggctaacaaaggaggagacaccctatgggcacggagaagcacacgagagagaccctacacgatgatcggaatgtaggcatcagcaacgcaggagggatcgagcaagg

SEQ ID NO: 605240 - DNA, 287 bp, Homo sapiens
  misc_feature (45)..(45): n is a, c, g, or t
ctaaagataggggtctaaaagctacttccacacaagtaagaatanctgcaagatagtcagcttatcctattacgtcttcatatatcatgaaggctccctgtatctataacaaagcctgccctggtctcttcaaaaccattagtagaacttctggtttacaaaaactagactccacatttcactgacatctccgacctatttaccaatcacatatgcgattttcattatcgaaatacactgcaccaaacacatcacaccggaagtatctcaaaagcaacatgcacaaa

SEQ ID NO: 605241 - DNA, 170 bp, Homo sapiens
gggtcgttagccatcacaggtaaatgggtccttgtccccgtcctttctataatttctaggaatgtactttaatagaaagctgtatagtgtatgtctccaaatctcaagcagaagaataagagaagaaaagaaatgaacaaaacttaataaaggaagctccccagaagctt

SEQ ID NO: 605242 - DNA, 204 bp, Homo sapiens
aaaagcgagagtgctctccctccagtaccgcctgaactaagagtagtgaggacttcagcgccattgattacctcctcttctcttctttccaggagttcctgcaagcccaaacatggttagtgcttcatcgctggccctgtgagagtgcctatccagctggaggtcctctgggggcttccgcacctggtcaagatgtcacgtggt

SEQ ID NO: 605243 - DNA, 489 bp, Homo sapiens
  misc_feature (24)..(24): n is a, c, g, or t
  misc_feature (63)..(63): n is a, c, g, or t
  misc_feature (109)..(110): n is a, c, g, or t
  misc_feature (115)..(115): n is a, c, g, or t
  misc_feature (121)..(121): n is a, c, g, or t
  misc_feature (160)..(160): n is a, c, g, or t
  misc_feature (205)..(205): n is a, c, g, or t
  misc_feature (300)..(300): n is a, c, g, or t
  misc_feature (389)..(389): n is a, c, g, or t
  misc_feature (487)..(487): n is a, c, g, or t
caaattatgtttaacttataacanattttgtaaaggccccttaggttaaccattttgggagtntacattgttctgaggaaaaagatatgctttcaaaacactatctagnnattcntaatcntttttctattatgggggttggggttcgggggttattgcnacagtgcttgtggcagtgaacaggatgtgaaatgtatcagaagantaaattagtgtcatgggacataaacgtactaggtggtcgggtgggtgctgggcccttagcacagagaattattaaggggttgatttgagtgttanggtttgtgacattaaattaccttcgtatttcaaacattactttttctaaaccaaaccagaagttaatcaacttttcctctcctttaggnacaaaaaggatatttaagatattttccaaaacagtaaaaacaacttagtgtttcaatctagttacaacaaaccctgttgatcctgtgcatttcactgngg

SEQ ID NO: 605244 - DNA, 440 bp, Homo sapiens
ggtcgacaattttggcatctttggatctagggattccaaccatgtcatcaggaattttttttccccccccggcctttaattaacaattcccagccttcccccccaggtggaatccttttcctggaagcacctcccaatgcggtgccaaaaaccaatgctggtggcttaacacttacatcctactcctagagaccccggaatccggactgattggatagctctggaaaaaatcctggggatgagtttgaattgactggatttgggttcaaagataatccatgaacaatccactgttaccagggtgattgtgtcctctgagcaacacatcctgtaatagatgtcacccttggtgctggaagttggggtcagactcctgagccacttggactgtgactggggatgggacattttccaaaatattctgggaagaaagatgtcta

SEQ ID NO: 605245 - DNA, 213 bp, Homo sapiens
gagtcagggatccctgagatagcgtgagagatggaacagagaggactatgggagagatcctccaaccctgagcagtggccaggcactcgatatgacaagctggaagagcctgaagaacgagctctcagaggagaacgaagggaaagagcctccacgaatcctccagacgctcagtccagggccgccagtgtcagccaccctgacctggggatc

SEQ ID NO: 605246 - DNA, 81 bp, Homo sapiens
gcctcggacaccgctatgtattactgtgcgaggcaggaaggagctaggcggatcagcgctatggacgtctggggccaaggg

SEQ ID NO: 605247 - DNA, 266 bp, Homo sapiens
agatcacagtgcccggccaccacgttatctcttatacctgcctgtcacataggatggttgtgaggtttacttaactgtcctgtgctgtgatcactcgcaggccgggtccctcacttggtgctctgctgctgctttcactgtaatcgtcttcatcatcatcatcacccccgaaattggagttgtgtcttccaggccatagaactgtcctgtaccatggggctgatatccagtctcgaggagttagccaagccccgagtactgtgtgt

SEQ ID NO: 605248 - DNA, 123 bp, Homo sapiens
gaatatacagaatataatgaagaaaagaagtacggaggcagaggatattggcccggaacaaagccaaacgaccaagagcctggaaaagggaaaaaacaaaggggtggcacaacagaaggccgg

SEQ ID NO: 605249 - DNA, 365 bp, Homo sapiens
tccatgctaagtacagtctgctgtgttttgcttatgtactgcgttgttgttgggtatttttgtactagtaatgtcttggttttggtcttcttgccgtgttgcaaaactgtagaaagttgcttattcaccggccttggttccattgaagtctgcgtctcgagtgtccgtttcctcctcagaaccatctgcattttcaataactctacgtcctccagaccttccagaaggaacgaaagaggtctcgtttcctcgcctggtgcatcactgcgaagtttcctgtggggggggccctctgagcttgctcttgagtgcgttcacctcgcggcccatggcctcgttgctctccgtggcctcatcctaccaaa

SEQ ID NO: 605250 - DNA, 133 bp, Homo sapiens
ttatcccctctgcttcgcaagtgccaagggcaccactcctaggtgcttgttctatttcgtacgtggttcatcttcctaaattcctgcactaatccgctgccttacaccactccttggcctcgtccatatgcaa

SEQ ID NO: 605251 - DNA, 1197 bp, Homo sapiens
gggggcggcgtggtgtggatgcgatggaacaagatagcagcaaaaagacaagatatggcttactgttgctctgcttcgctgccatcttgttgtggggcgatcgtctttttttaagatctctcggtgagccgatttgtgtgtccccactcgctgtgttcttttttcgcctgtagtcccctcttttgtgtgtgttgccggtcgtagatcgatgctcgtgtcgcgatattgttgtattgaattttttccccgttgggctccccgatatgcgcggcttgtctgctgggtccaccgttttggaaccacgagccagagtgtggcccctgggcgatgcgttggccgctttccgcggtgctcggtgtggcggctcttcggacgccaggtgtgtcgcgcagcttgccgggcggagcagaagttttcagaaagcccttggaggttcacacgccgcgccggattttttggccgtgactgacccttggacatcgtcaagaccagacaccgtgtgtttcagaattgtaaggttttggatcccagctcgagtcgacgtgcgcggtcattggtgcccatactgggaagaccatcagtccgccctgatctttcagaggcgacccccccaggtggacatttcccccaggacccagctgacaagcactcactgggcggatcccggaggcccggcacggaggtggtcaaggcttaaaccggagccaggctttgccaccctttccactggcgtattccggcgcccgcctttgtcttctcccttgtggaatcccatgaatggaaaggaaggttttttggaaatgttccttcgttatagtcacccggaaaccggaatgtacctacttttccaacacccctgctgcttgggaaaaagggcattcgagaagaacctgggcactcggccaagtttcctcttttgaggagaagatgattctcggatgccactccccgagctgaaggcctccactcagaagggggaagagtttcgtgagagagccctgaagtgagcccctgtgacgggtggccacgtttccttataatttattgaaggcactcactgtcacctgccaagccgcttgcagataaactttgtaattttaatttgctttggtgatgattactgtattgaccatcctcatgccttcccaattgtgggtggctctgtgggcgccatccaattaaagccgtccttgattt

SEQ ID NO: 605252 - DNA, 489 bp, Homo sapiens
gcagtcgtatcaacgcagagtgggccaggacaggccgggcgcggtggctcacgcctgtaatcccagcaagttgggaggtcgagggtaggtggatcacctggaggtcgggagttcgagaccaacctgaccaacatggagaaaccctgtctctattacaaaaacgaataaaaaaaaaaaaaaaaaaatttttgggcggacttttggacccttaaagaaagtttttaaaaaaacttttgtttgggcgagcgaagacatagtaaggaattaagtgtgacaatgcggctaatgcgatgttccttaaggaaaattgggctatggaataaatgggaggggatttttcgacaaattaaaaaaccgcgggggaaccaggaccggttgtggacgaaatctcaaaaatgtgagattcgaaggcgaaataaggggcctttataaaagaggagcttcgagcgaccgattacgaattacgaaattaagccaaggcgatgtggg

SEQ ID NO: 605253 - DNA, 438 bp, Homo sapiens
  misc_feature (345)..(345): n is a, c, g, or t
  misc_feature (353)..(353): n is a, c, g, or t
  misc_feature (412)..(412): n is a, c, g, or t
gcatactatttactttacatgattccacaccttggcttttttctctaaatagcatatcttaaaagggagtgcatgtctgtgtagagagagtaccccgtttgcacacctgaatggtaattccattgtgtataagcactttggtttattgaaggacagttgtgttgtgtttgcccgttacagtgttgtagtgaaaaacccttggtaaagatgacatttcacacaagtgcaaggaggattgttttcctggggttacaggggtaaatgcaagtggggttttactatttttaatgcctcttacccagcaaagcccatgaagagtgtgcccgcttccctccacaagttttngcccaacnaaagtatggttttccagcctttttgggtaatccatccagtttgaagaagaaatgggtcnccaagtggaaggtttaaatttccatt

SEQ ID NO: 605254 - DNA, 251 bp, Homo sapiens
gagtaggacaaagctggtaggtttcaatctggatacaaatctaaatctcccattatccccaagtgcattatagatgaacgctgattttgtctggacccaaatagctatactaatagtttttgttgccaaccgacttacgcgaatacgattgtttaaattattattaccacactggaatgttgaccagacaagcttaacctgcaacttcagatctaaagaagcgttaatgcctgtttaagcttaagcgggat

SEQ ID NO: 605255 - DNA, 1104 bp, Homo sapiens
gatacgtgctgagctgtattgagctgacaccgttgtagtggatatgggataacccccggtggaagaggctgagcagtctggggccctggtccgagagttccttgctgccatggtagcccgagtgcggtctcatgcctccggactccgcacgaatgatgtggccttcgtcacagttcctcgtgggaatggagactgcttgagcgaacgagaggaatctgaggtcaccagggcacgacaggtatcgagaccgtgcggtccatggccaggtgttgtcactcgatatgattcggtgctatgatcgctcgtgtgcgagacgtggcgactacggtgcgttgtcgaggagtacgtgcaagaccagtaagcatcgcgattgctatacactacttgggagattaacctcgttggagctggttgtgccaaagagggtcaccctgtggattccctcaaggattggtcgcacgcctaccattgaggaacggttgggggtggacgtacggtggtcactggcgtccatctgggctcgaactacgccaaagtaactcgcttattgagtccgctccatacctgtcatgggcattggagaaccacatgtactggtttcacacgcgcctactgcggccaggcctgcttgctaaaccctgtgaaggggtgtaaacaccatgacaaggaccaggcacttgtgtggcaccacgcgggacgcgttgcataactctgtggaaagaacatgggcgttaggaagcgtgggtcatttcgtacgcacggacgtgtggattccccctgtgctggcatgaccctgtgctgaagaccggggccaaagtgcacattggccccaggagcgccaaagttatctcataggggaattcctgcgaacatttgcaggcgccataggggccaaggcgtatataatacccattcactaaacactttgcgtggcgggttgacccaagtggcattctacacgccctcccctatggtggcctctacaagaggttgcgtaccacttcggcgtattttcgggattggatggtagggtgaccaagcatccgtttgccaaggttagtccaagggtagtccttggtggtacacttgaaacaaagggcatag

SEQ ID NO: 605256 - DNA, 357 bp, Homo sapiens
cgagcgtagcgggtcgatctaagatctcacataggtctgccagcctcacctgaaatggagcgtcttccagccaacatcccatcgtggcatattgttggctggttctcttggagctggtaatcgttgaagttgtggccggtgtgtgatgtggaggaagaaagagctcagatagaaaaggagggaagtactttcaaggtggaaacaaggaaaggggccagggctcttatattgttttcaaaagttggaaaggggtgagaaagctgccttgtggtgggactgagaaggcaagatttgttccttgcctttccctttgtgacttgaagaaacctgactttgtttccacaatggcacgtggat

SEQ ID NO: 605257 - DNA, 154 bp, Homo sapiens
tagtgttggggcactcttgcggggggattcttctcttaatctttcagatactttgtctgcgaacactctttaatgtaccacgatcaggcatttgagcggaagaacgaatgtcactttaaggctggaaagacaaattttattcttcataaagttg

SEQ ID NO: 605258 - DNA, 85 bp, Homo sapiens
tccattgtgcaatttggaacacaagaaaaagcatggattttgaagtcagacaaatcatttacttcggttgcattggtgtgtggtt

SEQ ID NO: 605259 - DNA, 260 bp, Homo sapiens
tccctgttttgtgtgtgtgctgtgtgctagtgtgtgtgctgtgtgtgcatgtgtgtgcgtgtgctgtgcgtttgtgtgctgcgcgctcgtgtgtgtgctgtgtgtgcgtgtgtgctgtgcgtttgtgtgtgttgtgcgtttgtgtgtgtccatgtgtatacgtgtccggccacgtggccggacacgtaataggagtacctgagatgtagcagaaactcaggcttcactgtttacgtgtccggccactacgtgtccggcca

SEQ ID NO: 605260 - DNA, 111 bp, Homo sapiens
gagtatcgggggtgctatacggtaaatacgggccctatttcagacgatttttaggggaattaattctaggacgatgggcatgaaaccgtggttcggggtaccgagctctaa

SEQ ID NO: 605261 - DNA, 130 bp, Homo sapiens
accccgttttaatttttccagtctggtatgaaggatccctggggttgcaagtattccagttcacttctgcctttctggacaatctacagaagcaagtgagacaaattaaatattgtataattttaagcta

SEQ ID NO: 605262 - DNA, 100 bp, Homo sapiens
cgcacccctccctagctttgttcgtagtgatgctttctaaggcccacttgacttcacattccaggatttctggctctaggtcagtgatcacaccatcgtg

SEQ ID NO: 605263 - DNA, 395 bp, Homo sapiens
atcgggcgatctgttcactcatccatccatctcatccatgcatccgtctatccatccattcatctatctacgtacccatcatctgccatctattcatccattcatccatctatccatccactcatctacctacccatcatctaccatctattcacccatccatccctctcatccatgcatccatctatccatccatacatctacctacgtaaccaacagctaacatctattcacccaaccatccaactcatccatgcatccaactattcatcttcctacctatccatcagctaccatctattcacccatccatccatctcatccatgcatccatatatccatccattcatctatctacctgtccatcatgtaccatctattcacccaaccatcca

SEQ ID NO: 605264 - DNA, 801 bp, Homo sapiens
  misc_feature (226)..(227): n is a, c, g, or t
  misc_feature (234)..(234): n is a, c, g, or t
  misc_feature (253)..(253): n is a, c, g, or t
  misc_feature (257)..(257): n is a, c, g, or t
  misc_feature (265)..(265): n is a, c, g, or t
  misc_feature (286)..(286): n is a, c, g, or t
  misc_feature (395)..(395): n is a, c, g, or t
  misc_feature (449)..(449): n is a, c, g, or t
  misc_feature (745)..(745): n is a, c, g, or t
tcccccctctactcaggggcagggcacagtcacagcgatcccgacatcgaatgtttcccactgcaccccctccgtgactacagacctgggcatggacccttgcacatgtccctgcctcgcactagtgtttgagcgagaggaaggggccccgttgtctacctggccctgcaacggcctcccacagtcgattcgggttccctgtgcccattattcagcaaaagcctcnngtgtcanctggctgcctccactcccncttncctgaccntgcggggcttggctgagagantggcattggcagcaggtgctgctaccctccctgctgtcccctcttgccccaacccccacgcacccgggctcagggaccacagcaaggcacctgccaggttgggccatanctggcctcgcctggcctgaggtctcgctgatgctgggctgggtgcgaccccatnctgccccaggaacggggccggcccaggtgggcgggcagcacacgacaaggaggctggctggggccctatacagatgtgcccccccatcctggccccatccagtgtacccccgcccacggctggccagccccacagcccacgtcctgtcagtgccgccgcctcgcccaccgcatgccccctcgtgccagtcgcgctgcctgtgtggtgtcgcgccttctcccccccggggctgggttggcgcaccctcccctcccgtctactcattccccggggcgtttctttgccgatttttgaangtgattttaaagagtgaaaaatgagactatgcgtttttataaaaaatggtgcccga

SEQ ID NO: 605265 - DNA, 671 bp, Homo sapiens
  misc_feature (49)..(49): n is a, c, g, or t
  misc_feature (71)..(71): n is a, c, g, or t
  misc_feature (120)..(120): n is a, c, g, or t
  misc_feature (265)..(265): n is a, c, g, or t
  misc_feature (319)..(319): n is a, c, g, or t
  misc_feature (615)..(615): n is a, c, g, or t
ctgacgatggccgtggagttgcccgactccttttccccatgaaataacnctccctgctggaggggttcctncagagggatgtcaaccggagattgggctgcctgggccgagggggctcangaggcgaaagagagcccctttttccgctccctggactggcattggcagcaggtgctgctaccctccctgctgtcccctcttgccccaacccccacgcacccgggctcagggaccacagcaaggcacctgccaggttgggccatanctggcctcgcctggcctgaggtctcgctgatgctgggctgggtgcgaccccatnctgccccaggaacggggccggcccaggtgggcgggcagcacacgacaaggaggctggctggggccctatacagatgtgcccccccatcctggccccatccagtgtacccccgcccacggctggccagccccacagcccacgtcctgtcagtgccgccgcctcgcccaccgcatgccccctcgtgccagtcgcgctgcctgtgtggtgtcgcgccttctcccccccggggctgggttggcgcaccctcccctcccgtctactcattccccggggcgtttctttgccgatttttgaangtgattttaaagagtgaaaaatgagactatgcgtttttataaaaaatggtgcccga

SEQ ID NO: 605266 - DNA, 1354 bp, Homo sapiens
ttctccactcttctatctccgatataaacgcgttgccaaacatctcgtgagtgtgttgttatattcccatgtctctgtattgtctgtggggaaatgtatttttgagcctttcttttaaatactgtcccaaaagtaagtataagtcccctggttacctccgctcggggaattatttgtgtcgttgggccaaactggtgtatcttgatggtgtcgataagcttaatttgctggtgccagaattgaaaggggggcaacatacatatatgtgtttgtggcccttggagtaattcaagcaccacatgtcacatcgctctggtattgaccgcccgtccttgggatcctggaggaagaatacgcacgggggagaaacgctcggctgtcttgtggggaataatagggccacatgggcaattcacgcactttcataggcccatggcacaatattgaattaggtgttgcattcacgcagctattcctgcatgctggcaagttggactcctcgtaaatgccttgacatacgaacgttcttgtgataacacatggctcaagcggctctcgtactggccgttgtttggctttctctgtcttgttaattgtttcttcgttccacgggggatactccgacgctgttcctcgcagactggtatccctgatgaacctcatgatgacagcttggaagactgagtcatcaacctccacggctcaccaacatgtgcagagctttctctcggttggcatcggtgtgtagacatatccctaaccacgtgcccaacagtcaacacgaaatttctacactctgtcttcgttcttactgggcctctcgaccctttataccaagaggggctgtagtgtaaaatctaggatgcatagttgcaaccaccaggatagtctgctgttctccgaatgaagaggattccccatttaaggtatgtcgacgacggcggaaatggtgaggaagagtcgcggcactatggtgtctggagaagaaaggagcggcagcagggcgcccacgagcgagggatagtccagacccgacacaccagtacaccgaccccagacgcgcaacgccccgcgtgtaagtcaccacagcggtttctggaaaaggcagcatggcctctgccagctctttctactaattgttcagactgagcaaaagatagtagtatttagaagaagtttctaaaagattagtacaaaatgttttctgctagtgaaaaaaaaagttctttgggaccgggcgtaggtggctcacaccctgtaatcccagcaccttgggagactgaggtgggaggatcactttgagaccaggagtgtgagacatacccggcaacataagacatcctaccaccctcct

SEQ ID NO: 605267 - DNA, 235 bp, Homo sapiens
cgggcaatcggtgtactcggcgcgcgaactgagccgccagccgctctaccgcgagccgaaccaacgctcctacagctacgtcaccgatccggacggcaccaagatcgtcgacgacatcacgctgccggccgccgggctgaacacctatctgttcgaggtggtcaacgacaagaaccagatcatctccaccgaagtcgtggaaacggtcaggcgcctgtacatccaggagatcatg

SEQ ID NO: 605268 - DNA, 901 bp, Homo sapiens
  misc_feature (1)..(1): n is a, c, g, or t
nccctggggccacaggggcttctctccggcgcggtgtacccgttcgctcgtccgccggccacaggttttttctcccgccctgtgtcgggcctccgcctcctcctgtggcgcccgccgtaatccctgcctgcctcccagttttcgtcgcgcccagaatccgccatgcagtgtcccctttgggccgccgtcctcccctcggggcgcttcctccctctgcgaaacaccccccttcctgcggggtggcgtggcccccccatgctccctccggttcagggcgcacataggtaaccccctgtggtcgtctcccttggggtcgcccctcgcttgaacccccgggcgggtcgccccgccccccgttcttggccccccggtgggcccccccctgcaggggcctgtggcacccgggggcggtgttttccccccctcgagtgattcccccgtagcaccgcgtgggtgcctgtcccccgcttggtttttcttcttctgtctcaagacattatagccccctcgtggccgagcgcctcccgctgtcttcaccgcctgttgatatgtccctccccacccctatgtgccgggcgcccagtgcggccgcgccagcctcgcggcgtcccacgacggtgctgtaggcatcccctgtccttgtaaacccccgcgcaccccctgtttttcctttacaaaataccccgcacaattatgtcttggggcccagacatgcgcccgcgcgccccggtatctcccaccacctgtcccctgatggccggttgccacccagaaggatgtgggactcaccccccgggtccggggtagttgcgcccgtggccccgcgaatgatggacgataaaatttatgggttccatcttggaaatgaaaacaaaatcttgtttttcccccccacataaca

SEQ ID NO: 605269 - DNA, 382 bp, Homo sapiens
tcttgatgcgcggggtcattgggcgtcgatcttgcagcgggatgctatgggcggctgctgacacgctgctggtctcgtccgttacgcctgtcaccaaggatgcccgggcggccggctccggtcgtgaagtcgaggtcgtggtccgacagctcgtcccgttgcatcaacatgagtgagcgctcctggtccggagtcagctgatcagtggggaagcgcacgatctcgttggagaccgcgcgagccagagccacccgggaagccgttgcgcttggccccgggcgtccagccgtagggaagagagaagccgtcctcatactccgccggctgccagcgcacaaaggcccggctggaggcccccagcgtgcggctgcgcctgttgttg

SEQ ID NO: 605270 - DNA, 275 bp, Homo sapiens
tcgccatagctattacagtggtcattagaatgatcagcactgcggccggattgttagttttagctctctgccttgaggcactcatcagggtctcccaggctagagcattcattaccactgaatggcagattacacacactctagcttcctttctgcacatggataacagtgtacattgcaggctacggcagagagcacagaaaaccttcccacatgctctgcagggaggccttgtttcggtgacatgaaacctgctttgacatttcatgcaagac

SEQ ID NO: 605271 - DNA, 119 bp, Homo sapiens
  misc_feature (35)..(35): n is a, c, g, or t
  misc_feature (64)..(64): n is a, c, g, or t
cttttgaaagaaatggatcactgctgcaggctccncatacactgaataaccgttagtccgcctntctcttcccgggagttttgtggtctgggtcattgtcactcctgctcactggtggt

SEQ ID NO: 605272 - DNA, 658 bp, Homo sapiens
  misc_feature (238)..(238): n is a, c, g, or t
  misc_feature (273)..(273): n is a, c, g, or t
  misc_feature (357)..(357): n is a, c, g, or t
  misc_feature (413)..(413): n is a, c, g, or t
  misc_feature (415)..(415): n is a, c, g, or t
  misc_feature (423)..(423): n is a, c, g, or t
  misc_feature (429)..(429): n is a, c, g, or t
  misc_feature (431)..(431): n is a, c, g, or t
  misc_feature (446)..(446): n is a, c, g, or t
  misc_feature (463)..(464): n is a, c, g, or t
  misc_feature (472)..(472): n is a, c, g, or t
  misc_feature (477)..(477): n is a, c, g, or t
  misc_feature (485)..(485): n is a, c, g, or t
  misc_feature (495)..(495): n is a, c, g, or t
  misc_feature (498)..(498): n is a, c, g, or t
  misc_feature (505)..(505): n is a, c, g, or t
  misc_feature (507)..(507): n is a, c, g, or t
  misc_feature (509)..(510): n is a, c, g, or t
ccagtttacgcgccaggggcatacctcgcattgcgcctatgcgtgtcttatccacctctatctgtatctcgtgatcgacctactgtcttggtccatctcaattagataaaaatgaaccccgttacagagtcaccatcatgtctcttctcaccaccctctgaatctgcattagccagtcaactagccctttcagcgtcatgtgaccagcgcgccccattcagcttggctggtgtcgttncacatgacccaggctggccagtcgtcaggttgcancgccctttggttcccgagcatgctgtatactctcagccttctctccaagacttaacctaaagtcggtcagtgagccacctcgancgcccacacattcctggccaatcagctcagctgtttatttaccaaatgtcttcacnanaactacancagcancnttcggctaacaaaanaagcaggaaaaatccannacaccccnttcgncaaccaantaaatccaangcnacttgtngnannaccttttcagcaaattcttcctggcgtcagtccggcagcctcactcaccatttctagcttgttgaaaacccaaagtattcttcggcaccattcactgggcccaacagtgagattgaaagttggggacatgctcacgccataatactat

SEQ ID NO: 605273 - DNA, 105 bp, Homo sapiens
agaagactaaactcaacagtaaatcaaaaaactgctcgccagaacactacgagccacagacttaaaactcaaagagacctggcggtgcttcatctccctctagag

SEQ ID NO: 605274 - DNA, 377 bp, Homo sapiens
  misc_feature (76)..(76): n is a, c, g, or t
  misc_feature (132)..(132): n is a, c, g, or t
  misc_feature (134)..(134): n is a, c, g, or t
  misc_feature (142)..(142): n is a, c, g, or t
  misc_feature (148)..(148): n is a, c, g, or t
  misc_feature (150)..(150): n is a, c, g, or t
  misc_feature (165)..(165): n is a, c, g, or t
  misc_feature (182)..(183): n is a, c, g, or t
  misc_feature (191)..(191): n is a, c, g, or t
  misc_feature (196)..(196): n is a, c, g, or t
  misc_feature (204)..(204): n is a, c, g, or t
  misc_feature (214)..(214): n is a, c, g, or t
  misc_feature (217)..(217): n is a, c, g, or t
  misc_feature (224)..(224): n is a, c, g, or t
  misc_feature (226)..(226): n is a, c, g, or t
  misc_feature (228)..(229): n is a, c, g, or t
tactttggttaggttggagacgaaggctgtagaaaacagcatgctcgggaaccaaagggcggtgcaacctgacgancgcccacacattcctggccaatcagctcagctgtttatttaccaaatgtcttcacnanaactacancagcancnttcggctaacaaaanaagcaggaaaaatccannacaccccnttcgncaaccaantaaatccaangcnacttgtngnannaccttttcagcaaattcttcctggcgtcagtccggcagcctcactcaccatttctagcttgttgaaaacccaaagtattcttcggcaccattcactgggcccaacagtgagattgaaagttggggacatgctcacgccataatactat

SEQ ID NO: 605275 - DNA, 449 bp, Homo sapiens
cctggtatcccaccacttatagataggcagcaagctcagaaaattgtggggctctcaagataaaagacgaatgttaaactaggagttgactcagatattcctaataaagctttcaaaggttgccttcagccagggcagtggtcatgctgtaatcccagcactttgggaagctgtggcagggggatcgcttgaggtgaggagttagagacccagcctgggcaacattgtgaaagcccatctctacttaaaaatacaaaaattagctgggcatggtggcacgtgcctgtagtcccagctacttgagaggctgaggcacgagaattccttgaacctgggaagcagaggctgcaatgaacttgagattgcgccactgcactccagcctgggtaacagagagcaaggttcatctcaaaggaaaaaaaaggagccaaagggtggggataccaggg

SEQ ID NO: 605276 - DNA, 131 bp, Homo sapiens
agctgacccgagtttggggatactgaggtcgggaattcgagacagactgtacgacaggcagaagccctgtctctacttaaaaaaaaaaatacaaaaattagcctgggcatggtggcatttgcctgtaatcc

SEQ ID NO: 605277 - DNA, 468 bp, Homo sapiens
  misc_feature (196)..(196): n is a, c, g, or t
tggagtgtaccgagtccaaactgtgccctctgcccggcgtcctgtggtcaagttctgtcatcggccttcaggtcttcatggagatgtatccctcagtaaccggttggccttatataattcacgtttcctgaatctctgctctgagatggatggtcgagtccggccccttgtgtataccttacgctgctgggctcancataatgggctgtcaggaggtggcccccttctcaataactacgccttgacgttgttagtgatctacttccttcagaccagagaccctccagtacttcctactgtggcccagcttacccagagagcaggtgaaggggaacaggtagaagttgatggctgggactgtagcttccctaaggatgcctcaagattggagcccagcaccaacgtggagcctctcagttcccctgctggcccagttcttctcctgcgtatcttgcttggatctttctg

SEQ ID NO: 605278 - DNA, 303 bp, Homo sapiens
aaaacttttgaattttttatagtgatggggtctagctatattgcccaggctagtctcgatctcctgtgcctcaagaaatcttcctgcctggacctgccaaggtgatgggattaacaggcgtgagctaccatgccagcctcctgcttgtgtttagtttattggtttttgttgttccaggatactattcaacataccacattgtatttgattgtcatttctccctggttctctgacagtctccaattgttcctgggtctttctttgtcttttgtatgatcttgacacctccagagatcagttatt

SEQ ID NO: 605279 - DNA, 191 bp, Homo sapiens
ctcggaccgggtcggcaaggacacaaaaaatagtctggcattttaaagtgtacaattctgtgacattttgtacattcacaatgttgtgcaaataccacttctatctagttccaagacagtttcatcacctcagaaggaaacctcgtgtgcaataagcagtcaacacctcatttctcccttcccttgccgaa

SEQ ID NO: 605280 - DNA, 467 bp, Homo sapiens
  misc_feature (374)..(374): n is a, c, g, or t
  misc_feature (451)..(451): n is a, c, g, or t
cacgaggcggcttctacgcgaagcgcggctggacggagcgccccgagatggccaatttcgtcctccggctggggtgaaaaggggccccgaggcgcggccggccgggtgcaggaggaaggtgtaacatatccgaacggccgcgaccgctgcggcctggattgacccatggacgtgctcctcagacccgcggcgcccaaggatagcgcggagattgccgctatgtcccgcgacttgatcgaaacggggctcacctggtcctggacgccggcccgggtcgccgccagcatccgtcaccgggagaccatggccctggtggcggaggcccagggccgggtggcggggttcgccatcatggagttcggcgacgaaacggnccacttgaacctgctggccgtgcggcccaggttccagcgccaaggcgtcgcgcgccgcctggtggagtggctggaancctcctgccgcaccgc

SEQ ID NO: 605281 - DNA, 194 bp, Homo sapiens
aggggtacggatgctactcgggcacctagaagccacagcggccctccagcagagcggcacggcaccatgcgcaggaatgtctcgaccttgtccatgtccttcctaagagcagtagagcagcccggtagttctggaagcagtgcgtcatggtttgtgcgacgtttgcgtcaaactgtgctgtaggttctgcttga

SEQ ID NO: 605282 - DNA, 303 bp, Homo sapiens
caggtagtcgtatttctctaccctgagttgatgatctcgaggtatttatcccagacaatgatgccacttcacctgggagtgctgaggcgggtggatcacctgaggtcgggagttcgagaccagcctgtccaacatggtgaaaccccatttctactaaaaatataaaaaattggccgggcatggtggggggtgcctgtaatgccagctattcaggaggctgaggcaggcgaatcgcttgaacctgggatgcaggtgttgcagggagccaagatcgtgccactgcactccagcctgggcaatcaa

SEQ ID NO: 605283 - DNA, 474 bp, Homo sapiens
  misc_feature (284)..(284): n is a, c, g, or t
  misc_feature (349)..(350): n is a, c, g, or t
gacgagcttcacgatgccccacctcaccccataaccaggccgtgtctcctacccaccagccaggaaaaggacctgatgagaagggggaagaggagggagagtagggaggaaggaggggggagaggtgataagtgcatggtactgacttctcctgtttaggttttagctgcagacttgggtcctgcaggtggtgggaagccgtgcatacacggctggtgtcacagccaagcaggcttctctcacaacaagcctcgggccctggggccggggctaggcagcctccnaagagatgatccgtgtccccaggctggatgctgtgtaggtccagggaagccccaagactccccgnngcccgaggccctgaagatgggtgtggggagagaagacactggcccattgaagggggcccatggatctatagtgttttattttaagcaacacacaaaaatacaaaaagcaattgtccaaataaaa

SEQ ID NO: 605284 - DNA, 367 bp, Homo sapiens
gaggatccccgacggtctagtactatatcaggagtcagcaactagatgccataggccagatccaacctgcagcttgcatatgtagacagttttatatggaacacatgcacacccatttggtttttgtataatcaatggctgctcttgtgctacaatggcataactgagtatgtagttgcagcagagaccatttttcctgcaaactctaaaatcttgactatttgtccctttacagaaaaagtttgccatccccctgatctacattgatacttattgagaaaaattggagggctcaaggaccgttcaattggtaacagacccgtcgggggaacccgggcctcgaaatccggaaatccatggtcatagc

SEQ ID NO: 605285 - DNA, 604 bp, Homo sapiens
cggggatcaaaatgatttctcaccttgcgcgttaactcggctaatcaatcctccaggggccatcattcaacgacagagaagacttgtgttcaaaataagaactgtcccccttcagcgaggttgatacgccaagcaccaccaaaaattgtgggggagacgttcttcttgaggagtcgcaccccaggcgccccccctgtgcgccttaattgtagtggtgaacaaggcacctctttttcgatgtatcccccgcttgtcaccagtggggaatttccccaaatcaatatgaaaagataacaatatgctgccccacaaagaaattcagtgtgtcctgggaagctcttaacgacccgcagtgggggagtggtttgcattgagaggtgcgcccccacccatggtcggccgtatgagatgaacaagatttgctggggtttcgccgtcttcatagacatctccgccgggtgtcaatgtagagcggcctacattgcgaggtattgcacgagtcttcttgcccccccacaggcccaggcgcgtggcatgtgtgcattagagcggcgcaagttatccccccgaccaacaaaatgacaccccccaacccaacaaaaca

SEQ ID NO: 605286 - DNA, 219 bp, Homo sapiens
tacgatcgagctggtaccgttgctaggtggagtaagtgtcataatctcagtcttgccactctgcctcctgggctcaagctgggtcaagctatcttcccacctcggcccccgccccgagtagctgggactacaggtgcacgatgccatgctcagccaatttttaattttttttttttttttttttttttttttttttttttgggtttttttttttctctg

SEQ ID NO: 605287 - DNA, 207 bp, Homo sapiens
ttagtagtcattcccacttcctgctttgttcttcccggtatcacaggtgctggcatctgggagatgacagtttctgtattctgctcttcattgtctctagtgcttgttctgccaatatatattgtatctgctagattaagagtgtgagattatgagttgattttggtttctggctgtggaaggcaggtgagcagacttcagcaggct

SEQ ID NO: 605288 - DNA, 157 bp, Homo sapiens
gactctacaggatcccgcttgggcacgcaccgtcctctggtgaacctggcaattatatccctagccaaccccttaaacaccccttccccacatctaagcccgaagtgatatttcctattcgcctattttacaccaaccccacggtgcgttggcccaa

SEQ ID NO: 605289 - DNA, 1241 bp, Homo sapiens
gggtcccagtggcagcagtttagtcctgtcggccggcttgtgtgtcaacagaagaccattggagagagccatctcttgatccatgaagtgccaagctgtgcagagcatggctcgaagcgtcgtagtgaggacgactggccacgcacttcagtgaaacggtctgccagtggacgaaggggcgagagaagcatctaccgtgcgatacgaggcgaaagcctggctctcagctaggacctactatagaatcgtggatggaagcggccaagagggcctgcgcttggagtggtgactgctctcaagtatttgaccgcagtacagaacgccggacgatgcgatggggcctcgcgtagggagcacagcggttagcccgaaagggatgccgggtgcaagctaaacagcgcgtatgcatagcgtatgggagaccttgcagcgttgcagagcggccggagggtacgcaaacacccaggttggcttggcgttggcatccgtagtgtacccgcccatttgaatccacgctccaaaggggggatcgagcacccagagaatgaccgagcacgaaattgacgctcaaggagttctatttcgtactccgatgaacgcgatattcgaaaccgaggcgcttcgaagagaaacaatatcgctagccgtgtatgcgcacgaggtccccgaacgggctcgtggagtgcctccgtgcctccgtcattacagcaccgaacagtgctggaccttcaacttcaggcctgttcgacattcccgttcgactttgggaaccttccatgaagaagaaaaagggcgaagatcgtaaacccatacaaacgtgaatgacacacagactagataagcgcaagtgcgcaataacaacccccatacagccaaccgacgatccaagtcccttggacggattcattggagacccattggtccctagtattcgccaaacccattagaagcagaccgttacaccttcaagtggaccggaattccatcggcttgtagtcgaacgtgggtaacaaggattcaggtcaacgaaagggagggaaatgggcgataaactcgtttgcagctgaccaattccaacgcaaggaaactcctgttgcgattacacaatcgaccccatgggacattttacgtgcacaggtacgaattggaccaaccgaccgtgacttactttgctcaacgtactggataaaacccgcgaacaaagattgcctcgtcactgaggcctgggcccatgagccact

SEQ ID NO: 605290 - DNA, 950 bp, Homo sapiens
  misc_feature (928)..(928): n is a, c, g, or t
gccattctgtttttataacgtggctacacttgccttctgaatgattgaaagaaacttttacatcttttcttccaaaataaaagtaacaagctgactgtgattcttaaattgagaccagagcagcaaacgtctcactttaaattttgttttcttttcctttttttttcttttttctttttttttttttttggccagggcatggttgaatagttattccttaactttaaatatttttttgaaacatattttttaaaatgttctctaaatatttcggctatctggcaaggtctcttttaactagatcagggctgttcttcccacctcatccctctgaaaataaaaatgtttggccctccccaccatccatcatagccaggccactaacttgactgggtgcaagagatctggcggcaggaactttgtaaagccagtgtgcagataagaattgggctctggagggtcctgagggcttcaagtcttaccgtgtgtgtgtcccagtcctcaaatttgtggcccaaactctcaggattctccctctgcccttgtctaactccatggtactagaagaccttcctcgccactctctccaaattaaaaaattcagctgccctttcctcgtgtgcctctgacagaaagaatccttgaatggcacatctcagccccccatagagggaagtacttggaaaaaactgactcattaccctgcctcctttagattaattcgaaccataggccggaagatgtagaccgaattactaccagaggcttggttaaccacaaccctaattaagggttagagttgttctccctcgcaaactgatattgcgtccccatggtcaacctaataaggcagcaccgtcaatcgagataccatacaagagtgaacacacaggggggacagcctctagatcgatttacatatcatctngcaacagacacacgcatagacc

SEQ ID NO: 605291 - DNA, 111 bp, Homo sapiens
ccgcgtgatagaggatcccccagccaccccggcgtatttattagcatatccctctactattttttaaccaaatcaacaacaacctacttagctgttcccagcttgtccaga

SEQ ID NO: 605292 - DNA, 183 bp, Homo sapiens
tgtttaaaccacaactgaaacacctaatagtatatattttaacaagtaaaatgcacctagaccaccttcattactgaaacacttagtaattattatttactgacttacacaccttattaacatgagagaaagttaacaatatcaaagcagaccatcttgtcttgtcttaatttatatatttat

SEQ ID NO: 605293 - DNA, 132 bp, Homo sapiens
ggggggggggccggggttttttttttgggcccccccccaggggggaaaatgggaaaatttttttttttgggggaaaggttgggggggggtttttaaaacttttttaaaaaattttttttcccggggggggga

SEQ ID NO: 605294 - DNA, 261 bp, Homo sapiens
catcactcatagatcagttctatttttctcaacctttgtctctttgcatttccatgtaagggcctatgctatacatctgcgtaagcgtcagagattctttccttagccatgacccgtctactaatgatcccatcaatggcattcttcatttctgtccgtgttttgtactctggcgtttcttttaggttactactcttaaggtgtccgtctctccacttacgttgcccatctcttcttgcgtgccatctgctttattcggga

SEQ ID NO: 605295 - DNA, 166 bp, Homo sapiens
tcaacagagctacagatttgaagaatcttttcagcaatatgggaaggtggtgggcgccaaggttgtgaccaatgcccggagtcctggagctcgctgttacggtttgtcacgatgtccacagcagaagaggccacaaaatgcattaaccaccagcacaagaaccaca

SEQ ID NO: 605296 - DNA, 207 bp, Homo sapiens
gccggtcccaggtcagctgcatttcgtcagacagatccggacaggcctcaatcttggtccattgcaggatgtcatgcgcccgccagcggcgctcaccaccaacaagctcgaagcgaccattggctttggggcggacgacgataggattgttgagaccgccgttggcctggatcgcgtcagccagaaggagtctgaaggcagtctgga

SEQ ID NO: 605297 - DNA, 271 bp, Homo sapiens
gtcgactctagagcgataccccgtacgtctgtaaacatatgatgtccatattaacaagagagaccagttaaaagatagtttcatacttttagaaagcctaatttctatactgtaatatcctcccatccctactatttaaaaaggctgatagttcacaaaagctatttatgttctttccctagaaacacacagagaactttggtcaaagccacatttttaaaaagtcatacacttactgctgcagtaagcacaaacaaatagacactcatca

SEQ ID NO: 605298 - DNA, 245 bp, Homo sapiens
  misc_feature (154)..(154): n is a, c, g, or t
  misc_feature (211)..(211): n is a, c, g, or t
ttgtacttcaagagctctggcatctctttctgcaaaggcaccctgaatggttgctgtcctgttaagcatatgtgaggaggtggagagacagcccaccgcttgtgtacacttgtgaccccgtgttcccattgctgacctgtagtttcctccccangtcatctttcttgttccagaagaggtggggctggactgtctccatctctagtctcanagtttagcgtgcactgagtctgcaagcttcttac

SEQ ID NO: 605299 - DNA, 1655 bp, Homo sapiens
  misc_feature (205)..(205): n is a, c, g, or t
  misc_feature (448)..(448): n is a, c, g, or t
gcgctggtagaacaggacccgtacgccatgtgccgtgttatcccgtgggatataggcacatggtgcgcctgggtctggtgtccggcgcgcaccgatgactcactcgtttcatggcgctgcggcgcctgcgcccccagctggattatccgttcgatactgtcacgggttatcctctccgtcgctctcgttctgagggagcattcanatccgactgatcccgtgggccgtgtcgctggggcctgcttgacccgagaggcctgagtctctgtgccagagtgccactccgtgtccttgggctgttgagagaagagtcgcgtacgagcatgcttgcttggcattctgtcccgtgctgtaggcgcctgatttcaacgactggggcgccacggttctgatggttgagttgccgggtgtgaatgaaaagaggccgcgcaagccattcagatcattncagaggcgaactagtggacatcccactgtgtttggttagttgaacccacatgggccttgcataggaggtacccaagtctcggtgattgtgcttgctcatgtgaacgggacgcaaggacacttgggcacaggaacccgctgtaggtgcgagataggccattagggagacccccctttggcggcggacctatgcagaagacggggcataatcttgaaattttgcgcctaacgcaggttggtttattccttaacgccacaagagacaatacgccacctttggccattgtatccccgaaagcggaaaaccgttaccccacagtgttgacgtacgaaaaaaggccattgaggccacaccttttcttcggtggtagtcttccccctatcgcggacacaggcgcggatgtcaatttccttacctccttacttataggcgccaaaaacccacgggtacccgtctctcggatagcggattctggggaggcctagttggggcgatttcggcgcctgtggggcaggggctgtctggaggcctccgagggccccctttctgtgtgttccattacacagagcgcgaaatatcggttgttggaataaagacgccgcttctaggtgccccagggcgagcgttgttggacctccggaccaaaagtaccttatgtagatgcgggccatcagagattggaacgtcgcaattcggtagttctttgtgcagccaggcagttaggatttacccgttgggaggtgcagttttgggggcccggctgtgggatggtcccccggttgtgtcggggcgttgcccgtttcccatttctacgggccgctgcccgggttggtgacccttgggcagagccacaccgcggacaagtttcgtgctaggagggccacattcgcggggaccacgtttcctctggcacagggaggatattcgccccctctataggtttaggaccgccggagaagaagggttggccgttcattccaagttggccaggtcaccacgacagcgtatggtttggtgaactagttactccccgtgtggaccaagagccaattgaaactctggttctaaagaacagaagaaaagacgcataatataagtctgctagcagagagcggccctcaaagctaaacagggttcgcgtgagacatatctgcccccagtataaccacatttataagagcgcgttgcacagtccacttctcaatta

SEQ ID NO: 605300 - DNA, 329 bp, Homo sapiens
tttttaggcccccttttttttttttcctgttccccaaaaaaaagggggaaattccggggaaggggtttcttatcccggtccgggagggatttcctttcccccaaatttaattttgtttttcccgcaaaaaggtggaaccagttggggacccctccctttgtaattggggacccccccccctttaggggtcccccgggggtttttcaggggaaatttaggggaaaacttttttcttttttccccccttggggggggcggttttttttaaaagttgggggggggccctttttacccctttttaatgttttttttttggggggggataccca

SEQ ID NO: 605301 - DNA, 301 bp, Homo sapiens
  misc_feature (21)..(21): n is a, c, g, or t
  misc_feature (130)..(130): n is a, c, g, or t
  misc_feature (180)..(180): n is a, c, g, or t
  misc_feature (182)..(182): n is a, c, g, or t
gcacgaggacagagtcagcgnagttgtgggggccggggcgccatgggagccactggcacagccgagcagccgcgaggacccagcgggcgaagaggggcggcttggagctgggggatgcgggcgcacgggngcagctggttcttacgaacccttggaacataatgataaagcaccggcagngncgagaggggccgccgctcacagatgacaacaagtttcacagatcctgccatctccatggatctcctccgagctgtcctgcagcccagcatcaacgaggagatccagactgtcttcaaca

SEQ ID NO: 605302 - DNA, 145 bp, Homo sapiens
gcagtacggagtgtgagagtcccttttgtgtggacgtctgggataccagagtcacgtcgtcacgtggttctatgttctgtaaccgggtcttgggttcacggggtgggccgcccacgtgggtaccccagtgatttttgggcactgc

SEQ ID NO: 605303 - DNA, 419 bp, Homo sapiens
  misc_feature (19)..(19): n is a, c, g, or t
  misc_feature (87)..(87): n is a, c, g, or t
  misc_feature (91)..(91): n is a, c, g, or t
  misc_feature (115)..(115): n is a, c, g, or t
tcccccgggggggggcccnttttttcccccgggaggtgtgtcccttttttccccgaaatgtttttgccgtggctgggggagggaaanaatnctaacatcgttgggtgggaagggntggtctgtttccttggggcaccgggggaagtttggtgttttgggtttggggttttgttgggtttaagggatggaaggtttttcccgtccaagggttccctgttaattcccgggggcgggttggctttattgttttgtggttggattgggtcccttggcgtgggtaaaatttgtgcccctgggggggggtttggcgtggaccttttttagagggggtggccccagggttttaggatttccccccgtgttgtgttggggatttccccccccgtttttttggtagtgcaagccccaaaagttttgta

SEQ ID NO: 605304 - DNA, 304 bp, Homo sapiens
  misc_feature (5)..(5): n is a, c, g, or t
  misc_feature (13)..(13): n is a, c, g, or t
  misc_feature (30)..(30): n is a, c, g, or t
  misc_feature (299)..(299): n is a, c, g, or t
agagnaaagtaancccatgacctgaagttncctagttgtgggagaacatcgatgccctctgactgaggacatgagctggtttgtggggaagggtaaggaattcagttttagttatgttgaatggacccatttgccctaaataaatgtgtggaaatgtccactaggctattgagaatttagatctggaactccagaaggattgattatgaagatgtaggtttaggacattagctgcataatgatagtagttaaatccttattcgtatcatctaaaaaacccagagagagagataaaaatnatgag

SEQ ID NO: 605305 - DNA, 309 bp, Homo sapiens
acagaggtgcccggaggatacgtgagggaagggatagcctcattgataaatggtgctggggaaatgggacacccatatgcagaaaaatgaaactgggccgctatctctcaccatatacgaaaatcacatcaaaatggagtaaagacttaaacctaagacttcagactatgaaagtgctagaagaaaacattggggagactctccaggacattgcactgggtaatgatttcttgagtaatacttcgtaaacacaggcaaccaaagctaaaatggacaagtgggatcacattgagttaaaaagctgcacag

SEQ ID NO: 605306 - DNA, 708 bp, Homo sapiens
caacgcagtgaagcccaggagacatcattgtcaggctgctgggttcctaagtgtgcaaggatgcggaacagatctggcctcattctctgtgatcttgccctcctgatgggtttcctgatggtctgcctgggggccttctatcattatcctgggtgctccatattcgactgtcaggggagcctgattgtggcctattagtttctgcctctggggttattgatccttcgtgagtggaattttcatggaacaactatcggcaagtgactgaaagcaaaggagatgttgaggcacatgctccgataacgaccttgctcatggggcccatggccgtggtcacgagtagacatggccatgacttttaccctccagcttatgaagagagccttgagtgtggaaaatgcagtagctgttcttgagagagagaggcctctgggcattcctccagctctatatacatagacgggcctggaagtccaggatggaaagtgactcccagccagaggccctaccatcttatagagagtacatagccggcctggatggtgacatgcaatctcagaggacgcccatagtgcgaggccaaggagtgctgaggcatagaaagctctcacagcactcatgatgccaccaactgatggggagcagctagtgataataaaggcacacgagggacctgtgggatggaaaatgccagaccaggtgacccga

SEQ ID NO: 605307 - DNA, 764 bp, Homo sapiens
ggtgtgactctgggttgtcctctgtgagatgcccaaccaggtctttgtatggggccccccccgcatgggccctgtcttttgttgtggcattccccccgggggcgaccccaatgactttgtctgggtcattgttcttgtggtgttgtctttgtcattgccttcggttcctctttgtggggtgaacctgccagggtggctgccccccttctggttttcgcacccacccgcgctgcgcggagggtcgatgagacgggtgcccgcgatgtctattgcgagtttgtctttgcgccgcacccgtttcgtattgtctccccccaccggcgtttccctaccgaccatctttcctcgcgtcgacgctcaccctcccccgagtagagttcgtggggcccacaccactgcgtttggttcctctcaccacgcggggcgcctccgcccacctttgtgtctcactcttttgtcttagagagagagagagcgggtgtgtctcccgcacggtctgtctcccccgggtggtgtttctctccacaccatcccggggccagcgtgtccaccctctgtgtcaccagcacgcctggagctagtcgggggctaccacatatgtgcgcccccaccgccccccgccctgacggaggggcccacctactgttgcctctctgccgcctccgcacttgctcttttcgtccccccctctccgcccctttccgccccttttaaacacccccttttttttcttttttttttttcccctcaactttttcccccca

SEQ ID NO: 605308 - DNA, 153 bp, Homo sapiens
ggtgtgaaacaccccgccggcttgcttgtgggattttcatcgcatcaggtacaagaaggtacaaccagacccagagtggctcccagaggcagaagggtgatgtacgatcggtgctggccagcactgggtcagcactggggagggcaggacacc

SEQ ID NO: 605309 - DNA, 269 bp, Homo sapiens
atcgccggtgccaccgcagtccctctcgtccagcttatccctgcttcttgagagcacatggggggcacgtgtccacaccgtcctgaattctccagcatgcccagctcattctggacttttccaagagatcctgagaggtgcccagaaatgtacgcatgagcccctgaactcttggtcacactcaggaatatgacgacaagccgggtccgttcccaggtgtgtctatgtggccgtgaaccggtacgacagcaacgaggtgcagataccca

SEQ ID NO: 605310 - DNA, 568 bp, Homo sapiens
cccgataagcacttatgtggggtgtaggggacaagactgagaccaagacgtcgactcagataaatcagagcagtactcgacaggtgcactggagagaagcaagggcaccgcagttgtggtaggagtaggagaagagctgacttgcaatgaagcaacaggggaccagcaaacgaaataaacgtggtcagccatgagcgggccacgagggaatcacatggcttccaaagccagaaaggaggctctagaaagccacacactggtgatctccagtggtgatacccaatacacaatcagcatgactctctcagacacatagtgtgtgaggcctgtaggcggattcaaatacagaggttgatggccactgcagcttggtgaggtccagctcaatttcaaactgctaggttcaccagcatgctagcaggcttaggactatgctgccatgtgcctcagatactctctggaggctgcagtacgtgtaagcctatggctgctcttccaggctgctgttgtaagtgggatgtgatcgggtgaccatctgtgtagacctgggtatagctcaaatcatggg

SEQ ID NO: 605311 - DNA, 1638 bp, Homo sapiens
gagaggccgcgtcctcagctggtcctagacatgcgtggcgtcggggctgtggcacggtcgggtccgggcttgaatgcaccaaggaaaggccatttgtggggacatagcaagaaggcagctgtctgcaagccaggaggagaaccctcaccagaaacctcacagaaatcggccaacaccctcatctcgggcttccagcttcagagcaacgagaaaacaaatttctgttgtgtcctggttcccatttgtaattggcaccctaatgaaaccgttttctgtagccctggaaatggctgaaaatgaggggagggaaataaagtgctataattcagagcatggagcacaccttcctggttcacctgagctggattcggagaggtaaaatggccattacctcgtctaagctgccacttacagacatctgcttaggaatcaggcactggatcacagccataccctactcattaacacctgggggacctcaggcatgtcactcgaccttctgtgagcctcatctataatatgggaatgatatctcctacttcactgaggtttgtgaggactggagatcgaacatgtacctactgggccctctagaaatggtagacatcatcactgctctttcagacatgcagcaggagggggaaggtgccatttaaagcaataattgactgcagggttgttttttttcttgagacggagtctcgctctgtaactcaggctggagtgcagtggcgcgatctgggctctctgcaaactctgcttcctgggttcacatcattctcctgcctcagcctcccgagtagctgggactacaggcgcccacgaccacgcccggctgatttttttgtatttttttagtagagacggggtttcgccgtgttggccaggatagtctcgatctcctgacctcgtgatctgcctgcctcggcctcccaaagtactgggattgcagacatgagccaccgtgcccagctaatctactgtgttgtgtagagatgcagacatctgcttaggaatcaggcaggcggatcacatgaggtcaggagttcgaaagcagcttggccatcatggtgaaaccccttctctactaaaaatacaaaaaattagctgggcatggtggtgcacgcctgtaatcccggctacttgagagactgaggcaggagaattgcttgaacctgggagtcagaggttgcggtgagccgaggttgtgccattgcactccagcctgggcaacaagagcgagattccatctgaaaaaaaaaaaaaaaaacaccgatctcaaagagggagttgtgagaaccccaacttgaagctggttgctctcaagttccagaggcccggacttgcgactgacgtctggggagttgggggcagcagtcttgggaactgagctgtgagatctgatactatctctgggtctatagtgctggcattgaattggagaacacccagctggtgttcactgcttggtgtgtggcggaaaaaccctcacacatttggtcacagaagcccttttctgtgttggtgattgttgtgctggtgtgagaacagaggaaaaacaccgcttgcagagtttttcctgaaacaatactctttagagcgatagaaataaataccacgacctgcgcattcaaaaaa

SEQ ID NO: 605312 - DNA, 378 bp, Homo sapiens
ctgtgcttgggtgctcatgtggtgcgctgtgccccgattggcgctgctggcaatagtgtgtgatcgtggtgagagtggtcctgctggtcccggcggatcctgtcggccctgttggcgcccgtgtgccccgcgtggaccccaaatgccccctgtggtgacaaggtgtgagaccaggcgacacaggtgcgacagacggcataaatgggtcaccgatggcttctctaggcctccagggtcccccgtggccctccatggctctcctgtgtgaacaaggtccctctaggagcctctggtcctgcatggtccccagaggtccccactggctctgcttggtgctccgtggcaaagatggactcaacgtgtctccactggccccat

SEQ ID NO: 605313 - DNA, 295 bp, Homo sapiens
ggcacgaggttgctgcttctcccaggcaaggctgtggaccatggagtggcagcccagccagcgtcggtctgtgccccttccgccactggggctcaaagccggggtggggtggctgtcagctctggactgggagcccccaacctgctacatccaggagcttcagtgatctgagctcagcgggtagaggtacgggctaggttcaactcaacttgcctgtcctcgtcccatgaccccttttcattgcgcatttagttaagctctcaagactgctgaagcttttcctcgaccctgcacc

SEQ ID NO: 605314 - DNA, 184 bp, Homo sapiens
tgaggaggtggtccgaagtgcggtagcgttgggcagagtggagggggctgcacaggttgtcgtagactgctcccacggtagcagaagctaacacccttcccacactggatacacaattccaaactaaaaaaacctccagattcacatccagaaaatttctccccccaacggtgaccggcgactt

SEQ ID NO: 605315 - DNA, 924 bp, Homo sapiens
  misc_feature (629)..(629): n is a, c, g, or t
tagagccttcgtttgccaagtcgcctccagaccgagacatgaaactcgtcttcctcgtcctgctgttcctcggggccctcggacgtgtgtctggtgcccgtaggagacggcgtgtggcagtgggtgcgcctgtatcccaaaccgaggtcacaaaatgcttccattggcgaagcaatatgagaaaggtgtgtggccctcctgtcagctgcataacgagagatgcccccatccagtgtatccaggccattgcggaaaacagggccgatgctgtgacccttgatggtggtttcatatacgaggcaggcctggccccctacaaatgcgactgtagcggggaagtctacgggaccgaaagacagccacgaactcactattatgccgtgggtgttggtgaagaagggcggcagttttcagctgaacgaacgtgcaaggtcttgaagtcctgcccaaacaggccgtcgcaggacccgctggatggaaatgtccctatagggacacttcgtccattcttgaatggggcgggtccaccgtgagcccatttgaggcagctgtggcccaggttcttctcagcagctgtgttcccggggcaggataaaggacagttcccaaccttgtgttgcctgtgttgngggaaacgcgcaaacaagtgttgctttttcctcccaggaacggacttcagctcatccttggcctcaagtggtttgcaaacgcggtgaacacgcggttaatagacaagccacggttgggaccgtcacaggtgtaaagagatatagtatttcgcgagaacttgagcagtggattaaggcatcgcggggcacacaccgtggggagtagtgaagggacatattccgccgaaggtgacaacaatgtcgggaagagcgagtaggcaaggagcccaaagagaggggtcggagggcacgagcg

SEQ ID NO: 605316 - DNA, 602 bp, Homo sapiens
tgatgatcttagtatctctaaaattgttcagaatttatgttatttaaaatagtcaatcctttaaaaggacacatatgttaacacatatagtgggtgtagtcaaatccatatgagtataaactctttgtaccaatatccacgtgaagctatctgacagttagagggacctaagtttaacataaaaaaaaaaaaaaaataaacttcccaactaacagtgtttctttaaaacatacatgatattatgaaataataccttaagtaaagatatcttaaatgattttatccattcagttagctcagttttgtccaaaggaaaatgcatgtttatgttttgaattctaacaataaattatttttctacatcatttcttgatattattcccaatacaaattaatcaaagcacttcattctgtatatcagatttctggctcatccagatgtaaataaacctcagttctaaatcatgccaatctagtcctcattatttaggaaagccagacaataatctcaccattgtctttagtagtgccacatgctaaaggagaagacacctttataggtccaactcttagaaatctcccaacaatagtacattgttaaa

SEQ ID NO: 605317 - DNA, 3616 bp, Homo sapiens
agcgtgggacaaaagtctatagccagtgcatttgaaaactcccccttgcaccagggctgactgtagctgggggaagacattttactcatttgctctttcctttcatacagtcagctggtccctcttctcaggtgtagatcacctattataattttacctaattttgatactctgataaggaaagtcccaggacttatcagctgggataggcctcacttacaagacagctctgttcagtatttggaagaaagcctgacaggtttcttcggaaaagtggccatccatggaatgaatgaaatgttctctttctattccagggattgcagtggcaaagctaggctaggtcttggaggctggtgtaaggcgatgtgggtgaaggcaggaggctgatggaaagactggggggaagaaaagccgaaatggattcacggtgccttggatgaaggacgagaggggaactgcaagctccttcaactggttctgtccggtgagaagtgatcaagcttgggctgacaagaggctcagggagccctcacgttctttcgcttttttacctgccaatcaaactgctacaagacaacaccctgatctggcatggacatcgcgggtccaagcctgtagccccaaatcggataatctctgcagctgataacaagcaaaagagaagccaggcaacagccatattaaagaagaaaacaatcaactctgagatccaacttagaaataatgtttcattcaagataaggctcgtggcttaggagattgtgacctggcttgcatcattctaagacttctatcgtctgttttcaaaacccaaggaggacctccttttctgtgtgatagttcctcatgctttgccagccactgggtctttaaggaagcttgccaagagttcccggctgggaaggacagttcgagttcatcatagacaatgagctggcaccacagtttaagtgactcaccaacctggttgcccacttcaaaatgtcaagaaccacactatctaattgaaagaactgtgttttagcaaagtgtaattggatcgcctggcaagatcatctcaaactatgtctctgaccttgcctttcagtggctattttgagcacaagaggagaaaggaaatgattcctgaattatatcttgtttttaaaaattaagattaattaatacttggttttatgttcattccattgtaggaacttagtgattattacaaaacagtcaaaataggtcatagcaaaatgaacgtttaagattaggttaaaacattcctctgaaattttagtattcacttttgaagtgtcaattactatatttctgtaatttctcatttttttcttggcttagagtcaagatgaaaaatgatatttgaatcaaagacattgttttgttatatagccactcctttctaaaatgcaaatccaccctcccctcaccaatgctttattctttgtgcgcgcacacacacacacacacacacacacacacacacacacacacagacatacacagaaccagcacccaaatggtagaggaggtccttccaagacttctaggacctggatcatgtaagcagtagatgagaaaatgaagtaagagatatagagtaataacaataaaagtcaatgatttcattttacaaaaaagtcattgtgtagtactcagatatttttaagagcaagtattattatgactaaagtatattatacttctaaattattatgattctcatctaatttcaagccacacataggcgccatttgaaagcattttgtgttacaacctatcaacaaaaatcaactaatagttttataacgtgcataggtttaccccatggggaattaaaatttttatctgcaagtatttctgttgttgtgagactttaggacaagacaacatttggtgttaacatagaagaatattctatggcttttttagctttaaagttcattactctaaaataaagtacacgtggtatttttttcttcctagtgttctcttattatatgtagagtattttcggttgttgtttttaacgtatacattatttttattaagtcatttcataaaagataagatatatactaatagacccttggttttctcctaatttaattatttcaagtcaagcaaaattgggcaattttctttcaggaaaaaaaaaatattgagcatgattttgaggtaaaactgattatttacagcatcttttctctaataggctaacatttatgatggatcttatttcaaagttgattattctcaaagaaaagtggagatattagaatttccgagtaaattgcattgttttaaaaagtactttaatgcattgttcacattgttgccagctattgaccaaaaaagagaagaagaaaaaagaaataaaaaaagcagtatctgctccaaacgtcaagttttgcagtttgaaagacttgtacattataattgtttttttctttttttggaaagcagtagtaattaataccaaaggcatagacaatttagggccataacctcccttcccccctctccacctttttttttttttttttttttttttaactttaaccatgataggcatctctgcaaggtagcttttaacatatttttttcctaatttttttccctccattcagtaagaaggataagcttttagagtacccagtcaccgtggtaactgccaaaaaaattctcctgaagtttgaagaggtcagctagcagggtcaacaaccctggcctctctctgagctcggtctagcatgccccagcctgcggttggagtgtcaggccagatctgaccctgggaggtggaccattctggctctgatataaatttttcgagtcagttcatggcctggactctccaggtggcctccaaaatcgattttgaccccctgaccctgtctcacggaggcatagcatccaccctaagtaaggatttagccaggaatgacagctttccactgagtgttattggggacagtataaacagtttggaaagcaagtaaggaggtgtgagggctagcaatcattaaaagcacattaaaaaacaatttttaaaaatctttattagagaaagttgtaaatgcatatctgttacagaattcctgtgatttgtagagttttctagtcagttttgaatataaataggtcacatatctttatctttttgcatactttgttacaaatatgcaaataagataggcatacttgctacaaaataggtacagcaggaatgtaatatgttcagaaaaggcaaactggttattaaaacacattaacaggtaaggagtttctaatattttaaatactaaaattttacatgtgtattttgaagtttttaaaatggaaaaataaagaacctttaaaaaacccaacagtgtggaataaagataaacttgttgcactcaaggtacatttctactttgtaaagcaagaagccaatacactcagttggataaaaatgagagaaaaattgtaaatatagagagttacagcttatagagctgaagaggaataaaacaaaaaaaagtgtctctgaataactttatgtattttcaacagtttaagatatcagaaacttggaaaataaatatgatatatatataaatcatca

SEQ ID NO: 605318 - DNA, 3383 bp, Homo sapiens
  misc_feature (9)..(10): n is a, c, g, or t
  misc_feature (12)..(12): n is a, c, g, or t
ccctctccnncnctctctctctctctcttttaaaaaatcagccatttggggttttaagccataaacgatttttcttgttgcaggggattgcagtggcaaagctaggctaggtcttggaggctggtgtaaggcgatgtgggtgaaggcaggaggctgatggaaagactggggggaagaaaagccgaaatggattcacggtgccttggatgaaggacgagaggggaactgcaagctccttcaactggttctgtccggtgagaagtgatcaagcttgggctgacaagaggctcagggagccctcacgttctttcgcttttttacctgccaatcaaactgctacaagacaacaccctgatctggcatggacatcgcgggtccaagcctgtagccccaaatcggataatctctgcagctgataacaagcaaaagagaagccaggcaacagccatattaaagaagaaaacaatcaactctgagatccaacttagaaataatgtttcattcaagataaggctcgtggcttaggagattgtgacctggcttgcatcattctaagacttctatcgtctgttttcaaaacccaaggaggacctccttttctgtgtgatagttcctcatgctttgccagccactgggtctttaaggaagcttgccaagagttcccggctgggaaggacagttcgagttcatcatagacaatgagctggcaccacagtttaagtgactcaccaacctggttgcccacttcaaaatgtcaagaaccacactatctaattgaaagaactgtgttttagcaaagtgtaattggatcgcctggcaagatcatctcaaactatgtctctgaccttgcctttcagtggctattttgagcacaagaggagaaaggaaatgattcctgaattatatcttgtttttaaaaattaagattaattaatacttggttttatgttcattccattgtaggaacttagtgattattacaaaacagtcaaaataggtcatagcaaaatgaacgtttaagattaggttaaaacattcctctgaaattttagtattcacttttgaagtgtcaattactatatttctgtaatttctcatttttttcttggcttagagtcaagatgaaaaatgatatttgaatcaaagacattgttttgttatatagccactcctttctaaaatgcaaatccaccctcccctcaccaatgctttattctttgtgcgcgcacacacacacacacacacacacacacacacacacacacacagacatacacagaaccagcacccaaatggtagaggaggtccttccaagacttctaggacctggatcatgtaagcagtagatgagaaaatgaagtaagagatatagagtaataacaataaaagtcaatgatttcattttacaaaaaagtcattgtgtagtactcagatatttttaagagcaagtattattatgactaaagtatattatacttctaaattattatgattctcatctaatttcaagccacacataggcgccatttgaaagcattttgtgttacaacctatcaacaaaaatcaactaatagttttataacgtgcataggtttaccccatggggaattaaaatttttatctgcaagtatttctgttgttgtgagactttaggacaagacaacatttggtgttaacatagaagaatattctatggcttttttagctttaaagttcattactctaaaataaagtacacgtggtatttttttcttcctagtgttctcttattatatgtagagtattttcggttgttgtttttaacgtatacattatttttattaagtcatttcataaaagataagatatatactaatagacccttggttttctcctaatttaattatttcaagtcaagcaaaattgggcaattttctttcaggaaaaaaaaaatattgagcatgattttgaggtaaaactgattatttacagcatcttttctctaataggctaacatttatgatggatcttatttcaaagttgattattctcaaagaaaagtggagatattagaatttccgagtaaattgcattgttttaaaaagtactttaatgcattgttcacattgttgccagctattgaccaaaaaagagaagaagaaaaaagaaataaaaaaagcagtatctgctccaaacgtcaagttttgcagtttgaaagacttgtacattataattgtttttttctttttttggaaagcagtagtaattaataccaaaggcatagacaatttagggccataacctcccttcccccctctccacctttttttttttttttttttttttttaactttaaccatgataggcatctctgcaaggtagcttttaacatatttttttcctaatttttttccctccattcagtaagaaggataagcttttagagtacccagtcaccgtggtaactgccaaaaaaattctcctgaagtttgaagaggtcagctagcagggtcaacaaccctggcctctctctgagctcggtctagcatgccccagcctgcggttggagtgtcaggccagatctgaccctgggaggtggaccattctggctctgatataaatttttcgagtcagttcatggcctggactctccaggtggcctccaaaatcgattttgaccccctgaccctgtctcacggaggcatagcatccaccctaagtaaggatttagccaggaatgacagctttccactgagtgttattggggacagtataaacagtttggaaagcaagtaaggaggtgtgagggctagcaatcattaaaagcacattaaaaaacaatttttaaaaatctttattagagaaagttgtaaatgcatatctgttacagaattcctgtgatttgtagagttttctagtcagttttgaatataaataggtcacatatctttatctttttgcatactttgttacaaatatgcaaataagataggcatacttgctacaaaataggtacagcaggaatgtaatatgttcagaaaaggcaaactggttattaaaacacattaacaggtaaggagtttctaatattttaaatactaaaattttacatgtgtattttgaagtttttaaaatggaaaaataaagaacctttaaaaaacccaacagtgtggaataaagataaacttgttgcactcaaggtacatttctactttgtaaagcaagaagccaatacactcagttggataaaaatgagagaaaaattgtaaatatagagagttacagcttatagagctgaagaggaataaaacaaaaaaaagtgtctctgaataactttatgtattttcaacagtttaagatatcagaaacttggaaaataaatatgatatatatataaatcatca

SEQ ID NO: 605319 - DNA, 441 bp, Homo sapiens
tctgactgctcctggatgcaaagttgatgtgaaaacctgacaggagagatgtaatggagataatgttctgagtttatgctggtgaggtgctggcaaggctggggcttagaaaacagaagtctccagctctctagttccttatctgtggaatgggtatggggatacttgatgggttggtatgagaatactctgattgaattatgaatatacaagtaaattgatttgatgactccttattcagcatcttttagtattgaggctgtggatggcattagatatacagtggtgaataataatagtgctcattttacaaagggcttattatgtaccagagagcgtattaagtgctttccctggcattcatcacttttggattcaagcacagaaaaaacatggaggtaggtaattttaaccctacatctacttaaggtgaggaaacta

SEQ ID NO: 605320 - DNA, 3275 bp, Homo sapiens
  misc_feature (9)..(10): n is a, c, g, or t
  misc_feature (12)..(12): n is a, c, g, or t
ccctctccnncnctctctctctctctcttttaaaaaatcagccatttggggttttaagccataaacgatttttcttgttgcaggggattgcagtggcaaagctaggctaggtcttggaggctggtgtaaggcgatgtgggtgaaggcaggaggctgatggaaagactggggggaagaaaagccgaaatggattcacggtgccttggatgaaggacgagaggggaactgcaagctccttcaactggttctgtccggtgagaagtgatcaagcttgggctgacaagaggctcagggagccctcacgttctttcgcttttttacctgccaatcaaactgctacaagacaacaccctgatctggcatggacatatccaacttagaaataatgtttcattcaagataaggctcgtggcttaggagattgtgacctggcttgcatcattctaagacttctatcgtctgttttcaaaacccaaggaggacctccttttctgtgtgatagttcctcatgctttgccagccactgggtctttaaggaagcttgccaagagttcccggctgggaaggacagttcgagttcatcatagacaatgagctggcaccacagtttaagtgactcaccaacctggttgcccacttcaaaatgtcaagaaccacactatctaattgaaagaactgtgttttagcaaagtgtaattggatcgcctggcaagatcatctcaaactatgtctctgaccttgcctttcagtggctattttgagcacaagaggagaaaggaaatgattcctgaattatatcttgtttttaaaaattaagattaattaatacttggttttatgttcattccattgtaggaacttagtgattattacaaaacagtcaaaataggtcatagcaaaatgaacgtttaagattaggttaaaacattcctctgaaattttagtattcacttttgaagtgtcaattactatatttctgtaatttctcatttttttcttggcttagagtcaagatgaaaaatgatatttgaatcaaagacattgttttgttatatagccactcctttctaaaatgcaaatccaccctcccctcaccaatgctttattctttgtgcgcgcacacacacacacacacacacacacacacacacacacacacagacatacacagaaccagcacccaaatggtagaggaggtccttccaagacttctaggacctggatcatgtaagcagtagatgagaaaatgaagtaagagatatagagtaataacaataaaagtcaatgatttcattttacaaaaaagtcattgtgtagtactcagatatttttaagagcaagtattattatgactaaagtatattatacttctaaattattatgattctcatctaatttcaagccacacataggcgccatttgaaagcattttgtgttacaacctatcaacaaaaatcaactaatagttttataacgtgcataggtttaccccatggggaattaaaatttttatctgcaagtatttctgttgttgtgagactttaggacaagacaacatttggtgttaacatagaagaatattctatggcttttttagctttaaagttcattactctaaaataaagtacacgtggtatttttttcttcctagtgttctcttattatatgtagagtattttcggttgttgtttttaacgtatacattatttttattaagtcatttcataaaagataagatatatactaatagacccttggttttctcctaatttaattatttcaagtcaagcaaaattgggcaattttctttcaggaaaaaaaaaatattgagcatgattttgaggtaaaactgattatttacagcatcttttctctaataggctaacatttatgatggatcttatttcaaagttgattattctcaaagaaaagtggagatattagaatttccgagtaaattgcattgttttaaaaagtactttaatgcattgttcacattgttgccagctattgaccaaaaaagagaagaagaaaaaagaaataaaaaaagcagtatctgctccaaacgtcaagttttgcagtttgaaagacttgtacattataattgtttttttctttttttggaaagcagtagtaattaataccaaaggcatagacaatttagggccataacctcccttcccccctctccacctttttttttttttttttttttttttaactttaaccatgataggcatctctgcaaggtagcttttaacatatttttttcctaatttttttccctccattcagtaagaaggataagcttttagagtacccagtcaccgtggtaactgccaaaaaaattctcctgaagtttgaagaggtcagctagcagggtcaacaaccctggcctctctctgagctcggtctagcatgccccagcctgcggttggagtgtcaggccagatctgaccctgggaggtggaccattctggctctgatataaatttttcgagtcagttcatggcctggactctccaggtggcctccaaaatcgattttgaccccctgaccctgtctcacggaggcatagcatccaccctaagtaaggatttagccaggaatgacagctttccactgagtgttattggggacagtataaacagtttggaaagcaagtaaggaggtgtgagggctagcaatcattaaaagcacattaaaaaacaatttttaaaaatctttattagagaaagttgtaaatgcatatctgttacagaattcctgtgatttgtagagttttctagtcagttttgaatataaataggtcacatatctttatctttttgcatactttgttacaaatatgcaaataagataggcatacttgctacaaaataggtacagcaggaatgtaatatgttcagaaaaggcaaactggttattaaaacacattaacaggtaaggagtttctaatattttaaatactaaaattttacatgtgtattttgaagtttttaaaatggaaaaataaagaacctttaaaaaacccaacagtgtggaataaagataaacttgttgcactcaaggtacatttctactttgtaaagcaagaagccaatacactcagttggataaaaatgagagaaaaattgtaaatatagagagttacagcttatagagctgaagaggaataaaacaaaaaaaagtgtctctgaataactttatgtattttcaacagtttaagatatcagaaacttggaaaataaatatgatatatatataaatcatca

SEQ ID NO: 605321 - DNA, 180 bp, Homo sapiens
gagcgtctcaggacgtcagagagctcggtggctgttccagcagatgtctcagatgagctgctgtcgtctcacatagtgctgtgagcacatgacaggtagctcaggtgaggtcgggatcccggtgtggcaagctcttggcaacgtgcgcttaggagcagtcctttctgtacatctccaaga

SEQ ID NO: 605322 - DNA, 3221 bp, Homo sapiens
  misc_feature (9)..(10): n is a, c, g, or t
  misc_feature (12)..(12): n is a, c, g, or t
ccctctccnncnctctctctctctctcttttaaaaaatcagccatttggggttttaagccataaacgatttttcttgttgcaggggattgcagtggcaaagctaggctaggtcttggaggctggtgtaaggcgatgtgggtgaaggcaggaggctgatggaaagactggggggaagaaaagccgaaatggattcacggtgccttggatgaaggacgagaggggaactgcaagctccttcaactggttctgtccggtgagaagtgatcaagcttgggctgacaagaggctcagggagccctcacgttctttcgcttttttacctgccaatcaaactgctacaagacaacaccctgatctggcatggacatatccaacttagaaataatgtttcattcaagataaggctcgtggcttaggagattgtgacctggcttgcatcattctaagacttctatcgtctgttttcaaaacccaaggaggacctccttttctgtgtgatagttcctcatgctttgccagccactgggtctttaaggaagcttgccaagagttcccggctgggaaggacagttcgagttcatcatagacaatgagctggcaccacagtttaagtgactcaccaacctggttgcccacttcaattggatcgcctggcaagatcatctcaaactatgtctctgaccttgcctttcagtggctattttgagcacaagaggagaaaggaaatgattcctgaattatatcttgtttttaaaaattaagattaattaatacttggttttatgttcattccattgtaggaacttagtgattattacaaaacagtcaaaataggtcatagcaaaatgaacgtttaagattaggttaaaacattcctctgaaattttagtattcacttttgaagtgtcaattactatatttctgtaatttctcatttttttcttggcttagagtcaagatgaaaaatgatatttgaatcaaagacattgttttgttatatagccactcctttctaaaatgcaaatccaccctcccctcaccaatgctttattctttgtgcgcgcacacacacacacacacacacacacacacacacacacacacagacatacacagaaccagcacccaaatggtagaggaggtccttccaagacttctaggacctggatcatgtaagcagtagatgagaaaatgaagtaagagatatagagtaataacaataaaagtcaatgatttcattttacaaaaaagtcattgtgtagtactcagatatttttaagagcaagtattattatgactaaagtatattatacttctaaattattatgattctcatctaatttcaagccacacataggcgccatttgaaagcattttgtgttacaacctatcaacaaaaatcaactaatagttttataacgtgcataggtttaccccatggggaattaaaatttttatctgcaagtatttctgttgttgtgagactttaggacaagacaacatttggtgttaacatagaagaatattctatggcttttttagctttaaagttcattactctaaaataaagtacacgtggtatttttttcttcctagtgttctcttattatatgtagagtattttcggttgttgtttttaacgtatacattatttttattaagtcatttcataaaagataagatatatactaatagacccttggttttctcctaatttaattatttcaagtcaagcaaaattgggcaattttctttcaggaaaaaaaaaatattgagcatgattttgaggtaaaactgattatttacagcatcttttctctaataggctaacatttatgatggatcttatttcaaagttgattattctcaaagaaaagtggagatattagaatttccgagtaaattgcattgttttaaaaagtactttaatgcattgttcacattgttgccagctattgaccaaaaaagagaagaagaaaaaagaaataaaaaaagcagtatctgctccaaacgtcaagttttgcagtttgaaagacttgtacattataattgtttttttctttttttggaaagcagtagtaattaataccaaaggcatagacaatttagggccataacctcccttcccccctctccacctttttttttttttttttttttttttaactttaaccatgataggcatctctgcaaggtagcttttaacatatttttttcctaatttttttccctccattcagtaagaaggataagcttttagagtacccagtcaccgtggtaactgccaaaaaaattctcctgaagtttgaagaggtcagctagcagggtcaacaaccctggcctctctctgagctcggtctagcatgccccagcctgcggttggagtgtcaggccagatctgaccctgggaggtggaccattctggctctgatataaatttttcgagtcagttcatggcctggactctccaggtggcctccaaaatcgattttgaccccctgaccctgtctcacggaggcatagcatccaccctaagtaaggatttagccaggaatgacagctttccactgagtgttattggggacagtataaacagtttggaaagcaagtaaggaggtgtgagggctagcaatcattaaaagcacattaaaaaacaatttttaaaaatctttattagagaaagttgtaaatgcatatctgttacagaattcctgtgatttgtagagttttctagtcagttttgaatataaataggtcacatatctttatctttttgcatactttgttacaaatatgcaaataagataggcatacttgctacaaaataggtacagcaggaatgtaatatgttcagaaaaggcaaactggttattaaaacacattaacaggtaaggagtttctaatattttaaatactaaaattttacatgtgtattttgaagtttttaaaatggaaaaataaagaacctttaaaaaacccaacagtgtggaataaagataaacttgttgcactcaaggtacatttctactttgtaaagcaagaagccaatacactcagttggataaaaatgagagaaaaattgtaaatatagagagttacagcttatagagctgaagaggaataaaacaaaaaaaagtgtctctgaataactttatgtattttcaacagtttaagatatcagaaacttggaaaataaatatgatatatatataaatcatca

SEQ ID NO: 605323 - DNA, 271 bp, Homo sapiens
ttagactgtaaaattcttggagacagggagtatatctgtcctgtttaccattgtatcttccatgtttaacaaatgcccagcacatagtgctttccacacatctttgttgagtggaaaagctaccttagcctagtttaggactccctcttagataagcagctctttccattttcaattttttatttaccatgttcctactctaccccatccaaacatgacctcaaagagaatctgggctaggaaagtaatctgaatgacaatataaccctgg

SEQ ID NO: 605324 - DNA, 3150 bp, Homo sapiens
gaccctggcttggggcagccggataatctgttacctagtcagggacttttctactttatttactacttgattcgctcgtcttcccccacccacgggaccaggaaccaacaatcgggcacttttaagagcacgggttgcttcccacaatttcaagagcttgtgtcaacttgctacaaacttgtggagaagttggaatccggcagcgtcttccacccttgagtaaagtacccgctgcagccactaaatccaacttagaaataatgtttcattcaagataaggctcgtggcttaggagattgtgacctggcttgcatcattctaagacttctatcgtctgttttcaaaacccaaggaggacctccttttctgtgtgatagttcctcatgctttgccagccactgggtctttaaggaagcttgccaagagttcccggctgggaaggacagttcgagttcatcatagacaatgagctggcaccacagtttaagtgactcaccaacctggttgcccacttcaaaatgtcaagaaccacactatctaattgaaagaactgtgttttagcaaagtgtaattggatcgcctggcaagatcatctcaaactatgtctctgaccttgcctttcagtggctattttgagcacaagaggagaaaggaaatgattcctgaattatatcttgtttttaaaaattaagattaattaatacttggttttatgttcattccattgtaggaacttagtgattattacaaaacagtcaaaataggtcatagcaaaatgaacgtttaagattaggttaaaacattcctctgaaattttagtattcacttttgaagtgtcaattactatatttctgtaatttctcatttttttcttggcttagagtcaagatgaaaaatgatatttgaatcaaagacattgttttgttatatagccactcctttctaaaatgcaaatccaccctcccctcaccaatgctttattctttgtgcgcgcacacacacacacacacacacacacacacacacacacacacagacatacacagaaccagcacccaaatggtagaggaggtccttccaagacttctaggacctggatcatgtaagcagtagatgagaaaatgaagtaagagatatagagtaataacaataaaagtcaatgatttcattttacaaaaaagtcattgtgtagtactcagatatttttaagagcaagtattattatgactaaagtatattatacttctaaattattatgattctcatctaatttcaagccacacataggcgccatttgaaagcattttgtgttacaacctatcaacaaaaatcaactaatagttttataacgtgcataggtttaccccatggggaattaaaatttttatctgcaagtatttctgttgttgtgagactttaggacaagacaacatttggtgttaacatagaagaatattctatggcttttttagctttaaagttcattactctaaaataaagtacacgtggtatttttttcttcctagtgttctcttattatatgtagagtattttcggttgttgtttttaacgtatacattatttttattaagtcatttcataaaagataagatatatactaatagacccttggttttctcctaatttaattatttcaagtcaagcaaaattgggcaattttctttcaggaaaaaaaaaatattgagcatgattttgaggtaaaactgattatttacagcatcttttctctaataggctaacatttatgatggatcttatttcaaagttgattattctcaaagaaaagtggagatattagaatttccgagtaaattgcattgttttaaaaagtactttaatgcattgttcacattgttgccagctattgaccaaaaaagagaagaagaaaaaagaaataaaaaaagcagtatctgctccaaacgtcaagttttgcagtttgaaagacttgtacattataattgtttttttctttttttggaaagcagtagtaattaataccaaaggcatagacaatttagggccataacctcccttcccccctctccacctttttttttttttttttttttttttaactttaaccatgataggcatctctgcaaggtagcttttaacatatttttttcctaatttttttccctccattcagtaagaaggataagcttttagagtacccagtcaccgtggtaactgccaaaaaaattctcctgaagtttgaagaggtcagctagcagggtcaacaaccctggcctctctctgagctcggtctagcatgccccagcctgcggttggagtgtcaggccagatctgaccctgggaggtggaccattctggctctgatataaatttttcgagtcagttcatggcctggactctccaggtggcctccaaaatcgattttgaccccctgaccctgtctcacggaggcatagcatccaccctaagtaaggatttagccaggaatgacagctttccactgagtgttattggggacagtataaacagtttggaaagcaagtaaggaggtgtgagggctagcaatcattaaaagcacattaaaaaacaatttttaaaaatctttattagagaaagttgtaaatgcatatctgttacagaattcctgtgatttgtagagttttctagtcagttttgaatataaataggtcacatatctttatctttttgcatactttgttacaaatatgcaaataagataggcatacttgctacaaaataggtacagcaggaatgtaatatgttcagaaaaggcaaactggttattaaaacacattaacaggtaaggagtttctaatattttaaatactaaaattttacatgtgtattttgaagtttttaaaatggaaaaataaagaacctttaaaaaacccaacagtgtggaataaagataaacttgttgcactcaaggtacatttctactttgtaaagcaagaagccaatacactcagttggataaaaatgagagaaaaattgtaaatatagagagttacagcttatagagctgaagaggaataaaacaaaaaaaagtgtctctgaataactttatgtattttcaacagtttaagatatcagaaacttggaaaataaatatgatatatatataaatcatca

SEQ ID NO: 605325 - DNA, 117 bp, Homo sapiens
aggttctaacaaagcaagggaaaacagtaataatcggaaaaagaatgctagtaaacaagcacgactgaaacatggataagcccctggttttagtaacaggaaactgacaggacaaaa

SEQ ID NO: 605326 - DNA, 3329 bp, Homo sapiens
  misc_feature (9)..(10): n is a, c, g, or t
  misc_feature (12)..(12): n is a, c, g, or t
ccctctccnncnctctctctctctctcttttaaaaaatcagccatttggggttttaagccataaacgatttttcttgttgcaggggattgcagtggcaaagctaggctaggtcttggaggctggtgtaaggcgatgtgggtgaaggcaggaggctgatggaaagactggggggaagaaaagccgaaatggattcacggtgccttggatgaaggacgagaggggaactgcaagctccttcaactggttctgtccggtgagaagtgatcaagcttgggctgacaagaggctcagggagccctcacgttctttcgcttttttacctgccaatcaaactgctacaagacaacaccctgatctggcatggacatcgcgggtccaagcctgtagccccaaatcggataatctctgcagctgataacaagcaaaagagaagccaggcaacagccatattaaagaagaaaacaatcaactctgagatccaacttagaaataatgtttcattcaagataaggctcgtggcttaggagattgtgacctggcttgcatcattctaagacttctatcgtctgttttccactgggtctttaaggaagcttgccaagagttcccggctgggaaggacagttcgagttcatcatagacaatgagctggcaccacagtttaagtgactcaccaacctggttgcccacttcaaaatgtcaagaaccacactatctaattgaaagaactgtgttttagcaaagtgtaattggatcgcctggcaagatcatctcaaactatgtctctgaccttgcctttcagtggctattttgagcacaagaggagaaaggaaatgattcctgaattatatcttgtttttaaaaattaagattaattaatacttggttttatgttcattccattgtaggaacttagtgattattacaaaacagtcaaaataggtcatagcaaaatgaacgtttaagattaggttaaaacattcctctgaaattttagtattcacttttgaagtgtcaattactatatttctgtaatttctcatttttttcttggcttagagtcaagatgaaaaatgatatttgaatcaaagacattgttttgttatatagccactcctttctaaaatgcaaatccaccctcccctcaccaatgctttattctttgtgcgcgcacacacacacacacacacacacacacacacacacacacacagacatacacagaaccagcacccaaatggtagaggaggtccttccaagacttctaggacctggatcatgtaagcagtagatgagaaaatgaagtaagagatatagagtaataacaataaaagtcaatgatttcattttacaaaaaagtcattgtgtagtactcagatatttttaagagcaagtattattatgactaaagtatattatacttctaaattattatgattctcatctaatttcaagccacacataggcgccatttgaaagcattttgtgttacaacctatcaacaaaaatcaactaatagttttataacgtgcataggtttaccccatggggaattaaaatttttatctgcaagtatttctgttgttgtgagactttaggacaagacaacatttggtgttaacatagaagaatattctatggcttttttagctttaaagttcattactctaaaataaagtacacgtggtatttttttcttcctagtgttctcttattatatgtagagtattttcggttgttgtttttaacgtatacattatttttattaagtcatttcataaaagataagatatatactaatagacccttggttttctcctaatttaattatttcaagtcaagcaaaattgggcaattttctttcaggaaaaaaaaaatattgagcatgattttgaggtaaaactgattatttacagcatcttttctctaataggctaacatttatgatggatcttatttcaaagttgattattctcaaagaaaagtggagatattagaatttccgagtaaattgcattgttttaaaaagtactttaatgcattgttcacattgttgccagctattgaccaaaaaagagaagaagaaaaaagaaataaaaaaagcagtatctgctccaaacgtcaagttttgcagtttgaaagacttgtacattataattgtttttttctttttttggaaagcagtagtaattaataccaaaggcatagacaatttagggccataacctcccttcccccctctccacctttttttttttttttttttttttttaactttaaccatgataggcatctctgcaaggtagcttttaacatatttttttcctaatttttttccctccattcagtaagaaggataagcttttagagtacccagtcaccgtggtaactgccaaaaaaattctcctgaagtttgaagaggtcagctagcagggtcaacaaccctggcctctctctgagctcggtctagcatgccccagcctgcggttggagtgtcaggccagatctgaccctgggaggtggaccattctggctctgatataaatttttcgagtcagttcatggcctggactctccaggtggcctccaaaatcgattttgaccccctgaccctgtctcacggaggcatagcatccaccctaagtaaggatttagccaggaatgacagctttccactgagtgttattggggacagtataaacagtttggaaagcaagtaaggaggtgtgagggctagcaatcattaaaagcacattaaaaaacaatttttaaaaatctttattagagaaagttgtaaatgcatatctgttacagaattcctgtgatttgtagagttttctagtcagttttgaatataaataggtcacatatctttatctttttgcatactttgttacaaatatgcaaataagataggcatacttgctacaaaataggtacagcaggaatgtaatatgttcagaaaaggcaaactggttattaaaacacattaacaggtaaggagtttctaatattttaaatactaaaattttacatgtgtattttgaagtttttaaaatggaaaaataaagaacctttaaaaaacccaacagtgtggaataaagataaacttgttgcactcaaggtacatttctactttgtaaagcaagaagccaatacactcagttggataaaaatgagagaaaaattgtaaatatagagagttacagcttatagagctgaagaggaataaaacaaaaaaaagtgtctctgaataactttatgtattttcaacagtttaagatatcagaaacttggaaaataaatatgatatatatataaatcatca

SEQ ID NO: 605327 - DNA, 1288 bp, Homo sapiens
  misc_feature (9)..(10): n is a, c, g, or t
  misc_feature (12)..(12): n is a, c, g, or t
ccctctccnncnctctctctctctctcttttaaaaaatcagccatttggggttttaagccataaacgatttttcttgttgcaggggattgcagtggcaaagctaggctaggtcttggaggctggtgtaaggcgatgtgggtgaaggcaggaggctgatggaaagactggggggaagaaaagccgaaatggattcacggtgccttggatgaaggacgagaggggaactgcaagctccttcaactggttctgtccggtgagaagtgatcaagcttgggctgacaagaggctcagggagccctcacgttctttcgcttttttacctgccaatcaaactgctacaagacaacaccctgatctggcatggacatcgcgggtccaagcctgtagccccaaatcggataatctctgcagctgataacaagcaaaagagaagccaggcaacagccatattaaagaagaaaacaatcaactctgagatccaacttagaaataatgtttcattcaagataaggctcgtggcttaggagattgtgacctggcttgcatcattctaagacttctatcgtctgttttcaaaacccaaggaggacctccttttctgtgtgatagttcctcatgctttgccagccactgggtctttaaggaagcttgccaagagttcccggctgggaaggacagttcgagttcatcatagacaatgagctggcaccacagtttaagtgactcaccaacctggttgcccacttcaaaatgtcaagaaccacactatctaattgaaagaactgtgttttagcaaagtgtaattggatcgcctggcaagatcatctcaaactatgtctctgaccttgcctttcagtggctattttgagcacaagaggagaaaggaaatgattcctgaattatatcttgtttttaaaaattaagattaattaatacttggttttatgttcattccattgtaggaacttagtgattattacaaaacagtcaaaataggtcatagcaaaatgaacgtttaagattaggttaaaacattcctctgaaattttagtattcacttttgaagtgtcaattactatatttctgtaatttctcatttttttcttggcttagagtcaagatgaaaaatgatatttgaatcaaagacattgttttgttatatagccactcctttctaaaatgcaaatccaccctcccctcaccaatgctttattctttgtgtgtgttttctcctagacccgtgacctgagatgtgtgatttttagtcattaaatggaagtgtctgcc

SEQ ID NO: 605328 - DNA, 457 bp, Homo sapiens
  misc_feature (16)..(16): n is a, c, g, or t
  misc_feature (149)..(149): n is a, c, g, or t
  misc_feature (159)..(161): n is a, c, g, or t
  misc_feature (209)..(209): n is a, c, g, or t
  misc_feature (226)..(226): n is a, c, g, or t
  misc_feature (228)..(228): n is a, c, g, or t
  misc_feature (263)..(263): n is a, c, g, or t
  misc_feature (276)..(276): n is a, c, g, or t
  misc_feature (286)..(286): n is a, c, g, or t
  misc_feature (362)..(364): n is a, c, g, or t
  misc_feature (367)..(368): n is a, c, g, or t
  misc_feature (377)..(377): n is a, c, g, or t
  misc_feature (451)..(451): n is a, c, g, or t
ttttcttctatttttntttaatgtatattaatacatattgcatttatttattttaatgacatttatttaagttcaattgtacaaaacctaatttgttgtcaaaagtatcaagcaataaattttaatatattgtacagggtataatcgancatgcaaaannnaaaaccccatgtaaagacagcatgataagctcactggaaattttttanttaaataagcttaaaangncattggactaaatgctattatatggaatataaganttccctaatgttnatttagttancaacttttttgtagtagcatacacacacataccacctttatgtactatctctagatgtaaaatagtaaactatatnnnatnnttatatatntgtagaacaaggtggtcatcttgtggtcatttcagatatgttcatgattttattgagtctgcacacagtttttnttttta

SEQ ID NO: 605329 - DNA, 221 bp, Homo sapiens
tgagccggcacctaatggacttcttcgtctaatgctgtaagacctctaatttctagatggtctatacagatacgtgaaatatatatagttagaataccaaacactttatcagtgtgcgaaatactggaagcctgtttgtagaagatacatgtttggattctatatgcatatcaagggttctacaacttgaatgaagggatttcaaagaacagtacgaaaag

SEQ ID NO: 605330 - DNA, 698 bp, Homo sapiens
agcgtgggacaaaagtctatagccagtgcatttgaaaactcccccttgcaccagggctgactgtagctgggggaagacattttactcatttgctctttcctttcatacagtcagctggtccctcttctcaggtgtagatcacctattataattttacctaattttgatactctgataaggaaagtcccaggacttatcagctgggataggcctcacttacaagacagctctgttcagtatttggaagaaagcctgacaggtttcttcggaaaagtggccatccatggaatgaatgaaatgttctctttctattccagggattgcagtggcaaagctaggctaggtcttggaggctggtgtaaggcgatgtgggtgaaggcaggaggctgatggaaagactggggggaagaaaagccgaaatggattcacggtgccttggatgaaggacgagaggggaactgcaagctccttcaactggttctgtccggtgagaagtgatcaagcttgggctgacaagaggctcagggagccctcacgttctttcgcttttttacctgccaatcaaactgctacaagacaacaccctgatctggcatggacatagatctggaaatacaccctgtgtggcagtcatttaacactggtagatttaagtctgaaagcgttaacttttggaattaaattctaatttagattta

SEQ ID NO: 605331 - DNA, 422 bp, Homo sapiens
  misc_feature (113)..(113): n is a, c, g, or t
  misc_feature (120)..(120): n is a, c, g, or t
  misc_feature (126)..(126): n is a, c, g, or t
  misc_feature (132)..(132): n is a, c, g, or t
  misc_feature (135)..(135): n is a, c, g, or t
  misc_feature (151)..(151): n is a, c, g, or t
  misc_feature (155)..(155): n is a, c, g, or t
  misc_feature (164)..(164): n is a, c, g, or t
  misc_feature (174)..(174): n is a, c, g, or t
  misc_feature (177)..(177): n is a, c, g, or t
  misc_feature (194)..(194): n is a, c, g, or t
  misc_feature (292)..(292): n is a, c, g, or t
  misc_feature (303)..(303): n is a, c, g, or t
  misc_feature (321)..(321): n is a, c, g, or t
  misc_feature (328)..(328): n is a, c, g, or t
  misc_feature (341)..(341): n is a, c, g, or t
  misc_feature (347)..(347): n is a, c, g, or t
  misc_feature (373)..(373): n is a, c, g, or t
  misc_feature (396)..(396): n is a, c, g, or t
  misc_feature (411)..(411): n is a, c, g, or t
tgtgccagcagccttgtggtgactgcgacagtgaagtccatggttcgggagccaagggagggccctcccgtgactgtcagtcttattggtgcttataaaactggaggactggncctgccntctccncccacnggngctcctaagtttacgngccntcaaacagngcccccccanaanaaaggagtcagtttttnctttgggccaggtaaaaaaaaacaaaggcccgtccttcctccaaaaggtttgtggttttcccccggcccaaccagggccagatcctccccaacctaancaaaaggaagngcccctttcaacctgtgnggggtgntgggtcccagganttaaangcaggccagccccggcccctagcccncaggcctttttttttatccaaanaaatgttttttaatnagggatgggga

SEQ ID NO: 605332 - DNA, 187 bp, Homo sapiens
tatcctcgtcttaaccgcaggctcggtaggtttgtcgcctctacctataaatcttcccactaatcctctccttatgagcattcccctcttgggtgggcagttaggaaaataatgacttgctcgttgattgtagatattggtctgttaattgtcagttcagagttttaatctgacgcaggcttatgcg

SEQ ID NO: 605333 - DNA, 915 bp, Homo sapiens
  misc_feature (287)..(287): n is a, c, g, or t
gatataggggcggttggctttgttgggtgagctatgtttgtgtccctgtggagtggacgtggttggtgattggcaggatcctggtatccgtgttaactaggtcaaacaactgtccgaggaatctctcgctgtaaaaaacccattaccggacaacgtaccagtcatcgccttgcagtgtggcacggccccagtgacgaccagtcggaaaactgtgaggaggccagtgatccaggtataaaggaaggcgattcctcgccctgaccgagtgaggagagttcgtcattctngacggcaaaggctaggcgtggattagaattggctccgctacatcctcttcattgactacaaccattcgcatgcaagggcaggtggaactccgtgcacctggttccttgcgatctgcaggaggttgggtcctgtcagagtcttcggttgtactgtaactctctgacccggcgaagcaccctggtcaacctgtggagtgctgggatgcctcatgtgaactaggtgattgccgacaattatgttgaacggacccttgagtccaggttattcatgactgggagttccatcctgaagccaatataatagggtgtcaatctgttgcgcagtcaagcgggtgcattgttggccgtgcttctcgtactgtagtgaccaacaatcccagaacgggcgtcgatcccgtgtcagcttggttgcctggcgtctggagtgggtgggcatgcggcgggtactctgtgaatgccccttgaccggtggagagcatctggtcggggacgttggcacccaggtccccccgttgccgtgttgtagcctttctccctctttggcctggatttcccctcgggggtgtggctcaatttgccggtttcggccggagttgtcgggtttccgggtgtatggactggcctcgag

SEQ ID NO: 605334 - DNA, 130 bp, Homo sapiens
ccgcgtaccagttgcggatatgggtacggccgatgttgcctaccaggtgaacagcgcccgtcccaagctacaatggttctccaaacagctttggctcggtgaaggaactgccttcggacccacctggtga

SEQ ID NO: 605335 - DNA, 228 bp, Homo sapiens
  misc_feature (34)..(34): n is a, c, g, or t
ggttgtccctcgctcggccgtttgtcatttctcncttccgttgcttgtacctgttcgttgccggtcttttttgtcggcgctttgttcttattgtttcctcttcgtatcctggtccgtattcgttgtacggcttgtactcacgcgcatctcgtcgtactgatccgctattagtttgtttattataatacagcagtcagtcactgcttacaatgtccctcgaatctctct

SEQ ID NO: 605336 - DNA, 177 bp, Homo sapiens
atgtactctaaggatcccctgtctttgtggacggcggagccggttggagcaatgcttcttgtcacaggctgtactctagatttgggttctcattggcaagcatctgcattcaaaaggcttccttgtgtatgctggctgcttgatgaaggaccaaggccatgatggggtcacggagct

SEQ ID NO: 605337 - DNA, 1342 bp, Homo sapiens
gcactcagcccgagtccccggtcaccgggcggtctgtggccgctctcgggtactccccagtgcttatagtactatcagcgtgcctgaagtgcaacgagtgtaccaggaggaggggctggcggccgtctgacacaccatgccctgtcgcccaaccctcgcctgggccggtgctgtcccatgccgcctgagtgacgacgggtggactcccccgagaagacggtctccccttcctctcgcctgttgcctcccagtgccgagggttccatgctgggggcttgtgcaggctgcaggggcaaaccttcattcgatggttggcggcgagagcatgcctggcctggtctggtagtgtgctggcgaccgcccagttgtaagtgggtgtctgtgtctgtgagccagctgagtgagggtctccctcatgtgcacttaccgcgtctatgtgttgttacatttaggaagcaagataggggagtctggtaggcatagctaaccgggccttcaaagcggagtttcgcccgtttggatttattctttactcgcttttgcgaaggagcccccgagtatcttttgcgacccttcgatggcaacgccccttgaccaagagtcttacggatgcgcgacccctcgatgtggccgcgggtgccaagttatacccgcacttggccatttctttcgcgagatgattaccaagttcaagggcaagggcgtgatcagaactatggtttgaggcgcttgttcaaccccttgaaggccccaacaagcgaggatgccccccttggttgtcagcaacccatagagaaaccccccaatttccaactaggtccccgttgaaaaaaatgcccggccattcgcctttgggagccgcgccttttggagtacgaaccttcagagagaagaatcccaaaggagactcaaagcatataagttgagacggcacggttgggtgttcccccggttctctcgagcaaacggagaaacctaccgcttaggcctttgggcccgttcctttttacaaacccccctgtctcacagtgggggcccacatcttacaatgtggcgaccccatttcgaacagaacccccggttgggttaacgcattttttggtaaccccaagtgtacgcccacattgggtgatgcccttggcgccccatcgttctggccacgcggaaccgacgaggaatttggggggggggcccatttctttgcgcctttgtttggggaatttgttacctttggccctttggcgcaatgcccgggggtttccagcggcccaatggtggtttaaggcgtacacaaccgggttggggggaaatgctcggcctttccgctctgagcctgagtacc

SEQ ID NO: 605338 - DNA, 543 bp, Homo sapiens
actgactggttaccttctgtctttgtcccaaagatttaaactgtgtaccttgtatagctcttctgccccatttgacttctgagatgaaagtatttactaaaattaaaaaaaaaaaaacaaaaaacaaacctttagctcactaacttatgggttctgaagtgatggaaacttcttctaagggatatatttattaagcataaacttactaataattacttccaacaaataaaaacaggaatatcacttgtcacccaggggggtttaatagcatacattggtcactgaagcatatagggatgtactgtgatctttcctgaccgattatgaaagcattatgactggtcacacggtttacctcggctatatcactaacacggtttagaacgacataaactatcacgtggtggttctggcctacaatggtgtattaacaatctatataactaatctgctccatgtcgctttattaaaaaacataacttaccccataacggtcatatacaaaacgagggtgggatgacaatagttagagtgacaactgtg

SEQ ID NO: 605339 - DNA, 928 bp, Homo sapiens
gggacgagaaatggcggggtctccgtgagtaggtggtccttgagctcgcagtgggacaaggagctcgcggtggaagagagagccagggccttggttcttccgccaaggtccctcgagtaaagacttctccgggatgcagcatagagagctctggatagcgggggcgtgtgtgacccggaatatgctaccaacttgttgacaggcgggcgtcgctgcaacaagcatcggggggaccgcttgcgtgcctggagggagaatccgaggagccacgctgtctggcggaagaagtgctgccaaggtggagactttttggaatcaggcgtgttcgcaaatagaagaaggtatctcaagagggatttagatgagggagcgaaatcgcaatggggctagagagatgggttgtgcaaagaattacatgggggctcctgagtggggaattatacttgaggagtctagaaaagttagcttttggaaacggagtcacggtttttggaactggataagatttctcattaggtgagagactacttaggctcggagcaattaaaatttgttaagggcaaaagtaatcgcctaacggaaagaggggaattctcggtggggaaggtgggtggttcgcttcggaatgacattcaaggtatataaagctagagacatcataggaataggttttctggcccctccgttacaagtaaggtgcgtgagcagagtctggagtagattggcccacgaggggcggtgaacacaccaaggtatgtaagaagggaagaaattcagggtggaatggcctagtggaaaggtcccttgtgggcctcgctgttaaactgtgacccaagggcacgcacgggcactattccccccacggttctctcaggggagtggcaagccctggttaataccacccttccagacgggatttcgcgcaaga

SEQ ID NO: 605340 - DNA, 111 bp, Homo sapiens
acaagacagcacgttgcccagacctgaagttctcaggatcacgtgcagcttgtacagtgcagctcactcatgtggcaaaggtgcccttgaggttgtccaggtgagccaggc

SEQ ID NO: 605341 - DNA, 172 bp, Homo sapiens
tgtgcttcagataggctaggtcagtggatcctcatttgtgtcttgtcactgagttatataacagtctggttgaatgtctgtataccagagtatctcatttttatccgtggtgtgtttgactctaaggatctgcccctgaacatctcccgagaaatgctccagcagagcaaaa

SEQ ID NO: 605342 - DNA, 349 bp, Homo sapiens
tccggagtagttctgatgagatccgatggtttagacaggtgtggctcccagcactttgaggaggccaaggtgggcggatcacgaggtcaggagattgagaccatcgtggccaacataggtgcaaagcccgtttatacttaaaaaaaaaaaaaaaaaaagaacttagctgggtatggttatgtgcacctataatcccaggtactcgggaggctgaggcaggagaatcacttgaacccaggaagtgcgaggttgcggtgagctgagattgcaccagtgtactatcaccctggagacagagtgagacaccttctaaaaaaaacacaacgtgttgggcatttccccaccccca

SEQ ID NO: 605343 - DNA, 772 bp, Homo sapiens
  misc_feature (2)..(2): n is a, c, g, or t
  misc_feature (151)..(151): n is a, c, g, or t
  misc_feature (187)..(187): n is a, c, g, or t
  misc_feature (213)..(213): n is a, c, g, or t
  misc_feature (254)..(254): n is a, c, g, or t
  misc_feature (328)..(328): n is a, c, g, or t
  misc_feature (352)..(352): n is a, c, g, or t
  misc_feature (387)..(387): n is a, c, g, or t
  misc_feature (472)..(472): n is a, c, g, or t
  misc_feature (484)..(484): n is a, c, g, or t
  misc_feature (550)..(550): n is a, c, g, or t
  misc_feature (561)..(561): n is a, c, g, or t
  misc_feature (570)..(570): n is a, c, g, or t
  misc_feature (635)..(635): n is a, c, g, or t
  misc_feature (651)..(651): n is a, c, g, or t
  misc_feature (684)..(684): n is a, c, g, or t
  misc_feature (691)..(691): n is a, c, g, or t
  misc_feature (706)..(706): n is a, c, g, or t
  misc_feature (739)..(739): n is a, c, g, or t
tnggaaaagaactgaaggcataattctctacaggacatttacagttgttttctatatatattattaggtagcaggaaagttttttagaatgtcatttgcggtggacaatggaaggcccggcttcatcgtattcctgtttgctgaaccacanctgccggaaggtggacagagaggccaggatggagcnaccgatccagaaagagtatttgcgcnccggaggggcaatgatcttgaacttcatggtgctgggtgcnagggccgtgatccccttctgcattcggtcggcaatgccagggtacatagtggtgccccctgaaaggacattgtnagcatagaggtccttcctgaagtnaatatcacacttcatgatgctgttgtaggtggttncatggatgccagcagactccatcccgatgaaggatggctggaacagggtctctgggcagcggaaacgttcatttccgatggtgancacttgcccatnaggcaacttgtaacttttctcaagggaggatgaggatgcggcagttgccatctcattttcaaagtncagagccacanaacacagtntctccttgatgttccggacaatctcacgctcagcagttgttacgaaggaatagccacgctcagtnaggatcttcatgaggnagttagttagaactcggccagctagaaccagangcatganggcatggggcaaggnatagccctcatagatggggacattgtgggtganaacatctccagagttcagcacgatgccagttgt

SEQ ID NO: 605344 - DNA, 116 bp, Homo sapiens
ctagaggatccctgtggaatcctcctgctgctggagcctttttactcgcggtggtgatctttttttgcttggaactttagcagcagcaggagagcagcatggatggaattcctgtg

SEQ ID NO: 605345 - DNA, 241 bp, Homo sapiens
attcttcctaggtgtgtgaccttgggtaagtagcccccccaaattatctcatccttaaagcgagatggatattatatatctcagcatcatcatgaggattaaatgagctaacacacatgcacagccaagcatttcatcagtggtaactacaaccgtcattattagcacatgttcatcttgttggaacttcactttaagacacgggatccatgaatgcagtcaatgggcacacattatggag

SEQ ID NO: 605346 - DNA, 163 bp, Homo sapiens
  misc_feature (84)..(84): n is a, c, g, or t
  misc_feature (118)..(118): n is a, c, g, or t
  misc_feature (133)..(133): n is a, c, g, or t
  misc_feature (160)..(160): n is a, c, g, or t
aatggggaagaaggacttgggccccagcaggcctttttgtggcatccagtcagaagttaggaaacaccctctagggcagtgctncctgcaagctctcacacatgacttgagagaagtnagaagactcccagantctgcctttttaagttttccatcagtngtc

SEQ ID NO: 605347 - DNA, 347 bp, Homo sapiens
gggatcctaaggaaatagttataaaagacacacaatgatttatgggcatggctttgcatttcagtgacatttgtaataataaaaagttagaaacaaacgaaataggttaaaaaattatggtatgcccaaatgaagacatattctctatcagtggtaattaatactttttaaaaattgtccaaactttttgcaatgaaaattcctgcttttatacccaagaagtatgtatttttttttactcgggaggctgaggcaggagaatggcgtgaacctgggaggtggagcttgcagtgagccgagatcgtgccactgcacttcagcctgggcgaaagagcaagactccatct

SEQ ID NO: 605348 - DNA, 507 bp, Homo sapiens
ggatcggttcatcccgtggcaccaccaagtggatgcactgaagaagatgtgctggatcaggggggcttcgcccggtgtgtctaggctgctttctcccactgtaggggcacttacatggactgtcagcccaggacaagtgggccaaactacagcgggattatcctgatgcccttatcaccaactactatctatggccggctgtcgcgttaagccaagttctacctggtcccccttcattacaggtgggccggttgtccaatgtgtcgctgtaatctgggaactcataacctgtcctggaaggcacatcggggtctaagcgtggcttcagtccatcgtttccacctttgcagtggatgcggtttgaccctggacaggtcaggacagcttccttaccaaagggcccaaaaaagccacagccaaggggacaccatggtcagagtcgggcctctctggtgctccctgcagaacccggcctctcaaccaggtgctgtgagatactggtcacca

SEQ ID NO: 605349 - DNA, 297 bp, Homo sapiens
cacaaaataatttgtagatacgtttgtgcctgggttagctagcatcttgcacgtgtgacattccagtatcatgacataagcagtgtgtatccaagcacaaatgttaaaagcagagtaacttaagcaatgtcgtatacaaaggtatacagacactgtaggttattcttcttcttgaatcatttatgctgcatagcaaatcgcaatttacatgtcagtataatgttactgatctatagaatacactttgaaactgtgaggtatggcagctccctattacgagcgaggtgacatgtaacc

SEQ ID NO: 605350 - DNA, 155 bp, Homo sapiens
gaaaggggggggtttttccccggttccccctccgggggtttcttgcccccccctccaaaaccccccccaaggtttccgggcagggggcccggggccccccttggggtccccccaagggtttttttcccaaaaaaaaaaagtgattttggggggga

SEQ ID NO: 605351 - DNA, 225 bp, Homo sapiens
tagaggatcctgtgcagatacacagtcgcagagatagtcttttaaagaaataaataagaagcggaaggtgagcactttaaaaaagaaaaaatagggcaggtgcggtggtcacacctgttattccaggactttgggaggcttaagtgggccgatcacgaggtcaggagatcgagaccattcttgcttacacggtggaaacccatttttaattgaaattaaaaaaat

SEQ ID NO: 605352 - DNA, 744 bp, Homo sapiens
agaaaacctctgcgaggacagggagggagcaatgccgtgaatttaatgggacgctgtgaagcagactcatggatgcgaagtgaagagagggctctgctgtgtgctgctgctgtgtggagcagtcttcgtttgcggcccagccaggaatatccatgcccgatgcatgaagaggagccagatcttagccatagtgatctgcgagagtatgagaacacatagcgcagatgatatagccagcaacatcagtcatggtctgcgccctgtgctcagaagcaaccgggtggagtattgctggtggaagcagtggcggggcacagtgccagctcagttgcctgtcaaaagctgcgatgcgagccaaggtgtttcagcggggtgcaccatggcagcaggccgctgtatctatctcgagagtttcagtgtgccagatgccccgcaaggattggctggtgaagtgctgtgagaatagataccagggccacgtgctacgaggaccagggtcatcacgtctacaggggcacgtggatgcacagcggagagtggcgccgagtgcagcaactgtaacaagtagcgcgtggtccagaagccctacagcgggcgcgaggccagacgccatcgaggctgggcctggggaagcgacatctactgcttgaagccagatcgagactcaaagccctggtgcaagtcttaaagcggggaagtcagtcaaagtctgagaacctgcctggctgaggaaaggggtgcatg

SEQ ID NO: 605353 - DNA, 861 bp, Homo sapiens
gcgctgtgtgcggtcgagatttcatgagcgctcgtgactaaagcgtgtttgcagtactctgtggggggtgccacttttcgggggccacttcttccgggcggtatttcctcccctcctttggcgggtaaatatttctccggggtctagggggccagatttccgtgggtccccgctggacctcccgcggcgggccgtctcaaaaggatgggcgcccccacgggggcgaaacccacgtctctctggtgttgcacggtgcgatggcctttctgcgggctgtatttatggggggcaaatcacgcgggaagagggccccaaccacacactgtgggcgttttctgcaaagaatatctttggtgtcgtcccctctcccttgtgcaccatcctagcattaacctctcccgttcgcccccgtggacaaacggtctttgtccagcgcccaaacaactggctggtttattccccgcgagggtaacgtttacgcccccttcttaatgtgccaaatcgagatagcacatgctcgcttcacatgacaggggtccaacacgtctggaaggcgttcctactttgcccgccctagtatgcgcactgtgggcctccctcgttcttttgcaaaccgtgagtcctacgtgccgatacacagggtgtacacatcctctcaagggggtggacccccgtgacgaacttttgatgagtcagcaatagtagttgcattcctaccttttatcgccttccgccaccaaaaatgttccctcaatcttcttcgccatttattcaccatcccaaaggcatgtccccgatcaatgtaatacgacgtcgggtgcaacccaaccccctctctccaaacccaacaaaaaacaataa

SEQ ID NO: 605354 - DNA, 241 bp, Homo sapiens
cccccgatgcagagctgccccagtttacaaaactccctccgagtcccacatttaaattagaagtcctcacatcttccattcctggggcagtggatgagatgacatcctggaatggcatcagaactgtctagaagtctcactactaccatgaggccagtgatgctggccatgatggcaatgccatggaacatgacttgccccatgccccaagacatatgcacccattggttggcgtgcctgc

SEQ ID NO: 605355 - DNA, 1302 bp, Homo sapiens
tttctctgttgtgtttttttggtgcttggtttcgtcgtctctgtctcctcgtcctttttcgctggctgtgtggtctttttctgcttttgttttcttttggttggctgcacgttgcgtgtgctaggtgttcctgcttgtttgttctttgttgtgttgatcttctccttggtttgttgtcgtgtttgtttttcttcttcttggtcgttccttgcttgttttgtcgtccttttgttgttgtgtgtggtgtattattgttgcttgtgcttctttttttgttttttcttctgtttttcgccgtctcccctctcctggttgtcgtccaatgtttttggtcgcttgcccttggtgttctttgtttctctgcggttatgttgtgcgcgtggttgtatttttgcttgtctctttttttttttcgtgttcttgtctcctctcttctctctgttgtgtggttgtacccttgtctcgtcacttctctcttctttgcgtattttttgtgcgcgtttcgttctcctgtctctgttgttcgcgtgtgtctcccttgctttttctcctgcgggtatttgatgtgtttctccttgtttttggttgttcctccacttgtttttttcctgtgttttgttgcgtccttctgtgtgtttttcgtttctcttctgttggttctcggcttgtggtgttttgcttgtgtgtccccgttccccttcgggtgtgtgtgtcctctctgtgggcgctcgctcctgttttgcgcttttttgcgctctcctcgtctctggtggggtcgtctggcactctcttgttctcctctggtctcgttcttactctctcttggtggggcgcgcgctcgcgcccctgtgtatgcttctcttgccccccgctgtggcgctctgtgtattttggcgtgggtgggctgttttgtcgtcgtgggtttgtccgctgagttatgtggtgtttgttctttttttctctgtgtgctttgtccactttttgtgtttttgagggaggtcgctcttgttgtcccctcggtctctgtttattccctcgtttcctggttggttgcatgtttgctcgcctgtgcgctcttgcttgtgtgtggttaccgtgttgttctcgccacaatttcgtccgtgtggtgcccctctctctccgtggtgtgttattgtttttgttttcccctctccctcgctcagttcgtcctctgtttcttgtctttttcccttctcccctcgctctgcttgttgccctctcgctgctctggtgtgttctcttgtaaaatggtggtggtttggtgtcttttctttgtcatta

SEQ ID NO: 605356 - DNA, 1033 bp, Homo sapiens
  misc_feature (49)..(49): n is a, c, g, or t
  misc_feature (80)..(80): n is a, c, g, or t
  misc_feature (91)..(91): n is a, c, g, or t
  misc_feature (99)..(99): n is a, c, g, or t
  misc_feature (124)..(124): n is a, c, g, or t
  misc_feature (141)..(141): n is a, c, g, or t
  misc_feature (162)..(162): n is a, c, g, or t
  misc_feature (165)..(166): n is a, c, g, or t
  misc_feature (170)..(171): n is a, c, g, or t
  misc_feature (174)..(174): n is a, c, g, or t
  misc_feature (179)..(179): n is a, c, g, or t
  misc_feature (196)..(196): n is a, c, g, or t
  misc_feature (265)..(265): n is a, c, g, or t
  misc_feature (269)..(269): n is a, c, g, or t
  misc_feature (344)..(344): n is a, c, g, or t
  misc_feature (347)..(347): n is a, c, g, or t
  misc_feature (353)..(353): n is a, c, g, or t
  misc_feature (373)..(373): n is a, c, g, or t
  misc_feature (376)..(376): n is a, c, g, or t
  misc_feature (385)..(385): n is a, c, g, or t
  misc_feature (636)..(636): n is a, c, g, or t
  misc_feature (640)..(640): n is a, c, g, or t
  misc_feature (651)..(651): n is a, c, g, or t
  misc_feature (672)..(672): n is a, c, g, or t
  misc_feature (684)..(684): n is a, c, g, or t
  misc_feature (698)..(698): n is a, c, g, or t
  misc_feature (713)..(713): n is a, c, g, or t
  misc_feature (721)..(721): n is a, c, g, or t
  misc_feature (725)..(725): n is a, c, g, or t
  misc_feature (731)..(731): n is a, c, g, or t
  misc_feature (761)..(761): n is a, c, g, or t
  misc_feature (766)..(767): n is a, c, g, or t
  misc_feature (778)..(778): n is a, c, g, or t
  misc_feature (781)..(781): n is a, c, g, or t
  misc_feature (783)..(783): n is a, c, g, or t
  misc_feature (788)..(788): n is a, c, g, or t
  misc_feature (790)..(790): n is a, c, g, or t
  misc_feature (796)..(796): n is a, c, g, or t
  misc_feature (804)..(804): n is a, c, g, or t
  misc_feature (813)..(814): n is a, c, g, or t
  misc_feature (820)..(820): n is a, c, g, or t
  misc_feature (825)..(826): n is a, c, g, or t
  misc_feature (829)..(830): n is a, c, g, or t
  misc_feature (859)..(859): n is a, c, g, or t
  misc_feature (865)..(865): n is a, c, g, or t
  misc_feature (871)..(871): n is a, c, g, or t
  misc_feature (880)..(880): n is a, c, g, or t
  misc_feature (884)..(884): n is a, c, g, or t
  misc_feature (893)..(893): n is a, c, g, or t
  misc_feature (899)..(899): n is a, c, g, or t
  misc_feature (911)..(911): n is a, c, g, or t
  misc_feature (926)..(926): n is a, c, g, or t
  misc_feature (1004)..(1004): n is a, c, g, or t
gcatttattgcatgttttaaaattcgtgctatatatctgtagccctggnctgagaatacaaagtgatattttcccaaganacataaaactngggaaagnggtgggggggattttcccaccagtnctccccccacgccaggncccaagcagggtgaggcctcnaanncggnnagntgagnaggcgaggactaagagntacaatctggaccagggaaggaggggtggaatttgcaacagcgtctcaactaccaacgagaggtaagcnagtnaactgtacaagtctcctatcaactttttaaaaaaagagaaaagctgtaaaagtcaggccctgtgggtagggaagnggncaggtncccagccagggccgggatcnggngtgggtgcnaggcggagctgctgcgaatgcggcacggcgggccgtctggccagaggctgatgcaggtgggcggccttggcaagggtagcctagggctggcgccaccgctaatcaccaccctcgaagccctcctcctcttctggaactgggtctgcatcccagcatgtgatgtcgatctctggaggcttgttgtagaacacaggaggcggagcttggcacagagctcttccgattgggcaaactcctcctcctgtgattgnttgnagttcccctcnctggcctgggtcccctccttntggcgtggtctngccattggttaggnggtgcgggctcaggntcatgctnttgntcaagntcatcaagggctgagggcagagttggggtntgggnngcagcaagggnctnanattcnanttcatntgggtcanagaaggtgnntggcgnatcanncanntcatcaaagttgagaagggtggcacagcnttcgcntgctgncagcagtgnctcnggagccacntcatcnagcaggggcacntctgccagggtgacntcagtacccgagggtggcgtgggggccctgggctcaccctggagtgtggaggcccttccccgttgccaggcataggtnatgaggctggtggcggcgggggtagttgt

SEQ ID NO: 605357 - DNA, 312 bp, Homo sapiens
tcaaatactttaaaaaatccttgtatcatgtgtcctccattttatcattttcataaactcaacattactattgatcaaagaaacaaagggaatctatatttacacgacaaaacagcaccaacatataaaataattttcttggtgctttactttatgaaatttaagacagaggacaactctgcttaaaaagtgtaattcctttcttccagttggaaaaaaaaaaatcactagcacctttaaaagcatatcaggacctggttagctgcaccggtatgaccatagttgctcatctgatatcaacagctctatctc

SEQ ID NO: 605358 - DNA, 150 bp, Homo sapiens
aatccccgagctagccccaatgctgtagcttactgcgcagctccctaagcggttgtcaccagctggagacggtatgggagaaccgttgtggcgagcgctacacgaggcaaactgacttctccctctctttgacactggacccctgcgagc

SEQ ID NO: 605359 - DNA, 605 bp, Homo sapiens
ttttgtttaaggccaactttttggctgagacaaaggtgggcctttaatataataaagtaagcccctcccactcacgcaaaagaaaagctgcgtttaaggatttaaactggcattttagagctcggagttcacatgggccacataagcgaattcccttccggagcgcacagaggtgacgtgtatgaattacgcttatggacgtattagtttctaatgaaagatatgcaggtaccactcaagggccttctaatattaaccttccctgcccggcagaaagcccagtacaaggtgaggaaatccgaaggggctcactgccctctcaaaccaagagggcttggtttccgaagcagagaaacaccctacccaagcacccgcaccgtacttgggcctcaagtaacggcattcttcgaggagaacgggcaatctcgccccccttacagaggagcggaaccgcaagccagacagcaaagctggttggtttctctccatgccgaggccacggatgcccgggaacgtcaccagaccagaaaggacccaatcctcaaccttcccagcgcaacgacgcgcggccggccctctgctcagcagaagcctcctgcgcgctc

SEQ ID NO: 605360 - DNA, 320 bp, Homo sapiens
aataaaccatttcttctccaacaaaccattttgaatgtgctcttggtccttgcgattggcgcttcggtggtgttaagtgcctttactttcaagtcttttggcgccaacggaaacagctagccaatcggcaagacagcaatctaaccagcagctcattcaggtttttcggcccacgcagtatattgttacccaagcggatggccagcaacatgttgtcctgagaatctgactcaaaacaagtgatatcgattcggaacgcactgatgtcagcgcgtttttgcgatgcgcaaacaacacggtcagtacgcagcggatagaaa

SEQ ID NO: 605361 - DNA, 107 bp, Homo sapiens
gactctcactaaaatgcacatctgatcatgtgactcacctgctcaaaatcttcaataccttccctgcaaatgctaacagaatgcaagtctgatcatcctcagggatg

SEQ ID NO: 605362 - DNA, 224 bp, Homo sapiens
cgccggtccatgactgctcatcgctcacctcccaaagtgctgggattgcaggcgtattccactgtgcccagcctgagtttctgtttagaaacaacagtctatgatagtataatcctctcttttttgtacacagagtaaagaggacaaataggtgaaagaataaatgaaaggctggaatcccacttcccccgctgtcccagggcattggatatggggatcctcta

SEQ ID NO: 605363 - DNA, 383 bp, Homo sapiens
cttgtgattaagaccgtacacgacaatatagcagtctactagtaagcgtagaggggcgagtgctggattgaggatgttagcggatacggatatctacgggggagatgataggggtcttcgtcgtgtaggggaatatgaagtgtatagtaaggtgcgaggggatctgtgaacaggactgatagcgtcggggtcggtggagtagtagtctaaatggaagtatattggtgaggtggaatcgttcccggtggccgccctgtgtgggccgtgggttactgggattaggtgcgctatcggggtagaggaggtagccggtcgcgcgtaatcctgttggggagacgctggtgttgaggctggcgaggtttgatgtggtgcctgtacgggtc

SEQ ID NO: 605364 - DNA, 551 bp, Homo sapiens
ggcagcgtacggccggaattaagggatgctcgagttctgcgcgggacttgacaaggcacgacacgggccggaaggctgccaggcccgagttgggcaagtcgaagaaatgaaccatcgacaatgcgggtcgcattcggggcggggccgagtgcgaaccgtgagtccccaagatcccgacccacggcaggggcggggcccgggagctggggccgttggcaggccagcccgcgcggcgacgtctccgctgtgcggtcacggcaccgaagtgacggcctaccacaccagtggccgcagaccagcgcccgaaggccgacaccgctggccctgaggcaacggctcatcaggtacccgggcggggggcgggcgtgaggggggcgcgggggctgcgcggagaggcacgcgcacgcacgacgcacgcaacgcacgcactacgccacgcgcctcggctaggaagccgctgtacccatcccgtccggccgttgccctggcccgttggagcttctagggcccgaggcgggcggcgccgttgggcagtccggcgcgtggtctcc

SEQ ID NO: 605365 - DNA, 531 bp, Homo sapiens
  misc_feature (90)..(90): n is a, c, g, or t
  misc_feature (259)..(259): n is a, c, g, or t
ctctgtgttaggcagtttaccatctggctgatgtggggaaagtgcaaacttcctgtagaatcccggtcttttcatccaagtgctgcagcngcagccttgtagtctgcaaagaaccatgcagaaaccaaagagcttgcttttttgtctttgtaatttcttagggtctgtgatatatgccaggaaatctgattgaaactaatatgctttttattctcccattattccctaaatggttatatcacaggcacttgcctacatngggaaagtaaggacaaataatacccatttaaagtaacttgcctatattttgactgtctttcgtaagcacttgctgaactgctgacttaactcagttttaggatttcctctttccccccaacttttccacatttcttaaatgagggtgtaatttactggaaacatgtacatttaatataatattgctgttagattcatggtacactttatgaagcaaaaacatgaaaaggaaaccacaactctaataaactttaaattaaagattaagatgac

SEQ ID NO: 605366 - DNA, 159 bp, Homo sapiens
cctagaggatccacgacgcataggagagagacttataatgtacgaatgcttaaaaggcttccggaacagctcggacttaccaaacaccagagaatcatactggggagaaaccctataaatgcactccagtgtgggaggaacttcaaacaaattggccca

SEQ ID NO: 605367 - DNA, 155 bp, Homo sapiens
tgcttccaattaggtgcatgagtaggtggcctgcagtaatgttagcggttaggcgtacggccagtgactattggttagtgtctacctgggttagtgtctacctggtggtctacctgtggttagtgtctaccttggggtgtacctgagctctgaat

SEQ ID NO: 605368 - DNA, 883 bp, Homo sapiens
ggattgatcgaggagcgcggttaccggacgggctgggtctatggtcgctccggggccgctccgccggtgtgctttttaatcagggcaagctgtgtccatggcaggaacttgggcagagctcccacatattgcaagtgattttgataaacaagatctgtggaaggagcgcaaaaaggattaaaaggttctctcagaggaagaatatgggaggtcaccaaatattttttacaagtgttatccaagcataaggtgaacatcttaattcaggacaacaatgttatgtgccagtgctagggtatattcagggagattctatgcaaggtattctctgaaagagtatgagatcgtgtaataagtgggctcctacatgtgtgtttggggccatccaaggtagaggatttggcgtagtttcaaatacaagatgtgattgtggtgtactttctgttatgtaggtgcaaaagtgtatatctggtttaaagggatgtattctaaaggaaaggttccagagtaaatagatttttctaaggtgaatggagacttttgggagtatggtgggttaataaaatttcctgggggacacttatttttcgcgtgttcgtggcaaaaaattcaggcaaaaggttttttaaaaagcaattacggattttactttaatgccaatgggtgggattttgcatccaaaaatttacaattgaggggtgatcttggcggggtagaaacactctgtgccgagttatagtgaaatgggcaaggagaatggtctcaggggaatattattattggggaccggtcgttgtttggtctgttttgcacagtgtactacattcgaaaagcgtctttgtgatggggggcgaaaatgactaggggtgacagagctcttttg

SEQ ID NO: 605369 - DNA, 140 bp, Homo sapiens
cccgcggtttgtcgtcgttgagcagcccccacgggtgtcggtcagactcttgggtgtgtgtggtctgtgtggtccttgagtgggtttctcggattcgtgccctggaatacctgggtcaggaatgctgtcagacaaggtag

SEQ ID NO: 605370 - DNA, 153 bp, Homo sapiens
acacgcactttgcacacgcacttggtcatgtatatcgggacttcttacgtctgcacgatgctgatgtcacgactaaggagtcttgtctctaacgtgaagaagtcattaagagctgcttatgtaaagccctgtgtcttgcgagacagtggcgtt

SEQ ID NO: 605371 - DNA, 321 bp, Homo sapiens
  misc_feature (159)..(159): n is a, c, g, or t
  misc_feature (172)..(172): n is a, c, g, or t
  misc_feature (304)..(304): n is a, c, g, or t
gggagatgtcatctgggagtcagggactggagtcaaaaactttagaagtctactcggtgttctagtttgctgtggctgggctggcaataaagccatatgacatagtgcttctcactcttcggtcccctttccacagatagaggaacatcacaccatggncaccaccacgggnccatagggagtactgccaagttcctgccagtgttcacttaaggcctaaaagctcttcagtcagtttgtggctgtcaggactgggactcacccttcaaggcgatcagttctctggaccagggtaggttttgcnatcccacccaggatttt

SEQ ID NO: 605372 - DNA, 510 bp, Homo sapiens
tccccgcgcggagtcgggcagtgtgcagcgggagaagcggcagccagtggcgcggcgtgggccggagagaggcggtcccctgggaggacggggtctcccctcgttgcctttgtacgtggacgaacgtgtgtgacaatgttggcacgtctggctgtgatcgcagggaagcggggccggcgcgggcggccgagggtccaggcgagcccgctgggctgcgacgggacgattgcctgcatgctacacctgaaatgccagttatgtgagacaagaatgcctgccacgctgtgaccattgctgtgcccccggaccgcacggacacgatattatcatacttgataaaggtcaccaacgagatcttccgccactacgatgacttttttgaacgaaccattctgtgcaacagccttgtgtggagttgtgctgtgacgggtagacctggactgacgtatcaggaagcacttgagtcagaaaaaaaagcaagacagaatcttcagagttttccagaaccac

SEQ ID NO: 605373 - DNA, 1167 bp, Homo sapiens
ccgatccagtgctgcacaaggctgggagagctgccccggggcccctgctatcctgcgcctggagtgttgtgaagagggtgggtttgcctgccgccctgagggctgagagctgccatgatggatgctgggaatgaatggatgctgctctgccctgccctggcctggcctcctcgctgtcctcccctgtgctgtttgtgctctctgtgactcactagtgacttgctgggctgctcctcccaccctgctgccctgcctcctcactctgcctatttctgttctgcctgtgtgtgcttgcttttcccaatgcctcgtgctgtgttgctgccctgtgtgctgatgttgctgtggtgctgatgtgtgtgcccctgtggtgccatgtcgacctgatgccatgtggtgtgctgttgtgtgtccctggtgctagagatgcttgctggaccttgtgcctgtgcgagatgtgtgtggcccattgtgtacgttgtggcttgcttggcgtgcatgccaatgcttgtgtgggcgccctggtccgttgcatgctaaagtgttgagccgagatggctgagtcttgcttgggacctgtggtctctgcccgttgccccccccttcttggccaacgcttgtgtggtgctatgtgtgcgtgtgtgccactggtgaatggccctcctgtggagtggctccctggggtgtagtgcctggcggcttacgatggccttgtggcgtggctagagtttgcaacatggtttgcgggcctccaagcggtggctggatggctttggctgtgtgtgcctctggctacgcaggcatatcctggttgtggcgtggcgttccgttggtgtggccatcgcacccacattgggatattaccctctttgggccgtgggggcatgggcgttaccacttggagcacccctttggtgggtctcctggaacccattgtatccgatggaacacccttcgcgggagacgaaaacactaggagagtgggtttgggcaatcagtacctgaaaagtgatcttataaccaattccccacaccacctgtgatttaggctcacttacccttgcgcaaagagcccccaatgtgagaaggtctgggagctggggggaagagaatatgcagaggctcagccgggcaagggaagtcccgcttcacttccccaaatttatt

SEQ ID NO: 605374 - DNA, 1642 bp, Homo sapiens
  misc_feature (1642)..(1642): n is a, c, g, or t
ctgctaataccttgctcctccaaagtccagagtcccaagcctaataataggcccctggcaacagaatcggagatgaaggtacccatatgggaaaaatgggacaaagctgatgctggcaaggtaggggaataaccctgcagaaaatggtgagatgccaagaacgagaccaggcagcaggaaagctgacaggtgctggaggatgccaagtggaatgtgtgtgcattttttgataactgtgtacttctggtgactgtacaggtttggagaatatcgtattttctatatcacatgtttatataataaattgcaggaagtttctgttgttagctttgttctttggtgtgttcaagaacgctatgttggttgacgcacacagaacactctcatgtgtggtggatgattagggagggaagggggcattagtgttcgacgtaattacaaatgtgatctctccgaataggtgctggattgtgagtggtgcgatggaaaaacccctttgtcccttgtcatatgctttgtgagacaaagacgttacctcatagggttctcccgcgaggtaagagaggggagtttcccccgtggacttttttgcatcgaccacgagtgtgaccaaccacttgtgggtctacatagaaaacgcctttagcggaggctagttacataaatagacagacatcgtggctctttgtacactggatccgtcgttgtcctctcccttatatcccaatccgtgtctcagcgctatgtaaggagattgatactctcgcctgttttataaggtccccgagaggagcaggttctgtgttccgagagaactctttggaggcccctcatttaggctccatttgtgggtgctcacccaggcgtgtgttgtccaacgggcggaggaccctctgggggagggtttttccccagtgtgcgcaagtgtgtccccactcttgtaagaaagttgggccacccctagtgttctaaaaccaggagagccaagggtggcgttcccccccatttcctctcaatagaaggcggggcgcgagggaaagtcctcttccgagggcaattacagacttttcttgggccgacctttttccgatctcctgccaatttttcgccttagaaaagaagcttcgacgggagctccacgtgctcttgtgcggacaaacaccgtctctggtctgagcaccaaccattcttctcttcaacctgttttaacatgtgggtcaaagccccgttcactgtcttataagacgttatcccccggttctacagagagactaccacagtgtacgaacaccccacatgggggcgctaataaacaggaggagcaaacaagaacattggggggggcccccatttaagaaaacagcgggctttctcaccgcaggctggggataccatgcgtaacgaacagcttcttgcgccgtatactgcgcggcaaaaacacacatattctgtattagtagacaagcaacttcatacacaacgcggactcaacagcgggcgggctcgtacacaacaaacaacatgacactgacggtctctttcgttgtgccgacacaacatatcgcgtcatacgtcgtacgcacaccttgagagatataggcgtgcgctagcataatagtacacgagctaatagcatacgccn

SEQ ID NO: 605375 - DNA, 1103 bp, Homo sapiens
gaaaaaaactctacctcatctatactaatctccctacaaagtctccttaagttataagcattcacagcgcacagaactaagtcatattgttatagtcttcttcgaagagcacactatatccccaccattggccagtcatcacccgatgaggcaagcagccatgaacgcctgaacgcaggcacatacttcctattcatacaccctagtaggctcccattccccgtactcatcgcactaacttgtacagtcacaacaccctaggctcacctaaacagttcgtactactcagctctcactggccaagaactatcaaactcctgagccaagcaagcttacatctgactagccatacagcaatagctctctgactagtcaaacgataactctattacggcactccaactgtcatgactcccataaagacccattgtcgcaaagccccccagtcgccatggcgtacacatagataagcttgaccgacagacaactcgtgtaacaaacttagcgacgcgacatactcggtacttcacacacacaggacattcaacaaaattaaagtatacatgccgacaggcccccaccgatggcaaggaaagagcacagcacattaagggcactacgctcacacattgccccttagggtacagcataagtacgcccataagatgaaagagcacacataagatacaagctaagcacaaggggactgccgccaatccgtggaacctgactgatacaaacagagagggaacgccttcagcagctacggcacccagtgggccatacacatccgagagaaaacgacacaacgagccaaccaataggacaccgcatccggacacgagccacaccaacaggggcacacaacaccgtacaaagagaccacaaagagcccacccaccgggaacagacagtatagcgctccagggcaggcaaagccacacatgcctcacagagcacgttgcgcagcccacccgggggcatataacacaagcccgatgcgatataacagtaaagatcctgagccaaaacgacaaccacgaccacaaaaaccgacagagcgaacaagcgcagaagcagacacagaggtaccgaccagttca

SEQ ID NO: 605376 - DNA, 373 bp, Homo sapiens
  misc_feature (16)..(16): n is a, c, g, or t
  misc_feature (128)..(128): n is a, c, g, or t
gagaaagaggaatggncctggcctgtgggcaggatccagagctggtgcggaacatctgccgctgggttaggcaagctgttcagattcctttttttgccaagctgaccccaaatgtcactgatattgtnagcatcgcaagagctgcaaaggaaggtggtgccaatggcgttacagccaccaacactgtctcaggtctgatgggattaaaatctgatggcacaccttggccagcagtggggattgcaaagcgaactacatatggaggagtgtctggggacagcaatcagacctattgcttttgagagctgtgacctccatttgcttcgtgctcttgcctggatttcccatttttgggttacttggtgggattgaa

SEQ ID NO: 605377 - DNA, 855 bp, Homo sapiens
cgtcgtggcgggcgtctgtagtcctagccactcgggaggctgaggcagcagaatggcgtgaacccgggaggcggaggctgcagtgagccgagaccgtgccactgcactccagcctgggcgactgagcaagactccgtctcaaaaaaaaaaaaaaaatcttatctatttgtccgggtgaattcagagaccatggagattctatttatcagaaccagggaagataaattccttcagagctattcaacggagtacttcttttccctcaaaactggggggactggtcggggaaagggggcccacaatttttggtcttggatatagctccaattctcataagtatatacgggccctataatggggcagaaaaagatgcttggagggaaaatctccataacccatgagggagacctgaaaaatcatccttaggggtataattaataatggggcaattaagtgccaatgatatttctcaccatggatgctcgggaatgtgaaagaacattaaacagatcctgcggaattatgtatattctacatgtgcgaggggacatcggggaaattgcttgtgaaatgatttgtggcttctgtacaacgattttcaactaagttttttaagtaaattcagtttccctccatatttaaaatgctgtgctaggtctcaattcggattggtatgcgaactgcctactaatactacggggagtggcggatactggtatccaaaaagagattggggaaaaaagggggctggaggaggagattggactaggataggaaaggttgtttggggcagggatcacagggcgtgttcatgggaagggggggaaatcaaaggtagggccgagagaattagtg

SEQ ID NO: 605378 - DNA, 248 bp, Homo sapiens
  misc_feature (97)..(97): n is a, c, g, or t
  misc_feature (107)..(107): n is a, c, g, or t
  misc_feature (227)..(227): n is a, c, g, or t
ggctgaggaattcggacgaggaccatttggaccagctgggcagcagctccaacgggcctgtgggaccaacaacaccgtttcacccttaggccttcgntcctcttttnctttagcaccaggttgaccagcagcaccagcaggaccagcagaatccattggggcagcaggaccgacctaccacgttcaccagggcttcccgaggaccaagcaggaccagcaggaccagnagccccagcttcgcccggtca

SEQ ID NO: 605379 - DNA, 109 bp, Homo sapiens
acagtggtggcctggtctcaggttcccgggccaccacctggggtctgagtgtaccctcatggagccacctatcctccagaccctggagctgtgtgcacggtgcgttgtg

SEQ ID NO: 605380 - DNA, 438 bp, Homo sapiens
  misc_feature (3)..(3): n is a, c, g, or t
  misc_feature (61)..(61): n is a, c, g, or t
  misc_feature (92)..(92): n is a, c, g, or t
  misc_feature (263)..(263): n is a, c, g, or t
ccnggctggtttccccgtaggttgtcaaacctaaaacgtccctgccccttccattggcccncttttccgtgaaagctccctgccctccccanaaacgatgtctcccctttccttccttgaacccacatctctgttattgaaactcctagaagtcggctgggtgtggtggatcatgtctgtaatccccagcactttgggaggccgaggcggggggatcacctgaggtcgggagttcaagaccagcctggccaacatggcgaaancccgtctctactaagaatacaaaaattagccgggtatggtggtggacacctgtgatcccagcttctagggaagctgaggcagaagaattgcttgaatctggaaggcggtggttgcggtgagctgagattgagccactgcactccagcctgggtgacagcaaactctataattagt

SEQ ID NO: 605381 - DNA, 998 bp, Homo sapiens
gaaaggcttaacatgtaaagataagatctttactatctctaaccctgtcctttgtttcactgcattcttgtctagttttgcttcattgcttatcattaggatagggtaagtgaagtttgctatgctgctaggcatcctaatgcaatgtatacctgttgttgtgaagacgaattgtgaatagtcatgattcatttctagcagcaggctgagttcagtgacagtagcttccattgagaagtcttcctgtgtcgtgaatagccactttgtaaatgacctcgttggtcgtcacataagccaaacaaacgatagggaacgtatctgcgtatgaaagatccacaaattgtgttcagatcagtgccctagaagaacaattttatatgcctcactggttgttattcttagggttcattcccacacttgacttctatcgattgtgtactactagtaaaaagcagcattgccaaataatccctaattttaccactcaagaaatatcatgaaatgatgttaagcttttatgaaaagtttaggttagacctactgttgttagattaatgtatgcgttgcttccctttatctggaattgtggcatgtagcttttttattttaaccctctttaattcttattcaattccatgacttaaggttggagagctaaacactgggatttttggataacagactgacagttttgcatacttataatcgggattgtacctagcaaggatatggctacctttgttaactctgccttctaggtatcaaaaggcagtgagtataagccactttgtctatctgtttgacctgagtttattggtgtaaatatgggttgcaccttccgaagctctggacctcgttaacgtttcttttagcaaagttgcctccgggcaagacaccgtttttcttcacaaagcgactttaaaaaaaaggggggggacccagagaaaacccttaggggaataaagcacaggaatatattttaccaacaattgttacgt

SEQ ID NO: 605382 - DNA, 265 bp, Homo sapiens
tgccaggggacagacgcagtccagtgtgaagtgggctccactgtcatacaggaccctaatggagggacagataaaaataaaaaacaaaaactttggagacatacagggaacaagagaaacaaaatagaaaagagctctgtaggtgctaatgtacagtaatgatccacagttctcttcatccaaatcagcaaaaacaaaatggcagggtttaacagtgcaagttcaaacacatcaaggtcattcagcatgttaacacattccatta

SEQ ID NO: 605383 - DNA, 595 bp, Homo sapiens
  misc_feature (520)..(520): n is a, c, g, or t
  misc_feature (523)..(524): n is a, c, g, or t
  misc_feature (532)..(532): n is a, c, g, or t
  misc_feature (534)..(534): n is a, c, g, or t
  misc_feature (536)..(536): n is a, c, g, or t
  misc_feature (543)..(544): n is a, c, g, or t
  misc_feature (548)..(548): n is a, c, g, or t
  misc_feature (554)..(555): n is a, c, g, or t
  misc_feature (558)..(558): n is a, c, g, or t
  misc_feature (567)..(568): n is a, c, g, or t
  misc_feature (577)..(577): n is a, c, g, or t
  misc_feature (585)..(589): n is a, c, g, or t
cgaaagaagtgaagggaccatagacagaggagagaagaggcgcagaagatgagacagagatggagggaacgagcggaagtaagcgagagagtgaaggaaaggggagagagtgaatagatcggagaagcagaagcagatgagagaaagacggatggacagatgggccaaaaaagagagttggattgagcgcacgagtgacacacatggtgaagtcgactgacgagggaggagacatagagacagagggaagggcggatggtgaagacgggcgttaaacagggcaagggaaagcgaagaagcagcgtgatctttagagggaagatacttcaggaggaagagaagtagcagaaaggggtgggtcagacgaaacccgagtctaaaagggtaggaacagccggttctaaagcacgaccaagagcgtggacccctctctagcctggattccactaaaatatgtgaatgtggtgtgtgacaacacgtcggcgagtgaggaagaaaagtcgggcacgctaaaaagtgnaanncccaactncngnaattganntacngtaaanncanaagcaactnntttggatgnttggtgtnnnnnccacca

SEQ ID NO: 605384 - DNA, 346 bp, Homo sapiens
cccccgggagtgatgtccaaagacgtctagtaggttcaaagtatggtctatcaaagaatagaagctattcctatcgtggcagggaaaactcgtggatcgtggttcaaataccatttttcaccagctcatgaactccattctcatcgatgattagaggtgcatggaattctttatctgccacataactttctaatccttctccagcataggagataagaggagagattacacattggattggtacatcattggcatccttcaagctaagaaaaaaaacaagtgtgtgttaaagactttgcttcccatgttacttgccagagcaaaagtacaaaccataacttacctc

SEQ ID NO: 605385 - DNA, 551 bp, Homo sapiens
  misc_feature (476)..(476): n is a, c, g, or t
  misc_feature (479)..(480): n is a, c, g, or t
  misc_feature (488)..(488): n is a, c, g, or t
  misc_feature (490)..(490): n is a, c, g, or t
  misc_feature (492)..(492): n is a, c, g, or t
  misc_feature (499)..(500): n is a, c, g, or t
  misc_feature (504)..(504): n is a, c, g, or t
  misc_feature (510)..(511): n is a, c, g, or t
  misc_feature (514)..(514): n is a, c, g, or t
  misc_feature (523)..(524): n is a, c, g, or t
  misc_feature (533)..(533): n is a, c, g, or t
  misc_feature (541)..(545): n is a, c, g, or t
tgtttaacaatattgtagaaggaagccaaatcgaaccttccctaacaaaaaattcctttgggagcccctgtcaaaaagaaaaccaaagagggttaaacggtcattatagaattcctaaaaccagagcaagtatttgccattaattgttctagctctaaaaaagcataaaaaaagacggtggtgtgtaagcgatagtttaccaggacacccccaaatactttcagtagtaatttaataaaagtttgggtccatttaatgaacacaaactgcgagccagttttctttcttttttaaaaaattaactttctgaagctcttcttaagattttcttctaatgaaccaaaagaacatctgcagcgtgacacactggctgataacgcatgacacttttaacattatttaagtaaaataaagatttaggtaaattacaaaataatcagaagttagaaataaaagccatgccctttaaaaagtgnaanncccaactncngnaattganntacngtaaanncanaagcaactnntttggatgnttggtgtnnnnnccacca

SEQ ID NO: 605386 - DNA, 133 bp, Homo sapiens
cgggatttcagagacagccatgatctgtcgctggtgtggacagtcacgaaggagctgatctcctgtgtctccccaccgtgcattataacatggagcggcattcccaccagacaacgagagggcagtgtcctgc

SEQ ID NO: 605387 - DNA, 615 bp, Homo sapiens
gccacaagtcagccaccttcatcaacagctgggcaacatcctttagcaacagctttgagcttttgagcatagaagtgaggttctggggcatcaatgtcagaatgtcatctggcaatttcagatagtcaattgtcctaaaagcattgccattgtcatcaacatcagtgctcatcacatcagccacgggtctcaccaatcgtgtgaggttcgagagctcatcattgtgttccagttagcgttcatttctgcaaggttccagttctgcacagcagtcagccatttcaccataggtgtatcgtatgtttgcaactgtgcgtatttagtcaccagtcacggtatgcagtgatctgtcccgcttctcatgtgactcatcagcaagacatgtcattgccaattcagacacgtcattcacatgttctacatgatctacacatggccactgctgtcgacactgagcctaggcaatcttcatctaggctatcaaattttcgtctagcaactcttttaacgagtgagtatcctcactcctgtgtgcatctataagccgcgctccactggaataagccgagcttaagagttacacaatgcaaagtgaggtaagccacttcagtgtgc

SEQ ID NO: 605388 - DNA, 1047 bp, Homo sapiens
tcgactggtttgtagttggtggcatgtgatggtgtgcttcggttgtgtgtcgcccgtctcttgtgtggtgttttctctgtgtgtagtgtcggtttttgcgtggtggtttgttacatcagtgcccgctttgatgtggtgcgcgttgtcttcgtggtggtccgcgttcctcgcggttcctagtggtcccgaggggggctccgtgccacgaggggtctccgcttcgactctgaccgtttgcttctgtgtggcaacgtggccggcattatggcgcttttgtggcgttcactggttgtctcttcccattttccgtgttgtcactcacgcctacgcggtcccgtcagtgagcaagcctgtggcaccttggggcaaggcccaggattcaggaagtcaaggtgcatcggggtgatcgggtctgctggttgtccctgcttgtggcctctccatagttatcggggatctgctccggcagatccccctggccgtgctctttggaattttcctgtgacatgggagtcacctccctttacgggatcccgttctatgagcggctgcatctgctgctcatgccgccccaacccccccccgatgtcacttacgtcacagaaggtccggaccctccgtatgcaccctgttcaccggccctgcaagctgctctgcctggccctgctttgggccgtcaatgtccaccacgctgcctccctggccttccccttcatcctcatcctcacccgtgccgctccgcactggtggtgctcaccccgtatcttcacccgacccgagagatgaaaatgtctggagtgctaacgagggcacgaagccggtgtttgaagaggcgggaggggtgttggaccgagtacacatgagaatgcccactgcctgtgtaaccgccacccgagggacacgccgagggaccgatggacgaggggacacggctggtgggatcggggttccccctcccactgcccctccctcctttttatttaagtgaataaattttaagtattctcctccccccctgcccctgcagtaaagtgctttggcccccca

SEQ ID NO: 605389 - DNA, 155 bp, Homo sapiens
gcttcaagatctctgttacaacaccactttcctgtgtggataacataaaggtctttggaactcatctcatgcaagacatggtgaaagatgcacttcgcgtcttttgtcagatcctccgtttgactttccccctaagtgctacctcatataaataa

SEQ ID NO: 605390 - DNA, 268 bp, Homo sapiens
agctttatactaactgtctctagtatctttaatgtcttcacatcttcgaagacaatcctctagtatctgaacatcgctggcccatgtttaattccttatctcccaatactgaattcctggaggtatactgcttccacaatagaatccacgtaaaggctttattacgcaggagctttacggatctaggatcagaaacgtgccaatacaaaaataccaatatagcttttcctccggttggttatccacatcttctgaccattaataatat

SEQ ID NO: 605391 - DNA, 575 bp, Homo sapiens
ttttctacagtggttttatactgaaggaaaaacacaagcaagaaagaagaaaaagcatctatctcatctatctcaaagcagatttttacacacgaccatgtgccagggtacgggggaaaacggaagtggcttaagaacaaagagggctgcctctagaagccaagggaaaggggtgcttttatagaggctagcttctgcttttctgccctggctgctgcccccaccccggggaccctgtgacatggtgcctgagaggcaggcatagaggcttctccgccagcctcctctggacggcaggctcactgccaggccagcctccgagagggagagagagagagagaggacagcttgagccgggcccctgggcttggcctgctgtgattccactacacctggctgaggttcctctgcctgccccgccccgtcccccccctgcccagccgggtgagtccattctcccaggtaccagctgcgcttgcttaactgtataatatatagacaagagatcggaatgaggtgagaggtggaagaagggagaagaaaggtggtttagctgccttactagctttaaaccc

SEQ ID NO: 605392 - DNA, 267 bp, Homo sapiens
aaaaaaaatggacagactgtgacagaccattcccatcggccaagatggtcgaacccgacatccaagaacccagcgagcagccaagctcagcgcaacctccgggcttctcagctctgactccaataagggtgagcacgtcgccctcgcgccacggggcctttttacatttgcggattgatggactcggctcgttgtcgtccattgaatttccgacgccgcaccttgcgttgtactggtcccttgagtaaccgagtcctgtgcccagga

SEQ ID NO: 605393 - DNA, 1055 bp, Homo sapiens
tcctcccaagtagctgggactacaggcacgtaccaccacacccgtctctactaaaaatacaaaaaaattagctgggcgtgatgatgtgcgcctgtcgtcctgtctactagggagactgaggcaggagaatcgtctctgcctcccaggttcaagcaattttcctgcctcggcagagacggggtttcaccatgctggccaggctggtctcgaacccctgacctcaagctgatcagcccacctcagcttcccaaagtgctgggattacaggtgtgatccactgcacccggccggcattatgatcttagtgtactcttgaaatggttatctacgatggatgataagacaccattaacgctcgaacccgcacctcatgaataactggcactctcacacacgtagtaggtgacttaaaatttcaatagaactcacacctgcagcacaccacagtccaacactcgaacctcatacgagtaccaacttaacagcaatggaccaataaagacactacaaaatgtacagtatgcaacctacatctgcacctcacaactactacacctaaacgcgaaacagccagaacatctatatccccaccccacccaccaatactcgactcacatctagcctaataccacatactacacctcaccacatcttgcctaccacgtctacactcacttcgccaatcgaagaccccagaacgcaccgtcgcgaacacacacgcacaacagaacaggggcccaggacacactgacggggcacccacacgccccagcacgcgacggctcggcgtcccgcaggacagcgcgcaaccgacgtccgacgggcgggcgcccctctcgcccgccaagccatgctctgggagccttggatcacacaaggtgaacagcccttggccgctgcttcacacgggaaccatcgtccgacgcaaaacgcgccatatcgcccgcctgataggcgacccgacccggcacctgcaaaccggcgagtcacaccatgcagataacgtacaaaggagaaatagccgaaagcacaccgagcaaacaccacgttcaaga

SEQ ID NO: 605394 - DNA, 146 bp, Homo sapiens
cgcaagtgtttagtcacaattcacgcatggcattagttggttttctttagaatctagaagagtctccatcctgcctccttttttttttggtttaaatgattttaatgacattaacactttcaggagttcaggacagttatggtatg

SEQ ID NO: 605395 - DNA, 244 bp, Homo sapiens
aggcagaggatccctcacgcttaacttccttcttctttcttcctcttcttcctcttttcttcttctttctttttcttcttcttcctgattcttcttcctctttctccatctttttctttcttgctttccttctacgtttgttcttcttcttctttcctctttcttcttcttccttctcctcctttcttcttcttattcttctccttctccttctttttcttcttcgacttacctacgtgttgag

SEQ ID NO: 605396 - DNA, 428 bp, Homo sapiens
tgctatgactaacgcctttaatcgcaggattgagacaggccgaggtatgcgaaccacaaggccaggagagcaagaccatcctcaccagcatggcgaaactctggctctactagaactacaggcgctggacgtactggagcatgcatgacagcccagatactcacaagactgtgctggacacagcatttgaacccaagagcagtgggatggacggagctgagatcgagccattgcacataagcctggacgaaagagcatagactctgcctacgataggaccaagtcttggcttgaatagttctgccaagcatgtttcctgcagagtaacacctgcaatgccagctctatgaaaggccgaggcagacatgctacttgcgttcacaggctcaggaccaggccgactaccatggagactgcatgtctcttct

SEQ ID NO: 605397 - DNA, 870 bp, Homo sapiens
  misc_feature (1)..(1): n is a, c, g, or t
  misc_feature (6)..(6): n is a, c, g, or t
nttganatcctagggttgatacactgtcgactgcgaggaatgtcctagttgcaatttcgaggatgcccctggactgtccccgagactgacggatgacccttctggaacctgcaaagccaagatacagccagcatagccttcactggatacctagccctgggagtccattgacactgcgactgcacacccgaactgcattagccaactctatatctacgaactactgcggtgattactgccaacaacacagtcttgtgagcaagcaacgaacggcttgctataacgcggcctcagcttaggagaccgcagattctttgaacgcgaccggtcttagtgctcctaccataaccaatggcactccgccagatgggagacacacgatgcagcccggacaggaacccttgtcagacaggctcacccactgtgcacagagatggctagttcaaaaacgacaccctctcgtttgttagcacttacaagttaccttttgatgtccagggtggacacggtttaaacattcctgatcccgggtttcttttccacgcggaaaatcttttactgcccccacagggaaggggcgtaattcctcccgaattgggaaccagccttcaataggactgcgtggcaacccgaaaccagcttttagacccgggccccgctttccgccggcttcgatccgggggaagacggatcccattttgttccttgtttaacaacccggctgaattcaatccgagggcgccggaattgcattactaaggcttggccccggaattttttcttgggggccgggcaacccgctgacctggccacgggtgtataattgccaatttccttccaaagtgtcattacgcccctttggcatttttg

SEQ ID NO: 605398 - DNA, 1349 bp, Homo sapiens
ggacgcgtgggtcgaccacgcgtcggctactggaattcgacaaggacatggatcaggtgcctccagctaaccaggaagcttgagagtagccagcccaggcacggcgcaggtgtaacgaggagcccgagaaagtcatgaagaggacagaacgcaagaaggccacccaagcgagagcctacaagatagcttcctcttggagctcgaaatcccgctccttctttccctgtcgagcatctctgacacaaggatatgcccagcatgcactccatgcggaggtgtgacagggacgatcctgcatggacacaaacgcaagacctatccaacgagcgacagaggactacagccctgacgggacaccatcatggagacgcaaacattgaaaccatgcagctggtgcgaaacaaatccagcagtcccagatggcagcaagcatcatcttaccaaggaagtccagagaatccaaaggcaacacagcatgtcttggcagacaagcatccaaatatcatttcttcatacaccaacaattggtgaaaaaaagacatgggagattaatcccatataatagtagatgactgatagggagtaacacaataactacaatagattgattatggtagaataccaaaatagagggatgattaataacaacaggagttaaaaaatggagatggaaagattggtcaccatcgaatgatacataaacgaacacagtagaaccagagagaacacacgaacgccaaagggacaattcacccgatagggcaagacacagacaaacccaaacatgtgcaggaaataaaaacacgggaatgacactgaaaggcacaacacacaagccacacacatacatgcatcggacacaatagacgcagaccaccaacaaggaatcaaacaacccaaaccacggaagaagataacaccagtggacaaagtgacgcaacaatgcacgaaggaaccaccaacggacgccagagcacaaaagcagcacaccagcacaaagggagaaagtgatgagcggacaaacccacacaacaaaagaaccaaaaaaagcggacagcaaaaaaaacaacaacaagaaacagaaagaccaaacaacaggagaagagaccgagagaaagatacaagaagagacagaacaaaggggaggaacgcaccgggaaggggggacgaacacgcacagcaagacacaagggacagacgaggcaagacgagcgggagaagagcggcgcgccacgacccgagaaacaagagccgaagagaagaacagaccacgggaaaggagctcacaggacaaaaaccagcacacggacaaaagagaccgagagagcaaagacgcaaacaaacggagg

SEQ ID NO: 605399 - DNA, 234 bp, Homo sapiens
gcttcggcattcatgtgtatcagctcttcggttcctggcatttcatgatattcactgtgctgggttggggtacgtgtacccgtgttctaccagcctgtgggaccaaagcagtatccttacaattatctgtacctggaacgaggtgttaatccctccaaagaaccagagcgggtggttcacttatcagatctgaggaggcttcgtgggctgttgtgtcctgtgttacgtctaggt

SEQ ID NO: 605400 - DNA, 700 bp, Homo sapiens
  misc_feature (244)..(244): n is a, c, g, or t
gggtggtagcgctgggggtgattttaggcagcaagaattggagaactcacgctgcgaaaagaaaacctcgggtggcagtgatttgaacaccggcagtgctggggcaggacccgagccagcggtggggagagatatagtcagagaacccagcaatacagatccgtccttgggcaaggcgcggtgctggatgatgggtgcggaggaatttgggtaaaggcagagggaaggggtggaggagggccanctcacttgccaaaactctggagtggctgctgactagaaattgatctgtataaatgaccttgaaaatggacttctgaccagttgcggtggctcacacctgtaatcccaacactttgtgaggcctacgcacgcacatcactacgtcatgagttctataccagccttgccaacatggcaagaccctgtctctactaaaaatacaaaaattagctagtcatggtggcacatgcctataatgccaactacttggcaggctgacgtatgaaaattgcttgaaccttggatgtggacgttgcaattaacctacatcactccactgcattccatccttgtcaacagatctagactgcttcttactataaatatataaaaactcaggtggtccccttaccaattctcgcttatattattctgatacaattcacttgccttccctttacaccttgttaattgccac

SEQ ID NO: 605401 - DNA, 638 bp, Homo sapiens
  misc_feature (52)..(52): n is a, c, g, or t
ccccttcgcccaatttgtaattgtagttttccggagacggagttttgcttcntttgcccaggctggagggcagactcccccttaaaaaaattaaataaaataaaattaacctccaaaagtgagttcaggatttgtttgcaattcttaatttttttcccacccaccccaagctaaggacatatagttgaatctggggttcataaatttggcctcccttctttcttaatttctttcttttttatcccctttcggtatggatataggattcattttactttaaaattaactttatcaatgagaacacatggacacacggaagggaacataacacacaggggcctgttgaggcttggggggttaggggcgggatagcattaggtgaaatacctaatgtaggtgatagttgatgggtgcagcaaaccaccatggtacatgttttcctatgtaacaaacccgtacattttgcacatgttttccagaacttaaagtgtttttattaaaaaatatggaaaaaaaaatgaattaggtcaattgtttgtttacaattttagggccctgtcccagagaattatttttattaaacggttgaaaatgttggaaataaaaaggtttcaaaagttgaaactattccaagaaag

SEQ ID NO: 605402 - DNA, 150 bp, Homo sapiens
acataccaaggccaccacacaccagccgtgatccaaaaatggcccttcgcatacgcagcataaatccctattcaattaaccctcagtaggatctgttttctgtcgccagagtgtatttaactgagcccttttgaacccacctccagccgt

SEQ ID NO: 605403 - DNA, 380 bp, Homo sapiens
  misc_feature (25)..(25): n is a, c, g, or t
  misc_feature (29)..(30): n is a, c, g, or t
gcacagagcgagctcttgcagcctncccnnccctcccgcaacgctcgaccccaggattcccccggctcgcctgcccgccatggccgacaaggaagcagccttcgacggccggagtcgaagaaccgagttatcaacgggggaatacaaaatattggaaaaggaccacccctttctttaatgatttgggtgatgcccatggctctggagtggcccacctaaacttcccatgggcttccgagtagtacccagcccagagggaagagattagagcatacagcgtctgctcgggggacacacatatcgtatgcacaccactatcgtcgttagagccagtgctgcagctccatgatgatgatgcatgcagtatgatgcgtcactac

SEQ ID NO: 605404 - DNA, 358 bp, Homo sapiens
cccccccggggggggggggaaaacccccccgggggggggcccccctaatcctggcctttttttccaggggcaatttttggggcccgggggtccccctggggggtttttttgagttgggggcccctcccccccccccggggttttttttgggccaggggggttttttttttttaaaggccgccttttttaaccccccccctttttgggccccgggggaattaaaaaagtttttcctccgggggggggggggggtttttttttcccccaggttttggtttcccctttcccccggggggggaaaaaaaagcaaagggccccccccttttgcccccttgttaaaaaatttccccccccccca

SEQ ID NO: 605405 - DNA, 174 bp, Homo sapiens
  misc_feature (94)..(94): n is a, c, g, or t
  misc_feature (98)..(98): n is a, c, g, or t
  misc_feature (133)..(133): n is a, c, g, or t
agaaaagcgaccgctggcttcctggtagagggcggcatgctcgaagggtctgctgggtgtggattggatgctgcggtgtggaggttggaagctntgtntggcccacttgggcacccacgcttctgtccacttntggttgccaggagacagcaagcaaagccagcggtcgcttta

SEQ ID NO: 605406 - DNA, 187 bp, Homo sapiens
ataagactcccttagatccccacttagatcaccaccctttttcagggggtaataaagtcatcttccttggaatgtagcaatctataaccaatcaaagccctgtaacatatgccctggtcttgtatggaaaatgttgtaatcctgctaaaattcctctctctttgcctgtggaagtgaaaccttaact

SEQ ID NO: 605407 - DNA, 297 bp, Homo sapiens
tatagaccatttcctgggtcctaaaacccctctccataaatgtaaaacaattaatgttatataaagtatgtgctctgaccacaaaggaattagtagatcaatataaagaatacatctttgacgagaatctcaccatattgaacaactaaataactcacttctaagtaactcctgtatcaaaggagacattacagaggtatttagaatgtactttgtatttaggtgtcaaaagatccagattcatgggataacactaacactaagcacatttataggcagcactcacatgtatctgga

SEQ ID NO: 605408 - DNA, 758 bp, Homo sapiens
gagagagagagtgagagagagagagagagagagagagagagagagagagagagagagagagagagagagagagagagagacagttagcgcctcctcctctctttctctctctttctctctttctctctttccgtctctccctctccctttctctctctctctcttcctctctccttctccctcctccccctccttccctctctctctcctccctctcctccttcttccctttctttctttctccctcttctctcttgttcctttcctctctctccccctcttcctttttcttccctcccttcctcttctcccctcctcccctctctctcctctctcccttctctctctctcctcctctcctctccttcctttcttttctctctctctctttcccctttctctccctcttttccttcccttctccctcttctctctcttcctctctctctctctctcttcctcccctccctccttcctctcctcccttactcctcccctcgttccctccctctctcttcttctctcctctccccctcctcttctctttccctcccttctctctcctcctctctctccccttctctctttctgcgtcctccctcccccctccttccctctcttttctctctctcccttcttcttctctctttctcctccccctcccttctctcctcccttcctccttcccttcctctcctcctcccttccctcctctctcccctctcactctccttctctctcttctcctctttccctcc

SEQ ID NO: 605409 - DNA, 194 bp, Homo sapiens
cagtctcgatgttgaggaacatctttttagagctgcaaaggaacgattatgattcagggtgacagaatgctaactgcagagtcaataggcaaattgaattcataagcagaatggagtatggtgttcagtatccagtggccagctcctcaagggcatgactgtggaccacattacttctgcttggtcttctgctg

SEQ ID NO: 605410 - DNA, 659 bp, Homo sapiens
gagaccttccctcgctgtgcatggaccagtggctgactctggagcacaggctgttgcttcccggtctggtgatgaatcctccatagtttggcatctcccgcacagaacagcatggtggcgggtgcctgtaatcccagctattcaggaggcttgaggcaggagaatcgcttgaacctgggaggcagaggttgcagtgagcagagactgcatcagagcagcctgggtgacagagtaagattctgtgaacagaaccagtgaagaaacacaagagaacagaagagaagaaccaaaaaattctaaaatttatgtggagtcacaaaacacccgaatagccaaagctatcttacgcaaaaagaacaaaactgggggaatcacattaccggatttccaattatactggagagctatagtaaccaaaacagcatggtattggcataaaaacacacatatagaccaatggaacagaatagagaacccagaaacaaaatccaacacctacagtgaagtcattttccacaaaggtgccaagaacgtacactgagcgacaagacagtctcttcaataaatggtgctgggaaaactgaatatccataatgcagacgaatgaaagtagacccctaacttctcaccagagaaccaccgcacttcttcaacaacat

SEQ ID NO: 605411 - DNA, 171 bp, Homo sapiens
gaaccagaagccatatcccaagttccatagacctcattatcttcagatcaatagaagcagaatcaaaatgcattctggagctttgaggtcaattgatttggaaaccactccggtgcaaagaatctctagattcatagattttggagtattgtttgaggggaaaagaccctg

SEQ ID NO: 605412 - DNA, 150 bp, Homo sapiens
gacatctatagactgggctccatttgtaaattctaatattaatttagttaattatatgccttgcaagtatcttttcccagccctagtttattttttgatttatattataggtgttttttgttggaccttaatttttaattttaaggtagt

SEQ ID NO: 605413 - DNA, 313 bp, Homo sapiens
atgcctctctgtatgggggcaggggtcttcctgcgagacacggagcggaggcgggtcttccaggctctagccaggatccacgagatctgctataacagcaccatcctctgggacgtgacggtgagggatctgctgccctcctctgctatgataaaagacttgagccaaggagcttgggatgcccctttcgcaagaagaactcacagatgagaaacggtttgccctatcacctcagcctgcccccaatcttgaggactaccagagtcggaactctaccctcagcttagagatccacgccccacagagagagcgt

SEQ ID NO: 605414 - DNA, 172 bp, Homo sapiens
agtgctgttatctgctgaatacttggagcttcccagatgaaaatgatacacgtgtacttctgcccagattgcaactttccatactaagcacttctgaaatgattcttggccctaaactatcacttacttcagactgaatgtcactgctgtatcacaaaacactgcagcaagt

SEQ ID NO: 605415 - DNA, 353 bp, Homo sapiens
tgagatggaatgtctacccagactggtaaccagtcactaccatccctgtgcagagcctgggcagccgtctttgttgcagtcctaacctcaggacatctttggagatggggtctgtctttaaggcagtaattaaattaagctggatcattagaatgggtccttactcaatatgactgatgtcctgctaagaagagactacgacacaggtgcatgcaaagggaacaccttgtgaagacacagcgagaaggtggtcacttacaagccgaagaggaaggtcttagaagaaaccaacccagcagacaccttgaccttagacctcttttttgtgagaaaataaatttctgttgcttaaa

SEQ ID NO: 605416 - DNA, 1267 bp, Homo sapiens
ggtggtggctggtgccgtggaaatggaagggctcaggagagagctgggacttcagtgcgagctgccgacggctagctaccgatgaagcatatatgaccttctacagatgaggtcgaagcatcattaggagcataagaacgagactcagggatatcatatagtatcgtacacaagagtccagattgcatatgattggactccgtgcactgattccgtgcttaactttcaatagtttgaactcctagtattgggaggattcttctatgatagaatccgtgatagttgagcagatgaaggaaatagacaaagagcaggctttcaggcaagttagtccactacttggctcgcatcctggacgacatacatcagacgatgagtgcctagacacgaggcatcgaagaagcgctttttgaacgcctgatggaccaaataggcttacgaagcttgcctacctcgggactcacgcgatgcacacaacgaacgacgcggccactgggattgctatagttgcatgcgccagagacaacacgcacactcacgctgggatagcagcagatgctcgcacaaagatgccgtaaaacatagacacacctctaaccgcaccacgggaaaacgcggaacacacagcgcacaagccacagctctggccacgcaggcggcaagcggacgtggacctccccttgaaaccaccgcgggccaccacaacacgctgcactcgcctcgccagcgtagcgtaccacgcatcgctgcgaccgcaggtcaaccaagctcgttactatccccgggccacggcacggcgcgcggagcaaccacacctccctaccacccacacctgacgggtcaccgccaggcgcaacagcacgcgtcacgtgcccacacggcgccaccatacagcggtcacccgcaccctagtccacaccctgctgcagcaacacaccgcggtcacccaaaacacccgtctcaggcccacccgagccaacccgaggggccaaccaatgaagcacagccagacacgctgcgatcccacggaccgcgcggtctggtcgccaaccggcccacaccgacgagcaccacggagcgcccgctatcagccacgccgaaggtcggtgaacacgcaacccccaccacgccaacggccaccggtgccccaccagggcaacacaccccgacaggccgcgcgcaaaccggacaacacgcggtgcgacaacacttgggcctgtctcgccaccagcgacggcacccggcccacctcgcgacggcaccttcg

SEQ ID NO: 605417 - DNA, 166 bp, Homo sapiens
acccctggttggcgcagcttgaggagttcctgaaccagagccgcccttctacttctggatgaatggtgaccgcatcgactccctcgctgagaacgaccgtgcagcagacgcgtgtgttgaacttcatgcaggtctgtttcaggcagggcttacactcttcccaggt

SEQ ID NO: 605418 - DNA, 153 bp, Homo sapiens
gtgtcagccgcgcagggggaggacgatgaagaagctgtaagggaaagaagctcacagaacctctacttctgccttgctttcaggatccaagcccagcacttgggtgtcttgcccaggtgaggaagagaatcaagccacgaagggggatggaca

SEQ ID NO: 605419 - DNA, 346 bp, Homo sapiens
gggcacggccggattagctgcggcggcggaattaacgtggacgtgaaccagcactcggaagggggtccaggaggcaaggctctaggctcggactgtggcggctcttccagctcaagctcgggttcgggccccagcgcgcccacctcgtcgtcggttttgggctccggtctggtggccccggtatctccctacaaaccgggccagacagtgttccctctaccccctgcgggcatgacctacccaggcagcctggctggggcctacgctggctacccgccccagttcttgccacacggtgtggcactcgaccccactaaacctggcagcctggtaggggctcagctgg

SEQ ID NO: 605420 - DNA, 81 bp, Homo sapiens
ctattatttaaagggtgacttacatttggaaacaacatattacgtataaattttgaaaattggaataaattgattcatttt

SEQ ID NO: 605421 - DNA, 470 bp, Homo sapiens
tgtgtgtgtacgaaagagagatcccgtcatgacacccaagattcaagtaggagcatattgcaaccgagaattgtacacagtgctcctggaagaagagtccatccgtgtttatccaagaaatcagaccacgtgctcaaacacgctcagaccaggtccaaccaggccccaaggagatgcgaggtaggatcagggccatcacctcaggaatactttgccccttccacctccacccagtgtgtgcaagtaacctaccagacctagattgtacagaagtgaaagatttgtaggatacttacccattcattagaatgagagatattttactgggagcagtgcttttctccatgagttctgaagggcacctccatccaattcctctatcctcagaggttctcacttctatttggccaaataaggaaaacatgtggatgtctcagtatatgcttctctttttcagaaattgcatttaa

SEQ ID NO: 605422 - DNA, 437 bp, Homo sapiens
ccgcctgcagagagcctatgaatggacatgcagtcagggaggtttcacataaccaagattcctatcccagaaaagcagatgtccatagctctgggaatggaatgcgacccttgtggacagcttacaaatgaccttaaatccctcactaacctaccaacactctcactaaacttaataataaatgctggtatatccagtgcattggtagcatcgcaggaccagaaggcagtgacccctctggacccagttttctctatcttgtgtgtgtcttttatttctcaacctgccgatctgcctgggaacaaagaaagagccctgttgcattgcaagctgctggccagatcccgcaatatagtcccagctacttgggatgctgaagcatctgtagagggagagctgcccctaatcataaatcaaaaataaaagccaattacatc

SEQ ID NO: 605423 - DNA, 563 bp, Homo sapiens
gcacgaggtttactcagaccataggcggcctacccaaattgatccggcgccacctgccaagctccctgggtctttagcccgactttctcattccaggtactggcacttgtcacagcatggaactacagccgcttgggatatagagggcatgttatggtggtcagcggcttttcaggctactggagctttcaacggtggttgaacgacctcccctgggaccaacatgaggcactagcacaacccaatctcccgcactctgggactaagtgtccgtgaccagggctgggtgtctagatctatgctagatttaagaccattagcctgagaatgcgtcttcaccgggtagcacccattgcttgatcagtcgcaataatcaccacattgcgaagtgtgagctccagtcaaagtgaccctggaacccttgggagacactgctgactcctcgatctctgggaatgggggacgtatcagggtccaagagcaccttcacttcatgagttctttggaccacctggaatgccatggtgaaatcccatggggtttcccaaagccgaacaataata

SEQ ID NO: 605424 - DNA, 479 bp, Homo sapiens
tgtaatccggctaaggtaggtaattccgggatcagctgggtcctctaagggctggttcaaggtccggctaacaagtctagagtagctataatcctagggctagtttagacatgagtaatggatccatattaagatattaacaagggcagcacctcacttccaggtggtaattacatggcagcataacaaatatatcccagaccatagaagcttaaaacaggcagagatataatataatctgacaaggtcgggggaaaaggaaccggggcacaaatttcccgggttctcggttcctcctaaaggcggtattccaagggtctatcaaagctctagccattccaaagatggcaaggtgagaggatcctctttccagaatgatccaggggtccataacaagattaagtggctaatgcagtggtggtgggcgggaatactccctcgagggtctggcaaaagggtcctctccatatggcagttca

SEQ ID NO: 605425 - DNA, 643 bp, Homo sapiens
  misc_feature (228)..(228): n is a, c, g, or t
gctggggatggatgagatgctcagaccggggtgctctcagggatgggagaacaccccagctcacagggtggcacccagcaaagctggctgggagatgggaggagctcagtgtcagcctgtggcagcgtggggagtgcggctgagtggggacgttgtccagaaggcatgtatgtgtgttgccctgtgtagaaaagccatgctgtgttgtgtgtcttgacctgtgtcccnctcctgtgcccccatgtgcagcccagtgcacagcctcctcccagtgctcatgtgccctgcctctggcccatgagtggtaactgtggtgcagtggcatgttgttgtgcatgtggccaatgtgggaatctctttgcactgtgtgtgtgagttgtgtgttgggaagccacagcctgggaatgtgatgcttgggaaagacctgagggcgtcatgcacgtcgcctctttgtggcgtgcgttgggaccgttgggatggtgtcgactccaccgtccaccccgagaccatcagtcagggttccatatttatgaaaagtacgggggtacaaggaggtcatcctccttgccacacggtcaatataacccaatgagtttgggaaacagcaacagataagggcttttgaaaagaccacgaggacccc

SEQ ID NO: 605426 - DNA, 138 bp, Homo sapiens
gtatcgtgtacatagatcgatttcaatagatatttcgtgtcacgagtggtggatatctttgtattgtccattgttcaaattctttagtcgtaggcttgttgcagggaattgcagtacccttgcttggatgtttttgtt

SEQ ID NO: 605427 - DNA, 287 bp, Homo sapiens
tgaagcatatcctccacaaagcctctatcagtaatcaaagtgatattttgggtttctgcttgtcttactccttgcttccttttaaacagttataacttatattggaaacagcagttattaagtcttgttaaggtatggtcatatgctggaataatagaaatctagttctgctcttttcaaacatttaggttgatagttattttacgttggtctaaagaagccagtaaatagtacccctctttcctacgtgagtgtgacaaactgagaagcaagcaaggagtaagaca

SEQ ID NO: 605428 - DNA, 184 bp, Homo sapiens
atattgcccagcaacaaagttggcaatcaccatcatgcaacatcagttggccgtgtcacattcaggcagcacattttcatcatgcacacaaatcaagtcattcctccaacaacagtcagcaatccatagtcccagcacattccagcacatgcgtccaccacagtgtggcaagcagcgccaccac

SEQ ID NO: 605429 - DNA, 183 bp, Homo sapiens
caaccgagctcgtacccctaattggttcttcgatgacgcagcctccagagtagctgggaccacaggcgcatgccaccacacccactaatttttgcctttttatttttatttttttggtagagacagggtttcgtcatgtttgccaggctggtcttgaactcctgagctcaagcagtcctcacg

SEQ ID NO: 605430 - DNA, 482 bp, Homo sapiens
aagcgtttagtatacgaggagctattttagttattctgtaaacgctccaccttacatgccacgtctgtgtgagatcaacagggatcaggttaggtcaccacacatgtactgaagctgggcagcgtctgctctgtgttctgtgtggaatggagaaaaaaacgcctgccctgctgccttccatgttcataggcccagcccaagagagtgacacacagtgctggccctgagacatttccacaaagtggtcaactctgccttgcatactaaaactttttgggcatctattttgaaaactataggagcctttggaaggccttctatgtttggaggggaagggtgttgagattgtcaccatccttcaagctgagactcctggtgagcctttgccaccatgaaaaccacatagctgaccagggctgtgcttgaggtacagaggacacacatcgtaaacaggcctgtgtcatgtttccttacagtcgttg

SEQ ID NO: 605431 - DNA, 930 bp, Homo sapiens
  misc_feature (22)..(22): n is a, c, g, or t
  misc_feature (62)..(62): n is a, c, g, or t
  misc_feature (275)..(276): n is a, c, g, or t
  misc_feature (278)..(278): n is a, c, g, or t
  misc_feature (286)..(286): n is a, c, g, or t
  misc_feature (289)..(289): n is a, c, g, or t
  misc_feature (291)..(293): n is a, c, g, or t
  misc_feature (297)..(297): n is a, c, g, or t
  misc_feature (304)..(305): n is a, c, g, or t
  misc_feature (307)..(308): n is a, c, g, or t
  misc_feature (313)..(313): n is a, c, g, or t
  misc_feature (327)..(328): n is a, c, g, or t
  misc_feature (331)..(331): n is a, c, g, or t
  misc_feature (333)..(333): n is a, c, g, or t
  misc_feature (336)..(336): n is a, c, g, or t
  misc_feature (346)..(346): n is a, c, g, or t
  misc_feature (349)..(349): n is a, c, g, or t
  misc_feature (368)..(368): n is a, c, g, or t
  misc_feature (377)..(377): n is a, c, g, or t
  misc_feature (516)..(516): n is a, c, g, or t
  misc_feature (622)..(623): n is a, c, g, or t
  misc_feature (703)..(703): n is a, c, g, or t
  misc_feature (808)..(808): n is a, c, g, or t
  misc_feature (862)..(863): n is a, c, g, or t
  misc_feature (890)..(890): n is a, c, g, or t
ttgataagaaagcaattatttnaaaaagtttaatacaaatacatgttaagtgtacaaatcangattcttttgggcaaacaagttgttatctaaagaagaagcaaaacctccttaacagttgtaataaaacctatgcctgaaaagttggtggctattacacggaaatatttatattgtgttcttctactcccaataactacttttaaagaatcaggataacttaaatagaatatcaaaatataaattataaataattataaaaatatatctgtccnncncccctatnggngnnncgtnggtgcannanngcctnaatatggggctatnnatncngcnaaatattcanganctatgttatctcaattttngaaaagggnacttttctgaagagaaatgtttgaagttaaggtactaagatttcactaatttcacacattggtattaccaacaaattgcgattaaacagaaatcactcttttagacaaaaatatttcccgataatatgaaaaaactggngtttccaaattacaaaaatgttgaaacagaaaggtcagaaaaaacaatgtgaaattaagaaagtatttttgagggtttctttttcacatagctccgcccccccccnncgcgcaatcctgcacaggcatgtttttttgtgtgcgtccagtgtggtcataattcctgtatgaagtgctgaataaagatngacacagctttctgttgaaacagcatttcttccactccctctcaactttgtagatagttgatgaaggtgagcctttgttcttgtagagcctcatgaatctctctntcagttccatgaaggtgggcttcacacatgagttatttgctaaagctaatcacnnatgagaatggcccacaggaggtacggnacacaggctggtcttccagccttcttgattccaggagaca

SEQ ID NO: 605432 - DNA, 80 bp, Homo sapiens
ttctggtcccccactgtgcccagctctgactgggaccccaatggtggctgctatgtaaattaaatctctccccgctgtac

SEQ ID NO: 605433 - DNA, 422 bp, Homo sapiens
  misc_feature (400)..(400): n is a, c, g, or t
  misc_feature (406)..(406): n is a, c, g, or t
ggaaacttgacccttaaaagctcccatccctgggacttttatataaagttttcttctcctttctgccaagctcgcttgggtggcggtcaccctgccattatctccctgaagcagaaggggttgaggaggagccacagggctgtccctggcagtctcaccaaagccctgagctgtgcagataaaccagtgtctgcaggtagagggatggagagaaagcttccctgctgtctactctgaaggttctctgcaaagaactaagggtagacagttcaaaaagaggcaagcaataacaaacttattaacgtgtacagggcaaaggaattccacaaatatggagactcaaagaaggtcttcgaaatgtagctttcgatgtggccacatgttggggaaaactttgganggcttnttgctgccggacttgg

SEQ ID NO: 605434 - DNA, 970 bp, Homo sapiens
ctgggtaactttgtttccaaggccgggccccttcagcgtagtttctcttcggcggttatctatgggtgtccggcgcgaatatgtgttggctgatacttcttcatcccccgttctattatgcccctgacgcttatacacatcttgcctgccttagccgtagctggttaccgctggggcagtgcatcgcgcgttggggttttctttgtcgatcattcttcacttggtactttcttttggcgttccacaggatgacttcctgcttgtatctgggtgccctctacttagctgtccagcccactgtgtgatgtcagctaggtccgacgttccccggtgggagtccttccgctgcttgcacctcgcctccagcatagagtcggcctgttgcctgagatggagcccaagctgtactgtgggcttactatgactggagacaggaaggagtttgagacactctgttcagagctgtgaccagggtcactcatgctcctcctctgccacagaagcggtaccccaatgttacaccctggccagagggcccatgctaatggaccacagcctggacgacctctgctcccagcgtcagcccagcccatcatctccggctccctcgcacagggcggctcctcagggccaaacgccccagctgctgaggactttgtgtttttataaagggaggggatgaggggtaaagatacaacactatttattttttatgatttactgtcatgtcgcggtgtgggatcttgagctctggcaatgctgagtgatggtacgttcctgttgtcagccccgtcaagcccagcgcgaaccagtccggcggccattcagccagggacagagcccacagagcccatacacctgtctcccaccagccggggccctcctggcagggtagggaaggaggaccccgggcacccccctcagggcctgacatcacgtactgctagtcttgcactgacgccataccccc

SEQ ID NO: 605435 - DNA, 289 bp, Homo sapiens
gataacttggcctccaggagtcacggagggcgtcacagaggaggtggcatctgagggcattttggggaacttgttcagcaggtggaaaagaatgggagggctcagcttcagctctaccactccatgggtttgttctaattttcttctttgccttcattcttctctgcctcccatttgctcctctggctgctcagttgttctccctgaagccctacagagaaaaggcatttggaaaaaacaccctaaagctgttatatgctccgcatcccattgcctccctgcaccccgt

SEQ ID NO: 605436 - DNA, 84 bp, Homo sapiens
aaagcagttccaaaagttttgaggttggacatgggcccgctccccccaatgaaataaagtttttttttccttcccaaaaaaaaa

SEQ ID NO: 605437 - DNA, 345 bp, Homo sapiens
gtaaaccccgcgggctgattccagagcctcacgctctgattttgtgcccaggtacctcttctgtcggccctgctcgggccaccctgaccgctcactctcaggtgtgctgggagctgcgctgcgtgctcctgccaggagtagcgggcatctcagcctcgacagtcgccaagtggaccatcgatgaggcggacattgtgaagatcatgagcgtcaagctgggcccagccttgaagatctataacgccattctcatgttcaaaaacgctgatgacaccttaaagtgactggcccagggctgtgccctcctgcagcccctgcttggcctccatctccagctgatgcttt

SEQ ID NO: 605438 - DNA, 174 bp, Homo sapiens
gctctctgaggctcatttgcagttgttgaattgtcccgcagttttcaatcatgctgaccatcagagtccttgtgactgagcagctgtcaaattgcatatcactgctgtacagattggaatggatctgtcttggtaaagtcagcctatattctcgtctgtggatatcaccccata

SEQ ID NO: 605439 - DNA, 270 bp, Homo sapiens
ggtacttttcacccttccctcacggtactcatccactatcggtcaccaaggagtatttaggcttgacgggtggtcccgccagattcacgcgaaattccacgagtcccacgctactcggggcaaccccacaccagtgccacgcttacagttacaggactctcacccactccggtacgccttcccagacgcttcaccttcacgcaacatttctcactggccaatcctgcggcagcagaaccacaaggcccccacaaccccgcacatgcaaca

SEQ ID NO: 605440 - DNA, 420 bp, Homo sapiens
aaagcacatgggctgggtgcggtggttcacgcctgtaatcccagcactttgggaggctgaggtgggagcatcacttaaggccagggcagcctggggacatgacaaaaccctatctctacaaaaacaaaaagcagggccgggcgcagtggctcaacgcctgtaatcccagcacttctgggatgctgaggcgggcggatcacctgaggtcaggagttcgagaccagcttggccaacatagtgaaactccatctctactgaaaatacaaaaaaaactagccaggcatggtggtgggcgcctgtaatcccagctactcaggaggctggggcaggagaatcgcttgaacctgggaggtggaggttgcagttgccgagattgtgccatgcactctagcctgggcgacaagagtgagacttcctctc

SEQ ID NO: 605441 - DNA, 165 bp, Homo sapiens
  misc_feature (161)..(161): n is a, c, g, or t
agtgacattcgttctgcgcctctcttcatgattgtcatgagtgattcgtgtcacttctcttaggatttagtctaacttgttcacatgtctcgtagagtatgacgtctttcaggacattttatttcctcgcaaaggaagaactcttttctttgtgtgctacnaatg

SEQ ID NO: 605442 - DNA, 583 bp, Homo sapiens
gatttgacacatgaatgtatagcagtcatgggaaactccacagctcatgttttcctcatagtagatgtgtgctcccatctccatggcttgtccctcacaacccccaacccatggtaagtcaggccagtgtcctcccagctgcagagctgagaaggctgcagcagttgcctactgagaacctgcctagtgggtcagagcaaagtgagaacgggcctgtgcccacccaccagtgtgactgtcagcccaagctcttggggatgtagtggaaagtcatggtggatacggtgaggagagatggagccgaggggtgctggcaaacagaggtcacgagatgtgcggtcaagggctcgtcgggcctatgaaggcaacagcaatgacatccgcgtggctggcaacagggaggtgagtgatgactccaaaccggactcagggagcaccagagaggtaggagggtgacgacgaggggtcagcgcaacaacagcctgacctaggtccactgaggacaacaatcggggcaaccaaggagcgcacatggcccacatcccggcagagcccgccaagaccacatcatgaggaccatcga

SEQ ID NO: 605443 - DNA, 205 bp, Homo sapiens
aatagtcaaaagaatcgatacaaaaaaactcctggctaggtgcagtggctcatgcctgtggctcccagactactcgtggaggctcagtgtggaagcgatagctatgagtgtgaggagtgttgaggcttgcagcgatgccatgatccttgccacggtgtactctagccttggcatgaccagacattgagacgctgacttgaggatg

SEQ ID NO: 605444 - DNA, 1083 bp, Homo sapiens
  misc_feature (13)..(13): n is a, c, g, or t
ttctgttcttccncttgtacatgtgtctttctttttcttcctatcacttctcgcgctccttcccgccgctgcgaggtgtgggtagttactgcctcgtccgggacccccttgtgtgcctcaggacccgggcctcccctcgtgttcttcctgctcggggcgatactttttccccgggcccgttgtcccttccttttttggggaccgtaggcacggttcacccaaaaccggtgttcccgtccgggttcccggtatttcttaaccaccgtccccaacggtcctttcaagctcctgtctttctttcctctcccaccacgctacccttgcccagtccacccagtcacatccgtgcagccctctcttggcttgcaagataacgcttttatttttattttatcttattttcattttcttaagcacaactgtgtgagagtgtagaagggaaggcttctcaggaggaacgtgacagtggattgggtggctggagtagactaaagcagtcatgtgacgaggaagaggtgatctgacccattttgataagtctttataaggaagaataaaataaacgtgtaagcaaaattttcttttgtaaaagcaaaagccacatctcttttctggatccttcaggactggggtttgtttgcttccttttctgtttctgtcttctcgctgctctgtgcccttggttgttttgtggtggtcctgtcgtccctcgtgcccctcggccacctgctggcagccgatgggggcactcggacatctacaaccctgcaactttgtacagagaaacacaatcagctctttctgcatgtgctggtcaaatccaaacccagagaacagaagcgctttctaagaatgaacaaatatgtgaaataggatgttttgtgtagataaagcattcttgttacatactggtcaatttgtgatatgttttaacttaatgtctgtgtttatttatggaattcggttttcttaataaatgtttgagctaatataaagcatattatttgacttttccggacaagtttatatcaagttaaatgtaaatggataaaataaaatcattttcagtatgtgatacagaaa

SEQ ID NO: 605445 - DNA, 457 bp, Homo sapiens
  misc_feature (32)..(32): n is a, c, g, or t
  misc_feature (151)..(151): n is a, c, g, or t
  misc_feature (198)..(198): n is a, c, g, or t
  misc_feature (200)..(200): n is a, c, g, or t
  misc_feature (202)..(202): n is a, c, g, or t
  misc_feature (294)..(294): n is a, c, g, or t
  misc_feature (323)..(323): n is a, c, g, or t
  misc_feature (377)..(377): n is a, c, g, or t
  misc_feature (383)..(383): n is a, c, g, or t
  misc_feature (398)..(399): n is a, c, g, or t
  misc_feature (401)..(401): n is a, c, g, or t
  misc_feature (405)..(405): n is a, c, g, or t
  misc_feature (419)..(419): n is a, c, g, or t
ttcaggtagtataaaggagttaagcagaaganacaagttattttgttgatcaaaaagcaccttagaaaatgctgcaaattcagaagaaaaatggattttgggcaaaactaactggtccacaagagaaaatgagaaatttgatttggctgcnaggcacaacttagctctggcagctatgttgcaggagcacaaaaagtntntnggattggggaggaaatgggtttcgctgaaggtaacaggtcccttgaggggcagcaagctgtttggatcattgttcaggggctgttttcagcncagatacctccgaggtgagttcagatcantagaagcagcagtttgttggtggaattcgatggatggcgatggcagttgcagcncaggtnttttggcagcatganntntttntttggaagtttggngaggaggaggggggttggcagcggcggctgttagttgt

SEQ ID NO: 605446 - DNA, 454 bp, Homo sapiens
tgctgcagcagcagctgctctgcatagtggtggccggggccaggccggtggtgcctccctcccaccttctcccgccatgagccatgtaagtcgggggactgtgccgctagattaatagtagaaagtgtatcatgagtgctgaataatatccttctatcatttagctaagacagttactaccatgacactactgtatgtgtcttccacacttgcagataaaagcttcatcatataggctatccatacatttccccaagatgctctactcttaaaatagtgaccattcatttacataggtggagactcactattcacacgactgacgtatacttgctagctgggtggcacacacgagggatcacggacatattagggaaaatacgcattggccttaaaacagagataccattctctcccaaagaacattccttcatgggcatacagattaggaagg

SEQ ID NO: 605447 - DNA, 359 bp, Homo sapiens
  misc_feature (302)..(302): n is a, c, g, or t
  misc_feature (310)..(310): n is a, c, g, or t
tgctgggattaaggcatgagctaccatacccagtctaattttaattttaagtttttttggtatatagtaggtgtatatatttatggggtacttgagatgttttgatataggcatccaatgtgaaataagcacatcatggagaatggggttatccataccctcaatcatttatcctttgagttataaacaatccagttacactcttttaaaatatacaattattattgactatagtcaccctattgtgctctcgaatagtatgtcttattcaggctactttttttgtacccattaaccacccncatctcanaaaagaaaaaaataaagagagatgggatttccccgtcttccacagccgg

SEQ ID NO: 605448 - DNA, 841 bp, Homo sapiens
tgctaccttatgaggccaatagcgagttttagcattctgatatgggcaggcatgctaactgagagtccagctctccagtgtagttcttgcttatggattggaatgtccctgcccattgctgttcgaatgctcagaaagggccttggcctcctgaagacatcttcctcacatgcctgctctagcctgagcctccccggggaaaaggagaggaccatggaagcctgtggacatcccttcctcccacaggctggaacacttttgagagtgagtgaatccactctctttactctctctcttctttgaggcttacatgattcctccccactctccttccctcattaacacacctttgtggggatgctcatagataccggcattactcgttgtcgttcccggccaatatattagaaaacaaagggttcctagaccggaaaatcagaccaccttgcttgtaacatcttggaaatggacttgaaacagactcacttcatggtctcgcaggtgtttattacacattctgaatatgggaataaccctgcgtttcggccggggttattttttcatattgggcctgcccctcgcccccccacccttggtaggagtggatggggtttcaccaactcatttttgggggaacctctattggaaacgactcgtttggttaggaagaaaattttaagtgaaattgggggacattatttcaaagggaaggcgcggtccccattaacagaatctgctggcggcctgtgtcctttgatagggatgtagcaggggtcgcgcttcttagctgcgttcccctggacgattgatttcgggcacgcgtaaaccaaccaacaagcgt

SEQ ID NO: 605449 - DNA, 421 bp, Homo sapiens
ggcggcggaatatggcggctccgatgactggacctcagaaaaaaaagtcagtgctgtggtccagtacactgatgcggtgctcactttatcgctcgtgcatggggtcccatatgcgcagcagtagtgggcctcagtcttcagaatgtggatctgccgaattgaagaggcctgagtttcacgctgcgcaccaggatgcagagttgtgtcggttaaaggttttgccttggttactccactgggtcacgacgagcttataagcgatgtatgcctatgttgcgagaatacagcttggtcgtagccgagccactcaagctgtctgcacaacttcacatattggacttctatgcaaagtacaagcacaacttcgcactttcacgtagcactgggacacatcatgtctaacaatctccagcgaatccct

SEQ ID NO: 605450 - DNA, 385 bp, Homo sapiens
tcgtgggtctgctgcagtacctcctctctctgcatcgatcgccgtcgcaagctactgacgtactcgcgtatagagccgtccagcctcacaccccacggtgctgttcattcagaggatctagtctcaacagacgcctcaggcgcgggcaagctcgagcggacgggggggcggcggagcctctctcgggggagccgcgcctgaggaggcggaagaacccccctgacgcgactgggtgtgcttctgcccgcacgccctcccgtctcaccgggccgtccctggcatgcccctgccgcggaggcagcggcggcagcggctctcttttccacagccggcgctgcgcgacccgctttggcctttcctgagcccgtcgggtaggctctcctcg

SEQ ID NO: 605451 - DNA, 138 bp, Homo sapiens
gcttgtgactaaggctgtgatacatgtgtgtgtgtgcacacatgcatgtacacggtgttggtgtgcatgtgtggctgcaaccgtgtgtgcatgtgttgtatgtgcacatgtgtgcgtgtgagcgtgcatgtacccagg

SEQ ID NO: 605452 - DNA, 179 bp, Homo sapiens
atggcgcgcagtgacttatgggcggggtacactgcggatggggtcttagtgaagaggttcttgatctccgcaatggtggcgtgagctccaacttgtcaagaaacaagttctcccttgtctttgcgtccagaatctccacctcgtaatgcttcatggctccctccgtgccggtccgcaat

SEQ ID NO: 605453 - DNA, 705 bp, Homo sapiens
tgaccggttcaagctggggttcacatgaccccctctttgggttcagttaatttctggagcagttcacagaacttagggaaacacttgtttatatttactggtttattataaagaatattacatgggatacagatgaagagatgtgggtagggcgaggtacaggggaaggtcgtgcagcttccatgccctccctgggcaccaggaacctccagtgttcagttatctggaagctctctgaaccctgtcctcttgggttttatggaagttttatgacatcagcattccttcccccagggtatagggtgggaccctcgcagggaagggtcttaagactccaagttggaaggtggggaaagattagagtcctgccttgtggcaggtgaaaggaggacaggagagagattgtgtttcccgatacctgcccttggggcctaacacacccaacattataacaaaaaactataacaagggctgtgggagttaggaaacaagaactgtagacaaaaaactataacaagggctgtgggagttaggaaacaagaactgtagacaaaaacctatgtatcatatcacattgggttttcatgctcatgtgtgagaagtgcctctttcaaaccttgttctgacacattatcttacatgcaaggaaaaaaagctaaacatacacttaccatcccacttctaggtatttgcccaagaaaaaaa

SEQ ID NO: 605454 - DNA, 102 bp, Homo sapiens
ccaccatgcccggccatacagtaggttttaattcaatgcctttgacatgctgagtacttcggatacagcagcaaaaaacaaaaacatggttactgctgtcat

SEQ ID NO: 605455 - DNA, 764 bp, Homo sapiens
gccgaaaggaggaaggaagcaaaatatcaacaacagccgaggcggctcaggcgctcggcccggttccccgcttgcctgccgcccgcctgctggcccccgcgcccacgacgggggcccaggcctcacggcgccgcccagggtcccgcgcggacgccggcctcatttattattctccctcgcccggagctgctggcttcccggtgttgaagatcccccggaccagtggcgagggctacccgctctttgccgtgacaacaccgttcccccagccgggctggaggctgtgcagaaggtatcctgcagaccatgaactgagcactggttcccagaccgttcatgagcacagttgtaaggtgtgccgagagccagcacgccagcgagcccctacccctccgtaacactgaggacccccggagaagatggggaggaaaaagatgcagatccgagcgaatcaccgacgagcaggaaccgactaggtgacgtgtacaccaaggcggaagtaggtctgatgaagcaaggcgtatgagcgtgagcgtgctatgtgactgcgacgatcgcgactcatcagtcttcaaccagtccagataagctggtccagtacgccgagcgaccgaacatggaccaaagtgctgctcaagtacacggagtacaatgagccacaagagaggccgcccagcgccgacatcatcgagaacctgaggaagaagggcttcaacgggtggacaggcccgagccgacgggaggactcgcgggaacagagcccg

SEQ ID NO: 605456 - DNA, 840 bp, Homo sapiens
aggagttttgcttagctggactaacagatttgtggatggattttacatgctcgacaactgggccaatcaaagatcagcttggagaagtgctcttgatccaattgctgataaactacttatcagtatcttatatgtcagcttgaccctatgcagatcttattccagttccacttaattacatgatcatatcgagagatgtacaatgtgatagctgcgagtaatattatgtcagataccgaactcttcaaacaccacgaacacttgacaaagtattcaatccttgctatgccactgctacgttaaaaccaaccattcatcagcaaaggtgaacttccagcaagtccaagttacatcttgagagggcaggctaactatgggccagactccacgtatttccacactactgctgacaggcattatttaattcttaaccgattactatgggtgtgaaaacaagactttctaccacacagctgcaatcagttactcagtacctcatccatgattggccggacaaattgtacacgggtgcttacacaaggcacggatgacaatgtgcaatccccatcactgtatcagataacgggcaacgcatgtcataccatcaattgggtcaaccaggggacccatgggacaaactgctacacggagacgatgtacccatacttaatctagtgaggtacagcatcgacaacaggtactcgtcagcatttcacactggtgttcattcaaaaatatagttcatggtgcattgacaacatcaaggttgatgactgggatatatgcccgacatttcaacaggtattttaaatacacaatacaattgcataaaatttaatc

SEQ ID NO: 605457 - DNA, 103 bp, Homo sapiens
caggcaaaatggaacatcgagttgatggaaccccttgattaagaaatctctggcatgtggaagtggttggaagagtaaccgcaaggccaccatcttgtgtaca

SEQ ID NO: 605458 - DNA, 382 bp, Homo sapiens
gaaaaaagtcctttttttaatgggcggggaaaggtaggctatccttaaccctcttgggaatttcccccaccgggggaaggtaaaattccctcagggggaagccaggttttatttggaatttatataccacccgcttgggtggaaaaacccttgttttcggaaaccctgggggagttgaactgataggtactgttggggcctgaagttccccctttaaaggggtttccccagccaaatcctgggatgggtataaaagggattggtggcccctcctatgccatatattttaatttgataatggggcccgataaaattataaatggggatgaagcttggggatcccttttcctggggaatccaaaaaccattttattttttttga

SEQ ID NO: 605459 - DNA, 173 bp, Homo sapiens
aacatgcgaacggactgatcaccgcagcaacgccttcgtcgaggcgatgaacgggctgctgcagcaggccaagcgcgccgcgcgcggcttcaggacgagccagaacttcatcgccatcgcctacctgcgcatgtccaagctcaagcacctgccgatcagtccgttcgcatgtt

SEQ ID NO: 605460 - DNA, 631 bp, Homo sapiens
  misc_feature (181)..(181): n is a, c, g, or t
  misc_feature (244)..(244): n is a, c, g, or t
  misc_feature (323)..(324): n is a, c, g, or t
  misc_feature (338)..(338): n is a, c, g, or t
cccgccaatcctcggagtctgtccaccccctctactccgccctcaagaggatttcaaagatggaggcggcggctccctaaaccacttttcgtgttcatccgcctccatccgagatcgaaacgggactcgtcggcccgtaggggcccgacaagaagagggaatccctgagaccaacaggggntatattgacgaggtgtctgagatcggggaccgtcttttgaagagtcagtccctccttagttgnccgcctcagctgaggccgccgccattttcttgctgtccgccgtctgagagcgcgcaagctgccggagctctccgagagnncccaaagagactgntttctgtgcctggccatggcatgggtggttttgtctgcctggatggcccaatgaggaactggcctcccacccagacttagctgggttatgcttggacctgggctggtgcaggggaacctgaggccaccacggactttcctgtggctgcagggcagacagccgagttccttgacggtcaacgatgactgcaaaacgtgatctcccacacaataatgctcacctggggcaagggaatggcagggtatgctgggggctgggccccagaagcagcagcaccagggcaaaaggatacg

SEQ ID NO: 605461 - DNA, 174 bp, Homo sapiens
ttagtcataaaggagaggctggaaaagttgatattggtgccagcagatggcgcgaaagcccttaaatatatcttgtgccaggcattcaaagcgctcaaatagtttaattcagagtcgtaaaggttaggcactggtatatagactataatgctcatatgtacagccatctaggag

SEQ ID NO: 605462 - DNA, 270 bp, Homo sapiens
tgaataataatgtatgatataatagaaaatagatgataatcagatagcaatcgtgcagctcaacagacatacagttgcctacactgtaacaaccgttcaggatgaaccgtataataaattcgtccatgcctagcgtctttgcatgtagcctgatgtctgtggagctgcacattgtaagttattttctgtatctctctattgatatctgcccttcttgtccttacatcgatcttggtttgtggctttcccacctgtgaaattgctcctttg

SEQ ID NO: 605463 - DNA, 1009 bp, Homo sapiens
ttcctgattcccaatcaaggggctccgagaaatgtgtgccaaatcgaatgcgagctatcatgtttcttggcaactcgttttcggaggaaacaggctttgtgggtaagttttggatcctggatgaggccaagatttggtaaattcagaaggacacccgtagggggcccctggtggtgctctacagagtatttagttgtataaagaaattcttagtgtgaaaatactcgttgcacagtcgatctaaggtcttccggttcttggtcatccgttctactcataggcgttggcagtgacatgtttgaagcattataaggcagtgtccaattaatacttcttacttcatgcccatatctttgatggctggggtcttggaggggaggaggtcaaatctcgattttgaacattactagctttgtcagttctaatgcagaagtataccattttatcgcctgtgataactaatcccaatattgttaaattaagggagcaactgttcacttactagtctatttcagcctagaagtaaagagtaatatgagtaacacaaattgcgttgtttaaaggattatagtgctgcattgtctgaagttagcacctcttggactgaatcgtttgcttctagactacatgtatatacaaagtctctttggcaagattcgacagcaagatcatgtagcatatcatcccattgttaacagcgcacttcaagaaatatgggtaacacagttagctaaatttagtacacagttctttttgtttttgtgtgtgtgtgctgtcgcttgtcgacaacagcttctttgtttttcctcaatcgaggagtcgttgctcatttgtgagccttcattaagctcgaagtgaaatggttaaactatatatcctgttagataggctgcatctttttaacaactcattaaacacaagtacaactctggcttttgagatgactatactaaattacacttgttaccagctgtagtgctgtaatacgctccataacagcgtatactgc

SEQ ID NO: 605464 - DNA, 181 bp, Homo sapiens
aagacggattctcactctgtggcccaggctggagcgcagtggtgcgatctcgactcactgcaacccccgcctcctgggttcaagcgattcccctgccccagcctcccaagtagctgggaggacaggtgtgagctgccgcacccagcctgtttctctttttccacccttctgtcgtcttctc

SEQ ID NO: 605465 - DNA, 530 bp, Homo sapiens
atctagaggaccctgcatgatgactgctctaaatttgctcggtccctcactctggctcatgccccgttggtggaattctatcttctagaggacgtgcaaggactgagtgtgaatccatattgattcaccagcactaacagttcccccatatatctccccactgctgggccctgctcacctcagtcgccaaggtctcagtgtgagtgagttaatcagatgcattcacgagtggcaggatgtctggcgcacgccgattctgatgagggaagagaaacagaggggctatgaattcgaggttcacactttcttcaaggcacaggtttcagctggacttaatggtataccttgtaatcccagtactatgggaggccgaggcaccgaggatcacttgatgccaggagtttgagaccatgctgggcaacatagatgagaccccgcagtctctaccaaaaagagaaagaagtataatcccggcactctggtgtgtcccggtagtcccggctattctggaggctgagcgcggtcagatt

SEQ ID NO: 605466 - DNA, 187 bp, Homo sapiens
gtgatggtgatttacacggctgggcatataaaagcattgcaaagcatggagtggagatggatcgtggtgcagatgagctggttcaatcactcctcgtgatcaacaaggaaacaaaggccctagagaggagaaggcaatgcctggccagacgtgggacctgaacccagccagggctctgactcacagt

SEQ ID NO: 605467 - DNA, 186 bp, Homo sapiens
acattcgcaggactgaactgaagctgtactgagtctcatccacagaggccagcgcattgtcccagcctggagccgtggccgatggcttccctacactgttccctttgttgctgtctggcttctcccgacatctttttagcgccagcctccaacgcactctaaaagggcggctattccctgctagac

SEQ ID NO: 605468 - DNA, 304 bp, Homo sapiens
gcgtattctggtgtctgatggggaaggagagcgcatttgctctgagctaaggaaaaggatctgcttctcagattttaactaatccctgttttaggctaacccagagaccaagtgtcccaagaaagaacccaatgcttcaaattcctgagcctccccatgaagtctacagcacaacatcagcctgcgttctcacttgcgctttttagtttaactgacaacgaaactaacaaactaaacatctctagtttgctaactaaacagcttaggctactgggaggcccttcaaccgctaaggaatgacaag

SEQ ID NO: 605469 - DNA, 313 bp, Homo sapiens
cggggtggagctaggcactgcaggtcctggattaacctctacatcaccagaggaacagaggaggaataggataagggtacggctaaaggctataagaactggtcatctagtgcgttcggaacagagagtaaaaggagcagatttctgggcccggaagaatggattcaaggcataatgtacagacaagggtatggtaggatgtgaatacagtgtaggtaaacctaggcattgagtgacgatgagagaggttgtctctagaggcaccatttaggccaggtgaggtcaccccgtcgggtggagcgggtaccgagct

SEQ ID NO: 605470 - DNA, 406 bp, Homo sapiens
gtgtattgaggctatacaaactacagatctgcgtgctagaaagatacaagttgtgccccgaaacaacatctgggcttttaaagcctaagattcacgtcctggtgttcacagcatcttcttcttgactatcactatgatcatatcctccgcagtggccccgatgctgaattccaaatgataccctttactatgtatcttgactgtatggagattattttttccttattaaaaaaaagaaatacgatgatctttccttctttgtccttcattaagaataactgggcgatactctatacaggctttgtaaactctcccttgaataatatttcatacttacagacatttcctgaatggctgctgcgcttaccctctgttcactccttcacataacatgtagcggtccctt

SEQ ID NO: 605471 - DNA, 928 bp, Homo sapiens
ggcggggcccgctggctctcgccgccgccgggcatggccgtgcagctgctggaggagaagctgacctgcgccatctgcctggggctctaccaggacccagtgacgctgccctgcggcacaacttctgcggggcctgcatccgggactggtgggaccgctgcggaaaggcgtgccccgagtgccgggagccctttcccgacggcgcctgagctgcctgcctggcaacgtggccctcagctggctgtgctggaggtggtgctgcggcctgggtccgtcctgggatcccggcccccgatcccgggccctgtgccgcgacgctgcggctgctgacccctgcacggtggctgtgcggtggatctcttctgcctggacctgagggccgctgtgtgtgcagcgtgtgcaccgtgcgcgagtgtctgccttccacgagcgggcgctgcttggatgccgagcgcctcaaggcgcgaggtccagctgaggagccaggctggaggttacccagcagcagggtcactccagtggcgaaggccagctactagagctgcgcaagcaaagcagcagatccagaactcggcttgcatcttggactcctgggtctcgggcaaaggttcagcaaggctagttagatggcctggaataacaggacacgactagacttgagggaggattgaggtgggcaaaatgctgggctggcacaaggggtcaaaaaaaagaggcagggctgggggggccttgggagggtgggggtcaccaaggctggaggagtccgggaggccttggagacagagggttagaaaactctttggaggatccaggcactcaggccaaaggcttttgggcaagctttgtagtgtagcagacaccagtcgtctccaaatcacacctctgggcatcacaagaaagcggggaacctggtacacataggcag

SEQ ID NO: 605472 - DNA, 639 bp, Homo sapiens
ggggttttgtttttgtttttaaaacttttcgggccttgaaaaaatttcccaccaacaaataaggaaatggggcttaggagaccaaaaataggtctctccagtggaacaataggcaataaataaaggttataaagctgggctttgtaaaccggcatgctgggattaaatcctggctcaatttctctgtagaagagaaaagagagggcacaaatcctctgtccatagatgaattccttcacccttcctagcctcctttttctcatctataaaatgggcataatactggtacctctctcatatggttgttttagaaatcggtggtacaatgtgtgtaactgacttatctcagggtcatggctattcactctagaggtggcagacacagtggggaagagaagcatctcggacctccacctgaattttgcttcttccaccttcttctagtgactttgggtggttatgtactccttctctgctttattactgtggagacgtaaaatgagagtaatggaaatacctgtctcatactattgttacgaggattaagtgagttaatacatataatgtctatagaacagttcctggcattaagcaaaagctcaataaatgttagagttattattatgtcattatcatcaa

SEQ ID NO: 605473 - DNA, 102 bp, Homo sapiens
  misc_feature (86)..(86): n is a, c, g, or t
  misc_feature (95)..(95): n is a, c, g, or t
gtgtcagcatttccagcagcggtgtcagcatttccagcagcggtgtcagcatttccagcagcggtgtcagcatttccagcagcggngcagcattnccagcag

SEQ ID NO: 605474 - DNA, 201 bp, Homo sapiens
tggcagccctcctccaaagccctcttcctgacgtggctgagaccaccgctgggactgctcctagatggatatcagcggcaataagctgtgcctgagcgagtttgtagtgacgcactgcacagcacccccagagtagcatgtggttctatatctgtaaagttattgggttaagaaacagttatacagtttgtagtaaacaca

SEQ ID NO: 605475 - DNA, 125 bp, Homo sapiens
tcatataacactcttttttcaaaacggttgaagaatagatgatacgaatgtgttggtctgatttctctatctggcgaactcaaaaattccgggtaatcatcaatcaggtcaatggtccgagcgga

SEQ ID NO: 605476 - DNA, 602 bp, Homo sapiens
tcggcatgtttcccacaggtgttacaggagctgccagctgcaaacacattcgtgggcacgggacaccacgtccacggcctctgagcagtactccgactacagctaccgcacaacccccccaaataccccagcaagcaggtagccagccctttcagctcagcaggattgttctggagtcttatgtgaggtatcaacattcagactccagcagcattgttctggagtcctagtgaggggcaatcattcaggccctcatagcagtattctggaatcctaagtgaggggaaatactcagaatccagcagcagtgttttggaatcctatgtgagggactaacattcagaccacagcaggaatgtcctggaatcctatgttagggacagatattcagacccttgtggcagtgttctgtaatcctatgtgaggaagaaatattcagaccacagcagcagtgttgtggagtcctatgtgagggacaaacactcagaacccagcagcggtgttccggaatcgtatgtgagggccaaacattcagaccacagcaggagtgtcgttgaatcctatgtgagggacaaacattcagaccctcgttgaagtgttct

SEQ ID NO: 605477 - DNA, 1236 bp, Homo sapiens
  misc_feature (1125)..(1125): n is a, c, g, or t
ccttcggtctctgcggctcgcggttggtgtgtgacgtgcttgtgtctgttgcctgggttgggtctttgcccttctgttcttctgtgttgctttgatgtgttggtgcgtgttggcgtctttgttggaccgatgctactactatccacgttgcctattgtgggccggttgcaaggggttttgccggccgttttcccgtcttaggcgccgtttgggaattcggcagaggccatggcgggccctgcgcatcggggcccggggccttgccctgggtgggccccgggtgctccgcgggtttccgacctgggcttcccggcccgggttctcgcccctgaccggggcgcggccgtggccccgtctttctcggaggccctgtccatggtttagggtgatgtcccgtcccccaattggcccccttggtcaaggaaccagaagatccaagtccctgggaaggaaatttatcgtgtggtctgcccctgcccactttaggaatcccgagatcctgtgagttctttccctggggccttttctcaaagatggaagttttgagagaatttatgcccccggtccaggaagctcagaccccggggcccggccccagcgcaaccccgggtttcaaagccaattgttgcttattcgggggactacccaatgggcccaagtccggttcttgggtggtttaagtggcttccccagagaaggttgcgccaccccccaatccccgtggggccactcaatccatggcccaagcgtttccacattgtgccccggtgccccagagaggctaacttgggggacacaagaatccggccaagccccaaaactggtctcccttgcacaaggtgaacaaggcccctgcggctcttgtgctggaacgcctcaatgccctgcacaccccaggggccactggcactcgtttccgcaccctgggcctaaagaaagctgctcacatagagatggctggtaatcgagtgagctgctacacacctcagacccgcgggctgcacctgccacccctgggcaaactttgcccaaggccaccctttgaatgccactttttataagacctacacagctacctgaacccccgaaccttctggaaaggaagaactgtaattcaccccagtncttccctaataccggagattccctgaccccctcgtccagacccccccccgagtttccctgcaacggactccggctcccactgtggctaccaacatagggtttttataccca

SEQ ID NO: 605478 - DNA, 318 bp, Homo sapiens
  misc_feature (49)..(49): n is a, c, g, or t
tattattctgtggctcatttttattttaatcctttaaatttaaacattnttttattttaaaaataattgtcactttgggaggctgaggcagacagatcacaaggtcaggagttcaagaccagcttggccaacatagcaaaaccccgtctctactaaaaatacaaaaaaattagccaggcttggtggcgggtgcctgtaatcccagctacttgggtggctgaggcaaggagaatcgcttgagcctggaggcagaagttgcagtgagccaagatcacgcctctgcactccagcccgggcaacagtgtgagactccatctc

SEQ ID NO: 605479 - DNA, 181 bp, Homo sapiens
tctctccacactggaggagcacaactaaaaagagctgaacaaactgacaatctctttaagcagaacataagagacacgcagatgagaaggcaataatttaacaacattattaagtcatattctggacatgtcacaagatgcacgcatttgtcaatttatcttttacccagtgtggagagag

SEQ ID NO: 605480 - DNA, 325 bp, Homo sapiens
aaagcacaaaatggggtggcctatgtgcaagaacagcgcgcgaacatgccaccacgtgaacctttgtttaaacggcgggaacgtcccaaaaagagcattacggactttggcgatgatccattaggtgtgaaaacaaccaaaactgccacagttgatccagtggtaccacccgctaccgcgccggctgactggaatttgtccgaaccggatattaaatggcagggaccagtgcgcgccgactgaatacagccacccaacgcccggccacccagctgtgtgcgaaccccctgaaagcccagccaagccgcaaccggcaatcaagtgt

SEQ ID NO: 605481 - DNA, 373 bp, Homo sapiens
atagtaggaaaagctacttgcgtagcatgtatatataaaacacacttgatacgtcaggatctaggaaaacacaagatgacctaacacgagaagtagttcacatagtcataacataaacataagctgcccagaaaaatgtaccaaaaatcaatgtaataaatgtcacataatatcaaaaagacgttacctcaatagtctatcaattatcatgtactataagtcaacttcctaaataagataacagtcctttattataagcccctactgatactatagtatacctttaaaaaacgctactacaaaaattttcttttctattaagatacgcttattgtgtacttagctatagataatttttgaatacaacgcctac

SEQ ID NO: 605482 - DNA, 490 bp, Homo sapiens
actctagagttacccctggtacgggagtgggtccccctctgtggacgcaaacatgtttattgcaggaaggaaaaacaaggaactattaacccaagtcacctctggagcaaagaccagctggggccaggtgagcagtgtcgtgctgtgatctttccagaaggctgactctttttccgtacacttttaatttgtttgatcatatccctattttaccttccttatttttaatgccagccagggctttctgggtaagagctgggcacacccaggtagaggcacgtgaccatccgcagctgctctccttgggctccagtttgtattgtttttgtttcttactttctgtggagatggggggggggggtcttactatgttacccaggctggtcttgaactcctgggctcaggcgatccgcccgtctcggcctcccaaagtgctgggattacaggtgtgagccaccgcgcccgggcaaaatcccatcccgtaccaggc

SEQ ID NO: 605483 - DNA, 796 bp, Homo sapiens
gagagagagagagagagagagagagagagagagagagagagagagagagagagagagagagagagcgcaggagccgcagggccgtaggcagccatggcgcccagccggaatggcatggtcttgaagccccacttccacaaggactggcagcggcgcgtggccacgtggttcaaccagccggcccgtaagatccgcagacgtaaggcccggcaagccaaggcgcgccgcatcgccccgcgccccgcgtcgggtcccatccggcccatcgtgcgctgccccacggttcggtaccacacgaaggtgcgcgccggccgcggcttcagcctgggaggagctcaggggtggcctggcattcacaagaaggtggcccggaccatcggcatttctgtggatccgaggaggcggaacaagtccacggagtccctgcaggccaacgtgcagcggctgaaggagtaccgctccaaactcatcctcttccccaggaagccctcggcccccaagaagggagacagttctgctgaagaactgaaactggccacccagctgaccggaccggtcatgcccgtccggaacgtctataagaaggagaaagctcgagtcatcactgaggaagagaagaatttcaaagccttcgctagtctccgtatggcccgtgccaacgcccggctcttcggcatacgggcaaaaagagccaggaagccgcagaacaggatgttgaacagaacaataagcctcctggggacttggatcaacaacacgagacaagtcccccagaaaaaaacccgggggctctcgg

SEQ ID NO: 605484 - DNA, 321 bp, Homo sapiens
  misc_feature (4)..(4): n is a, c, g, or t
cganctgaggatcccccgctacctggcatttcatgacagtccagcgagccaatcttctgttagaaatgaaggggcagtgagcaaaagagaccagaacaaagcagaagccatattccacttattcgaaaatcaccggcactgctcctcttaagggcctgtggataaaagggaaattaagttagtatcctccaggagacttccattttccaagaaaataaacccttatcaaatttcaagaaagtctgtaggcaggactagagaatcagtatattttataacttaaccatactttttcagcaattactaggtaattaccaagca

SEQ ID NO: 605485 - DNA, 558 bp, Homo sapiens
gagagagagagagagagagagagagagagagagagagagagagagagagagagagagagagagagcgcaggagccgcagggccgtaggcagccatggcgcccagccggaatggcatggtcttgaagccccacttccacaaggactggcagcggcgcgtggccacgtggttcaaccagccggcccgtaagatccgcagacgtaaggcccggcaagccaaggcgcgccgcatcgccccgcgccccgcgtcgggtcccatccggcccatcgtgcgctgccccacggttcggtaccacacgaaggtgcgcgccggccgcggcttcagcctgggaggagctcaggggtggcctggcattcacaagaaggtggcccggaccatcggcatttctgtggatccgaggaggcggaacaagtccacggagtccctgcaggccaacgtgcagcggctgaaggagtaccgctccaaaaactcattccttcttttcccccagcggaagcccctttcgggcccccccaaaggaaaggggggacgaaccagggtttcgttgccttggaccaga

SEQ ID NO: 605486 - DNA, 174 bp, Homo sapiens
gtagagacgacgtctcactatatggcccaggctggtcgtgaactcttgggctcaagcgatcctcccacctcagcctccccaaaatgctgggattacagacttgagccaccatgcctggctagaattcccttccttccttccctctgttctcccctccccttctgtcgtcttctc

SEQ ID NO: 605487 - DNA, 121 bp, Homo sapiens
  misc_feature (110)..(110): n is a, c, g, or t
tgggctttgacttaaatttccatcaggcctctctccagcaggtaatccctctgcttccgctgggtcccctgggaggaagtgaactcaagggcctagcccaaaacactagnggtgcttttct

SEQ ID NO: 605488 - DNA, 219 bp, Homo sapiens
tcgagccggtacctatctgaaagcagaatctagtagccaggagagaaacgcacacactaggtcagggtccccaacccttggccacagactggtactggtccatggcctcttaggaactgggccacacagcaggaggtgagcaagcattactgcccaagctccacctcctgtcagatcagcataagcattaaattctcataggaactcgaaccctattgt

SEQ ID NO: 605489 - DNA, 247 bp, Homo sapiens
acaccaagcaatcttcagggtcttccctaatccgctccttctgttgaaaagccagcattttactgagaacagtactcgtgtgtgtgaccctgacagtactgtcaacttaaaaaatgcacaaactgaacgttaagagttaggttttatttggggcaaaattaggatttaagcccaggagacagctccaatgtagccccgaaaaacacttctcactcattctataatgtttccctgtatccctgaagat

SEQ ID NO: 605490 - DNA, 203 bp, Homo sapiens
tagccctttactaggtatgaaagttctagatacacttagaaatgatgtttcctctctccatgccataaacagagagatttttgtttcttcggtcttcaccttttaaacttgtggggttcctggaagcgatcaaaacctctaagactgtgggcccccagttttgtctattcctacactagtctacactcttgtacgccagtcaa

SEQ ID NO: 605491 - DNA, 127 bp, Homo sapiens
cactgtatatcaattccccatgtgacagatgaagtgatgtctcaggactctgcgcatattctacaggcacataatctaccatagttatattatctgtaaactgaacaatgacttgattctaagtgag

SEQ ID NO: 605492 - DNA, 551 bp, Homo sapiens
  misc_feature (411)..(411): n is a, c, g, or t
tcacacctgtaattgtagtacttcgggaggttgaggcaggcagatcacttgagctcatgagtttgagaccaggtgtgggcaacatggtgaaaccccatctctataaaaaattagctgggcataggctgggcatggtggctcatgcctataattccagcactttggtaggctgaggcgggcagatcatctgaggtcaggagtttgagaccatgcctgaccaacatggagaaaccccatctctactgaagatacaaaaatttgccaggcgtggtggcacatgcctgtaatcccagctactcgggaggctgaggcagtagaatcacttgaactgggaggcggaggttgcagtgagccgagaccacgccattgaactccagcctgggcaacaagagtgaaactacatctcgggcnacaaaaccatgattccttttctcgagggggggcccggttcccaattcggcctatggggagagtattacaattaactgcccgttgttttacaaacggctgactgtgaaaaccctggcgttcccaaatttaatcgctttgca

SEQ ID NO: 605493 - DNA, 190 bp, Homo sapiens
agtaactgagtacttgagcaggtacaccaatctgctgaaaattcatttcttacccctgggacatttaactgataaacgtagatgaattaagaaagaaatgtgatgactttagatagaaagcatatcagttcttcattcaggaatgcagctttcttaggagaaaaatgtgtcgcaaatgtccgcaagatat

SEQ ID NO: 605494 - DNA, 867 bp, Homo sapiens
gcgactatggccggtgtgaagaccgtgggcgtgtagtacaccatgagaataaagttagggactggccttctgtgcactggggcctgtaagaagatgcgatttgttttgcctccgaagtcttacgggtcaggtcgcctgcgcacccagaatggagggatctgattatgaacgcctccgagaaggggttgatgtagcgaatgattttatacgtcaagttagtgggcagctattgccactaatcccccaggtgatgtgatattggcacgtcttttagcgcgaagttgacgatgcatccgaggataggtcggattgagttggcgcatttgaaaaatgcttgtacaaattgtactgatggtatcccatagcaaaagatcaccctcggtttcgtgttcgacttgttgttgggctcaggactggaacatttgagttagcggagtcatcgtctggttgtgctgtttgatgccactcatggcggtcgcgatcatcatgggtggatttcgaaagcgttcacttttacgatacgtaccaggtcgtcgtctgatagtcgcagttgcgaatcgctttaaatgttcggaactgaatctgggggcgggccctttcgttagattcatggagtagctggacgtgcactaggggaagatcccttgaaatgttgattcgcccgtggcaagtggttacctcgctaaaattcctggcgagttcgacaaacccatttaatgtctgaaagttcagcatctacatccggactgagtgacttcagttttggaagtccaggcataagataggccgaaattatgcaaagactttgacctcgcacggctttatgactatgcgtacagaactgcacttgcggtactcttacaggca

SEQ ID NO: 605495 - DNA, 1300 bp, Homo sapiens
attatcactttaaggtggataaatgatgaaaatgagcacccagttcatctcttaagcaacggtcagtttcaggggctggtgcaaaggcatgcagtgcaccattgttcgcaagccagcaggcaatgcaattcacgaaggcagtcccacttcaaagtcaacactggcaactttgcaacaatgtctgtacagccaacggtttcccttgggggctttgcaaatcaaaacacctaccagtggtcttcaaggttgcaagatgtggttcaggggccaggatggccatattaagtggcacaagacaattcagtcagctagttggaaggaaagcatgccagaagtcaagacagatgcaagagggcagggcaggcatgtgaaaactcttaaagtaatatcgtggaaagacggttcttgacccctgtgcagggatggctagacaaggattacaaagacaaaaaaggtaaaaacattgagattgagtgtatgacaggaatgcatgaccgaatgaattgatgaaagaagggatgaatgagtgaaaagattgaattgattggcatgcagtgactgagggcaacgactgagcggaacagctgacagcacaaaacggacgcacaggggcaagcacccactccacatcacgccgacatgagaacccacgaccccaaaacacatgccagcaaaaaggtccaaacatccgacactcggcagcaacggaagtccaacaaagacaatgcactgaacaacagacacacgcaggacactcacacaacggggcaccaacgcgaacacaatttcttaataacaacgaacaaaaacaacgggacacaacacacgacatcccgttaaagcacgacccgaaccaacgggaacgccatcacgaggtgcatggtaggcaaacgcagccgtagacgaaggccaccagacagacaggcacacaagaacacagacacaatcgaacaacacaaggcgcgtggagaacacaaccatctagcccaacaacaacggctggggaaccacgacccaacaacacgatgccacagtccaacaagagaaaacggtgcgcagcacacaaaactgtggcctactcgcggaacaagtagacctgaccaccacagccagggcgagaactagaagcaagaactccagacagcgggaccgaaccggcgcgaagaagcagcccaccatactaccgaacaccaaacaaggccgccacacagcaacctaccaccacagacaacaccgacagaccggcaacacacgcgtcacaaacgaacgaggacacgcaccgagacgaaaccacccgaca

SEQ ID NO: 605496 - DNA, 456 bp, Homo sapiens
acccgatgatggcgatattctttggcaagcacaatcgattgaacaactaaaagaagattatacgcgtcatttactttatttaggtcataagcccgcagtaaagtctctgttaacaccttatgaaaacttgctatcttactatcaaatgcaccataaagagcctgaaggggagcgtatttggcaagcgttagaggaagtttcgttgataggttatgaggatgttcctgtttgccaattgtcggcgggtcagcaacgtcgagctaacctggcacggttatggttaagcgaagcatcactttggattttagatgaaccgtttaccgctattgatgtggcgggtgttaaacgcttaactgaacgttttcatcagcatgctgagcttggtggtattattttgtttacatcccatcaagcgatgtcgggccattttggatcattaaaactgacggtcgacgc

SEQ ID NO: 605497 - DNA, 108 bp, Homo sapiens
atgctggtccctaccggcaggttgtactgtagagtttgtgtttgaatcaggcagtgcccaggcaggaggaaatcaagccctgccaagtactggcaggcagtctactga

SEQ ID NO: 605498 - DNA, 172 bp, Homo sapiens
gcttttttaaaagagatttatggatttgggaaatgtttggagtccacagttcacacaagaagctggacacggtttggtcatgtaaaaccgtttggggggccaaggtgggctttggtgccatccttgagatgaaccttttaagaaaaataagttaatttcaatttttccctga

SEQ ID NO: 605499 - DNA, 147 bp, Homo sapiens
gggaaaggagttggggaggggtttaaaagcccggggcatgtttggtgtttgtcatgccaacctaaacacctcatggttttgtttcccccccccccctttgttttacattttttataaatgtgccaaactgtgtggcctctgccagga

SEQ ID NO: 605500 - DNA, 677 bp, Homo sapiens
aggagaacgctaccacggacctcctcactaagctgcctgcgcacacagtgggtggatgtgaaatgtgacatggaggtgagctgcccagatggctatacctgctgccgtctacatgtctggggtgcctgtgggctgctgcccttttacccagtgctgtgtgctgtgagtgaccacatacactgctgtccctgcggggtttactgtgtgacactgcagaagtgtgtacctgtgaacagtggtgccccaccaggtgccctgtgatggatgaatgggccccagctcacctcagcctgccatgacccacaatgccttgaagacgacgatgtcccctgtgataacttgtcatgcatgcttgtccctcctccgatacctgcttgccaactcacgtactggggagttgggtgcttgcttgtccaatcccagaggcttgtctgcttgcttcggaccaccagcactgctgccccccagggctacacgtgtgtagctgaggggcagtgtcagctgaggaagctgagatctgtgtgctggactggctgaacgatgcctgtcccgcgggctttccttatcccatcccatgagacatcggttgtgaccagcacaccagctggccggtggggcaggacctgctgccctgagctgggtggcgcgctgggctgcttgcatgttgcccatgctgg

SEQ ID NO: 605501 - DNA, 287 bp, Homo sapiens
ggggggcgctctcgcggtcctgtctgatggggctgctttgcctcgctgctgctacgtgacggcggctacgtacgtggggtgacggcttggcttacgcgtttagacgggctctttgttgtgggtctcatgagttggcgtgtaggctacctcatgctccggcgcggctgacaccgatatcgccgatacggttgtatcggattgcgtgaatggctgctgtgttggcatctgctcgggcgtatcatcaactgatgagcaagaaggatataattcctacgcccattcagcct

SEQ ID NO: 605502 - DNA, 366 bp, Homo sapiens
tccctctctgcgaccattcccaatctcacccagttatcttatgccaaaatagttctccctatcattcttaaaaacttggttttgcccggacacggtggctcaccctgtaatcccagcacttagggaggccaaggtgggcaggtcacctgaggtcgggagttcgagaccagcctgaccaacatggagaaaccccagctctactaaaaaatacaaaaattagccaggcatggtggcatgagccttgtactcccaactactcaggaggctgaggcaggaaaatcacttgaacccaggaggcagaggctgcagtgagccgagatcacaccactgaactccagcctgggtgacagagcaagactccatctt

SEQ ID NO: 605503 - DNA, 106 bp, Homo sapiens
aactgctgttcgctcatgtacatgcacgccgttgcaggcctgccgctgtcgtcgggacgcaggtcgatccatgcaacactgctgcgtacaacaccggttgccacac

SEQ ID NO: 605504 - DNA, 160 bp, Homo sapiens
taggtgactactgtggttgactatcttacagccttttggtactgggacactatcaccaccaaaaatgtatccctggttatatttgaaaatttgttaaattttttcttttttgttccttccttttttttgttttattttgttttgttttgttttacagcat

SEQ ID NO: 605505 - DNA, 502 bp, Homo sapiens
  misc_feature (4)..(4): n is a, c, g, or t
  misc_feature (21)..(21): n is a, c, g, or t
  misc_feature (317)..(317): n is a, c, g, or t
tcanacagagtttcgctctgncaccaggctggagtgcagtggcgggatcttggctcactgcagcctccacctcccgggttcaagcgattctcctgcctcagcctcccgagtagctgggactacaggcacacaccaccatgtccagctaacttttttgcatttttagtagagactaggtttcaccatgttggccaggatggtctcaatctcctgacctcgtgatccgcctgccttggctcccaaaatgctgggattacaggcatggggccaccccgcccagccatgcattttttaagtaatagcagcatctttctttngcaggctttggcaaagtcttctctataatttggagtcagtcacacacctttagagggttgttgtgagttccacagcctcatctgtcctatttgggaatacaaatgggtttttgtaatggtttgttgtcacattgatgctggttcctcatcttatgtttcatccaagcatttgcaatggtggttga

SEQ ID NO: 605506 - DNA, 332 bp, Homo sapiens
  misc_feature (5)..(5): n is a, c, g, or t
  misc_feature (29)..(29): n is a, c, g, or t
  misc_feature (42)..(42): n is a, c, g, or t
  misc_feature (60)..(60): n is a, c, g, or t
  misc_feature (272)..(272): n is a, c, g, or t
gcacntgaagatcctggtgtcgccatggncgccgcccgcccngttgttaccggtattgtnagaacaagccgtacccaaagtctcgcttctgccgaggtgtccctgatgccaagattcgcatttttgacctggggcggaaaaaggcaaaagtggatgagttccgcctttgtggccacatggtgtcagatgaatatgagcagctgtcctctgaagcccttgaaggctgcccgaaatttgtgccaataagtacatggtaaaaaagttgtggcaangatggcttccatatccggggtgcgggttccaccccttccacgtcatccggatcaacaaga

SEQ ID NO: 605507 - DNA, 116 bp, Homo sapiens
  misc_feature (67)..(67): n is a, c, g, or t
  misc_feature (93)..(93): n is a, c, g, or t
ttcttttaatttactgtttttggggggttttgttttgttttgttttgtttttgttttttgagacagnacctccctctcttgcctaagctgagntcgtgccattgcgctccagcatc

SEQ ID NO: 605508 - DNA, 766 bp, Homo sapiens
agcggggcggtggctgagaaggcagcggggcggctggtgcggctgtgcggctgttgcgtgctgtggaggccgcagtccgggtcctggcttcggcctcagccccaccatggtgacgcttgcttgaactgctggtgctcctggcctgctctcctggccacggtctcgggctatttcgttagcatcgacgcccatgctgaagagtgcttctttgagctgggtcacctcgggcaccaagatgggcctcatcttcgagagtggcaggagggcagtcgcttcctggacatacgaccgtggaggtgcgaggctagactgcaccagcagctgagggcttggtcgacgatggccactcgggggattggtggcaacctgggaccaagacgcggtggcctagatgatgagggagtgtggctatgagaaaagattctgctggtcgctgaagatcaccttgggaagaaaggccacgaggggccaggaacggaggcagaagtaaaagactggaatgcaccccggggggcgaaagagacagacgcatgaccgtagagccaaagcagggaacacaagccaaggtggcaaagtcttgaacggtgggaggtttgaggttggaaatataggcataatgagggaagcagtaagatgcagggaaaatagaagatagagagaggggaagagaagaggggatattaggtaagatgttaaaagaaaaaggggagtttaaatgttattacaaaaaaaggagtgagagtaagaaggagaaagtgtagaaaga

SEQ ID NO: 605509 - DNA, 612 bp, Homo sapiens
tgctgttccagaggatccccaggaaacagctatatttccattctttataaaatcccttccgctccacagattacacaagagcacacaagctgcaaccctcctgatgtccactagcacaaaccaacctcagggcttctatggtgcattcattattttgtagtccatttacctgtgtattggtataaatcttacgtgcctatcttttttcccatagtgtcgctgatgaaggttctgagtattgtgtccctgttttctgcacaagccctgtggtgtttattcatcatgctgtatggcacggtgatttttttagaaacacacgggttgcatcatagcaggactcagtgcattgactttttatttagatatattgctggactcggtaagatttaattaagatgtccatgtctagctcgtgtatatgtaaaaagtagaggctcctctttaaaggctttactccccgtctaattaggaataatactaacttctcttagaagcataatttattcaaagacctgtgctaacattcttaaatatctgctggccgtaatgaggaaatcaaagtactttatgttcttagctcgcacaattcagcctaaatatttggcctggcat

SEQ ID NO: 605510 - DNA, 100 bp, Homo sapiens
tgccaccacctctccgatcgtactctctgtatatcattttccagcaatagaaactgctttttgaaaacagcactcattttctctctctacttggggtggt

SEQ ID NO: 605511 - DNA, 319 bp, Homo sapiens
tcagtcggggtctcgctctgttgcccaggctggagtgcagtggcacgatctcggctcactgcaagctccacctcctgggttcacgccattctcctgcctcagcctcctgagtagctgggactacagttgcccgacaccacgcctggcaaatttttttgtatttttagtagagacggggtttcactgtgttagccaggatggtctcgatctcctgacctcgtgatccgcccgcctcggcctcccaagcttgtgttttcaattttctttaacaaccaagaatgtttgcagataaactattgatgctattgcggctggttct

SEQ ID NO: 605512 - DNA, 243 bp, Homo sapiens
cttcctcacctggctgcatgacggaaagctgctgccaagaaagactgcgcccctcccctgccctctccctgaaataaagaacagcttgacagaagccctggctctcctgctgtcctgtgggttgggttgtgggtgttgtcgggggccctgcagtccccttgtcttggtgccctgctctgtagccactaccctctcctgggtgcttgcctggttgcagtgcacatgggtcaccgcagctcgcaa

SEQ ID NO: 605513 - DNA, 1990 bp, Homo sapiens
acacctccttattcagacgtccagatgactaggaccaacctatgccacaaacattcattattgtcaccgactcaacaagtcatacagacgataagtacagatcagcagaccctagtgcgactattgataattatatctttctgtcatgggtaatactcgcatcataatcaggcgagctatgagtatcctgaacgtgagttaccccctataattaatctgtgctgccactacagtagttatgtgcgctatcacacactgacactataagcaacggtagagccttctgaccttctataccctcgccatcctcatgcactaacgtccatgcgtacgggcaatcatgtctaataaggtagggaagcgccgcgaagcctagtgatacacgcgcattgtaagccaggggtcctagactcttaccacgtgtatggcacgggccagacataactactcacattcgcctgcgctagggctcgtactcgacgtactgagctctgaatacccaattcatttcttacccctttcatcaagctcatacagcaccatgctgttagatacttaccccgtccctcactccttttaaaggcgcgtccttaatacaatactctcccctatgactaacacacaactccaacaatacccattgctaacggcattcccaaacagaggcgcaccgcgcaaatggcccacgacatttccaatcctccccgaagaaagttaagcccttaaaagagggagggccaccacacccattccgtttacggggttatcggatgggacacagtcaccggtgtataccacataaaagtttctcatacaaaggcaccgaggcgacaccttatagacctatgtacgtccccctcttaaattatgtacgatgctcccccaaggatacacacgttaaatgaacggtaggacgaattggcgggcgtatttcaaaaccgccactttcaacacacttcaaccttcacaatccatagaacacccctaggacaaacagcaaccattcccaaccaccagacccaactcacattttccatatgcaggaagcctccccctgaccaacagagacaccccgaaaagtggaagggaaccccccccaattttcacttactaagccccataacctaaccgccataaagtaaactttggactttcttctcacacacgcagttccaaccctccttcgaataaagctataacctcaatttcccttatacatgtcaccgtgaaaccaaaagggagcccttttgccaggggaccaataaagttccattcgccgccaatgcacttgacaggccaaccgcatatcaacataacactacccgcggcaaagaaaaatcgctaacacacacgacaatttcgcgaaactacacaagtacagctgtacttatcgcaccctgtcaagctctgatcagaagcatctccacaactacacggaagttacggcaacagcgagaaatagcaccacagtgtgttacaagcaccacaccacgacacaacgtctgtaacaacagcgtgaccaagcaaaagataaaaacccgcagacacgaggacaaccccacagacacacaatactagcacaacaccgagagaacacaaaacagcaaataaccgaagagagcacccccaccacgggcgacacaaacaacaacattgatagcacatgcacaccgcagccacacacccaaacgagagaccgacaggctgacaagtaacctcggactacgctcgaactagagagacccgaacacaaacaccactcgcagacagcagcggatgacctacaacagcacaacaggcacgaccgctcccacacaacgagacaaacagaaagacaagaagatcagacacaacaggacagaacgaaaatcaacgaaacgacaagcaaagtagacacagtgacgcacacaagaacacaagacagcacagcaaacaacagcaagacaatcagacacgcaacaaataaacaacaacagcagcgaagaagcgc

SEQ ID NO: 605514 - DNA, 913 bp, Homo sapiens
  misc_feature (579)..(579): n is a, c, g, or t
  misc_feature (913)..(913): n is a, c, g, or t
ggtgaacagatttatctaagaaaaaaaaaaaaaggattaaaatagcgaaaaattaggaccaatttacgataactagttagtcaaagctctatggaacatgggttctcctgggccgaatgggtatgacacctaagttagaacacagcctgggtgggggggtgccctctctagcctggtatcagcagctgtgtaacccctttccgggtaaaaggggtcatcttaccaaagtcatccatgatgaggggacaaagtcgccatcccatctgcggggaatccatgagctcctttattcctggctcacagaggcagccacgaggcactacaccaggttattatattaaaagccattaaattttggaatggccctgtgacaagtttccttaaaaaaaaacacacaacaggttcatcatcctggtcacactttctatcaaactccccaacttttctgggtgggtaagccccttggcggttgttttggtggccgggcccattcttatcacgtaattactggggcagggggagagggaagtccagggtccccagactttcaacccggtctattttgtgaatctggcctangcgtttcacccctgttaaactcggtgtcggggacttcttcccaacagctacgcttcgggggggggacaaccacttaacgcatcactgggtggcaaaccgtccaaggcaagtggcttttatctggccttcacagccctgggtaacaaaggagacagaatcgcttccttaacagggcgcccatggtaagattagacgcgcaacacctcttctcgtccgggtgagtaaaccaacgcgcagtgcgctctctcgcaggggagacggcgggagacacacaacgcttttcagcacaccactcttcgccgtctccgtcatcgcagcgcacactaacacaccn

SEQ ID NO: 605515 - DNA, 108 bp, Homo sapiens
actacgacaggatgacgtgaaggaggtgggtgctgcgggttagcctgccggcgttcccacagagcaaaggtggttcgtggcattgtgaaggatgtaagacaggatgag

SEQ ID NO: 605516 - DNA, 444 bp, Homo sapiens
tggcaattcccggaaagccggttcttcgcctaacgtgctggggccgatggaacaaggacaggcgccgatctttatcgtgctcaatgccgcgccgcaggagatcgtgttcaggatgccgaggatggccgaatacaagagctggcagcaggttctgaacacgacgaagtcggagcagaccggtgaccagattgcggccggcgccgataccaccgcaccgccgcgttcggtgctggcatttgcaggctccgcatgagcgcgcagcatttcggacccgaactgaccgctgatggcgcgcgctttcggctctgggcgccggcggcgaagcgcgtcgacctgctgctggacaagccgcacgcgctcacgcgcgatgcggccggctggtacgtcgccgagattccgggcacgcgcgacggaacccgctacaaattccgcatcgatgaagag

SEQ ID NO: 605517 - DNA, 324 bp, Homo sapiens
  misc_feature (252)..(252): n is a, c, g, or t
attagatccactatcagtctgtgatatctgatatttcagagtctttggtggttcgtgtcacacacgatgcgtgttacagtgagctggagagacggctctatatctctgagcaaaatcggccggcgaggaagcaggagagagacaggtaaagcgcagattctgcgtgctggggcaggtcacagttgtatggtggagcgaccagataatcatcagtcacctcacaagctgtgctatgggcgtgtctcacaaggnctgatcaacagagcagctcggcacatattaggattggatagtgtgtagtgggacgagtcgatcgtatatgcc

SEQ ID NO: 605518 - DNA, 288 bp, Homo sapiens
tggaacattcgtgtcacgaaattcgggttgagggaagcaccacccacaaggaagccatccactattaggctggctggccagtctccttgcaggttgccccagtcacatagtctccataaatgatacgggtgctctgacccatcgcttcagagacgttgtacttcagtccatcctcggatcttctcgtgtacttcctggtcctgttggggtgttccagtcttgccagtaccactggaacacatcaggctcatacgccatgacgacctttcctccggacacgaatgttca

SEQ ID NO: 605519 - DNA, 349 bp, Homo sapiens
  misc_feature (59)..(59): n is a, c, g, or t
  misc_feature (63)..(63): n is a, c, g, or t
  misc_feature (147)..(147): n is a, c, g, or t
  misc_feature (185)..(185): n is a, c, g, or t
  misc_feature (199)..(199): n is a, c, g, or t
  misc_feature (202)..(202): n is a, c, g, or t
  misc_feature (205)..(206): n is a, c, g, or t
  misc_feature (208)..(208): n is a, c, g, or t
  misc_feature (214)..(215): n is a, c, g, or t
  misc_feature (225)..(225): n is a, c, g, or t
  misc_feature (236)..(236): n is a, c, g, or t
  misc_feature (250)..(250): n is a, c, g, or t
  misc_feature (256)..(256): n is a, c, g, or t
  misc_feature (262)..(262): n is a, c, g, or t
  misc_feature (278)..(279): n is a, c, g, or t
  misc_feature (294)..(294): n is a, c, g, or t
  misc_feature (296)..(296): n is a, c, g, or t
  misc_feature (300)..(300): n is a, c, g, or t
  misc_feature (303)..(312): n is a, c, g, or t
  misc_feature (314)..(314): n is a, c, g, or t
  misc_feature (316)..(321): n is a, c, g, or t
  misc_feature (326)..(326): n is a, c, g, or t
  misc_feature (329)..(329): n is a, c, g, or t
  misc_feature (331)..(331): n is a, c, g, or t
  misc_feature (336)..(336): n is a, c, g, or t
  misc_feature (340)..(340): n is a, c, g, or t
caaaataaaaatcacacataaactcaccactttggagatcagcatggaaaacatttgcnatgngtcctttgtttccctataagtgcatatatggttggcaatttttattacaaaactaaaatcatatgtattacagaggagtaactngcttttttccccacttaacattatattgctggtatttnccaaagtcattacntanttnncncaaacnngatttttacngactataagtncaataagccatttncaattnttttcntaactaatatatttcnncttataccatatttntncttnccnnnnnnnnnntntnnnnnnggggnggngnttggnctgngtcgggggg

SEQ ID NO: 605520 - DNA, 307 bp, Homo sapiens
aaaatagcagctgcaaagctgtggagcactcaagatggtaatacttgtgtagaagtaattgttaccaatgaaaatacatcatgtacctgtcctagcagtggcaatcttttggggtccctaaaataaagaaaggctatctccacactgtaatgggagtcattgtggatattcatctagcatggaaggcagttaaacaggtttctcggagggttcggattttccctcacttaaggcatttataatcattatgaacacggtgatgactcttgttttacacactgttgagacaaagaggttgtatggttat

SEQ ID NO: 605521 - DNA, 1267 bp, Homo sapiens
  misc_feature (1267)..(1267): n is a, c, g, or t
gtgccatgagcttgatgtgttggtgcccggcactggaggggcctgcggaccaataggctctgccctgcaccttagtggctcgggatgctgctggccctagccagggtgccttgtggctctgggtggcatgctgctggagtgacaggctgtgggctccagctctgtcacctgttgtcctgctgctgctgcttgctcctactgctggccactggcctagcacttggccttggctgcctgcctcagcctgtgactcagtgtgtgctactaccaccctgtgccctggcctatgtgtgccgtgcttgttggtggcctgcactgctgggatgccttgcttcttggggccaggccccccaaggtcagcttggcttgcagtgcccgatgcttgagctggggtccacagacaatgacctgtgagcgacatggaggatgagcatggacacagactatgaccacgatcgcggatggtggcctgcatggctgaccctgggggaagggcgagcagcaatgttggagagggcgtccagcccagaagcagggtcccctgtgcgggcttgaggaagccagagacctgtgacactggatgtgctgactgggtcctcggctccccagtgacagcgagccgcagggggcaggtgctgaggcccttgctgaggtgagctttcacgccttttgcttgtcagtgcgcaggcttgggattacaagtgccagggcagcttgtgggccagggcctccagtgtcaaccgaacttgtagatgccggtcattgggttgtcccaattcccttttttaccaggcaggattcaatcaccctagtagctcttagataccaatgattccaatttgttgattgtgaccactatcccatattaacaattccttagacttttacaccccataacagatacacacagtcatattttacactggtacaccatgtaacgtgcccaccatacacatgattatgcgccctttggacattcagactcctttgacctttgtaatcaatagatataaaagaatcaataagaataaatgatagaaaagagaaaggaggtaattatggggggaaagagataaaaagaggcgattatgtattatcatgaaacgattatagaagaggaggaggccagatgggtatttcagagagtagaaagaatgacgaacgagagagaagtagaagaagagcgaggactttatgggcagaatagataacatatagatagtcagatagagtagatgagaggagatgaagagtaaatggagatagn

SEQ ID NO: 605522 - DNA, 195 bp, Homo sapiens
  misc_feature (36)..(37): n is a, c, g, or t
aatctttagtgttgtgagcccttaaaagggacagannattgtgcactcggggagatcgggattttaaggcagtagcttgccgatgctcccagctgaataaagcccttctacaactcggtgtctgagaggttttgtctgtggcttgtcctgctacaagctgagattgcatcacatacccctgcactccagcttggg

SEQ ID NO: 605523 - DNA, 443 bp, Homo sapiens
acggataccagatagctcccggaacgtagcgaagtgcacaggtggcatcggtcttgaaacgaaagtcattgtcgtgatagagcgggggtcaggtagctacccttcactgggaaagaagatactctcgagcacgtagaagtcttgcataaggccatcacgctctggttaggtactcaggctccccacagtgtgggtaatgcctcactagatagcacctttcaaggctgatgaggttctctttttatatttcgtctctcctgaggaatcaacacttctattgcctatatccttgatgggcatgccacaggcttaaggcacctcacatgccaagggtctcttgattccagatgctgctgaggacaaggtacaggatgggaccgcgggatctaagtgatgataaaccgatcgaagaccattgcccgtagaacgcaaagccatcttag

SEQ ID NO: 605524 - DNA, 568 bp, Homo sapiens
aggctcggccggtggttttgcatgaggcgggcaggtgtctgtgagggacctgacggacgcacgggcgggcggctgggagccatggagcgcggcctgggcccggtgggcgcgggccgggggtgtgcgcttcccacggcacgacatggagacctgtggttgcgaggctccctgtgggctcggcttggaccgcgatggggctgggccctggcctcctaacggggctgctgtctgggtgcggtaagcatgggggtggcagcatcgtcaccaccaagtgaccagaagagtcggagaagcaaaccaacaaaaacggtcacccatgacagatgcacaagagcctgtagatggacattcgttagtaagaggagacccagagttggacgagacacaggaacatagagaagggagcagcagcatagaaatgaggcatataagaatgaaatagagaacatgaaagaacactactggctgaccagaacaggtgccaaacggagccggaataggcatggcaacaaatcgaccgtataaattgaacgggcgggaagcacaaaccatacgacgccgtggagtg

SEQ ID NO: 605525 - DNA, 764 bp, Homo sapiens
  misc_feature (32)..(32): n is a, c, g, or t
  misc_feature (119)..(119): n is a, c, g, or t
  misc_feature (257)..(257): n is a, c, g, or t
tacctccggaaggcttattgagccggttacgntggcctttgaaataaggtgagttttctcccaatgccgaagccgtaaaggtcccatcttctgaaattaggcactaagtcccgtggtcnaatgtccgttagtcttagagctcatcgtacatcttcgattttgtgtgtcactacacatctagttcatattctagtacgtgtcggctcatctgcatgtgcaatccagtactgagtcagcatactgtgctgtgtttttcnatctggcactcctagtggcattacactcgcgacagtctacctctaagcgtgcagtcagtgcttatagtcaagtaatgccatctgcagcaggtacagagagcataatggagtgaatctcaatggtctgctcaggcacgatgatggtgggcaactcaaagtatgcgatcgtgttggctactgcatttagatccgtagcagctatgccatatgaaacacttttcgtaagcgtgaactaggccacagttaactgagattcaggcacggttatctcaataaagggaatcaaggagtcatctggttgagaatattttgttaacgcatcaacttcagggaattttacctcggtgagtgttggtaggttgagggcaaatgatcaagttctcagcttcttatagatttgtatctctctgaagtcaagtttgcacgatgcaacgtgcagatctgtaaatggtacatggaacgtaggcatgacaagtactgaatttagatcatttagtttcagctcag

SEQ ID NO: 605526 - DNA, 942 bp, Homo sapiens
  misc_feature (137)..(137): n is a, c, g, or t
  misc_feature (942)..(942): n is a, c, g, or t
cggaagtagtcggggagggccgcgcagtcggaccggctgctgagacgaacgcttcactggggcagtctctgcatatcatggggagatagacgctgctgcctttaattggccttggtccctcacagctccaaaaaganacaggatctcgataagctctatgagctgaagtccaaagctcggcgcaagatttatgaccccagttgtggcccttcagacccataatcaaacctcctccatttttctccatccaataaaaaaccgggaaccaggcccagaaccccctccacaaaggtctccaatgggcccaatttagtactggcagtcggtaaaagtatacccagggccactccttggggaccagggagggtcggtcttaggcccttgaaaaaacaaaattcagggttatttggacccaaggaacgacatttacagggacttacgtaagagcaaggtgggatccctaatggagacaggtgtggtttgaagattgtggaggcaaaatgctgctgaaagtatggctgattgatttcaatcgagacggtgtgggtgacagcagccttgtccagctgggccgggaattcggaaggttctaaccaccctggagcgtggaaagtatgtcccagcctgcccattagaggcgccagtggacacccttgtggctccccaggatttgtgctctagagaaaatcgacctaaaaaaaaggttgcaaccatagaaaggttccacaaaacagagaagtgcctgtgatccggaaaacaacccaagaagataacccccggaacaggtccggcatgcacggcactgtttgggaagattcttggacctgcaatcagcatttccttctgggtttttttagaccgtgcaacagaccctttttttttacaccggcgcaattacacggggagggttcaaaataacttcacccctgggcgcctccgcan

SEQ ID NO: 605527 - DNA, 121 bp, Homo sapiens
tgtgcctcggacctgcttacccgggcgtatgctatgtttctatgtctggtacataagctactacatattaacatatgtcatccactggaatgtacagtggctagaattctgcgtgaggcta

SEQ ID NO: 605528 - DNA, 1349 bp, Homo sapiens
gaacatctatcaaaataagtaactgtttatacaaattcagtttttgtagggtcttccaaggaaaaatcaccttggcttgaatgtattctcactcattcaaactttgcacgaacgtgattcatattcagtactgttttttaatcacattattaaaatatacaggaccgaatgcaaggaaacccaaacgttcactcaactacactctctactatacacctaaaataacaatacgatgtggacgggactctgctgatccactactaacaacacgggacgcggttacctgaacacgaacttccacgccaactactactcgacttcacggaacaaggagctgatactcgataacatgatcatatcactggtacctaactggttctactgtatactattcaatcccgaataaccttatacatacttaaaacgacgcgtaaactagtcgacaagtcaagactgcgtcactcacttactgcactcaccatactacttcacacgctcacgactggcacgataaacctcactcatctagcgctacgtgcgctactagtagtctgctgaactgtaaaccacgtactctacttcaccgcctcctactaacaagcacggagtataccacgcaccaacagtgcccctacctcgagacacgcaggactaggcccaacatggtaccaccacacgacgcctgaggcactcccgctcactccaacaccacgggataaattaaaacccaactgcacaagaacaccacacacaacgaaccacactgaacacgaacaccagcagcatacactacgaccgcgacacacaacaatatacaccactaaacaacaacacgctactaagcaacacacctacgcagtcagaatacgagcacagaactaaccaccaccaggcagcaggcaagcacggagaaaccagccgagtacaaacaaaacggggatacgtcaacaagaccaaaaatcactggcgatcacacacgacaaaagacgcaaaagagaacccaaccaaccacaaaaaactaacaaccgaccgagagagaaccaacagagtcgtcctaaaaaagccacaacccgaaggagaccacacagcgccccacaacgcggcaaccaccaacaaccgtgacgcccccagcgaggctcacgcaatacccaccacccgcgcgcaggcacacgaccaaccatgcagacgccaaccccaccacaacccaccacacaccacaccacacgacgagccccacccccaccacctccagcccgacacctccgccaccacgcagtgtcacctccacccacaccaccgccccccccacccccatcaccacgcctcacacgaccaccgcccacgctaac

SEQ ID NO: 605529 - DNA, 248 bp, Homo sapiens
ctaactactaccgcattccttactattcaacttggactccagcactaagtacctactactatctcgcacctagaaatacgctaacatgactaacacccttaattccatccaacctcctctccctaggaggcctgcccccgctaaccggcttatttgccccaatgggccattctcgaagaattcacacacaaaacgatagcctcatcatccccaccatcatagccaccatcatcctccttaacctctac

SEQ ID NO: 605530 - DNA, 763 bp, Homo sapiens
  misc_feature (7)..(7): n is a, c, g, or t
  misc_feature (17)..(17): n is a, c, g, or t
  misc_feature (24)..(24): n is a, c, g, or t
  misc_feature (29)..(30): n is a, c, g, or t
  misc_feature (88)..(88): n is a, c, g, or t
  misc_feature (101)..(101): n is a, c, g, or t
  misc_feature (545)..(545): n is a, c, g, or t
  misc_feature (716)..(716): n is a, c, g, or t
cttgganaggaaccgcncagccancttcnnggggacacacctaccacacagcacaacagacgcggcaccaggttttccaccttcacgncacctgaggaccnctgcacgggcattaaagcccgcacccaccagccctttcctcccacggtgccaagcaaggcttatgattcaacagttttgaagacaagaggtaatccttatagatatgaactgattgatattcccaaggtttttttcaacaaagcactgactgggccaggtcaaggtgtatattatgatttttccagaggtgttgagaaaaataagccagtattctacccaaaacctcccaagaccttcgctactaacacttgattaaaagcatgggaccctcatcgccctgccaaagaagccatcctacacagaaatcttgacagcgccccactggctcacttcgtacactcatgattatacaggtctggggcccatggacccccttgaactgcatgattaccgcgaaaagatggcagcacagtcaacacgagagataggatctgacccgtagncgccagaacatctgcgacctgctcttcatacctcccacaccgaccgaaggaccagttgccctacttctctacaaacttcattttgttgcaaggtaatagatccagcaaagaccacaacgaaagtaaagaatgtacttcataaaggtcagtggcacttttattacataagtncacatctataacgagttgccggcacataatcgatacaaagaaaagag

SEQ ID NO: 605531 - DNA, 397 bp, Homo sapiens
tgctgtgttatctttatagcaacactcatccttaaccaactaggtaccgtgagtttacatacaggagaatgatggaaggaagggaggaaggaaaggaggagaaaatcgcgtcttcagctggcggcatttattttaaatccttagcactgagtttgaatggtataaaaagtataactcccatcgatgagtttttatatgaaggcaccccaaagaccttctttgccctaaaccgggggatgggaaggaaaggtctccatggagtacatctcatgccagtttagtaatcaattatgttgatattgttaaactggttcaaagaaataaactggcaatatgtaaagtaattcctcatttgtgtcactatgatatagagatattaaaggaatgttggtttgtt

SEQ ID NO: 605532 - DNA, 146 bp, Homo sapiens
tcttgagttatccctaatacaggatgtgtgaggatcaaacggcacacattctgctagctaaagagatagcaaactacccccaacccttataaagataagaccctgaagggggctgggtacagtggctcatgcctataaccccagca

SEQ ID NO: 605533 - DNA, 248 bp, Homo sapiens
accctttaaatccccttgtaaatttaactgttagtccaaaaaggaacagctttttggaccctaggaaaaaaccttgtagaaagagtaaaaaatttaccccccatagtgggcctaaaaacagcccccaattaaaaaagggttcaagctcaaccccccctccctaaaaaatcccaaacaaataattgaactcctcccccccaattgggccaatttatccccctataaaaaaactaatgttagtataagta

SEQ ID NO: 605534 - DNA, 100 bp, Homo sapiens
gcggaccagcgcgacgcttcatcaactcaagaactagccagccgggagtttctagtaagtgaaactgacttggttctgcttcctttcatgaaaacctttg

SEQ ID NO: 605535 - DNA, 989 bp, Homo sapiens
ctctctgggaggctgaggtgcgcagtcaattgaggtcgggatgttcaagaccagtctgaccatcatggtggaaacctcatctctactaaaaatacaaaagttaacccgaggtgtgtggtcgctcagtcgtgaatccccagttactcaggaggcttgaggcactaatgatatgtgaagtatcacttctctagactcagcgaggcagatgtgttgccagctagagcccgacgattcgcaccactgtgctccagctcgggttggataacacatataataagagtagctcgtcgaatcttgttgaaaaatgcagatgcctcagatccaataatgagagctcagactgtgtaacgagggcccaggacatcttgcgttggtacaaaaaacctcgtatgggtgttccatgcagcacaagaggatgtctgagaaccagttgtatctgaaatgctgctcccaattgggacaacagtgccgtgatcattttcgcaaagagaaccaaacaaatggtcgtctctgcctagtgttcagtcttactaatgaaagtctgtctggttgagctactaggactctgagacttatttcttattaaccctctgagatttcgccttgtattaacattaggcgaaaaatgcgtcggacctgaaccatggtagggtactaaattttggtgtaaccctttggtgaacttccgaggaaattggccgggtaggctgtgctcaaggatgggtagcgcacgtaaaaaaccacgtggcgcgttaggggtttcaacaaattaatgtcgagggttaatggtgccccggccggggtcgtctaattccaaatattaagccttccaggttggccacttcctggaagagttggggaaaattagggatgttgcccccacgttaaaccgggtggggctcacacatttgtgttgggtgacaaccgttttctcacaaaaaagagtgcggccccagaaataggcggacgaggttcatgataacaacgaa

SEQ ID NO: 605536 - DNA, 440 bp, Homo sapiens
atcactgtgaccaatctgggatcaaaagtcagtgttcctccaaaggagacctctcctggctgggatcatccttcctcttttgctccaagcatttgcagcagtaggtggatacttgagtggcagaactggcaacacaagaacataaaaggtgtgatctttgacaatcctgtgtacttgaaaaccatggaagaggacctcttaatggacatgggtagacatggtgcttctggtggatgcacgtgcccagtaataccggtcataagcacagatgatgactcagcttgacttctaagaccaacttagaagtctcgacttctgaggtccacatcaataattccctactttggaagggtaacaaagccagaagatgaggccgtttcttcctccagcctggaggaacctcacgatatctctgttgtggataaagcttgtgtatttga

SEQ ID NO: 605537 - DNA, 211 bp, Homo sapiens
tggttggggtctctgtgtgttgaaagcctttccgtgttgcatgtgttgttacaattttttgtggtacttgcaatttttgtttggggggaagtgaaaagtttgccttttggcctcatttcctttttgatcagtggacccttacattttgggggcaactttgtcaattggttttccttacaccaaatttaggttaattgttgcaaaaaaaaaa

SEQ ID NO: 605538 - DNA, 172 bp, Homo sapiens
gccgatcatctgaaaccttttcttgatgattctactctccgatttgtggacaaactgtttggggcttttggggaaggccgaagcttttggccttccaagtttagcagtgacaggagcagaaaacgggagctaaagggtgggttttggccataaggggcgaaactctgtctca

SEQ ID NO: 605539 - DNA, 210 bp, Homo sapiens
ggcctggactcttcttcacagagaatgtgacagaaacagcccagctgtcccactgcctgcaagatgagggatgcggggacgtgcaggaggcagcttggggaacggtggcgggcagcaggagggttgggtggactcagtgtcaaggtcaggatgcaccgagtctaccgtgcagcacatgctctgagccactcttatttcctctgagtgagg

SEQ ID NO: 605540 - DNA, 692 bp, Homo sapiens
  misc_feature (107)..(107): n is a, c, g, or t
agaagaaaagtgagaaagagaaagtgaagaagagaggagaaaggagaagagaggtgtggagaagaggagggggatgagagaaaagaagaaaaaggagaaagaaaagnagaggaggataagaatgtgagaagaagaattagggaaggagaaagagaaagagaaaaggagagaagaggaagaagaaaaaagagaggaggtgtgggggagaaaaaggaagggagagaaaaggaaaggagaaggggaaaaaaagctttttgatgaaaaaggcaaaaaggaggaaaaggaagcttaaaaacgattaaaaagcaaaaaggggaataaataaagggtggaaaggaacaaaacaagcattaagaaatcagagaaaggaaggaggcaagatgaaggaaaagaggggaagtccctcagaagaaaaagaaaagaaaaaaaaagaaaggagatagagatgatgagaatagcaaaaagaaggaaataaggaaagaaaagaagaagtagaattgaaaaaaaaaaaatggttagtataagggaaaacggaagaaaagagagaagagagaagaaaagaagaattgggaaaaggaaaaacagaggaaaagtaaataagagaggggggaagatatataacatatatactcgctctctatatatactatactatatactatatatatactatactctacctcgtgccgaat

SEQ ID NO: 605541 - DNA, 508 bp, Homo sapiens
  misc_feature (387)..(387): n is a, c, g, or t
gtatcgtagccggccaattgatacctccctttactctcctccttccccatctggcagcgaggaggctatgtcctagaacacttccacccctctctggtccacgtcaacgccccggcctttacttcagtaagatggtgcccgtgcgccggcttccccggacacgtcggcgtgctggagtaggggcccaacggcctgagcgtgctccggccctagtagacttcgcgtcgcccgcgagcccagcgccgccgccacacgacgtacccagaggtgtcagacaccaacgaaagcacacgagcgatgcagacgccgcccgacgcagcgtcgacccgatggagtgcagggtggcgctccggcaacggtgatagcagaccctttaagccccatctngcatagggaagatcaatgatcgtgaccgcgcagtgacgcgggcttgcgaccatttcgttggcgtgggacgcgagaaataaacgcggcactcgacctacggtgggacagagacaccgcagct

SEQ ID NO: 605542 - DNA, 151 bp, Homo sapiens
aatgtataacacgtacaggactggaggtttcaccactgttggccaggatggactccatctctatgaccttgtgatccgcccgaatacggactcccaaaatgctgggattacaggcgtgagccatcaagtctggcgagtgaaattacggcca

SEQ ID NO: 605543 - DNA, 516 bp, Homo sapiens
  misc_feature (405)..(405): n is a, c, g, or t
  misc_feature (451)..(451): n is a, c, g, or t
taagtttctttaatgcccatatgcttgggttagagttcttgactatctttaataatgtaggtactttgcttaaaagtgttcagattcagcatatatgtttctaaaatatatattttataatatattgctggtaaatgcaatatagagctacaaaaactgagttgagactcagtctgtctccaactagctgtctgatcttggcaaagtcacttcagatttacctactattacaaattttgattttcttattttaaaaaatgaaggtaatacctgttctagctaattctttcagatcaaggtgagataacatacagacataaaagcatggtgtaagctctaaagtgttatataaatataagccagttattatcagctggattaacttagcccatgttgacattgttngagtcactggataattccattagagcataagaagctaaactgcgtnacctggatgtggtgcatttggaaggtattatcccagctaaatccagaccaaggagccaccaaatt

SEQ ID NO: 605544 - DNA, 580 bp, Homo sapiens
  misc_feature (149)..(149): n is a, c, g, or t
  misc_feature (153)..(153): n is a, c, g, or t
  misc_feature (254)..(254): n is a, c, g, or t
  misc_feature (376)..(376): n is a, c, g, or t
  misc_feature (464)..(464): n is a, c, g, or t
  misc_feature (486)..(486): n is a, c, g, or t
  misc_feature (521)..(521): n is a, c, g, or t
  misc_feature (540)..(540): n is a, c, g, or t
tcgagatcttactcctgtcataaccatttacatacttcctgccataaaaacttaaacctggctaggaatattaaataaaacatgcaaaaaactacaagttcaggaagtgactgtatgtattatatacattaagttcatattccaatctnaganaaagctgaatcacccctacttaggaaaaccagtattatgttttatcatctggggtgactaatcccacaatggcccgtgcagtgaactttaagggtaagaanggctttctcttttgcactaagctcagtccatagttttgtgggggctgtcaggacgtctcgcaagtctgccgtgtgtaatgggctgaaatacactgttacatggccccagaattaaaactgtnaagatccaaagacttactttaggttaattttgcacactttaaatgcatatgccagttttcctttggtgcctgcctacttccttaaaanaaaacaacttccttaatgcctnagctttaccttgccgggttgggaaaatccaaaccngtgttcactccccatgatnaaaaaacctgcgttgacagtttgttttaccaaacaggcac

SEQ ID NO: 605545 - DNA, 204 bp, Homo sapiens
gtactctagagatcccaggattcgtagatcaagagaagttgggtcagaggtaggagctggggctcagtgtggggggttaaaggtgaggcaggtcagcggtgaaggtggagctccgaggggaggggtcaaaccataaaccagaactttattggtctagaggtaaaatgggattcatggggggccgaggtccacggtgaagccgaa

SEQ ID NO: 605546 - DNA, 864 bp, Homo sapiens
ttccgagtatcgccgggatttcgaatcgcgatgatcatccgctctctaaaggagctggagcctccctcaagtacagtgacctgcacaacttagccaagagtctgggtctccggagccaacctgagggcagactagttgttataaagccttgaatggctatcattcaacatgaggcaacgaataggaaatgacgaatctaggatgaaagtcaaggttctgcgtcctcttgtgatgagactgagatcctgactcagtccccaggaagaagctgcgtagacagcctacttgtggcattgtcgaccaaaacaaggagaagcgtgctagactggtccgtgctggaacccgtgacgtcacagcagatctctggcatgagataggaaataaatgtaactcccacatgtaagtcccagcacaatcagttagatcaaggctggggaaaaggcccacggagatccatcgaaaacggctacactgcggaacaacgcttcggcacttcatctgacgcgacgactggaagcattccaaaaggaaatgcatgacgcaaattgcttgtgatccctacaagacgttgatgcaagatgagtctccaaagcgtacgcgttccaagcacagggacctcagagacattcatcttcgtacgaaccatgaaatgcagggtcaactccccaaggacgcggtgcgcatacacacgcttacaacgaggagacatgtgctcactcaacattacgaccctcagaacgttttgacagaaagacttttccattgcacagccctcactattgtaacacgcggacacattggggagatcccaggtagagtccaacgtatatttcgacgaagagaaaaaatgcaacacatgacgta

SEQ ID NO: 605547 - DNA, 345 bp, Homo sapiens
acatgctgcagaagatgaggtgatgtcataattgcctgagttgacaaaatgaaacataaatggcaaaagtagaattttaaatgtcaagcttttatttcttcttaatttaaattttaattggaaacacttagcttttatttactgcaaaaaagtaataatttttgccagagattaatgtatccctttattgccaaggatgattctcttcctgtaaaaaaaaacgcagaaaatattaaatattggctctgggaggattcatttatttgtgagattctatttgctctgttatttaaagtgcttctatatacccattctactcctagacatttagataaacttcaagtg

SEQ ID NO: 605548 - DNA, 113 bp, Homo sapiens
  misc_feature (113)..(113): n is a, c, g, or t
agatccagtcagggtcaagagcttcagctgtatcgccaaatcgtgtggcatcattgcaggcagcctagggagcctctccagctggaggtagtccaaggggctggcgactcttn

SEQ ID NO: 605549 - DNA, 102 bp, Homo sapiens
  misc_feature (60)..(60): n is a, c, g, or t
gaccactgcgtggattaggacggatagacgaagaggggcgttggtatgggttatggcagngggttttatattagataattgtcgtaatgagatgttggaagg

SEQ ID NO: 605550 - DNA, 603 bp, Homo sapiens
ggacccacatcatgagacagcaggcttaatgtgtcccagccaggatcttcctattcatgagcatggaaggttgtttcattgttggtatcctcttttatttccttgagacagtgatttgtagttctccttgaagaggtccttcacatccctggtaaggtgtattcctaagtattttatactcttggtagcaatggtgaatgggaatacactcatgatttggctgttggtctgttattggtgtataggaatgcttgtgattttggcacattgattttgtatcctgaaatttagctgaagttgcttctcagctaaaggagattttgggctgagacgatagggttttctaaatatacagtcatgtcatctgcagacagagacagtttgacttcatcttttcctattcaaataccctttatttttttctcttgcctgattgccctgggcagaacttccaatactatgttgtataggagtggtgagagaaggcatccttgtcttgtgccggttttcacagggaatgcttccagtttttgcccattcagtatgagtatacctatgtaacaaagctgcacattctgcacatgtatcccagaacaccgtcga

SEQ ID NO: 605551 - DNA, 399 bp, Homo sapiens
acggccctgaacgtgggaggcggggaagagggagggaagcctttcctagcaggtgggggcgccaaagagcgcgtcatgagaaacgcaagcgaatcagcgcaaaacgcgtggggcgagtgtagtacagtgattggggacctcccgaacaagggcctatagcgctgggagaatttttgtcagccaaacaggtcaacctgggttcccgacccttgctaacattaggagaaataacccccccctactaaaccccattaaacgcctggggggcggaagcctatttgcaggatttttcattactaacaacatttcccccggatcccccttccaaacaacaatccccctttacctaaaactcaggggcctcggggtcactttcctagggcttttaacagccctaga

SEQ ID NO: 605552 - DNA, 570 bp, Homo sapiens
agagtaaggtagatagtatcaattgggtgcggtgagaaaggtaccgggagggtcttgtaagtggtaaagccagagttacttgtaagaaaaagcctatgattttagtggtgtgaatctagaatcatgacacataaagcttcagcggtatgtatttgtgcaaatttgtgcaagggtcttaacactataggaaattcaacaaaaactgaaaaacaagcttgatatctttacctgacccatgccttcttccattattttggtagttaaatattcactccagcactgcatacaaaacttatgtccacattcaaggccagtgaaatactgtaagaaaaacaaaacatgaacttaacaaaggtattatcagaaaactcactataaacagtgactcaacagggctctgtaaggtcacatttcttacgtggctcaaatgtccaatttgacaatagatgggctcctaaaatgaacttttcatggtgaatctagacatgcagatacaccgaacacacatacatcttaggaaaggcgggcaacaatgtttgtattacatatcaaaagaccaatgagcatatg

SEQ ID NO: 605553 - DNA, 903 bp, Homo sapiens
gaaaggctcctggtggaaggtgagacagagagagtcacgtgatagaacagggcaagaaggtggctggctgtgtgacggggaatcgaaaagtgcagtcgtacccttggtgaatgctgaggtgtgggccccatgggcctggctcccacctgttgtccagagcatgcccctgcccccaggtgatggaggactccatgtagctctggccactcatccatgaccacgccgcaaggtatgacagtgtggacagtccgtctatctatgcatgaatcaacgaggatgaatggtactggaggtgctggatccagctcagccatgacgtgcctcgatggtgctgctcttcttgccgtggtgctgagagtcatctggtgcgcatgacaaggatggtaccaagacgtggtcaacggatgttggtcgccttgaggaacgtatccgtgccccgccggtgttgcaccgactctgtcccgtgtatagtgttggaatgggctcctgtcctcatctcacaacgtgtcttgccttttgtgcttgattcccgcgtggtgctgcggtcagggagacactctgcagtctcttttgctgccagggctgtgtggacttatggttgttcctgttcttttaggttgggggtgggggctgagtcccggggttagctggacagaaagtgaggggggtgagtagtgtgaaggctttgaaccatcgaataggaagggacgggccggtttgccgtgttatttataaccgaaaaagggagggggacttataatactggggtgcaaaaataatgttccatgaaaaaatgtggcagggtgccgtgtattttaacaattttgtgacatagcaaatttaagcgtgtgttctaaatgaaaaaacccatggggaacagttttttttgtgatttttctccga

SEQ ID NO: 605554 - DNA, 630 bp, Homo sapiens
agggggggtatcattttatttattggacgacttacacaaaagggttgtatttcagttatttatgcaaatagggctactggggtcccaacagctttggttctgggcagtacaagaccctttgtccactcccagctttccaaagaacccaaacccaaattcctgtcagctccaacttgctcagcactttaattgctacagtggagccacactggtgccacaactgctcccaagcaacaatatttgcctttaacgtgtctttctggtgacaatccttcaagacaaaagaatgcctcaaacacaagtggaattagcccctgtgcgaatttttgggaagcactttgggagagggttctttacgtttgccttactggggacaaaaaagggcaccgtgttgccggctgattatggacttgctttggccaatggccctttctagcacatatgtttattgatcgaaaaatctccccattttttaaaacacaattcttatgccctggccttaagtaccctctcgcgaacctagggctacttaatggaaaggcttttattttttccttatttccccccaaaaggagtctcttagtctaacgcgttttaccccccgtggcgttggctttcttggcaaacccg

SEQ ID NO: 605555 - DNA, 100 bp, Homo sapiens
gaaggtgtcaggatgaggagtgagggtgtcaggctaagagagtgagggtgtcaggctgcaagtgaggtgtcaggatgagagagtgacggggtggggggtg

SEQ ID NO: 605556 - DNA, 333 bp, Homo sapiens
atgaaatcctgcaaatccaacctgtctattggagagaggcgtgtgagagagagtttattccttgaagaggtgtttccctcgagccagtgaagagaaagtattcgtggggtacctccaatgtctgtccacacagtaagcttcccacaggtgtgaccgtgagatttatctctctgtcaatagtttgaaagactgcctggttgcaaaaggaagaaaatccaattgagctctgatgtttaaacacatgttttgctagaaaatttctcatttgtacacttttcatgaacacatctagagtgtggtttgtagtctaaaatacagtgtcactacccggta

SEQ ID NO: 605557 - DNA, 509 bp, Homo sapiens
agtgatcgtatgttcttgccccatgtcttgacgcagtatgttgactagttagagacttatcattcttttgttaagccaacaagttgagaatttgagacctggtgagatccactgtagtgggcactagctgctctttggccaaggccttcataaagtgattcagtctctcattatctgtcctctagccccacaccctgatctagaccgaggcaaaaggaagaacttgaggtcaagaccaaccaactctgtgcaattacagctgatatttatcactctgcaaagggagcttagctatcaggtctggagctatgtgcagaacctaagcaggctgtagagagtatagaagaaggcagtattacatgtaaggcccagaacaaccatgggaaaaggttcatgtagtgtatcttagtgtcctgcctagctgcctctgggacaggcttgacttctgatgtccacataagctcgtacctaaaacctgattgctgaatgcagcccttactcctgtaaac

SEQ ID NO: 605558 - DNA, 264 bp, Homo sapiens
tgacacacagcgaaacgaagatcactcaccttccccttgctctaccccaactttgtataaatattcaattcagctacaaaacaaaatactggacccacttcttgcagaagatgatgaagataccttatatagccctaagagttaatacctagtcagtcataattttatacagattgtaaatctgggactgtaatgctctataaagtgtatatacgtaatggccagattcatgggtacctggagctccgaaattcggtacatcat

SEQ ID NO: 605559 - DNA, 499 bp, Homo sapiens
  misc_feature (412)..(412): n is a, c, g, or t
cacaccacctgagtccaccggtgagttcggtgaggatgcgaatggcttcgagcatgtgctcgcgctcctgagcctcgtccatgtactggtagtcgatccagcggtagccgtggctgcaaatctcgtggccggcggcgaccatggcgcggatcacatccggatgccgctgggcggccatggccacggcgaagatggtcagcgggatgtcgaattctttgaacaacttgaggatgcgccacacaccggcacggctgccgtactcgtacagcgactccatgctcatgttgcgctcgccttgcagcggttgcgccgagaccatttccgagaggaaggcttcggactctttgtcaccgtgcaaaatgttgcgctcgccgccttcttcgtagttgagtacgaacgacagcgcaatgcntgccttgcccggccagtgggggtgaggagggttactgccgtaaccgatcaggtcgcgtgggtagtcagcgcgctcgtgttggttccg

SEQ ID NO: 605560 - DNA, 294 bp, Homo sapiens
cgcctcctgtgctcatgcctcagccttccaagtacctgggactacaggcgcacactaccatgcccagttaatttttctatttttagtagagacggggttttgccatgttgaccaggctggtcttgaactcctgacctcaggcgatccgcccgccttgaactcccaaagtgctggattacaggtgtgagccactgtgcccggcacctaaacaacatagttttgatataggtaagcatacagcatatatcttgatgctaatttcaggtaatttagctctaagaacacggaacaggg

SEQ ID NO: 605561 - DNA, 752 bp, Homo sapiens
  misc_feature (27)..(27): n is a, c, g, or t
  misc_feature (88)..(88): n is a, c, g, or t
  misc_feature (94)..(94): n is a, c, g, or t
  misc_feature (96)..(96): n is a, c, g, or t
  misc_feature (100)..(100): n is a, c, g, or t
  misc_feature (143)..(143): n is a, c, g, or t
  misc_feature (219)..(219): n is a, c, g, or t
  misc_feature (280)..(280): n is a, c, g, or t
  misc_feature (288)..(288): n is a, c, g, or t
  misc_feature (292)..(292): n is a, c, g, or t
  misc_feature (319)..(319): n is a, c, g, or t
  misc_feature (340)..(340): n is a, c, g, or t
  misc_feature (408)..(408): n is a, c, g, or t
  misc_feature (441)..(441): n is a, c, g, or t
  misc_feature (466)..(466): n is a, c, g, or t
  misc_feature (482)..(482): n is a, c, g, or t
  misc_feature (497)..(497): n is a, c, g, or t
  misc_feature (554)..(554): n is a, c, g, or t
  misc_feature (599)..(599): n is a, c, g, or t
  misc_feature (620)..(620): n is a, c, g, or t
  misc_feature (654)..(654): n is a, c, g, or t
  misc_feature (663)..(663): n is a, c, g, or t
  misc_feature (685)..(685): n is a, c, g, or t
  misc_feature (688)..(688): n is a, c, g, or t
  misc_feature (724)..(724): n is a, c, g, or t
gactgtggctgacggcctcaagaagcnggaggaggtggagatggacttcgcggtcgggctcaccgcagtgacaactgcaggggctgangagatngnggtntccctggccaagcccaagcaccgcgtgaccatgaacgagtttnagtacctgaagctcgctgggcaagggcactttcggcaaggtcgttcctggtgtaaggagaaggccacaggcgcgcntactacgccatgaagatcctcaagaaggaagtcatcgtggccaaggacgaggtggcgcgcncacactcnccgngaaccgcgtcctgcagaactccaggcnccccttcctcacagccctgangtactctttccagacgccacgaccgcctctgctttcgtcatgtgtagctacgccaacggggggcgagnctgtatctatccaccctggtcccggcgaaacgntgatgtttctcccgaagggaccggngccgcgcctatcgtantgggcgcatgaaganttggtgatcagccccgtgggacataccctgacatctcggaagaaagcaacgatggtngtacccggggaccctcagaggctggaagaaacctcaatggctggnacaagggacggggcacaattnaagaatcacgagaactttcggggctgatgcaagngagggggantcaagggacgggtggccaccantgnaagagcctttttgcgggcacaccctgaggtacctgngccccccgagtgtggctgggagggacaa

SEQ ID NO: 605562 - DNA, 189 bp, Homo sapiens
  misc_feature (116)..(117): n is a, c, g, or t
  misc_feature (158)..(158): n is a, c, g, or t
acagaaggactttgtctctttagcttgtttagctcaatgaacattatctcggcaaatgactctgctttctcgaaggtccttctccgctccaggtttacttgcatctctcatacttnntacagccaacatgaacactctatgtattttctaagctttcntctgttcaagaactttgaatttaaaacgtct

SEQ ID NO: 605563 - DNA, 617 bp, Homo sapiens
gcacgagccgggagtttcagccaaaagcagcgtatggtccagatggccttcataccctctgccagggaatttgacaccaatagtctccagccacttaaggtccccgctcacgtgatgaccaacaaatgcccttgaccatgtcttgtcttcttcggtcaccgggaccaagtaatagtttattagtgattgaatgaaatgcacgcactctttcaagctcaaaacatagctttctcccaataagtagcaatccttgtagtcacagacccatttttggtttctaagttccagggactcctcgataattaggtggtaattctttgtaattggaaccattgacggcaccatattttccctggggtcataaattgaaattccaatttcggtgattacgttctggtttgtttcgaaagcctctatatcaagacaaaagcatattgctctctgagaggccatcagcctgatgcatttctccagataagcaaattcattcgagcgtgaatgtgcttccaccatgggccagaacgtcttcctcacgctgtttttctcgtcagccagtagtttctgttctgtctctaggagcttgatggtaccattcattcctaacattttcttctgaa

SEQ ID NO: 605564 - DNA, 176 bp, Homo sapiens
tcgctgatagccccgtgtatcgaggtaacttgccggtcggagcactaccaatgactaaacacagatagcaggccaaggctacgcggaacctcatatttcccagatatctgctgagaaaatcatacagctacctaccctactctggctaccatggattgattgtgtggacagcctca

SEQ ID NO: 605565 - DNA, 138 bp, Homo sapiens
tgagttacagatggatccagttcgcgtatgcgggcaggcaccgacgcttgctcgatgtggccatccagctgaccttcctgcgcttgatgtccagcgaggcctcccagaacatcacctaccactgcaagaacagcgtgg

SEQ ID NO: 605566 - DNA, 241 bp, Homo sapiens
gcccagtcgctgggtccactagtacttgccgtagtactcttaaaactaggcggctatggtattatacgcctcacactcattctcaaccccctgtacaaaacacatagcctaccccttccttgtacctatccctatgtggcataattataacaagctcgtcataccgaagctcgtcataccgaagctcgtcataccgaagctcgtcataccgaagctcgtcataccgaagctcgtcataccg

SEQ ID NO: 605567 - DNA, 744 bp, Homo sapiens
gagaggcagccatctttctcttgcactggtgctggtgttggaggaccctccctgcttcagatttatcaacacgcatgaatcaagaagagttagccaaacttcagtgctcaggtccggatagggggcaaggtgtacatgctcgccgaaacgaagaaggtggtacatagaagcagccacagctgatgacaacaaagcttcaggagttctcttaaaaaaactggcctgtgaatacatactacgctggttcatttcgacgaggtgaccatgcattaccacgatgactggggacagttattcatttccaagcaattcccaaagtccaagcttccctttcctgctacataccttttgccacattactggctcagtgcatgaatgccaaaccaatcaacacgcacatgcttcctggcactatccactgtcagctttgattgctgacatgtttaacacagccttccgcacagttcagcttgaacaagttcccaactggcacagtctttggacacgtcacaagcatccaaaagccatcaacgacactctgatgacggaacgacatgactgcatagttccccgatccttggttcgacccccatcccctgcatgacgtgctcttcaacaggaactgcacagcctcaactcacacgctttcggactcgtcagtgcacggcctgtgcattggcacctacgcctcttaaccacatccagccatcacgttgcgatccagaacgtctacccgccatcgac

SEQ ID NO: 605568 - DNA, 163 bp, Homo sapiens
gactcttacggctgttacaacccgacctgagcggtcgcacagagctgggggtgacaaaggtcacgctgcgcctgcaggaaatcacggcgaaagcctccaaggtgctgtcagagggcgagcagcgcgcgttgggggatggctaatgttcctctgccgagcctcg

SEQ ID NO: 605569 - DNA, 157 bp, Homo sapiens
tgcgcttttacggagttcttactttttccctgataaagaggtatctttactataaaagctattgtgtaagctcgtcataccgaagctcgtcataccgaagctcgtcataccgaagctcgtcataccgaagctcgtcataccgaagctcgtcataccg

SEQ ID NO: 605570 - DNA, 383 bp, Homo sapiens
tccctgaacgcagcctgctgagatacgcagacagggtatgatagacaggattgcagttataagcctcggaatgcggatctcaatcccataacaaagagatgagtctatcctctagtccttttggagacacagaagttttggctttagatgaactcattgcctcagatcaactcttcagccacataattacaaagactccaatatttgagaatctgagtcactgctcaatcctcagattagacagacagagagaccagcacctctgttccagtatctcagctggactcagttagatccaggcaggcccagatctcatcattaataataaagcacgcagctgggcaacggtgcttcacgcttgtaatcccaacactttgggaacc

SEQ ID NO: 605571 - DNA, 389 bp, Homo sapiens
tacacacagcaccggcatggtatacacagtgagtgtatggttcctgtaagcactaagttgagctgttttcatttaatgacgctgtggtttgaacccttggtgatcactaccacacattatcagcaccagagctgagcagctatatccttgttattaatcactggtcattcattccattcattcgattcacaaacatatttcatgatgtatttactcgtgcaccacggtcccactgccatagcacatgggagacacaagttagtggcaatagtagacaaacgcataagtatcatattggagcgttagagtccagtgaggaatacatgtagataagtgagcacaatcagaatataaacttgcaaagatgtcacaggatgtgtagcatgaga

SEQ ID NO: 605572 - DNA, 141 bp, Homo sapiens
tgcctttggagactaagactcttatgcgtagagtagggttggtatgggactgccctttctcacagtaaatgaggtggaacttcatgaggtggacttcccttaatgtcgttcttttcttcttttcagattggccttatcgag

SEQ ID NO: 605573 - DNA, 93 bp, Homo sapiens
tgtgcgaaagacttctccgggaacggcgctggggttgactcctggggccagggaaccctgatcatcgtctcctcaccatccccgaccagcccc

SEQ ID NO: 605574 - DNA, 369 bp, Homo sapiens
ctactcaggaggccactacgtcatagcagctactcaggaggccagctactcaggaggcccagcttctcaggaggccaaggcaggcggatcatttgagcccaggagttcgagagcagcctggccaacactgtgaaatcccatcttcactaaaaatacaaaaattagctgggtgtggtggcggacacctgtaatcacagctacttgggaggctgagaccaggagacatcgatttgaagccccgggacgccagaggcttgcacgtgaacccgaagatttgcactccaggccctggaaccgaacagcaaagacatcttgtctccaaaaaaaacgcccgcctaaagaacccagaaattgaagggccccctttct

SEQ ID NO: 605575 - DNA, 415 bp, Homo sapiens
gtcttagtcatattgcattaatcaatagtgcccaataaatatttgttgatttagggtcagtcctctatatctgtggtttctgcgagctatggattcaaccaactgctgataaaaaaaaatttggaataaaataggctgggcacagtggcttatgcctgtaatcacagcactttgggaggccgaggtgggtggatcacgaggtcaggaaatcaagaccatcctggctagcacagtgaaaccccgtctctactaaaaatacaaaaattagcggggcatggtggcgggcacctgtagtcccagctacttgggaagctgaggcaggagaatggcgggtgaacccaggaggaggagcttgcagtaagccaaggttgcgccactgcactccagcctgggcgacagagcgagactccgtctg

SEQ ID NO: 605576 - DNA, 213 bp, Homo sapiens
tttatttaatgggctgatctatgtaatcacagaggccagtatgtacagccacagtgggaggtttaattcctcggtctcttcctccttggataaagtcttgatgatctcctccttctgggccgggaggcgctcttcagggcgctggcgtgctccctgggtcttagactggggggcctcagccgggtcagccaggagcttctggcgggccttatc

SEQ ID NO: 605577 - DNA, 300 bp, Homo sapiens
gggtatctaaggatccatccccggtctgggtacatctgacgctcttctgggaaccatgaaaggttcacgaattcgctggaactttgagaagtcctggtgggggcagaatgtatacacatcatgcgctggcacaacggaacacggtcagcaacgtccagaatgacattctggtctaaattaagggggaggcagcccttggggtcaagaagaaagaaactgaagggcggctcattccatgttcaccatgtagggggagggacttttgttcaggaagaaatccgtgtctccaaccacactatc

SEQ ID NO: 605578 - DNA, 279 bp, Homo sapiens
  misc_feature (181)..(181): n is a, c, g, or t
ctctatgaatttggctgcttgaatcatatagtatgtgtctttttgtgactgtcttatttcacctagcataatgtcttcggggttcatccttgtagtggcgtcagaattttcttctttaaaaatgtctttaaaaattagccaggtgtggtggtgggcgcctgtaatcctggctacttgtggngctgaggcaggagaatcgcttgaacccaggaagcagagattgcaatgagctgagaccgcaccattgcatgccacctttggcaacaagaacaaaactcc

SEQ ID NO: 605579 - DNA, 585 bp, Homo sapiens
  misc_feature (20)..(20): n is a, c, g, or t
  misc_feature (95)..(95): n is a, c, g, or t
  misc_feature (126)..(126): n is a, c, g, or t
  misc_feature (140)..(140): n is a, c, g, or t
  misc_feature (179)..(179): n is a, c, g, or t
  misc_feature (206)..(206): n is a, c, g, or t
  misc_feature (221)..(221): n is a, c, g, or t
  misc_feature (240)..(244): n is a, c, g, or t
  misc_feature (313)..(313): n is a, c, g, or t
  misc_feature (321)..(321): n is a, c, g, or t
  misc_feature (386)..(386): n is a, c, g, or t
  misc_feature (397)..(397): n is a, c, g, or t
  misc_feature (430)..(430): n is a, c, g, or t
  misc_feature (495)..(495): n is a, c, g, or t
  misc_feature (503)..(503): n is a, c, g, or t
  misc_feature (569)..(569): n is a, c, g, or t
aaactgaacaataaacactnaaaacattttgcgattggaaaaatgtaaagacaatatgaggttttgttaccatcttactgcaattttcttatgtntaactagtttacataccccatgtgttctgtnatcatgcagaagtnaatggaagtgtgaatgattaaataaatgaaaagtccgtntactgcagggaatacatttaacaaggnagcaaaaccgggttnagagaacaaaactattcannnnnttctccacgtatttaggttcattttagaatccatgaaccttaagctgttcctcctttacaatgccaacntccaaganaaactggcagatgtattttctttggtcaccttgaagctgaataacctctccgtattcaggatgtncaatcacagtnccattacaggcaaatatctttttgaaagctttnacaagtttctttttgttataatcatctgcaatgccctgaacagtagtgagtgtatttctgccgtnccgttgcnggattattatatgaatgtaatcctcagtgcctgccgggagtaagtagtcacccttagttgcatcancaaaggggtagaaaga

SEQ ID NO: 605580 - DNA, 498 bp, Homo sapiens
  misc_feature (20)..(20): n is a, c, g, or t
  misc_feature (95)..(95): n is a, c, g, or t
  misc_feature (126)..(126): n is a, c, g, or t
  misc_feature (140)..(140): n is a, c, g, or t
  misc_feature (179)..(179): n is a, c, g, or t
  misc_feature (206)..(206): n is a, c, g, or t
  misc_feature (221)..(221): n is a, c, g, or t
  misc_feature (240)..(244): n is a, c, g, or t
  misc_feature (313)..(313): n is a, c, g, or t
  misc_feature (321)..(321): n is a, c, g, or t
  misc_feature (382)..(382): n is a, c, g, or t
  misc_feature (390)..(390): n is a, c, g, or t
  misc_feature (403)..(403): n is a, c, g, or t
aaactgaacaataaacactnaaaacattttgcgattggaaaaatgtaaagacaatatgaggttttgttaccatcttactgcaattttcttatgtntaactagtttacataccccatgtgttctgtnatcatgcagaagtnaatggaagtgtgaatgattaaataaatgaaaagtccgtntactgcagggaatacatttaacaaggnagcaaaaccgggttnagagaacaaaactattcannnnnttctccacgtatttaggttcattttagaatccatgaaccttaagctgttcctcctttacaatgccaacntccaaganaaactggcattgtaaaggaggaacagcttaaggttcatggattctaaaatgaactaaatantgagaatntctcttcgaatangttttgttctctaaaccccggttttggctgccttgtgaaatgattccctgcaagtaaacggacttttcatttatttaaatcattcaaaactttcc

SEQ ID NO: 605581 - DNA, 468 bp, Homo sapiens
  misc_feature (439)..(439): n is a, c, g, or t
  misc_feature (454)..(454): n is a, c, g, or t
acaaaagtctggaaagtgcttttttagacacacatttataatataaattcccagaaaataaggatttggctaaaacttggttctccatgaaaatgagaaatgagtcctcagcctgttgatgccaacttgaccagatgaatctcttgtccctgagttccccaaaatgctgataaagtcatattttattccccagaatacatgcctaattggagttctaactagttgactaatggctaaaaaatttagaatcatggggaatgagttagagtaaggagatggcttagaaaaaaatgaattctaagtattgatgaattctaattatgataataccaagttccaactatcatacctcaaatctctgatttcaccttctgtcacaggggggaaaaaagtttctcccatctccaaaaggtaacagatactttttataatataaagntaggcccggctcggnggctcactcctata

SEQ ID NO: 605582 - DNA, 1584 bp, Homo sapiens
tagtgtgtgtgttggtcttccgaccaaatgtgtcgcctcactcttgggcgactaaatacccgataactatttgtaggttgttgtacaatcacaccacgcatggggtccaaacaaagaggtctagaggtacacaactaggagcaaagaacaattgtgtggtgaatagttcttctggtgggatatagtgaagatgtttctactgtagtgtaccaacacccatcgtggtacaaattggtcacccatatgtcattgctgtgggggtcagctcgccgccatcggggattgagagtgatcgtctgtggtggatgttgtggggggacccacccccgttctccccagcggcggaattaataaatctttcttttgtgggccctcgtgttatattgtgtgttctacaccccgtagggaggccttgtgttgctccctacagaagaacacatctgtgcaaaagttgccccccgacgaccaccttctttgaataacattggggtgacagaacgtcgtgcctcaataaaagaaagacattcgtttttggtcatacaaaaataggtgggtgcaatatactcccacgtcgtgtaaagtctcggtgtactgctcggggtaaaaagatcgtttaaaacctggggggacacattggggccgcctctgtctgccactggtggttgtcgcccccaaacactgagtgcagacaacaaaaacagctgggtgtcaaccactgtggggttgtgggaagacagctccggaggacgctctgtacgcccttgtgttgttaaggaggaaaaacatcgcctcggcccccacacaattaatggggagagagtgaggacactctcatcacggagaatagtgtgtgtgtgtgattatacatcaccgaggagtgtcgcgagaggggacgccccacctctcactaaggggcaacattccctcggggcggctttataacacactctgagagacacacaccacagcgttggtgttgtgtctctcctctcctctgagacgtctgtccactgcactcggcagtagacacacaccacaactggtcgtctctcgcacaccactctttgtgagacacacctgtgcggccgatgtgcgcaaatttgccccactgctctcatacctgcgacaccgcacaatgattggtgtctaaagacgagtctcaagttgtctctactgggggtgagagtcgacacacacaggcggaatttttgtgcgtatcacacacgcacacacagagaggtgtgggtttgtgtacacactctaatgtggccacacaacaacactgtgcactctctaagaggagtataaacacctcatggtacaccacaccagaccacccagctatagatagacaaatatataaagagaatataatatatgaagacaccatctacattcatgtgggtagattcctattcctcacacacatccagatctcccctcacccacacacactgtaattgtctccctctcttctacagagtgcacaagtagaaccaccttgtaaaatagggagagggccaatgggagaccccaaccgttgttcaagggacccatccagttaaattaccctggtgctccaat

SEQ ID NO: 605583 - DNA, 896 bp, Homo sapiens
cccgcgctgacgggcgggaagatggcggacgtggtcgtgggtacaatgacaagggcggggagcagcggctcatctcgctgtcctctatcccgcatccgggtcatcatgaatggagctcccccgaggtgtccagcatcaaccaggaggcgtgggtgctcacggccaaggacacggagctctttgttcaatgcctagccacctattcctacagacacgggagtggaaacggaaaagaacgtactgacttacagtgatttagcaaaccactgcatcagcatatcagaaacttttcacgtttcttgcaggatatataccaaagaagattttagcctagtaaatacctgaaactgcgttaaagaggaaccgagggaagaagatgaggagaatgacaatgataatgaaagtgagcatgcactgaatgctgagctcctacagctaccaagtgctttaaacaaccagcctggcgaggacagccctggagccattccaatgtctctaggtaaagacagcactgcccgcttagagcgtcttcacttcttcacagagttccagtgcgtggtatcttccgaggtattctttccaggccgagatggagcacctcatgtaactacgccacagacaggcagagggaacgcgaccagaagcagtgctcctcgagaggccagcctgcaggtcaggcacaagaagccgcgatactggcagcataggagaccaaactgcacaggaaggccaattaaccctttcaaataccgctcgacattgaagagcttctcacctatcggaccggtcccacccatactgcaccagggactcacgccaataacccgcgcgaatacgacaaccacacccatcgcgccgaaacatgtcaactagcacactcgccccagaaagtacag

SEQ ID NO: 605584 - DNA, 885 bp, Homo sapiens
atggcacatgcagcgcaagtaggtctacagagacgctacttccgcctatcatagaatgagcttgatcacctttgcatgatcacagccctcatgaatgcagttgtgtccttatctggcttcctgagtcctgtattgccctttgcctaaacactcacaaacaaagactaactaatactaacatctcagacgctcaggaagtagaaaccgtctgaactatcctgcccgccatcatcctagtcctcatcggcctcccgatccctacgcatcctttacataacagacgaggtcgacgatccctcccttaccatcaaagtcagattggccaccaatggtactgaaccgtacgagtacaccgactgacggcggactaatcttcgaactcctagcatacttcccccattattcctagaatccaggcgacctgcagagtccttgacgttggacaatcgagtagtacatcccgattgaggcccccgattcgtataataattacatcacaagacgtcttgcactcatgagctgtccccagaatctcaggcttaccaaacagatgcaattcccggacgtctaaaccaaaccactttcaccgctacacgaccgggggtatactacggtcaaggctctggaaatctgtggagcaaacaacagttacattgccatcgtcctagcaatgagtgccctaaaactctttgacataggcgcccgtatttaccctatagcaccccccgtcaaccccgctctagacgcgaaaacagaaaaacacaacgcagagacagagagcagaaaaaacgagacaagagaacgagaggagacaaagaaagaaaaggcggggcaagcaggagaaagaaaacacagacaaaatggagagggagaagagagagagac

SEQ ID NO: 605585 - DNA, 304 bp, Homo sapiens
  misc_feature (66)..(66): n is a, c, g, or t
  misc_feature (108)..(109): n is a, c, g, or t
  misc_feature (174)..(174): n is a, c, g, or t
  misc_feature (198)..(198): n is a, c, g, or t
cgagcgcgcaatgactacgtcgatgtctcaggctgagcgatcatcgccacgagcacaccagacgcnctactgcggggcctgaaaaaaaggaggtgccgtaggagaggnngaataacctttagattcgttacaactttctttctccttttgtagctatgactagggtggaggganatgatatatatggcccagaaaggnatatacgagggtgctagcattgagtgtgccctactgctttctgtgaggcttttttgccagctctgtcataaacacagagatctgtgcttgtgctcgcacttatagc

SEQ ID NO: 605586 - DNA, 947 bp, Homo sapiens
agcccaagcagaggaggaagaaccttttcaggatgggacttacgactgttctgtgtcctaacagtgaggttccatcacaaaggggcagtattaattagcagctagcgtgcaagctcagtacgttgtaacatagtgggatgattttaacaggagaactcagttcagagactctttcgggtaaaggtatacagtagatttaaagctaattctttctgggtctaaagcaaatcttttgtgactccattacaaaatgtgatcataaaggcatcttttcataacaaaaattttaagctgccagtgcaacaacgttaccctattgttacggatgtcccatgaagaaatattggggtttacacctcaaaggtgtgggtagcttctttaaacccacaggaatttgtttttgcccccaggtgagcttactttttcactaccttaacatcttctacacattttcccggttctgcatttattgtccagatgtgctttttcaaaaaacactaaaatgctaaggtgcttgcaatagtctatcaggttacttgagctaactgtttgcttccccttgataacagtggacttcttaaatcagtcctcctggaatagaattggtaccctggggcacaatattgttcgagttgtgattggaaacaattctccttggttaactaccagtcaaatcccagtctagaattgatggagtatttacctgtgaagttaatgtgcttgtttagcaggttgattcccattagaccatgtgcagagttgaagggtctccactttgtggtcgttcccctaaacaattggctaagacagtctgtgtgaccccggggaatttcaaagcggccatataggcgtaaacagagaggcggcgctggaacacaaggagttaaaggccgccgcaaaaggcacatcctacttttagtatggtcagatgacgcgtactcgtgtgg

SEQ ID NO: 605587 - DNA, 930 bp, Homo sapiens
  misc_feature (48)..(48): n is a, c, g, or t
  misc_feature (88)..(88): n is a, c, g, or t
  misc_feature (99)..(99): n is a, c, g, or t
  misc_feature (104)..(106): n is a, c, g, or t
  misc_feature (256)..(259): n is a, c, g, or t
  misc_feature (313)..(313): n is a, c, g, or t
  misc_feature (317)..(317): n is a, c, g, or t
  misc_feature (355)..(355): n is a, c, g, or t
  misc_feature (366)..(366): n is a, c, g, or t
  misc_feature (390)..(390): n is a, c, g, or t
  misc_feature (395)..(395): n is a, c, g, or t
  misc_feature (409)..(410): n is a, c, g, or t
  misc_feature (420)..(420): n is a, c, g, or t
  misc_feature (422)..(422): n is a, c, g, or t
  misc_feature (488)..(488): n is a, c, g, or t
  misc_feature (530)..(530): n is a, c, g, or t
  misc_feature (542)..(542): n is a, c, g, or t
  misc_feature (544)..(544): n is a, c, g, or t
  misc_feature (547)..(547): n is a, c, g, or t
  misc_feature (555)..(555): n is a, c, g, or t
  misc_feature (558)..(558): n is a, c, g, or t
  misc_feature (569)..(569): n is a, c, g, or t
  misc_feature (584)..(584): n is a, c, g, or t
  misc_feature (589)..(589): n is a, c, g, or t
  misc_feature (598)..(599): n is a, c, g, or t
  misc_feature (608)..(608): n is a, c, g, or t
  misc_feature (611)..(611): n is a, c, g, or t
  misc_feature (621)..(622): n is a, c, g, or t
  misc_feature (660)..(660): n is a, c, g, or t
  misc_feature (666)..(666): n is a, c, g, or t
  misc_feature (674)..(674): n is a, c, g, or t
  misc_feature (677)..(679): n is a, c, g, or t
  misc_feature (698)..(698): n is a, c, g, or t
  misc_feature (713)..(713): n is a, c, g, or t
  misc_feature (717)..(717): n is a, c, g, or t
  misc_feature (723)..(723): n is a, c, g, or t
  misc_feature (731)..(732): n is a, c, g, or t
  misc_feature (750)..(750): n is a, c, g, or t
  misc_feature (787)..(787): n is a, c, g, or t
  misc_feature (829)..(829): n is a, c, g, or t
  misc_feature (833)..(833): n is a, c, g, or t
  misc_feature (838)..(838): n is a, c, g, or t
  misc_feature (923)..(923): n is a, c, g, or t
taattgatttaaagttcacatggttgtgggattctcagtttcttgtgnggttagtaaaaaggaacttcttatttggagacagcaaganaaaatgaggangatgnnnaaggggaaacccctaataaaaccatcagatctcatgagacttattcactaccacaaaaacagtatgggggaactgcccccatgattcaaattatctcccaccgggtttctcccacaatacatgggaattctgggaatacaattcaaaaannnntttgggtggggacaaagccaaaccatatcattctgcccctggaccctccaaatntcgngtcctcacatttcaaaaccaatcatgccttcccaacantccctcaaagnattaactcatttcagcattaactnaaaantactcactccaaannatcatctgananaaggcaagtactttccgcctatgggcctgtgaaatcaaaagcaagctagtttcttcctagatacantgggggtacaggtattgggttattctgttccgggtggggggnattggccggggngnagnggttgggnggnccgtgggggtntggggcccggcgggncggtngagttttgnngcttctgtntgntctcttttgnntccgggtctcacattcaggtcatgctgacacaaaaggngggttnccatggtnttnnntagctccacccccgtggcnttgcagagtaagccncccncctggntgctttcnngggctggcattgagtgtntgtggcttttccaggtgcatgatgcaagctgccgggngatctaccatcctgggatctggagattggtggccgttttctnaganctcantaggtagagcccagttggggatctgtgttagggctctaatcccacatttcccttctgcactgccctagcagaggttatccttgangggctct

SEQ ID NO: 605588 - DNA, 221 bp, Homo sapiens
ccagagtatcagcaatgagagaatctgactctgatagaccaacatccagatgtgattttagtgtctgagaccacaccccagtagcaggttacgccatgtcaccgagccccattgattcccagagggtcttagatccatggaaagtcaggccaaccaagcaacgatttgcactcactgttatctcattaagatattaacaacgttttatatattctaaacgt

SEQ ID NO: 605589 - DNA, 1161 bp, Homo sapiens
tcactgcttcaacagtgcttggacggaacccggcgctcgttcccacaccccggaccggaccgcccatagccagcccatccgatcacctcttcaccgcaccctacggactgccccaaggaccccgccgaccgctccagcgccgacgcagcacaccgccgcacgaccgccgacatctcctatagtcgccgccagtgacagaccgcgatacacactcgcaggtgcgccagaactaccaccaggactcagaggccgccatcaaccgccagatcaacctggcgctctacgcctcctacgtttacctgtccatgtcttactactttgaccgcgcagcatgtggcttagcaacaactttgccaaatactttcttcaccaatctccatgcggcgcagggaacatgctgcgcacactgcatgcagctgcagcaaccaacgcaggtggccgaatcttccttcaggctaatcaagaaaacagactgtgatgactgggagagcgggctgacatgcaatggattgtgcattacatatggaaaaaaatgtgaatcagtcaccatgtgaactgcacaaactggacacatgccaaaaatgacccccaatagtgtgacttccattgacgccacattacctgacactgacccggtgaaacgcatccaagcatagggttgaacagtgaccacataggcgccaacgatggagaccagaccaacttctggcctggcagcgcaaaatcacaatagacacagagaacgctgggacgcacagtgatgaagtaaaagctaagccacccggctaataacacaaaagccgaggggcgaccatcctggtacaccaggacagcatgcaaggtcgaggtacacctaaacctttccacacggtggtcccacaccatcacgtcagctcattaggagactacacacagtacaaacccagactggaccccaagacacccacagccacgcaagaaaaccagaaaagaacacgcacaccaacacgaccgcgcgggcccacaaccacacagcgggagaagagcaaccgtatgacgggcgagcggaaaaaacgacgcgataatcacaaagaaaacaagacacattgtcacaacaaagaacaggtacggatctatcgaaaacaaagccacagaataccaccgacaccgaaacagccacgc

SEQ ID NO: 605590 - DNA, 339 bp, Homo sapiens
gaaggagtacccgatggattatcgacagctgggccgcaccgatctgaatgtaagcgcgatcgcttgggcaccatgacctggggcgagcagaacagcgaggcagaggccttcgcgcagatcgaacgggccaagtccgcggggatcaacttcctcgacaccgcagaaatgtacccggtgccgccgaaggccgacacctatgccaccaccgagcgctatatcggtaattacttcaaaagccgtggcgaccgggccgactggatcctcgccagcaagatcgcgggccccggcaataccatcgactacatccgtgacggccacttgcgccacaaccgcaagcgc

SEQ ID NO: 605591 - DNA, 681 bp, Homo sapiens
gcctcgtgccgggcgtgtgcgcacgtggccccccctgccgagaccatgagagagctaccacaggagcctgtaccagacagatgctgcaggccttgacggacacggtcaaccggttacgtatcagctccatccaggccaccactgcagtgggctctgagcaccccacgtcatgctgcagcgccgcagagatcatggcgtgtcgcatcttttatccacatccatgcgctacaagtgccaggatcgccccggtgaatctcgcacaatgtaccgctattgtgcatctccaatggtgctcatgtcggcgtcctcgatcctctacgcggtctgggctgaagctggtttcctggccgaggcggagctgctgataccgtgacggaaggactcatgctccttaacttgtgaccgtggcacccgagtacccagaaagcatagtctttcagccgagcgtcgcgtcacttaggcatccctgggccatgggcctcgcgggcccgcttgatgggacttggctagcaccgcgcgaagtacttcgactaaggtccagtctaccgtagtctattgcttgctgggagacggggagctgtcagagggctctgtatgggaggccatggccttcgccagcatctataagctgtacaaccttgtggccattctagacatcaatcgcctgggccagagtgagcc

SEQ ID NO: 605592 - DNA, 144 bp, Homo sapiens
agcccgtcacgaggttgtaaaaggggcccgggtgaaaaagttttccgggccccccccagtaaaaaggcgcccggggccaaatttttttcccccccccccccccccattttataacaaacacgaccgccaaacaaaactaaaaac

SEQ ID NO: 605593 - DNA, 149 bp, Homo sapiens
cagggggggcccccccccccgttttttcaaaaaatttttaaattttcttggggcggggggttgggggggaagaatgggggaattgtttgggccccggggtttggggtgtcggggggccctttttgggcccccgttttcctccctttgga

SEQ ID NO: 605594 - DNA, 102 bp, Homo sapiens
  misc_feature (58)..(58): n is a, c, g, or t
  misc_feature (93)..(93): n is a, c, g, or t
acccttgggccccaattggaagcaagagcttgtaaaccatgaaggactgcccatatantgtgtgcatacaaacgtggtgaccgtcaagttcanagtggtggg

SEQ ID NO: 605595 - DNA, 153 bp, Homo sapiens
accaattagtatgttattcagacttggcacccatgtctaccaaagtttacaagttcataatgagaaaagagaggatgtactataaataagtggtccatgtgttgtgtgcagctgtggtggagatgttgatttggagattaaatctcttgatga

SEQ ID NO: 605596 - DNA, 115 bp, Homo sapiens
tactagtcaattacaagctcttgcacacgtaggtgaacattaaaaaaaatgaaaagacaacttacagaatgggagaaaatactgtcaaatgattcggtaggtatgatgaaggacg

SEQ ID NO: 605597 - DNA, 202 bp, Homo sapiens
ctatccaagcactctatgaaccaatgtgcttgatacatactattcccatgaaatttatgtgccattatatgcatggttgtctctgacatggaaaaacctacctcccaccactaggaaaccaaaagtctcagctcaagaaatacctctgagaagtcttccctgcccatgtatgtcttttcatggctgacataacaaaatatta

SEQ ID NO: 605598 - DNA, 766 bp, Homo sapiens
  misc_feature (437)..(437): n is a, c, g, or t
tggtttgggaaaaaatccgggggcacccgggagggattggaaaaaaaatttctttctctctacagcaaatttatggtgaggaagcctccctccaactcctggggctatttagggtccaaaatctcaggttgcctaggggaagattcccaggggattgatttccggggagagcatactctgggtcatacctggagagtccgtgaacaagtgattccccattatggacgcagtctttcagtataaacacctctggttttgttcccctcattttggggcattaagcgtggtctccgcgggggaagtgttcacagttctaccaccgcggtggtaggtgtgtgtttttttttagaaacccacctttaacttcccttttaagggtttactccatatttttcacaaatatttttatgtggattactcctagtggttaccttatnttttggggtcgtggctccaatattgttgtttggtacacactgcggtgggtaataatacacgggcccggggtggggggtcctcgtggcggtcccacaggttgtatatattatcccggcggaagaggttctcctaacacctggccttttctgcgagtgagaattcccccctttttttgtcccttattaacgtatttggtcccccaaaaaggttccactgtgtcccaggacaactttcggttttcttgggacctctttgcgccaccttgtgctgtccccacccgcttaaaaacaacttgtgttcaccttgggttttgggcataaccatcctg

SEQ ID NO: 605599 - DNA, 82 bp, Homo sapiens
gttgatcgcagatgctgtgaagttgacaatattaatcacacctggatatatgtgctgttttacctactgaatcttttcagaa

SEQ ID NO: 605600 - DNA, 384 bp, Homo sapiens
ccgttaacataatcatgtttgatagatgtatatatttctcataagtctgtcagttttttcacaactggggaatgagaggaatcaagagagattactaccctgccagatgagctgtcacaatatcatatagtggtaattacattgcacgattgatgcattacactcccatgctgacgcttgcatttgcgcatatggggcatacatagccgcacactatgctgctgtggatgactgtaagcatgcgctacactgatcacagcatcaacgactgaagaatggagatgagatgctatgctgtccttactatgagacctgagctgagcttactgagttagaggataagaattggtactgcatattgtgaatatactgttgcatgattgt

SEQ ID NO: 605601 - DNA, 307 bp, Homo sapiens
  misc_feature (13)..(13): n is a, c, g, or t
  misc_feature (137)..(137): n is a, c, g, or t
  misc_feature (143)..(143): n is a, c, g, or t
  misc_feature (154)..(154): n is a, c, g, or t
  misc_feature (156)..(156): n is a, c, g, or t
  misc_feature (228)..(228): n is a, c, g, or t
tttgttttttganagggtcttgctttgttgcccaggctagtctcaaactcctggcctcaagcagtcctcctgcctcagcctcctgaagtgctgggattacactgggcaacatggccaacccctgtctctatcaaaanaaaaanaaaaattagtntngggcctaacgcacacctgtagtcctaggtacttgggagggtgaggtgggatgatcacccgagcctgaggagntcaaggcggcagtgagcggtgattgagccactgcacaccagcgtactgcacaccaggccacagagtgaaaccctgtctt

SEQ ID NO: 605602 - DNA, 656 bp, Homo sapiens
ctccaaaggttacccctgtcccgctcataagattaagccattctggtgctgtctctctttgatggaatcgctaaagggctcttggtgctgaaggacttggggatacaggtgcaccacaacattgcctcggagttgtgtgaggactccatcacggtgggcatgttagcggcaccatgggaagatcatgtacgtcggggacgtccgcagcgtcacacagaatcctatccaggagtggggcccattcgatctgctgattgggggcagtccctgcaaggacctctctatcgtcaaacctactctgcaagggtctctactagggcactggccggctcttaaaagagttctaacgcctcctgcatgatgcgcggaccaagaagggagatgatcgcacattcttctgactctttgagaatgtggtggccatgggcgtttagtgacaagagggacatcacgcgatatctcgagtccaaacctgtgatgataaatgccaaagaagtgtcaactgcaaacagggcccgctacttctggggtaaccatcccggtataaacaggacgttagatccactgtgaatgatagctggagctgaagagtgttgaagatggaagaataccagtaagaaagtgagacataatagaagcaatcctcgaagggacga

SEQ ID NO: 605603 - DNA, 834 bp, Homo sapiens
ggagccttttttcctcccccatcccctgcagctgccttttttgggggcagggtgggggttgatgtgaactttaagagtttaaaagtttagcttatgagtagttgtcatttaaacatataattgcgaatatcagaaaactcatactggaaaactaaatttttttttctcttgagacggagtctcgctctgttgcccaggctggagtgcagtggcgcgatctcggctcactgcaagctccacctcccgggttcacgccatcctcctgcctcagcctcctgagtagctgggactacaggtgcctgccaccatacccagctaattttttgtgtttagtagagacggggtttcaccgtgttagccaggatggtcttgatctcctgacctcgtgatccacccgcctcagcctcccaaagtgctgggattgcaggcatgagccatgaccccaacccctggaaaactaaattttaagtgcttatttttatagaacgtttgaaaatttaatgcaggcggtgtgtaataatcattttcgactggaccattaaattctgcttcttaaagtcagcactccacttgggcctggttgaaattggaatctatcttggtttgggtaaccaactctggggaagattttggcgtgcacttcctcaattattctcctaaggtttctacctaaaacaaacacgtgggtactggcccactgggcctgcgcaactcggggttggggaacttacaaccgcgggaagagcgccgcgggggagggtgaggccctatgatgccaaaaactggccgggggggagtggggaacgcccagaccggtttttataaaagggccgc

SEQ ID NO: 605604 - DNA, 149 bp, Homo sapiens
tgcatcagtgcttgacctcccaaagtgctcagattacaggcgtaagccaccgcgcctggtgagaaaccaatattacatcaaaactcaccacagtgcgcaagcggaagcgtgtaatcaaattgtagtactcaatactcattgcaaggact

SEQ ID NO: 605605 - DNA, 308 bp, Homo sapiens
ttacctgttctgaagcaactatactgtctttgcatattgtcacacccctatttgtgcacgagcgcatttatcgacttgcgcaacttggcgttcagttccgttagcgacgtggcattatacgtggcagctattactgttcgtgtagatctagtgcagggtacaactaacttcgttatttcaagaaacttggcccaggatcacgggaacagcaagcacaattctgtacttcggttataccatgataatggtttagatcttctttctttttacaggaacaattggcttctttgcatgcttctgggtttcga

SEQ ID NO: 605606 - DNA, 264 bp, Homo sapiens
aagggctcagggccccagcaaccaagccagcccccggggggatgataccccccccccccccctggccagcctgggggtgccctgcctgccctcctggtactgttgttttcccctcggccccctcccatgtgtattcaccagccctatggccttggctctgggcctgatgggccaggggtaaagggaaggtgagcatagcccattttcctaaagcgagaattgggggaaagctgtttttttttttttaaaatcccttcagatgta

SEQ ID NO: 605607 - DNA, 211 bp, Homo sapiens
ccctttcttatctaaccctagaccattcctggatacccagaccatcgtgcccagtggtgcccccatcctctcccatccccgctgccctcgtggccagtcccggctggttttgtaagatactgggtaggtgcacagtgatttatatctggtaatttaaagaggcccagcattggtggttctattgaatggacatgagataatgttagagata

SEQ ID NO: 605608 - DNA, 259 bp, Homo sapiens
gcactctatagacttacattaactagtcattgtaagagtgatatagaagagcttattatttttgaaatttgaagtataatatcgcattacataaaatttaccagattaactcttttgaaatgtgcattcagtggcgtttagtacatttcacaatagttgtagtaatcattagctactatatagtatccgtagatactagttagacacggacaaatagaaaaccctattgcccactaaagcaagtcacttagtataacat

SEQ ID NO: 605609 - DNA, 304 bp, Homo sapiens
cgttcgggtgacttctcctgacttagaattttggtcatatcatttcaaaacattagcatattggttggttgcatatgctttcctcattgatcccaatacccaaagtcttagaatcactctcatttaaaatactgagcggtgattcgatatacttcgaagtcgagaacaggcaatgtgcagccctcatttatgagaaaaccctcaggaaactcccagggttgatgcttggagaacctgtgagttgagctgaagctcggagaacttcctccagcagcaaagggcttcagaaagaaagaagaactct

SEQ ID NO: 605610 - DNA, 522 bp, Homo sapiens
agaattcggcacgaggtgtctcggtaagggaggactcctggcttccctggtcctaataagtatggtgactttgtatcccagtgtccctgggcgttctggtggctacagtaaggtgtgtgtgtctcaggtggccgccccacttggcaacgatgggggcgcctggttgtggaccgttctccgcagctttcatgatgctttgatgtttgtggttttattcaaagttcctggtctcacaacaggctcggaagttatttaatgactgcattttatagatgggtgtacctgcggctcagagaagaggagggacttcctcggcaggtgtgtggccgagctgggatccaagggcaggctcttaccctctctggcatctgggtccttttgctctgaagtgctcacgtttctgccaaatactcagggtctgagggtcttagatgagacggcaggcagaggggtgagggaggctcgttcggatcatggctcgtcttggaggaagtggacccatcacaatagacctggcggccg

SEQ ID NO: 605611 - DNA, 122 bp, Homo sapiens
cggccagagggatacagcgagcgtaggattggagatcgtccaagttaaagattacaaacgtgttggggatcaagaggaccatggttcagccaagaggatctgtggaacgagaagcggcgaag

SEQ ID NO: 605612 - DNA, 539 bp, Homo sapiens
agcggcggagagcgtggtctgcttggctcgccgcgcctctcccccgtccgtccatattgctgcagcccccgagccgggaagcccgggccgcccgggggcgggggggagggagggacgggactagaagcctgccgggctcggggtgggggcgtcttgcgaggaacgggcggggggggacgcacgcctaggaggcctggactcagagtggggggccttcctcgcccccccgccccgactagtgggcctcggatattacggcggcatgacatctaactggagaggaggacgcacctcgacgtgaacaccgaaccctagctactgacagggactggggacccagaagaccccggaggaaggacgtcgcagggccgctcatgctagaccaagattcgaggcgggggaggcagcctcgggcgcgcccggctactccgaggggggcgggcgcgcagatggccacatcaggtggagccgcgagcatgcctgggggcgcccacgactctatgcagggcagcagagcacggggggctaggtgaggcaag

SEQ ID NO: 605613 - DNA, 837 bp, Homo sapiens
gaaaatctttttagttagattgtaggcttctggggccgtcccatgccaggactgcaaaggtgatccacgccctacctgtcttcccacctgtgtgtcccccgtgtgggaaggtcggtgtcactgccccttcccaccctcacatctgcttagccagtgagccacacccctaaaacatcagactgcaccatccaggtgcagctccagaggctagccagaaaggcttcatgggacctagaatcccgcatccctagcttctctcgtcccttcctccatcaagaccttggatctggttattaaggggtgccgtgtggatgcatggagagtcatcaagatcatgcataagatgcacgatccatagcccccagtggctttgagagagaatccatcatcgtgaccatatctgtccaatcgtccccagatgggttaagtcgtatataatttgtcttaaattggtgttaagatctaagaaggttagggggtagagcagaggaggttatatctgtgtagtagtgagtggcttcatgtgtggaatattcatttgcttactgcagtgggacttggggtggaagccagccctacctactctgtgtggtcttagccctgaatatggtgacaggcgtaggcctgcagtcagccatcagtgtgtgcatgtgacaggcatcaattgtgattagtaatattgtctgttcctcccgttgaaagtggtcgtgttaagtctgagttttaaaagctggcaggcagctgactgtgatggtcactttgtgccctgatttttaccgcctcgtgggccacgatttacagggtgttcccacccaccagttcctctaagacaatatc

SEQ ID NO: 605614 - DNA, 321 bp, Homo sapiens
taggatcctgtattgagtgcatgtaggagtgggagagcgcagcctcattgaaagggcagcaggagcggttgtctgggcggggcagtggacacggtgtcctcgaagtgctgcctactcagtgcaggcacaccagcagtgcacacagacaaccaaactgccaggaaacacactgagctcagatgcaaaagaggtgacgccaccccaagcataagaaggtttaagcctacagtgaggggtcccccaagaccccggtgttgtctccctgctcgtggttctgctgtgcaatgtccccatccacagacccacactgatgagtcttct

SEQ ID NO: 605615 - DNA, 600 bp, Homo sapiens
tgaaacagagtctctctctgttgcccaggctggagtgcagtggcacaatctcggtcactgagcctccgcctgccgggtcaagcgattctcctacctcagcctcctcagtagctgagattacaggcttgcaccaccatgcccggctaattttaggggtttcagtagagatggggttccacccgtgctggccaggctggtctagaactcctgactgcaaatgatcagcccgctcagcacccaaagtgttgggattcacaggtgtgagccattgtgcccagcgtgattttttgttcttttaaaagacaaatcttgtccttgggttttcggcaaacaggctggtccctcttatttagaccatacatttcctgtgggggctgaacccccagtggtctcccacagtttttggcttgcttgcactttcccccgttgtggctcctcactgggggcgcatgggcccctcttttctaaatttaaccttgggccccgggggaatcacactcggcttggcacgggttaggtgagccccctcttgtatttcggacgcgccccgacgtcttcttgggagcctgctgtagtaactcctgcgggttctggataacg

SEQ ID NO: 605616 - DNA, 114 bp, Homo sapiens
tagtaacagttgaaatttgtttgcaaattatcagcgtacttattatttcaggctgggcacagtggctcatgcttgtaatcccagcactttgggaggccgagtggggtggatcac

SEQ ID NO: 605617 - DNA, 717 bp, Homo sapiens
tttcctcgaggggtctttggttcgcgaacagcggagcgcgccctccacgatattatggggttcccccctcgccccccccttctcggtagtaaacggcctctgttcaagcacccaccgccgggggctttttgatcacactgtggcgccgcatcaaatagtcgctctttacttagctctcacacaggcgtggttcgtgttcacacataggggacctctgatggtgatagcacggggaggctcttcacgcacgcgattttttggcccccctcacggggggggtcctctccgagagggatccatggtgtagcgcgcctggggtccctacataacacatgagccgcggctccaatagctccaagtccgctgcaccagcgatataatggcgcccactcccgcctcccgagagaggcgcacctcttgtggacgttccacgccgccgctcgctgtgtccacgcacgcacctgggtctcactcctcttggtgtggctcgcccgtcacctgcgcggcgctcctagccggttcttatctattcaagggcgtctctacaagggggcgcccgacggcccccccggcaagcaaatggcgcccgcgccccacgacgacacgcacccccgggtgagctcccgaccacgcacgccgctatggcctcctgctcgacgagcggggacaagaaagagaacaagagagttatatctttcaaaacaaaagacaaacaaa

SEQ ID NO: 605618 - DNA, 522 bp, Homo sapiens
  misc_feature (332)..(332): n is a, c, g, or t
  misc_feature (344)..(344): n is a, c, g, or t
atcatccagttggttggcatccctggcctgggggcacgcggttggattgcagccctgtctacactggataatcattccctggccatatcagtcatcatgatggtggtggctggcttcttcaccctttgggccgtgctttcagttttcctcctgcagggggtgcactccctctaccgacggacaggggccagcttccagcaggcccaggaggagttttcccagggcattttcaccagcagaaccttccccagagttgttttatttgttgcccaaggagccttccaggggaattagtcctcctcttttctttcccccccagcctttttttggcntgccctctgagntgccctttccctgggggccttatgtggtggtggttgtgcccagcacaaacctggcagggttcttgccgtggcttttcctcctccctcagcgaccagctctccctggaacgggagggacagggaattttttccccctctatgtacaaaaaaaaacaaagctttctttccttttttggta

SEQ ID NO: 605619 - DNA, 396 bp, Homo sapiens
gagtgcgcggaggctgcggggtggagctgctcggccgggagcccggcgcgagacggagaggcggcggaggtgcccgcgcgcaggtctggtgggcggccgggaaggcttggagaggcgaaccggagcgcgggcccgcggtcgcccccgaccagaagccgggagacccgaaggcaccccgagcccgcccggaagcgcgccgaatgacaggcgcgcagggaaataacccgcccggctgggtgccccacaaggccccggggcggggacatatcccggtccgagacctattattggggcgatcccactcagaaagtaattttgataggcaacgaagatcacccacgtagtgtagatggccaccatataacgataataaaatcgttctttttgatcggcact

SEQ ID NO: 605620 - DNA, 291 bp, Homo sapiens
taaggtgctgacagaatataaaaagtatgtaattgtaacatcaacttgacctgaaatgtgagggacgggagaagtacaagtgtacgagttatgctcatgtctctgaagttgttggcttacaataggatggtatagctataaaatattttatgtaagcctcatagtaaccactaagtagaaacctgtagtagatcagattcagagacaggaatcaaagtatatcatttcaaaagtgatccaatcacaaaggaaggcaacgagaaaacaagaaagatacaaagtactacaaag

SEQ ID NO: 605621 - DNA, 89 bp, Homo sapiens
  misc_feature (58)..(58): n is a, c, g, or t
  misc_feature (86)..(86): n is a, c, g, or t
cgcatcttcgaggagtccccattctcatcatcttcctcttcttcatcctcgttcttgntcatcctcatcctcttcatcatcctccntcg

SEQ ID NO: 605622 - DNA, 100 bp, Homo sapiens
  misc_feature (36)..(36): n is a, c, g, or t
ccggaccagtgttccctagttgtgggagcagatgcntgggcgcatcgcggggcgggcagggcctgaagtgcaggtgcgggccgtggaccctggcgggggc

SEQ ID NO: 605623 - DNA, 592 bp, Homo sapiens
ctgaagtgggagagataaagtgtttcttcgcttcctcttttcaatagctgattgtgcatcagctattgcccatttatcaattggatgagggaaacttttttgaacacgttcctctacatctgaagcacttcggggctgagcttggcatagcatatttaataattgcaaaattaattcttcaacatactgaagagcatcatcattagactcgagagtaggatgaacttgcccctggacctttttcagcgcaggcaccagtagtcccctccacttgggcgcgttctcttcgctgaaaaactcgtagggcagctctcgcctgcatggtgccccggggccctctgggcggggagagggagcgcggtggccgggccagggagccgcgagagggcgttctccagcgcggaatctagccgcggcccctaccggtgatctgtcccctccgggcgccgcgcagtcggctagccctggcgagggggctgggggcgagccccgcctggccacccacccgacacaggtaccagccgtggagaacggacgcggcccggaggcggggcatcccgcaccaccgactctccgccagcctccccgcccc

SEQ ID NO: 605624 - DNA, 344 bp, Homo sapiens
gctgagtttcagcattgcccagcgcttccggcatggtgctggaagcgctgggcaatgctgaaaattcagaatgctgtgaaagagtcagcacacacctagagaaggcgcgtcgtgggttggaagatacaacaagtggagatgacaggtccttccagattgatggacaggtttaatgcaatccagttactcgaaaaacactgtttaaatgaagaagttcttgtactccctccccttggggtggcgtgcccccagcccacactctgatgctggggcagcgggtgaccgaggcgggagcttgatggagaggtgaatgggtggtgctttgctggctagttctagatcgc

SEQ ID NO: 605625 - DNA, 461 bp, Homo sapiens
ggatcctttcggcgtgggaggtggtgcgctagctaactggactgctgtcgttggatgcactgcgcagttcaggtgtgggctctgggaggcggaggcggaggaggccgctagagatggtgctgaggacgaggaggccggtaggttggtcatgctcactaggccactgaccaagctgaagaggggctcgggccacaagggtgttgccacttgttgggtgcaggctccagggaaaagcggccagtataggtgatggggggcagtcgaggtggtttggctggggtaactggtctccaccagcaccttctcgttgttcagagaggatgtcaggaaacgactctggcaggagagagagaagcgggagggctggttactggaaaacaatcactggaggacggaggacagacccgagcttgccaggcaatgaagaccgggccggcttaccattgactgggtaccgagct

SEQ ID NO: 605626 - DNA, 210 bp, Homo sapiens
cggggggctcgcgttcttgttgtgttttttttgtgggcccccccccccccgcccccattggttttccgctttaagtgaaactcctcgtgaaaaggggggggcccctttttttggggtccccctaaacatgtactgtaattctttgtctttggaaaaaaaatttttttttaggtaagggttagcttttctcttcaaaaaaaaaaaacaata

SEQ ID NO: 605627 - DNA, 913 bp, Homo sapiens
  misc_feature (80)..(80): n is a, c, g, or t
gagagagctgcttgccctcttccaccatagtaggacacagtgagaaggcaccatctaccaaccagagagtgggtcctcancatgacactgaatctaccagtgccttgatcttggacttcctagcctccagaaccgtgagaagtaaatttctgtttatttaaacagtcaagtaaaatcaagctgggtaatcatggcagaaggtggatttgatccctgtgaatgtgtttgctctcatgaacatgcaatgagaagactgatcaatctgttacggcagtcccagtcctactgcacagacacagagtgtcttcaggaattaccgggaccctctggtgataatggcatcagtgttacaatgatcttgggtagcctggatggtttattggcatggatctgtgtccttaatgaagactcctaattctaaagaggatccagcctaacctgaaagccaaccagtcctcaataagttggccatgatcccaccagctcctccttgttggactaacttgtgtgatattgggaaggtgaaattcgttaaccaccttgcaggacaaaaagaacgaaagaatgacaggagtaatcttaaccccattagaatgttttccctttgtgtatctgcaatatgggattggtatgtgtttaatgagtctagaaattcactggcagtttatttggttccgtgtaatgtaatcctattaagtattggagtgatgatttttttacaggttactgggctttggggctaactaaaacttcactcatcggtggaggatataatggaatggcggtgagaatggagggcttttataaaattgtgggtaaggtttcacaatataatggggggggtggaacaaccgagtttactgtgttgggggtagggacgggtgatcaacagatgtgttgggaagaaaatagg

SEQ ID NO: 605628 - DNA, 240 bp, Homo sapiens
actctttctgtgcctcagtatcctccctgtaaaactagaaagataacaatccctagcacctggcttttctagctgcatagcgggcagagctttataaaggggctagaatatgtccagcatgagtaaaaacaaatggccagtacacatgagctataattgtctcattatttgtttaatctggtgtctggatgactttcctttcccggtatgcccatctgcagatggggacacattatggag

SEQ ID NO: 605629 - DNA, 742 bp, Homo sapiens
tatgccactagcaatgattgcttaaagagtagcgaagcactctatatttaagatggttaaacataactagctgttgcttggattatatataacttgtatatggcatgtagaggaaaattacacattaatatttgctgagagctgagcctttgtcgagtcatttgcttcgtaattttattccacttttcacgaaacacttttagttcctactagtagatttattggacaataactttcaggttttgtaataggatgccggggttctcagtattcttccatagacaggcactaagtaagcaagagggagcacatgggttgacgtttcacggtacgtaaaatactctcaacctatggtactaactgggttgactgggtttctcatgtatatgtactggcatggtacggagatgttgcgacgaagtatgtctcatcagactccgtgtgcaactttcccaagtgtggcctaacaaaagtgcaagcttctttttatgtttcttttgtagaatgtttaggttgtttttgtatagttacaagtgattaaattctcctgggaaattcacaagagaacgcaaagggcaaaacaagcacatccaggagcaacaagaccacgggaaacaaccctaggggccgtcgaggggacccaccaaaggcaccccggagaaggacgccacacgcccaggggccctcccccagggtctcgggacccacaagggggcccccaaaaggagagggggaaaacaac

SEQ ID NO: 605630 - DNA, 875 bp, Homo sapiens
  misc_feature (97)..(97): n is a, c, g, or t
ggcagaaacggcaggtggagcagcgtccggagcagcgcagcttctgaagctccaggcggtctttctgccgagcctcggtcccggcccatcctcccgnccatcgttgtgtctgggcggatttaaacagtcaagtaaaatcaagctgggtaatcatggcagaaggtggatttgatccctgtgaatgtgtttgctctcatgaacatgcaatgagaagactgatcaatctgttacggcagtcccagtcctactgcacagacacagagtgtcttcaggaattaccgggaccctctggtgataatggcatcagtgttacaatgatcttgggtagcctggatggtttattggcatggatctgtgtccttaatgaagactcctaattctaaagaggatccagcctaacctgaaagccaaccagtcctcaataagttggccatgatcccaccagctcctccttgttggactaacttgtgtgatattgggaaggtgaaattcgttaaccaccttgcaggacaaaaagaacgaaagaatgacaggagtaatcttaaccccattagaatgttttccctttgtgtatctgcaatatgggattggtatgtgtttaatgagtctagaaattcactggcagtttatttggttccgtgtaatgtaatcctattaagtattggagtgatgatttttttacaggttactgggctttggggctaactaaaacttcactcatcggtggaggatataatggaatggcggtgagaatggagggcttttataaaattgtgggtaaggtttcacaatataatggggggggtggaacaaccgagtttactgtgttgggggtagggacgggtgatcaacagatgtgttgggaagaaaatagg

SEQ ID NO: 605631 - DNA, 285 bp, Homo sapiens
tttgaatttttactaaataaatttcccccggattaattttttttttttcatctggggatttggaatctcgggggttactggtaccccaatttggccaaagggttgaaatccctttaatgccagaacatgggaaatttgcagccctttcaagcaggggagggtctttttttataacatcggtaacgggggcccttaaatattttgagaggggaatggaaaaaataaaagggatagggttttttttttttttaaagaaaacaataaactttcaaagaggaaacccga

SEQ ID NO: 605632 - DNA, 369 bp, Homo sapiens
cgcaaacaacaaagacagtggatacctgtgcactctgagccgatccatactggaccatgctggaggttcgatatacgaccacttcacagtaagtaataactcagagtcataaagtcgaaacagcaaagacatctgaaatcatcagacttgttctgcaaataagcttacctaggcatgcataccactttcgccttaatcagaatttcccctttccaactatttaacagtggcaactataaaaactctggtcgttaaaatacacagcagtcacttcatattactgcctccctcaacccactcaccttctgaagaacagggctttttcaagttttgttcccctttaagttttaatagaagccagtagtgggt

SEQ ID NO: 605633 - DNA, 84 bp, Homo sapiens
gccgtgatgggcccggggcttctccaaaaacataattccctgcttctactggccgctcccaaggttgtggccaaggtcttcctt

SEQ ID NO: 605634 - DNA, 230 bp, Homo sapiens
catcggctaatgaagcggtgatgtgcatgaaggcagggctgggtgcacatgtccagacactcactctcagagaacgagactccacttgaaattcatgtctggtgaaacgggaccaggtttatattcttctatttcacacatgatacgcatcatcacacgcatatacaagttacaatgccatttgtccactgctgcatctctgattctatttcctgagatacctgctgggg

SEQ ID NO: 605635 - DNA, 886 bp, Homo sapiens
ggcaatggtcgtgctgggcagtggcgatgcaaaagtgagccagggaagctacgtgtggggaacaagtaccgcctggggacggaaagatcgggagcgggtccttcggatatatctaactggggtgccaacattcgcctctggatgatggaaagtcagccatcaatgctggagatgtgtgaagaccaaaggcatctcccagttgtatcatcgagagcatagttcgtacaagatgactgtcacggtctgtgcgtggtggatcgccgatgcactcaagggtggctgcaggagacgtgacgaggcagaacgtacaaacgtgtgcatggatcactggatccctgtgtgaggtgccatatccttgcgaggaccgtgattacaactttgctggtggcccgcgaatcttccagtcatcaatgaacgggtgctcgttcattgagtacgacccaaggattgaatgcaggcgcggtgactctgtacgatatgattcccatggtccaaacgtacacatgtccaatcactacccgcgggaccgttccacagtcctcaggacttagctatccctcaatgtgcggcttcgtggggaaagaaagggggaactcgtggtcctacattcattcgtagctttagggccctggcacatagaaagtaatgcgggggagcgtcccggcaatcccaaacaggtcatagtacctcttagtcgggcgaaaaaaggacattattgccgtagacctggacaacagggcacccagctaacgtccttaccattctaacgacggcagtccttaggagggggtatggaagcaataggccgctctgaggactgaaccatgcgcaagaacgccctggggttagagtatgcgtccattggtagtaatcatggccgtgggga

SEQ ID NO: 605636 - DNA, 298 bp, Homo sapiens
ctggctgagaaactaaaagagtgagaactcactcactaatgcaaggaggatgcaatgcatgtatgcagatatctagcccccatgacccaatatgcctccaatcaggctccatctccaacattgcggatcagatttcaacttgaggtttggaggggacgtatatccgaaccatatcacatagctatctgtgccctcccaactgtacccttgaatcctctctgctccggagtgtgccttttacgacaggatcgagacacctagaccaaggccgaggagagaaagctggtcatgccactac

SEQ ID NO: 605637 - DNA, 343 bp, Homo sapiens
agacactccactaaatactacacgcagacatgggaagtctgaaagtctctgtggggtaagtcagccgatggcagcttctcttagcactggtgcatcttccaggctctcagctgatgacgagatccaacacctcactgtggcagcccctgtgagtcagtggcctcgcaacttttcttttggctagaaaatgcataaaggaaaagttgacagtagcttaacagttcgggcagtgtgtatacactgcactgcagaatagacaactgttcagaaagcgtcttggctttcttatctttcctgttttctcccccgcttccttttctttccttccccagaggaaggaggg

SEQ ID NO: 605638 - DNA, 176 bp, Homo sapiens
cagacgatccctagatatcagcagagaaggaggaggaaggaataatatcaaatttaatatgaggaaactaaagtagggacagattaaataaaggggcagagcttagactctcacccaagcattgacatccaaaggtcacgcttataacacactacaccgagagtgttagattttga

SEQ ID NO: 605639 - DNA, 348 bp, Homo sapiens
tgagtatcgcccaacactaggctcaggcaatcctcccatcttggctcccaaagtgtgggattacacgcgtgagcaccgtgcctggcctggtttggaacattagaaagcacacacaggctttccacgttttatgcacctctataaaaatatttcgtacataaaatttgaaatgagaaggatgagactaaaaaatgagtagcagctcccaccgcaccctcagcaggcacagccaggctcaaaggcacatccaggttcaggtgtacggtccccatttgggaaccaggactgcggctggtgggaggaggctgtgtgagtggtgtgaatgggatgtgtgtgtgtgggggataa

SEQ ID NO: 605640 - DNA, 121 bp, Homo sapiens
agcggccgcccatttttggcgtctccctttctttaattaacatttcaaaagtaataaattctgactggacgactggtaaaacaaacaaaaaaaaaaaggggggggggggggaccggagctc

SEQ ID NO: 605641 - DNA, 238 bp, Homo sapiens
ccaatgtcacggatccttttaacaggctgatgctgacgcgtacagggaagggggtgggaatacttgcctgaggggcagagccaggagttgagccagtcctgactctcagtgttgtcctctatcctatagcccttggggcaagccagggactcttctagaagcagaaaactaacgtggaccaacccagcacccacgctctccagcatcttgggacggatgggcggtggggatgtacaca

SEQ ID NO: 605642 - DNA, 104 bp, Homo sapiens
tatagagaatcttgctttaacagtgaactggaataatgagtggcttcactggtaaaatgcttctgaattgacttgtggaaatccatttgggggtgcttggggaa

SEQ ID NO: 605643 - DNA, 991 bp, Homo sapiens
gctgcggtgaggctggtctccggctgccagaccatgctgagtggagcacgctgtaggctcgcctcatcgctgcggggaacgcgcgcgccgccgtccgcgattcgcccgtaggtgcctgcacgcgtcggggtcgcggcctttgtgccgatcggggcaacgaggactgaggagccgcccgacgatttcgatccggcgctgctggagttcctggtgtgcccgctctccaggaagccgctcagatatgaagcatcaatcgaacgagttgattaatgaagatgtcgggaaatagcttatccagactcattgatgggatccctagatatgataccacgagggcaggtaggatgacacggtcaactgtacgaagcgagaagaagtggagcagcgcctgggttcatactttacacaagttataaaaacgcaacgagccagattattcgttaagaccatataccttttaaaacacaggtggccaggtaataggtggccagacgactgcaatgtctctgtctcttcctacgttgactgtctgaataccactgggattcttgagcaggacgtgtctactcaagctctgtggaagaaaacttcccacagggtgcactagcgacagcaggctttgtttacagcctgtcttgcctatgaccataccagggtatgtattcttccaccttgtggacttgggatgggattaaagctcttgcaggcagtactgatgcacctaaacgtcaaagcgcataaataggaagcctgggctcgacacggaagcccaatgaggcactacgtgcgggaagagcgtgcgcgcaaaccgcaggccgggaggcgacctgcgcaccctaattgtgcctggcgccgtgtgaagcgcgcccacgccggcgaaaacctgacacgtggtgggagcacccaaagaggacatccccacgccaagggtgggcctcccgcaccaggcacacgcgccgcagcgcgggcacccgctccatctagacaatac

SEQ ID NO: 605644 - DNA, 721 bp, Homo sapiens
gaagcatggagcacacctggcgctgctgctgagaaatcataacagaagaccggctgtgctgtcccatgactgtatatgtacactaccaaacactcaggacacatgctgtgctccagtgctgtgagggaggaagacctctcttctgacctaatggcgtataggctacaggggtgatcctggactaatgacatcctacgacatagagctagtcacctctgaatacaacgatctaacgggagatcatctgtgtctatgactgctgacatgcgcacccaccacgtgtaaatgtctggtgttatttctaaagacacaggtcatgagatgcgtgcgtgataatatacacacagtacaactatcactcctttctatgagaatcgagagccttatatctgaagtgtgccacgaccctacatatcactatatctccccacaagctatgacccccaatagctctgtgtgctaaacatgaattacaagagtctcatgtattgccaaatcacagctgtgcaagatatcgcgcaataatcagactggcgtgctgggggtgctgatcactatagtaatgtgccttacatatctttcatcacagagttatgcttggactgccccactcctatgaagacccatttgtacctgtaagtgctgaagtggaagaatgtacatgcgccccggtgctgatactcacctctccagaagaggtgccctttcgcatgatttgttg

SEQ ID NO: 605645 - DNA, 294 bp, Homo sapiens
aaaatcatgatatacacaagcttactggctgcagcactgtgtgcaatgacaatacggtatccatctctgagggactgagtggttagactatggtgcgttctcgtagtctacggtaacagggagaaagaagctctttatgtgtggatacaaagggagctccagttagatgctgttaaatggtttgaaactagtgcagaatggtatgtacagtagattgccttgtatgtatgctagaataagaagttgtgtctagatgcatgtggaaacaatgaaggatgaggcaagaaaaaaaaa

SEQ ID NO: 605646 - DNA, 133 bp, Homo sapiens
tctagaggatcctcttgcaggtctctaccttggtttattatgctccttgctctctctagactcagcggttctggctgcagcctgggcagctgggaaggctgggaggacggtggttgccaggctgtcgtgaggc

SEQ ID NO: 605647 - DNA, 443 bp, Homo sapiens
tccagaagtccaaatgagaatttctctggcttaccctctttaacagaaaacttaattgctttagatggtagtggtcttcctgcataagtgtctgcattactttccatttttttccccccctaagccccttttcctccatgttgaccaatatgcgccctaccctctccctttccacctgaagcatgtcaaataactttgagctcaaccaggagtttctttgaccctccatggcttgttcctggaagcttttgcattgcttccccttttttattcagtatttcaattcttaacgcaccaataggggttccagcaggcctaatctcattaggcaataattcatctccttcaggcctagttactgacgatctatcagggagccttgccatttcatcttaaacatattttttgtaccctccccccccccgccgtttccccgcgcgcgg

SEQ ID NO: 605648 - DNA, 387 bp, Homo sapiens
  misc_feature (38)..(38): n is a, c, g, or t
gcaatgctgactggttcaggcacagtcttccccgccgnggcctatgttcagtcttacccctcctacctgagccagatggcgtgcccgtccatccactctaccaccccgctgtcttccacacggggcactgggcttcctgccatcaccgatgtgcctaggcgcatttcaggtgcttcagaactgggccctttttcagaccccaggcagttcccaagcatttcatccctcactgagagccgcttctccaacccacgaatgcactatccagccacctttacttacaccccgccagtcacctcaggcatgtccctcggtatgtccgccaccactcactaccacacctacctgccaccaccataccccggctcttcccaaagccagagtgga

SEQ ID NO: 605649 - DNA, 585 bp, Homo sapiens
ccacccccggttcttgtagtggttttagtatacaagcctgttcagcccgtgttccccctgacctcttctattgaccgtcctgacgttttctcggggaacccacagcattcttcacccggttcaaagtagacttcacaattattcatgcccttgtaaccaatccctttacgcttggcgcgtaatcaattaccgactataccacacgtggcctcactttggtatgccatctcagggtaaagaattctccgacttgaagtagctctcttttatgtaacgcacgcgctggtctagtgaattgcgagcaccccttgcgttttccgatcggctcccgctggtaccccacacgtcttatttgacccgtcccctcgatgttttcgcacgtaatattccggtgtgagtagaagatcccctcttaaggcgtttgtatttaaaagggatatatgggatagatgggtggaacacacacaccgcaccgaatgatattttggtgttagccccaatgtggcatcccctcctctctagatatagtccctatagtgggatcgcctgccaatgctttaggaaaaaaaccaccatagacgagaa

SEQ ID NO: 605650 - DNA, 304 bp, Homo sapiens
  misc_feature (31)..(31): n is a, c, g, or t
  misc_feature (101)..(101): n is a, c, g, or t
  misc_feature (110)..(110): n is a, c, g, or t
  misc_feature (142)..(142): n is a, c, g, or t
  misc_feature (144)..(144): n is a, c, g, or t
  misc_feature (193)..(193): n is a, c, g, or t
  misc_feature (208)..(208): n is a, c, g, or t
  misc_feature (278)..(278): n is a, c, g, or t
catcatgtcttcataaaggactcatatcatnatagtaagccaaggcccaaagggaaaagaaagagaaagaagagggaatccaaatgaatgctcctagacgnctcactcgnacgggcttttccggacatcttccactccttgncncgaagtttggtctgttgaatttccctgtgacagctttggcaggttcaanacaaactctatcttntttgggacttgtatgggctgcactgacttcacatgctgctgcagctccttggtgagctgttctgggtcangggataggaactgcgaggccaggatc

SEQ ID NO: 605651 - DNA, 936 bp, Homo sapiens
gttagccgtcagaacacaggtgtcgtgaaaactacccctagaagccaaaatgggaaaggagaagagactcatatcaaacattgtcgatcatgtggacgacgtagattcggtgcaagtccacacactacgtggccatgctgatcatataaagtgcagttgggcatcgaccgaaaatgaagccagtagagaaaatgtttgagtaatggacggctgctgagatgggaacagggctccttcaagctatgcctgggctctatggataaacggtaaggctgatgcgttgatacgctggttatcagccacttgagtatcatcctgttgtggtaaatattatgaagagccaggcaagatacttaatggtgacttatcagtagattgccccatggagcacaggagacctgtattcaataagagcatgatttaccagggacagtctcaggtctgacctgtgcgtgatcctgatttgattgcttgtcatgcgtgctaggatgacacttatgacatgcttgagctagtcgtccatagaactgggcatagatccgagatgaagcatgcccattcatggcattacagcagctgcggtggtgaaaacaaactaacttgtcgggtgtaaacaaaagtggattccaactgagccagcctacaggcagaacgcagatactgaggaaatcgttaacggaagtcagcagcttacattaagaaaaattgggtacaagcgccgaacacgagtagccattgtgtagccaatgtctggattggaactggtgacgaacatgcgtggagccaagtgctaacatgccttgggattcaaggggatggcacaagtcacaccgtaaaggatggcaatgccagtggaagcacggctgcttgaggctctggactggaattcctagccaacaagttcgtccgagtgacaatgccttgggactgctctca

SEQ ID NO: 605652 - DNA, 167 bp, Homo sapiens
ttcaatcagaaagctaccgtaaatactgtactcctacgtgacttctggaggtcttcagtgaattacaaatccttttgcatatagcatctaaactgaatgtggtacagcaaattcacaatagtgccctgggttaattttttaaaggaaacacagcaaatagtcaactg

SEQ ID NO: 605653 - DNA, 690 bp, Homo sapiens
  misc_feature (177)..(177): n is a, c, g, or t
  misc_feature (690)..(690): n is a, c, g, or t
tgggtccatgtggctataatcatctttcaaaattacccaattgccccagaaaaagtgatgttcccccacttaaaaattattttctccaagaagaggcttcacttgtaacagaaaagagcatgaggtaatcatattttttctcccaagaaagtaagaaatggatggtgcttgaagtgntccaacactcgtggaacacgtgtctcacagtagtgtgggtccttataggcgtggtatatattttaatattacagaggtgaaattttatttctcgtctctcttcaattcatgtgccaaatagggtggcagacttttgtgggttgtggtggaggtataagtgtgcacgagaagtataaatatagtgaaaataaagtggtgaaatatgtgtctcaaaaagtatgaccatgtggcgaggacattccgtgaggcccgtgggtaattacacagtggtcaccgtggtgtatacacgcagagcggccctatttgtgaaatgtgggagacattcaaaagagcgctgtgtctcacacgcagaccctgtgacttgtgactgtggggagggattgggttggggagagacaatttattggcccggagaagagttcccgtggatgaatgtggagggattttcagacagagttttctcacgttgaaaagtgttttcccccccacttagttggaagcacaataaagtgn

SEQ ID NO: 605654 - DNA, 111 bp, Homo sapiens
agtaagagagtggtactgatctgttgctctggtccatgacacatggggcacgaaccatggcctggtggcagacgggctgtcggagccaactccatgagaggaactacccct

SEQ ID NO: 605655 - DNA, 507 bp, Homo sapiens
acaccactgcacgccagcctgggcaacgagagcaaaactccgtctcaaaaaacaaaaaacaaaaagaatcaagtaagtcaaagtcacgctgatgacagccaattttggtgaagcaaggaagtgtcaattcaatcattaacatatatttgacgtttgctgtctcctatgtgccaagcacgatataggctctggggaatcagaaaacaaagagactcacttgttcctcttacagtactcagtccttactgagagaaggacaaaacaaaatgtcctgtctggaatgcagggaaagcagaacttcaggtcaggggatatttccgttgaattgtgtggagttgaagctgaaaatcttaaggaatatatctaaaattcattttgcctttactttatgcatccgtcacctagagatcacgcagcgggcacccacgatcagcttaatcatcactcacttccatcggatcaactggaaatcaagtcagatgagagtggtgagtctcagaggatggc

SEQ ID NO: 605656 - DNA, 367 bp, Homo sapiens
tttttttgagatggagttctgctcttattgctcaggatggagtgcagtggcgcaatctcggctcaccgcaacctccgcctcccaggctcaagcgattctcctgcctcagcctccctagtagctgggattacaggcatgcaccaccatgcccggctaattttttttgtatttttagtagatacagggtttctccatattggtcaggctggtctcgaactcccgacctcaggtgatccgcccacctcggcctcccaaagtgctggcattacaggcgtgacgaccacagcctggctcgatttagtatcctgtaaacgtgtccctaaaactgctcagagagggcatcctaggaagttgctggtgtgcgcag

SEQ ID NO: 605657 - DNA, 742 bp, Homo sapiens
gcgccttcagaaataatcagaatgattcaagggtcaaaccactttcatcccttaaaatatagggactaatatttctttttcttttttttaaaaaaaacatttcttctgtggcttagaaatgtgccagtgtgtcaaaacatttacaccaatttcaccagatttaggacctattaaaaattcaaacaagtttctttttttatttttttttccttggggtaccacgggattttataaaatacacgggcactatttggctttctttggtgtattctcacacttcagttaaaggtggataacaatgtgtaaccggtgatcattatcagactggactggaatgctttctggattcccagggagtgatctagtcctacgtattacacgggtgtaatatctggtgagtgtaaataccgggaactggtcccctggtttaacatgacagttcctcttcggtggtcctaatctgaacggataatagtaggggggtataaatatctccaagtatacccccattttgtcactggtatcccactatggtacccggaaacgaaagatctatgtttgccctttttaaatcccgcaactggtatcggtcgtattcaacaaaagcaacaactctgtcaataacgtgataacaatcaggggatactttgcggtgacaaatcccagtgcctaagaacattggtacgttcccaagtatatttaactgctttactttttacatgcgcacacgttccccaataaa

SEQ ID NO: 605658 - DNA, 369 bp, Homo sapiens
ccccggttcgtcttacgacagcaaagtaaaacaactcaacaatgtgttatcacctgaaaaagagaagcagatgtcagagccactagatcaaaaaaaattaggtcagatcataatgtaagaagattagaaggcctgtgtgctacaagtagtctgcaatggactccaagaattgaacaatgccatctaatataccataaatgtagaatttctccatcttgggaaagtctggattccagattacctgaggaagagactacatatcgaaatgcatgccgtactcaggataactccagtgaaagttacccctaaaattccaagatctctaaagttgactacctagagagaatttaccgtaagacataaccgcgg

SEQ ID NO: 605659 - DNA, 348 bp, Homo sapiens
  misc_feature (315)..(315): n is a, c, g, or t
actcgcggccgcgtcgacgtggcccacgcctgtaatcccaccgctttgggagggtgaggcagtaggatcgcttgagcttgggagtttgagaccagcaacataggaagaccccatctctacaaaaaataaaaaaaattagctgggcatggtggtgcatgcctgtggtcccaggtactcaggaggccgaggtgggagatttgcttgagcccagaaggttgagactacggtgtgctgtgatcgtgcactccatcctgggggacagagtcaggccctgtctcagaataaaaaaaaaatatattactttaagttctctancatgtcggcgcggccgcgaatttattagtagta

SEQ ID NO: 605660 - DNA, 124 bp, Homo sapiens
attttgggtggtgattagtcggttgttgatgacgatatttggaggtggggatctaatagcagggggaaatatcaatgatcacgtactgcggcggtgtaggcctagagattgtgagcggcagggc

SEQ ID NO: 605661 - DNA, 210 bp, Homo sapiens
  misc_feature (129)..(129): n is a, c, g, or t
  misc_feature (142)..(142): n is a, c, g, or t
  misc_feature (151)..(151): n is a, c, g, or t
tgggaaggactttatcgggtgctcctgccccccgagatgacggtcggaaagggccccatccctggagggattttggaccttcactccaggatcaacgccttccaaattaacattcaaaaaggtttaatntgttttttccttntccctgtanccgcccaaggacgttttattatcaatataaggtgatccccctttccccaaaaaaaaaaa

SEQ ID NO: 605662 - DNA, 582 bp, Homo sapiens
  misc_feature (221)..(221): n is a, c, g, or t
  misc_feature (253)..(253): n is a, c, g, or t
  misc_feature (261)..(261): n is a, c, g, or t
  misc_feature (272)..(272): n is a, c, g, or t
  misc_feature (291)..(291): n is a, c, g, or t
  misc_feature (310)..(310): n is a, c, g, or t
  misc_feature (357)..(357): n is a, c, g, or t
  misc_feature (406)..(406): n is a, c, g, or t
gtcagggggaggtcttgttacaacacagatctgtggatctccggggtttgattgtggcaaggatgctgctgatgtcaaaaccacaacgtgggaaccacagaaccactagttggttttcagtgtttcagtgcatacaattcctaatatatctggccaagaaaacttggaagttcttagattgccccaaaggtggcgcatgaaatcaaagcaggagaacagtntcctacgaggtgtagcctgggaaagttggggntgactganggaaaggaggngtgaactccgccctttccnctgctagtgcgcccgaggntatttaaacccaccctggctggcctgtactcagatcttccggagcgnatcagcggccggagcgtttggcggactctgcgtggacttggagctcacngcgtcttgcgacttgaaagcggattcagaggacaggacagaacacttgggcaaaggtgaatctctgtctgtctgtctgtctgtctgtcccattggttggttgatttccatttccttaaggggcccatacctcagaccgcacaacacacaagcacacacaacacacacacaggtaac

SEQ ID NO: 605663 - DNA, 210 bp, Homo sapiens
gactgtaccattctctatttttaaagcatttggattgggagaaaaaacactacccagcggggaaaagaaagatatcagacaaaaacaaaagagctgacaagttgtgctaacgtggcgaggaaaacctgctttctcttgtcacagtccgaagcattataatttcaccacagacttgaggccatctagaccaagtcatacactgaattaaca

SEQ ID NO: 605664 - DNA, 1600 bp, Homo sapiens
gcaagtggaacccaaggcttgtaggtttcagtagactagggggcctgacgtgagcttgagtcgtcccccttgtagccttcctctcttcagagtgcctctgacagaccctgggctgcagcgttgagcgacagagggccctagagatctgctgggatcccctagactcgcatgctgacgaaggtgttaccgtagtcgcgagctgactccccatcccaagggaatttcgaacatcgaggtccacgccgcaagatacatccggcacccgcttctgcaggagaatgagggaacatcgcaagggctgtagaggacagcagctccccgcagggcgcccgagctacccagcggcgccacgacacacactgctcgcgcgtggcttccgcgtggtcagggtctatgctagcgtaggacacagccaccagttcctccctgggcgtacgccacgggcccttgcgcattccatacgtagcgagtgctactccagaagcgcttcgcgcaagataacgaagtgacgcctcatttgcccatccggtgccccagccatggggccccttctgcaaaggtttcatcactgatgctggcccataccggttgcgttacctcaataggcagcgttgattcgcgggcgaagtcgcgcaccatcgggggggcgcagagggcataagaggggcctcaggcataattctccggcggcagatctgggggttctcgttccaccttagtgggttagtcctgggagaacaggaacccagttcgtctggccttcgtggtcgccatccatcggcttgaagggccgccacaccattaccggggaccccacggaggacaccatttccccaaccttccacctttgggtacccatccttggccagagggcctgtggggacaacttcggcgcgtcaggataagagcgcttaaggaaacacagttccggacccagaaccacaaatcccattcacattcaaatctatggttggatagccaacccccctgagggcacggaaggggacccccggggggtggccttagagttaggataggggcacaccacctagtggcgaaagatcggaggctccccccatgtgcggccatttcggacaagacaccaacccggacgcgtcttaaccacagaggacgcgccaccacagggtttgaccataggagggggccccaaagcaagcatgaatgtgagagagaagacggagtcagtcgcatcatgggaaaagatcaccggacaatgtccaacctaaagcgaacactcgggataccctaaaattaggccgctaggtagagcatatggccacagggagaacgcgagatatactcccaggccaaggggagagcacgaaccactataaatgcgcagaatagacagcgaatacaacaacggcaacaattgtcccctctatataccacatggtgcgacgccccaaataatcaaccgtcttctggggaaacccccacaaagagagaaagagcaagacacatttgaagcacactcacctccacagtcgccactagcagttggatacgcgctagacaccaactatacacgagtaacaccatagcgaaaaaagagacgacaacgacatcacgaacagcc

SEQ ID NO: 605665 - DNA, 580 bp, Homo sapiens
agcggccgccttttttggggaaactccatgctgacatacaaagaaaacccagcaggtaggtggtcaggcgcagtggctcacgcctgtaatcccaacacttggggaggctgaggtgggtggatcacttgaggtcaggagttcaggaccagccgggccaacatggtgaaaccccatctctactaagaatacaaaaatgggccgggcatgggggcgggtgccggtagtcccagctactcgggaggcttaggcaggagaatggcttgaacccgggaggcagaggtggcactgagtcaagatcacaccacggctctccagcctgagcaatacagcgagacttagtctcaaaaaaaaagagagttacagttttattgggaaacctggaggtgtccggtttcatggtgctatccaaagacctacaaacctccagagagagcagttagtggctaataagggctctcataatttccatcaagcagtagtttcacagatgggcatccaccttgctcccttcctggagatcaaagtacatactttattattttatattatggtccttaaaataatatggacccttcttcat

SEQ ID NO: 605666 - DNA, 248 bp, Homo sapiens
  misc_feature (44)..(44): n is a, c, g, or t
gatctacagggcttagaaaatagcgacgtggtgctgtagtatancctgtactggatatgccatgatgtatttatttcaccattctcttcttgtggacaatttaatgtttccagttttttttttttttttgtggacaggcgggattaaagtggtcctggttccaagtgctaaccattgttacaactgtgggacaaagcgtttctcttaaagaaataaagttccagtgagtgcaataatttagtggagag

SEQ ID NO: 605667 - DNA, 925 bp, Homo sapiens
agggactattctactataaggcaagggacgcatggtgggcgaatgctacaagaatattttcttcttgatgtgtagcaccttttctcaagaggtttaaattcattagagtacatgaatttaaatatacattaaatgccacgctcatttgtgtacagtgtataagccaacagatgcagttttgagcaagatgtcatgatgctctagagactagcgtgcagtcccataagtgtaatataaaatcatccttcgagcatcccattatgacctctcaagcacatgaagttctaggcctcaagtaatcatgatgcgtacctgtcacgtgcgttcgttggcctgattcggaaattctcatattgtgggatcatgaaaatattgttcatatgcagtctgtgattctttgactcaggatgatattttagagattaattcaggtttgatagtgtttacagtagtatctttttaatgggtaagacagttaacatgtagtatagaaaataacgattggtcttaacttcagtggggtaagtaactggtctgcatctggtcggaaggcgaggccttaagtaagattagcctttctttttatcccaacaagcaagaagactcatccttcaaagttccttccattcctcatggaagagtaatagttcaatgaccagagcgaaaggtcacctacggaagagcagccacatcttcggcactatttatctttagttggatactccccagaatatctagtaaggctacatcaggctaaggggtgtctttccaacattatcagggcatcctagactccagggttacaacactctacaccactctaatggcctagacagctgcagttggctcaagaccacggcccgcccgcacagatcatcggccccggggaacaacccaactcgcggcgggccctcacaacggcagc

SEQ ID NO: 605668 - DNA, 891 bp, Homo sapiens
ctaatcggcccaacgattatattactaccacgtgacatgactttccaaagaaacacataatttgaatcacacaaacacccacagcctaattattagcatcatccctctactatttttttaaccaaatcaagaactaacctatttaggctgttcgccgcaatccttttccttccggatcccctacacaaccccctctcctaatagctaactatccatgactcctacccctcacaatcatggggtaagccaaactgccatctgatctcatgggaaccattatgaatgaagaaaagaattctagcctctctatatctatatctaccctagtcagaatctcctgtgaagttataacattgaaatcatgtcacctagaactaactcatattgtatatcttcgttctgaaatcacgaacttatgccccaccttgggtatcatacgacccgatgagggtcataccagtccagaacgacgcatggaacgtcaggctagatactgctctagtttctatcggaccactgagtaggactctcctatcacctactcatcgtcatctgatttacactcacaataccctagagctcactaaacattctagtattcagtctcactgtccaagaactatcaatactcctgagccaaactacttcaatatagactagcttacgcgagacgctttcataagtagaagatacctcttatacaggagtccacttatgactccctaaagaccgaagtcgaagtccccagcgctgggtcagaacgtacttggcgggaatcactcttaccaacgaggcggtatggtatcaatgcgcctcacacttcgttctgaagtcccctgaaaaggaattagactaaccctttcttggtctattccctattgagggcaagta

SEQ ID NO: 605669 - DNA, 1828 bp, Homo sapiens
  misc_feature (1411)..(1411): n is a, c, g, or t
  misc_feature (1580)..(1580): n is a, c, g, or t
tgtccccggtcgcgtctgccttggagcaagaagacaaagagcaaggggccctagcatctgcgctctgtgtcgcctagggacttcagggacacgtgcctaccatgtctcctggatgcgcacgtatacgctcgactcctaccacgttgatgccacacggcccgtgccggtggtcaccctcagggctgcttactgacatggatgtccgaaccattggttgcctcctggagccgtcctggacgcgtgcgcccagatctcgtatgcgcgcatgccagcgcagggagcgaagcgagtgcgaggtacggccgtgcgcttgcctgcgccgcgcggcgtctgccatgccccagccaattgtcgcggccggcactgcgcttgagccgtttcgtggtcggacccctacccgaacctccgccactcccgaggcggcgtagatgcccgtcgctccccctgtgggcacgaacacccagagtcgcccttggtagcctggtcagtcagttcggtttgttgggccatagcgggacccatttcccgagcgtgagcgcgattcgtaacgcagaccctttgtatcaccccgagcaactcactagacaggctttatgatctcgcaaatcggttcggcgggatctttaagggaagaggggccggccctttaaacccagaggcttagtcccccggtgtgattttggtttgccccatagtgaccaggggacagggcgtactctaaaacgggctggcctagaccgcggcgaaccgccgggccactttgcgaggacttcaacgcagagcgctagccctgaacttcccatcgaaatgtgcaatcgggcggcgcgggaccttgcttggctaaccttaaactttcgcccccttaattctaacaaggccttggcccttgtccccccccaagcgttggtgcttggggccccaagagagttgaagcccccatttttccggtttcggccgccggagggctcgccgcagcggagaaatcttccgaaacgcccgtggtcgaaggaggcctaagtgtgctcaccgaggcgcggcgtctgcacaggtgaaagcgccaagaatgggcttggcccacagagcctttctctggaagacgcgggaggggaaagagccgggggcgcctcccgtttttccggcacgactttgtttttgcaacgcgccccatacgttagttttgcaggggggcccgacgtccgctttttccggccccgagcggcaagatgccgcctttcgcggcctttgccgcgcggtcttgacaccccaccagtggttactccggagccaaccggcatggcgcacggccacaaggtttgcgccacatgggtttcaaccggattgtatgttttccggcgcacctagacatttggccgattggtagagtccgtccggcggcctttaagtttgtacnttcggagaaggcggccccccttttgtaaacatgtgtttgccgactcaaagggccctcacgggggggtttcccctcccctagccgcagtttggttcgtttgcttagaaggccgttctctgttccgcgagagccacaaagggggtacccgtggtgctgcacaggcgttttntgatcgtccccaacctgtgtgtgtggcgtccgcgccaacgacggactgaggcagcgccgtggctcgcacaacgtgtgctcccgtccacgcctgtggcgctcgactgtgtaatcgctcactggcccgctttctcccacacgagctcttgagtgggggagcgcccaccctcaatcacacacgagcgaccagcagtggagtgggattccaccccagtgtgtgagagcactccacaacgaagcagttacatc

SEQ ID NO: 605670 - DNA, 413 bp, Homo sapiens
ggggggggccccccacagggccccccccccccaaacacccccttaggggggggggggggggaacacccccttttgggggggaaaaacccggggcccccccccctttttggggggggaagccttttttttgggaaaaccaaaaaaaagggggggggggggggggggggggggtttttcccggtttttttccccccggggggaaaaagggcaattcccccccccccccttttaaaacgggggtccaaaaaaaattttttggggtcccgggggggggtggggaaaaacccttttttttcccccccgggttgggggggtttttttattttccggggggttccccccttttcttttttttggttttttttaaaaacccaaaaaaattggttttttcaaaaaaaaaggggcccccccga

SEQ ID NO: 605671 - DNA, 547 bp, Homo sapiens
cccggatacggaagagtgtatctactgggaataagtgataccatatatcctccaaattatagaggaagggaaagtaaaagtgagggagggaatagccagaagctttgggtgaaggcaacattgggtcagactgccatggttaagaattaagggaagctggccccagaacagtcctgtggcgattctgttctaattcctgcattccagcagacttgacactgggctcccagacgatccaatgacacaattggctcactggtatggaaccgttttccagctgctctgggtagaggttgacaagggttttgctttaaatggaaaggggaatgataatattgggaccttccctcacatatagttagggctgttgcccacccagaatcagacatttccttggtcctggcatttccttgaaaacagattgtgagttaccctgcatttaacaacaggcattacaaattgatcctgtaaaaggtgagaattttaactaggcacaagctagaagaagatgccagaacagctttcatagtaattaacagtgtgggaa

SEQ ID NO: 605672 - DNA, 1188 bp, Homo sapiens
  misc_feature (556)..(556): n is a, c, g, or t
  misc_feature (559)..(559): n is a, c, g, or t
  misc_feature (844)..(844): n is a, c, g, or t
tgtggtttgttttttccaactttttttaaaccaaacccagtattttctacaaggccttcaaaaaggggtcccccaaaaaaatgaaccttcatttctgggcgggggaaagaaaccagggcttcaaggatcatgactgaagttgcgccatgtcccatcattaatggtcccaacatcaccgggacacaaagctcagacatagagggcttctacccaaatctccctacagaaggtacttcttcaagctcttccacccaccttcttgaggctcagggaaattggagttgggcgtggggggccccctttcttaaatccccagtccagaagactccgcaatctgtctggccgtccgggcgacagcaggctgtccactctcgaaagtttgcccctcccggggactctcgcacgggttccacccttttatctggagaaagtctctggggggccctcccaggggcgagacagggctctggggctcacaggggcgccgcagagtatgttatgccgcccataaagagcgcctgtaccagtctaatgtcgacaatggctcctgaatacncanaggggtgcgctctactctcatatatcctctcccccagcactgtttccgccacgttattcttctacgactacctcgcgggataacggggggacccacccggggggcctccagctctataagggtcttaccttcccgcgggggaacccctaggggcgcctaaaaagcccggccgaaaatatgccagcgggaactcggttggcccaaaggatatacgcagaagtttttttccgcacccatatgttttgcaaggccacccctcagagttgtggcccaaagaccacaggngccccccaaggattaaaggccccccccaagagaaaagaacacaaccacggagtgtggttctctcggttgttctcccccgggggaatcgacaacgacgctcattagtaggggtcttcggatcgccgaggagtgcttttgtgggaacccccctgttattgttgccccacgcgtggtgctgtttgatatggggccccccgatattatccgtactacgcctctaatgttgagaaccgccttgtactcgctaggggggccgccacatggtgttgttcacccaggcgggtcctctccccggaagacgcccttgaggctttcttcttctttacccccggggggcttcccgg

SEQ ID NO: 605673 - DNA, 142 bp, Homo sapiens
ctctgcaggaccccggactgcacgcgctacaatctcagaaggactgtgcgagttccgtgagtcgctcgtgaattctcatctggaaacgatcccgcgtcttagaacccttcaccacgcggagtttttctcgtctgtgattctc

SEQ ID NO: 605674 - DNA, 808 bp, Homo sapiens
  misc_feature (238)..(238): n is a, c, g, or t
  misc_feature (245)..(245): n is a, c, g, or t
  misc_feature (309)..(309): n is a, c, g, or t
ggtcgcagagaaggggcgtggacagaagcgggagcacaggaagcattcgtgcgagatgcgtgggacgtgccggaagaccccagtatgagcaccggagggtgagggcatacgtcatcacatctcatggggaggctacaggtactaccggtcccatcctcgaatcaacaacttcctatttgagaagtcgcaggagtggttgcgaacgcttcctgcacatgcgtcacatgcagagaatcgntgctagngaagatgtgccagaatgtgcaaggcatgctggtgatagtggcgtgggcttatgcgctacctctnatatccgtaagtgctgcggagtcccgcgaacactctcgtagtggcatcatctcatgcatgacctgcgaagggcagatcgccggcgtggctggacacagcgccgtactacgatcgtggttcagtacagcgtgccgctgtatgctggtgcaaggaaggcaatctggtcaagtagcgacaagaagacgggacaaacttccaggtgacagagacctggggccgttatagccgagccactacttacatcaccaagtgatacaagtgcggacttacaagccagctgcgtgaaggccagcctgaggtgagattgagcttatccagggtcttctcagtttgtcctctgagttcaagaacagtcacagtgagagaggaggagaagctggagctggagaagttgttggaggaggtgctatcctgtaagggagagcttgaggaacccggtgctagatccacggtctctgcagccttaattccgagtgaatgggggttggatgtggcgaat

SEQ ID NO: 605675 - DNA, 145 bp, Homo sapiens
agcaggatccccaaggctgaaaggggggaaaggaaggaaagacagacagactagtacaagtcctctagttttatagattaagaaactgaggctcacaaaatagcagtgtgctagcccctatgggctctgggtactagctcactcc

SEQ ID NO: 605676 - DNA, 332 bp, Homo sapiens
  misc_feature (109)..(109): n is a, c, g, or t
tcgagagaaataggagggccgaagtcaggaatgttttcacattgccagacataaaaactttaaggctataagctagcaaatcctgttaccactaagtcttaagaagatntacattatgaatgaggaatgagttaacagagtaaatcaagcttttgtaaatgtacaaaaggaacttgcacatttcgcaaaaagcatttcacttgaacctctgcagaaagaactgattcctcagcagcgtcatgaaagcaaaccagttaatgttgatgaagctacaagattaatggctctgttgttatatactggtgatgcatctaatttctctcggaccaatg

SEQ ID NO: 605677 - DNA, 467 bp, Homo sapiens
aagctccgacccctcataatgtgtgcccaggaggcagaggctgcagtgagcctagatcgtgccaacaaactccagcctgggcaacagagcgagaatccgtctcaaaaaaaaaagaatacaaaaatacaaaaattagtcgggtgttgtgacacatgctggtaattgcagcttcttgagagtctgaggcaggagaatcgctggaacccaggaggtggaggatgcagtgagctgagaccgcaccactggactccagcccgggcaacagagcgagaccctatctcaaaaagtaaattaaaaaaataaactctaaaacaaaaaaataaaaagtacaaagtcctatcttctccatgatgggctcacaatcctgaagtccaaaaaactctgaaatccaagttttttcaaaacctagtgataaaacttgacacggacccattttagtcttaattaccctaatttccatgaataat

SEQ ID NO: 605678 - DNA, 952 bp, Homo sapiens
ggtactcggtggtggccactgtgcagaccagatttcgctcgtactcgtgcgcctcgcttccgtgagcccctcgctccctgggctcagttgctcctgccgtcgctgctcttacgatactccggccgctttatcattccctctcgctgttacctggatgaaagtgcgatgcgtcctaaattccgatgccctgagctagggttctcctcgcggtgataggcctacttctgggaggtagcatggtgcgagcgattagcttaaaacaccctcgtaagatacctggtattaaatggagggtgaggcgaatactcgactgagttaaaagaacaaaaagcggtggatcattgcgtagtctctggccggtgctccgcctctgagaggtgcggcccactctattgtagaagtttttcgattagaatgtttttggcctcggcgataggtggttgtcggtgctgatcgttctgtggccgaggcctcgacgagatattgggaggagattggactcaggtcactttggatatccctagaaggggtttcattcgtttcgctgatgcccccttgggccgttcttccgcagttcgttcgtgaacgtgcctggggctgcgtggttgtcgttctgttgcatgcacttgagtctggactgagtcgcgtgggcttagtagctttattcgactatttcttttaccccgatccttgtcttgggcttgatggaacttttgttgtcgcccccgtttggatgctcagatattttgctcgtggtaggatgcctggcttatgaaactgggcttgtcgtggcgcgggctgcgcgctggtcctgctttgtgtcgtggcgtgggggcttgccttggttgactctcggggcagtgtagggccggtttggggcgggtggggtgccgaagctacctaggttcggtggcccgccggcctttgtgaggggcctatattgccgggatcc

SEQ ID NO: 605679 - DNA, 283 bp, Homo sapiens
tctattgtaattctgttcctttacagattactttcatctaaaaaataaaaaaaatcccaaactgcacaaagtaagttagagtggttaggctggcttgcatactcaaaggaggaagccagaattgcccgtgtccaagcagtgtccaactcagacaatccagaaaagagtctttgggtctacaggagtggtctaccaaccttttcggtatcagggactggttacgtggaacataactttaccatgtttaccaagggatgctgggaggatggaggggatggtttca

SEQ ID NO: 605680 - DNA, 308 bp, Homo sapiens
gttctgactgcgtactaatgaactgatctgtgagcctacttcctaatccgcgcccctccccactaatgtaaatgtctgatgagagataatggatgagtatttgtatgatgaaatcaaacgatttaggaatttggttcctccctccggtttaccaccaggtttggaattggcccttggaaaaggaattggttgggggggaagggaaccttccaacaccctaattgtattttttaagtttcttttgtgaaagattttttaatgcatttttactgtaaaaatacatggaaatgtatgcattccacaaccac

SEQ ID NO: 605681 - DNA, 857 bp, Homo sapiens
cccaggctggtctccaataccgggctcaagcaatccacccgcctggcttaccaagagtgctaggattacaggcatgagcgtaccggcgcccagcccttcttatttcttttcattgctgtattatgctggctacgattccagaacatagaattgatgagaatggacatccctgctctgttctcaaccttagggagaaagcatacaatgttttttctctctctcatacacctacacacaaatatattcaaatgaagacaaactaaagataatttcagacatacctgagacaaacctgagagaatgccttatcagcagacctatactataaaaaatcctaaaagaagtttgaaaatgtaaaaccatttctttttattcctttacttcatatggagatagagtctcactctgacgcccaggctggagtgcaatggcagcagatctccggatcaagggaacctactgactcccaggctcaaggagtactacatgactcagggccatccatatagctgggactacaggatacacagcacaacatgcacggcataataaggcatcacaagaagacacggggattcaccatgaggcaggcagacaagaacacaccgaaaacaaggtgaacacacacgcctaggccccaccaagagcgggatacacagagaaagccaacaaaccggctgaataaaactgaagaaagaaaaagcagacaggacacacaaaaacacagacaaagaaagaaaaacaaaccaaacgaaggacacacgaaacaaactacaaaaagaaaggacagcgcgaaaagggaaacgaaacagaaaagagaagcaaacaagagaagaaggaaaaaaagaaaatgaacg

SEQ ID NO: 605682 - DNA, 142 bp, Homo sapiens
tgatattctgtctcaaaacaacaacaaaaaaaaaaaccacaaagggaaacagaattttccaaaagaagatatttagatggccagtaggcttatgaaaagatgttaaaaatcagtcatcaggaaaatgaaaatttaaccgtaa

SEQ ID NO: 605683 - DNA, 208 bp, Homo sapiens
agaggatcccctcctacgagcgcagcataaagttagccgtatagaggggaactaggttcgtgtaggtcctgaaggtgatgatggggaatttgtttttctgtacaataggcaaacatttgccggtatcctattcacatgtgtagaacaccttgaagacttgtaagcaagtgcgaatcatgaataggccctggttctctttaaaaaatgt

SEQ ID NO: 605684 - DNA, 131 bp, Homo sapiens
tggggttaaaaatttgcttcaaattaacaaaccccaaaaatgaccctcaaaaatgaaatgtattctgttttactcacgcaaaagagaattatatcctcattttttttttgctcttcttaaaagaaatgtgt

SEQ ID NO: 605685 - DNA, 683 bp, Homo sapiens
  misc_feature (470)..(470): n is a, c, g, or t
  misc_feature (538)..(538): n is a, c, g, or t
  misc_feature (669)..(669): n is a, c, g, or t
gtgatgttcaggtgttgattttaggtctttccagctttctgatatgggcagttagtgctataaatttccctcttaacactgctttagctgtgtcccacagattctggtacatagtgtctttgttctcattggtttcaaagaatttatttatttctgctttaattttgttatttacccagtagtcattcaggatcaggttgttcagtttccacatagctgtgcggtttgagtgaattacttaatcctgagttctaatttgattacactgtgggctgagaatgtttgttataatttctgttattttgcatttgctgaggagtgttttacttccaattttgcggttgattttagaataagtgctatgtggtactaagaagaatgtatattctgttgattttaggtggagatttttgtagatatctattaggtctgcttggtccagagctgagttcaagtcctgaatatccctngttaatttctgtcttggtgatctgtctaatattgacagtggggtgttaaagtcttccactattattgngtgggagtctgcttttgtcattctctaagaacttgctttatgaatcttggtgctattgcatcgcgggatatatattaaggattggtagcttttctcggtgctgatcccttacctttattgccctttctggncttttgtctttgtg

SEQ ID NO: 605686 - DNA, 444 bp, Homo sapiens
  misc_feature (11)..(11): n is a, c, g, or t
aatttttccanattcctaacaccatgaaatgaaatctgtctttgattttctagcagcatacctgggaaattgggaaccagaatgaacttgccccttcgcacaagggcaacctggtccctgagtcccagacaagcattccatggcacagcgctcccctgctgtctttacccagttgtgatgtgacagctctgtcctcctggggagactgattgggactgatgtcctggtgggagggtgtcctggtgggactgatgtcctggtgggactgatgtcctggtgggagggtgtcctggtgggactgatgtcctggtgggactgatgtcctggtgggagggtgtcctttgggagcacctttctttttactctaactcttcccccaagctccaagctgctgtcagtccaagctgtcagtatcaaaatctctcccttttttgaaattaaaac

SEQ ID NO: 605687 - DNA, 212 bp, Homo sapiens
ttgaactcatcgggctagggggatcacggcatgtctaatatcaaaagaactttgagaggcagtcccttattggcaaggtacttccttagggaacaaagcattgatggaaccaatcaagatgaagggttctcatagtccgagatttacttttagtaagaagtgaaaagactgtgcagctgctgtttatctctttccttccaatggctcatggg

SEQ ID NO: 605688 - DNA, 539 bp, Homo sapiens
  misc_feature (67)..(67): n is a, c, g, or t
  misc_feature (102)..(102): n is a, c, g, or t
  misc_feature (142)..(142): n is a, c, g, or t
  misc_feature (154)..(154): n is a, c, g, or t
  misc_feature (166)..(166): n is a, c, g, or t
  misc_feature (168)..(168): n is a, c, g, or t
  misc_feature (173)..(173): n is a, c, g, or t
  misc_feature (179)..(179): n is a, c, g, or t
  misc_feature (186)..(186): n is a, c, g, or t
  misc_feature (194)..(194): n is a, c, g, or t
  misc_feature (208)..(208): n is a, c, g, or t
  misc_feature (233)..(233): n is a, c, g, or t
  misc_feature (245)..(247): n is a, c, g, or t
  misc_feature (259)..(259): n is a, c, g, or t
  misc_feature (269)..(269): n is a, c, g, or t
  misc_feature (271)..(271): n is a, c, g, or t
  misc_feature (284)..(284): n is a, c, g, or t
  misc_feature (306)..(306): n is a, c, g, or t
  misc_feature (317)..(317): n is a, c, g, or t
  misc_feature (330)..(330): n is a, c, g, or t
  misc_feature (335)..(335): n is a, c, g, or t
  misc_feature (459)..(459): n is a, c, g, or t
  misc_feature (464)..(464): n is a, c, g, or t
  misc_feature (510)..(510): n is a, c, g, or t
ttcccactagagtacacgaagtttgtcggcccttgccttgtgctagagctgagtaagaaaaatcacnaagaatattatttttggaatttagaattgaatttnccagaaatgcaagcactgctacctaactaaagaccttggntttggaaacatnttaccccttggnanctctncacgantttaganttggcagnatcaaagacccaangcaagcaatatgaaacagagaaaanaagttggttggnnngctgtcctccangcagtgattnangatccaggctgtnatcatcttcatcactcatgttnagagttacccnagaggtcatctcnatttnatccagataaatgagtatgcaaggaacgtttttataggtcattttggagatcaaagatgggtaggaaaagatgctgctactataaaactatcctgtttatcagtacagaaaaatcaaattggtntacangattataaaaaaacttaaacctattttacgagctaccaaattaaangcagaagcaaagaaaacagcaataggcat

SEQ ID NO: 605689 - DNA, 254 bp, Homo sapiens
  misc_feature (78)..(78): n is a, c, g, or t
  misc_feature (149)..(149): n is a, c, g, or t
agtcgctagatgctagctggcagttgtatgtcactgaaaagtctagcgagattttggattccacccaaagcctctcancactcaatggctatctttccagtctacaagtacatgttccacccagcatttacagtcttggacatgttatntctccacttactgctttaagttggttttagtcactggataagtattataatagagctacttagctgtggttttaatacccttctgtaaggtttaggcctcccggg

SEQ ID NO: 605690 - DNA, 1224 bp, Homo sapiens
  misc_feature (296)..(296): n is a, c, g, or t
cttgtggtcgtatctcccagttcgaccgtctagaccatcccagaagatctatagaagagtattacatactggagagatcagtacgcagattctgtgtggaagggaacagaaggcaagcattcgttgggataggaagtaacaagacgggattgacctggagttccagaagaggccgggtgctcaaactcggtgagcacaggaatctgcatacagaaggagaacgttcggacacatagaccgagagctaccaagcatggatgcagaacggacagtacaacactgaggaggggcctccntccgtgtagaagaagtacagacttggtcacgaagagcctaggaacacaattcttgtagaatcgctaggtctcccagggaagatgtggcggtaggtcggcatcgggccagaggaagcccacccattcgagggatccgggtgaagtgacagaccgaggataaggaacaaagcaggagagactccgtggcaaacgggatgatgggctggaatgtatcgcagctgaacgcgaccgtcatgccccacgtcgcgcataggaagaaggggccgtggtgcaacgaccaccaactgatgtgaatcctgtgagtgaggcgttgggcatcgaatagacatggcaggtatcaaacgctgcacagactatccctggcaatgcaaagtgtaagaagcgcatgtgcgtaggtttgcagggactggggcatctgtaggttgaccatggggcagcatagccaggctgctgtgtcacactgccctgtccaaggtcacaacctggttggcattgcacaatttcgtgagaagggcaagtcagttgcgaacacttttggcgacccgtaagaattccggccagggggcatacactggcgttgcagctaactgtaaaccgggaaccttagttgcccgagttcaaagtcggaacacgtctggtgggggacctggggcaaattaacacctaggacacctcattttgctcccacttggttgggactcgctcacgcgcgcggccacttgcgacaaccctcttgcctccctaccaaccaaaaatcgttggatgcgaagcggcaccccccgggggaacttgagcactgcacacagatcccctgtactatggggtctaccaccctcgcgtggaattagctacgcacagatagtttagccgcgctgggtcgtgtatactgccgcactgaccccaactaatttccttgggaaaacatcag

SEQ ID NO: 605691 - DNA, 121 bp, Homo sapiens
cacgaggcctgcctcaatctctcaaatatttggggattacaggcacctgccaccatgcccaggtaattttctattttctaagtagagacagggttttaccatgtggtcgaggctggcctca

SEQ ID NO: 605692 - DNA, 540 bp, Homo sapiens
gacagggacctgtgcgccagccaatgacttcaacctgacgcagatccaaagcgctgcggaaagcatgaagggactcgggactgacgaagacacaatcatactgatatcatcacgcaccagagcaatgtccagctggaagaagatccggcagaccttcaagtctacactttggccgggacttaatgactgacctgaagtctgagatctctggagaccctgacaaggctgattctggggctcatgatgccaacggcccattacaatgccaagcagttgaagaaggccatggagggagccggcacagaatgacaaaggctcttattgaaatcctggccctcgaaccaatgctgaaatccgggccatcaatgaggccctataaggaggactatcacaagtccctggaggatagctctgaagctcagacacatctggccacttcaggaggatcctcatttctctggccacggggcatcgtgcacggagggaaggaaacaactggaccagtgcacgggaagatgcccaggtggttgctgagctcat

SEQ ID NO: 605693 - DNA, 111 bp, Homo sapiens
gcagcattttcccatggaaaggcaggtgctactgtagctggcctgggccccgtggaccccgagaggcagatgtggatgctcctggagccaacttctgtaaaaggctcctcg

SEQ ID NO: 605694 - DNA, 783 bp, Homo sapiens
  misc_feature (3)..(3): n is a, c, g, or t
  misc_feature (92)..(92): n is a, c, g, or t
  misc_feature (94)..(94): n is a, c, g, or t
  misc_feature (172)..(172): n is a, c, g, or t
  misc_feature (184)..(184): n is a, c, g, or t
  misc_feature (186)..(186): n is a, c, g, or t
  misc_feature (202)..(202): n is a, c, g, or t
  misc_feature (303)..(304): n is a, c, g, or t
  misc_feature (315)..(315): n is a, c, g, or t
  misc_feature (338)..(338): n is a, c, g, or t
  misc_feature (375)..(375): n is a, c, g, or t
  misc_feature (382)..(382): n is a, c, g, or t
  misc_feature (388)..(388): n is a, c, g, or t
  misc_feature (393)..(394): n is a, c, g, or t
  misc_feature (401)..(401): n is a, c, g, or t
  misc_feature (404)..(404): n is a, c, g, or t
  misc_feature (414)..(414): n is a, c, g, or t
  misc_feature (432)..(432): n is a, c, g, or t
  misc_feature (436)..(436): n is a, c, g, or t
  misc_feature (450)..(450): n is a, c, g, or t
  misc_feature (460)..(460): n is a, c, g, or t
  misc_feature (469)..(469): n is a, c, g, or t
  misc_feature (485)..(485): n is a, c, g, or t
  misc_feature (501)..(501): n is a, c, g, or t
  misc_feature (507)..(508): n is a, c, g, or t
  misc_feature (518)..(518): n is a, c, g, or t
  misc_feature (534)..(534): n is a, c, g, or t
  misc_feature (552)..(552): n is a, c, g, or t
  misc_feature (658)..(658): n is a, c, g, or t
  misc_feature (668)..(669): n is a, c, g, or t
  misc_feature (677)..(677): n is a, c, g, or t
  misc_feature (694)..(694): n is a, c, g, or t
  misc_feature (705)..(706): n is a, c, g, or t
  misc_feature (780)..(780): n is a, c, g, or t
tanggtagtatataaagtgctcaagtatctgaatgtaaccgatgagtgatgagaagtgcgcgtgcgcgtgaaggagagagagagggggggantnctgccgtgggtggttgaagaaaaatgcttgcgcgttggggagatgaacgtggcctgagcgggggctgacgaggcaccngggttgtggtgntnagagaggggggtgtgnttgggtgctcccccagattctctgcaggcactgtcttgattgaaataccaccggctggggggtgccatgccctgggtctcttcccagagttggtggtttgnnaagggtgggtntttgcttgcctctgcggagagtnccagcacctgggcaaagctccttcggagctgaaggtngtttttnggggtnacgtnnttgagtncgntcagtaagtncagcacctgcaaattttnttgngaattaccaacatnaagttgtggnaggaggggntgagtggtcaccagtnaatgctgcagggggtntaaganntgctgccatncaccctggagggagangggggtgagggggaggtngtgcgtggtagtgttcagggcgtggggaatgttctgtattgctccttgaagcgtgtggccactgcctcgaaggggctgagcatctcgatctgggcatccaggacanctgccagccnngggttccnctgagagaggagaagcntgcgctttagnncgtgggcctctttctgtagcttctccttgtggttagagattattaataaattgttttgtggggttgttggaaantga

SEQ ID NO: 605695 - DNA, 674 bp, Homo sapiens
aagagctcggagggctcggggctcacatggttctcaggcgtcaacaaggtgcatgtgtggtctcggtcactctgtatgtccgaaggggtgtgtaccagtcaagtgactgcacgtcgtgagatacggtaccacagcccacaaagaatctctagaaccaagtttagataatattattctccctagtagctctctctctctataccaagcactcaaggtcaagaatatgataaatatataggtccacccctctctctcaagacattggagggtgaacatctgggcacgcatctgacatttcttcctccattcctataacaataaaagcaagcacaaatctgcttcatatgagtaaccaagtctcatacactacaaaataacccatgcacactgtttctgggaagggatatggccagcccaggagagttgggccacatgatgggggactttcactctgccacttacagcacccctgtactgggaagggttggccagtgccacagtgcactctgagatgaaagggtgtttcttccagtggcctttggcctgtcaccagcctcttccgcggtggcagccagtacaagagtaatgacaatgtgactggcacagagatagtttctcccaggcacacgagagctcctgtaagccccgtagttccattgtgcaaagggcctcag

SEQ ID NO: 605696 - DNA, 314 bp, Homo sapiens
  misc_feature (159)..(159): n is a, c, g, or t
  misc_feature (172)..(172): n is a, c, g, or t
  misc_feature (190)..(190): n is a, c, g, or t
  misc_feature (202)..(202): n is a, c, g, or t
  misc_feature (232)..(232): n is a, c, g, or t
  misc_feature (246)..(246): n is a, c, g, or t
  misc_feature (290)..(290): n is a, c, g, or t
  misc_feature (304)..(304): n is a, c, g, or t
atactcgctgtatccttgaactcctgagctcaggtgatcctcctgcctcagcctcccaagtagctaggaccataggcatgtgccacaatgcctggctaattttgaatttttttttttcataaacagggtcttgctatgttggccatgctgggttcaaantcctgggcctcangctatatttcctcctcancctaccaaagtnttgggggttacagggtgtgaggccaccatngccctgggcacttngggagttgttttaagttttatctttgattgattggggtttttcntttggggaaaaagnatttaacttg

SEQ ID NO: 605697 - DNA, 747 bp, Homo sapiens
tatatctatatatatatgtatgtatgtatgtattttagtatttatgtctttgcactaaaatcacaatgcaagccattgctttgggaggtcaaacagttattttacaaagatagtgaaaatcggatggagatgttcttaagcgtggattaattaagatgagtttatccaaattttagaagctgtaattgtctcttaggttttatttctcagtgtttaagcgggaactgaaagaggattagcatctagggtactggctcaaagggacatgccctatgtttgcacatttatataaataaatatctgtaagccccaactctcaaggtgactatatttggagatacagcctttatggaagtaattaaggttaaatgaggtactgaggatggggccctgatttaacatacgtgtcattcataagacaggacatcttgctgtctgaaagccagaagcaagccctcaccagaacccaacatattggcaccgctgatctcaaacttccagtctcccgagaactgtgagaaacaaaaatggctttgttggcacccattatggtagcccaagcttgactaatacagactggagaggagatcaccgtttcatatgatccagtttaaggtgcttgggatcagccagtagcagacagtcagcctcatcttccctcccttaagtttgccagcacaaacaaaactgttattagtctgaaatgtctggaccataaaccggttaaattttagtcccgcaacactt

SEQ ID NO: 605698 - DNA, 354 bp, Homo sapiens
tctcacagcacatgctggccacctggggcctggcagagaggtcaggccctgaaactctatctgggcctggggctaggggacatcagaggttctttgagggactgcctctgccacactctgacgtaaaacccctttccttttctattccttctggcctttcctctctcctttttcccttcccttccacttcctcttcctttgggggaccccccgcttaggaggcttcttaaaaccattttgccttgcctgcccttccctgaggaaggaggggaagctgcagcttgggaaggaccctggggcctagactctgtaacatcactttccatgccccaaacttattaaactttgcgggtt

SEQ ID NO: 605699 - DNA, 511 bp, Homo sapiens
aaattcttaaagttgggggaagcggccatggttaaaagggttccgggcaagccaaggtgtgtggagagttttccaaccaaccccccttggggtggctttctggttcgtaatataaaacaaacagttggggggggggtcataaaaacagtggccaaaaaggtgggtggagtgggcaaggtccccaagtttgcccaaaaaggtcagaggggtaaatgaatattatccctaaacccggcccccccctttttaataagggggggaagaggggtttaaaaacggtttgtttcaatgggccctttaagtttgggggtaaaagccgggttaataaaaccaaggcttggtaaacccttcaaaaggaaaggagaatgttttggggcccccttgggttttttttttggggggggggggttttaagttataggtttttaaaaacgggattttttaagggaaacaacttgcccaaaaatttgtcccaaaattttgggcccccttaaaaaagttaaatgggata

SEQ ID NO: 605700 - DNA, 912 bp, Homo sapiens
tcccgagtagctggaattacaggcatgcactaccacacctggctaattttgtatttttagtagagacggggtttcatcatgtgcccaggctggtctcgaactcctgacttcaggtgatctgcctgcctcggctcccaaagtgctgggattacaggcatgagccaccgcgctggccatagatctcctaatttttattttattttattttatttatttatttattttattgagacagagtcttgctctgtcacccaggctgagtacagggtgcgatctcggatcactgcaagctcagcctccgtggttcaagtgattctcttgcctctgcctcccgagtagctgggattacaggcacgcgccaccacgcccagctaatttgttctgatttttagtagagacaggttatcaccgatattggccaggctggtctggaactcctgacctcaggagatccaacccacttggctcccaaagtgctggaattacaggcatgagccaccgtgcccagccttcctacatttctttttcaaatagcatatattaaggtccactcttgtgtgtacattctatgggtttgacaaatgtgtaatgtcatgtatctactattaccgtattattcaggaaataggtcgaccaaccccttaaaaagttgcgcaatacttccatatgactaaccctacctaaccaccccatccggaaacgcaaggctgggggggggcctacggaagggcactggtcacacccttcgagtagaacccaaaggcactatgccccgaaagcgctacagacgccggaggcgggcacaacagacgctcccgggtaagaccacaaggcccgcacagagggcacccaagggatacaatatatgagacgcacggagcccaatagcacgccgggggggaacccaaaatg

SEQ ID NO: 605701 - DNA, 130 bp, Homo sapiens
ggtttgtaagtcaacgattaaatgacctacgtgatctgagtacagagcggagtaatccaggtcggatctatctacttcaaattcctcccatgtacgaaaggacaatgagaaataaggcctactatcacaa

SEQ ID NO: 605702 - DNA, 1368 bp, Homo sapiens
aaaggaattaggaattgacatatcataattctgacgagaaagccagacatttaaagcacactgttgatgaactccagaaacgagtgaaccagtctgagaatacagtacctccaccagcatcctccctccacgagacacattcacccgtccaccgtcacgaggtccatagtccgagtcccataagatgatgcagtgactaccggaaacagatcgccatccccgaggggtaaagatggtgcataagagaagagaaaggagagaaaaaaaagacaagaaaacaaaacagaaacgaaacgtacagaagaacactacaagacgggcaaacgaccaagcagcaacaggacaagactgcggcacatcgcacctacaaagaccggcgcacgctacccggcaacgaacacccgagagcaagccagcacaaggacagcccacgagaaaccacaaaggccagggaacaacacgcaacaagcggacagagaaacaggaagaaagcaggaaatgcaacgccacaccaggactacacaagcgcggacaccacaaatacaacaaccccaacaatataaaacagaaagacaaaaaacataacaccaggcaaccatagaaacaacaaagacgacacccgtgaagcatggaagaacaacgcaccggaaggcgcactcagccgcacaaaggcgaacatgcggcaaagcagactcaggcatgaggctccaaccaaactggggaagcaagaagaacgacggcaaaacgaacccaagaagccaggacgagaagaacgcgaacacagaacaacgcaaggcggaaaacaaaaacacaacggacaatgcaaaaaggaaacaccatactgaacggaagacaaaaacaagacccacaggacaaccccacggaaaccacgagcacagggacaaaggagaccaacacagaaacgaaaaggggaaacccacgcactcaacagacaacaaaacgaagaccaccaaagaacgacaccgacaggaagagaaaagaaaacggaaaaagggggacaacgagaagcaaaaacgacacgaggcagaaaaggcagaagcagacaaggccacagaagcccaagaagagagacaagaaaaaagcatgacagaccaaaaggacaacaaccgagagaacaaaaaacgaaagacacaaaagaaaagacgagaacacaaggacaggcaacggaagaagcaaagagggcagagaggagacgaagcggggaaagcaacaaacgagaacaagaggcaggagagagagaggcacggagggaagagaaagaaagcacaggcgacagagagcagccgccggacgccaagcgcggcaggccacacaacaccacacggggagaagcaagaaagggcgacg

SEQ ID NO: 605703 - DNA, 405 bp, Homo sapiens
aagcagtggtatcaacgcagagtggccattacgccgggggggggttaaaaaaaaaaaaattaaaaaaaaaaaaaaaaaaaaaaaaaaaaaattttggggccccccggcccccaaaaattttaaaacacatgtcgtgggggcgccgaggggccccagagaggtagaggggcacatggctgtccacagagtcggttccccagggaaaatccgcggggcaggacactaggggtggtggtttcctccacccaataaaagaaaacggcgggggcggaacacaaccggaggtcgtctcggaacaaaaatcacaggatagggagctccggagaggcgcatcagcgaggattcctactacaccgaggggagcccaaggagaaggcgaaataaaaaatagcccgccgggggaac

SEQ ID NO: 605704 - DNA, 702 bp, Homo sapiens
tcttttccacatctcattgtcactgacatttaatggtactgtatattacttaatttattgaagattattatttatgtcttattaggacactatggttataaactgtgtttaagcctacaatcattgattttttttggttatgtcacaatcagtatattttcttgggggttacctctctgaatattatgtaaacaatccaaagaaatgatggtattaagatttgtgaataaatttttagaaatctgatgggcatatggagatatttaaggttgaatgttggccctaggtaggctatgtgtacaaaagaattgttctagctgaatgtgcaaagatgactttaaaatgttgagggatctgggatgctcgtaattgtcagccaaattatgagaaaatatcggtcagcacgtggtttaatatttaaatcaaagctgatacgataatagtttatatatactgacaaaattctttggagagggaaatgaataatatcataagatatcagaatctcttacattacgttaatgttaagtagagaatagtcatagtgttaaacacgtcacgttttaaaaaaatgttgttaactgtcgtgcaacctgattgtggttgaagttcaggtcgaaatgtttattgaagaaggtgaacagtgtttgcttcacaaaaaaaaattggggggcgaattaaatggggcaaaaaagtgaaacc

SEQ ID NO: 605705 - DNA, 182 bp, Homo sapiens
actgacgggtccccgtgcagcagtgtccaatcctattggacgatggcgtcgttatctgtgctctcgcgtccgtatagaaccacgcggtgtgtgggcagatgcagaacgagagcgtgcacagcaatgttaagtggaggcgcatcctttcctgagaaagaaaataaataattcatcatagatga

SEQ ID NO: 605706 - DNA, 196 bp, Homo sapiens
cagaagaactggctccctaaatgtagcagagaatgtttttacaactgggtctcctatttcacctcggtggggatggtaggtcacttcaaaagaagagctccatgcctgaggtaatatagccttcttctgagctaatggagaaatgaggctcaaatattttgatgtcccatttaaaccttgcacccacatcgcctgt

SEQ ID NO: 605707 - DNA, 356 bp, Homo sapiens
tgtatgtgtctgatatccttcatgaccttggtatcagccttatcacttttcacgtttctccgggacatcgtgactagacttgtaccttcttgagcatcaagtcttagtatgcaatctcagtcatagacaacccactagtgttaggtggtgccctctgatggttacaaagaattgcaacagctcgattggcacggttataagaaaggatcttcgctgggatgttctcatccggggctgtgagttcttctagctgctgctgtagcgtgatggaggcattgtatgtatggaataccttggctgtcaagctctccatgagatcctggagatgcttattcagaataccagtattgagtcta

SEQ ID NO: 605708 - DNA, 850 bp, Homo sapiens
tttcattccctcccagcacctgcctaccttgtcggcacgccccactggtgaatgttactgcggcgccctccacaatgtaatacgtctcgctccctccctgtcagtggaggtgcctacgcccccctatgtctattctgcaccagcgatcgctcacgcctgttcattactgctgtttgtcatcccccctcgcgggtttcctcgttagaagattgttattagcacccaaataagaagctttgctgcgccaggtcatctatgcctagttctgtcttccctgttcgccccttatctgcaagctgggtttcattatctcatgcacattgctctgtctggtatctaaaagagagcaaagcaccagtaccacagacttacaagaggacctacaagcaggacctagtaataatgaatgtactcacttcagccctggccaagcagatacctctcaataatacttaatgttataataacacagctcactgtcaagctatttctacagttctatactagtccttttcaatatgatatcctagcacatagtaaagataatgtactaccgagcgtaaacgagtggaaccttctccagcaaagccagatgacaagttttcctctccagtgagaaatgggctccaagttcttatcttctctgccatcagcatggctgaaggcgggagagcggtgtgctgttagggtaaaatccagggacccttccacacaggaggtactctggggttccacttcaggagggtgccagataattcagatcactctagcccacggctttttggcaaaaaacaaccctcaccctccgtaactagtcatcttccttgtccattatcccacgtcccttcca

SEQ ID NO: 605709 - DNA, 204 bp, Homo sapiens
ctgctcggctacttgcgggcctttcacggtcagtgcgcgtgttgccgccttccacgtacggccagccgtcgcgccattcaatgcggcgatgccgtctcgccccagcggcagtagcccgtcccggaggccagcagcgcacccggcaggcgcagcgggcggctggtgaggtaggccatgtaccattcacccgtatgcgtctgcagc

SEQ ID NO: 605710 - DNA, 183 bp, Homo sapiens
ttcgtgctactatgatgtgaatacaacctgcagctgttcggcgatgctctacagctacgaaaccgtcaagtacaacaccggtgccggctacaactactggggcacggatatcagcatgggtccgttcttcgatcagtccagcggtcgctatctgggcctgcagcgcgtgttcgcccccgaaga
